United States Patent Application Publication US 2011/0183924 A1 - sequence listing, part 57

SEQ ID NO: 180587 - DNA, 429 bp, Homo sapiens
tgtgtgtctaatttctacttatttgatacttttctagaaatcttattttctaatttgattttattcactttaaatttcttgagacttttttatgggctaatatatccaacttgataatatactgtgtgcacttgaaaataatgtatattcttcagttgttgcatatagtgttctaaaaatgtcagatcaggttcataatattgttctgatcttctgtgtctgtattgattttgtttttgtgttctactaattgctgaagaagagttattaaaatctgcaatgatttaatgatcctttaatgatctgtttcttgttttctaaattctgctctcttatgaaatgtcccactttatctctgatagtgatctttgtcttcaagtctattttacatgatattaataaagccttcttattttatatttaggttgg

SEQ ID NO: 180588 - DNA, 279 bp, Homo sapiens
tttacacccttgaaatgacagggagctacctggctttttaaaaaaataagctactaatgtgttcatttgacaaatatatgttgagcaccaagtacgtgctagtataaagaaataccttagtgcacagaacagacatagacctcatggaacttagtttggttaggagagttaggaattaagacacaaatatatagttagttatttcaggaaatgcaatgaaggaagaaggacaggaggccatgagagaatagtaatgacaaattaatatagattggttat

SEQ ID NO: 180589 - DNA, 785 bp, Homo sapiens
atgtgctgtagacgctaaaagtaattttaaaataagaattttcaatgttttgagtagtggttgcaatactagaataaatacatattgcttctggataaatacaattgcttctgcatattgtttgttgttgttgttgttttgagacaggttcttgctctgtcacccaggctgcagcacagtggtgcaattgtagtttactgtaaccttgaactactgggctcaagtgatcctcttacctcaaactcctgaatagcaaggactataggtgtatgccaccatggctggctaatttttaaattttctgtagagagggggccttgctgtgttgcccagttggatcttgaactgctgggctcaagcagtcctcctaccccagcccccaaaagtgctgagactgttaagtgtgagccatcacgcccagcctggtagtgattgttttgaatgggtgaaggctcatttcgatgtgtaagttctattatgtttgtttttaacagatattattactcatatctcataatacagtttgattattttcatttcagaattccatttttgtttctgttattttgagataattgtcttttagagagagacagcttattttggagcaaatccattgatcgttaggtaaaaatactcgtcatttgtagtttgtttctttaactgaactaagctttatttaaactaagctactttggtgtcgtcccttatttaaaaatttttctcagtggttacactgttttattttctttggcccaatatattacctatctcttgctctgatt

SEQ ID NO: 180590 - DNA, 218 bp, Homo sapiens
gccttcaatgttcccttcacccaatgaccatactcggtcatctcacctaaactgcaattatctcacaacagttagataattagagagctcttctcatgttcattttgtcaataaattttaataagtgtctgtgaaagtctctggaatacgttttaaatgggacaccgtatgtgtgagtttgtagtctattgagagagaaagacaaaaaagttattatg

SEQ ID NO: 180591 - DNA, 493 bp, Homo sapiens
ctggtctgttattttgcctgcgtcctggggcattggagttgtttttggcaacacagaataagaatgatggagaaatctggtgggaaagggaaaacattgttactgaaatttagtgctttccttaaaaaagaaatgaaactcagcaatactgaaattttgggtagccaaggggtaaccaccagtttaaggcagaactgagctattgtcagcagagtcaggcagcagtggacgttggtggagagggctccgctccttccagcctctgccagtgtgggccctgccgactgcaccttcccaccgctacccagagaccagcggctcaccccgcagggagggaactgtcaatgttctatagcatgggcttaattggaatggtttgagtgaaaccaaatttcagtcgagatcctgctgccagcaagctggatataacagtggcctttcactcagggcctggcactgaaacaggtccaggatgcaggagagcagcttggca

SEQ ID NO: 180592 - DNA, 459 bp, Homo sapiens
gtaggggactgtgcgggaagctgggggtggatgcatggtggggcccggggttctgggccgggatgcagccctactgagcccctttctggttctccacaggtgatggagacccgccaggtgtccaggagccctcgggttcggctgctgctgctgctgctgctgctgctggtggtgccctggggcgtccgcactgcctcgggagtcgccctgcccccggtcggggtcctcagcctccgccccccaggacgggcctgggcggatcccgccacccccaggccgcggaggagcctggcgctggcggacgacgcggccttccgggagcgcgcgcggttgctggccgccctcgagcgccgccactggctgaactcgtacatgcacaagctgctggtgttggatgcgccctgagcgcgctgcccgtccccatcttaataaagaccatgccctgcgctccggactgcg

SEQ ID NO: 180593 - DNA, 582 bp, Homo sapiens
gcgtggacaggttctggccatgttgcccaggctgttgtcaaactcctgccctcaaaccatcctcccacctcgcccagtctcactattctaccaaataacccacttgcagattttttgtttccctgtcttggtaagtttgagctctgctgacttggaagacttagtcctcaagggaggaattcttccatcaggggcacaacaatgataccattggaattggaaaatgagactgccacctggtcatgttggactttttaggccactgaaccaaccgcagaaaatggggttactctactggctggagttattgatccttatgaccaggaggaaactgggttgctgccacaccatgggggtaaggatggtgtgtctgaatcccgggtttctctggagtgcctcttactatttctatgcccaataatacatgttactgaaaaactgtggtaactaaaagaaggcaggacaatgcggaccctttaggaatgaagctttgcctcatcctaccaggtaaaaagcccaattatcggagcccaaggatttttggatacttacagaagggaacatagttaccaattatgggct

SEQ ID NO: 180594 - DNA, 770 bp, Homo sapiens
attaggtgcattcatccagtaagcctcctaggtaactgctctaggtgcaggaataatgcaggcagcaggacaggaatgggcgctgtcagctccccctagagctcagtgtacatacacccttcctttcctgggagggccgttccaggcccccaggagacaggacacgctgagctgggtggggctggggccaacgtgggcaggcctgtgagactctgcacttgggagctgggggctgtggtctgcggcatacccatgtctggaagcagcctctgtccctgcaggggctctagaccccagccacggatggctaaggaggagctaggccagggcacgcatagacaacccccgacattcacgggtgttcagccctaccctgggtgtggaggtcgtggcccagctgcctgacccagagctcggctcttccacttgcgcttcccacccccagcttcacaaggtcacctccaggaactcagtctttttgtgtgtagttttctggagaaggaaggtgatctccccactcccggggctgtctgccttccctgtagctggcaggtgccagaggcccccgcctgtgacatccggctttcctcccagcacactcgcctgagagccagcatctgtcttcttgggcctgctcaagctctcctccgtgtcagcccctcctccatgcccttctccctcagaccccaccccccatcccttcaccgcccactggggctcatcgctcaggctgtaggagggaaatggaaggatgtcctcccgggctctgg

SEQ ID NO: 180595 - DNA, 682 bp, Homo sapiens
gagatggggttttaccatattggccaggctggtcttgaactcctgacgtcaggtaatctggcgttcttggccacccagagtgctggaattacaggtgtgagctaccgtgcgtggctgagctcccttaatttctacctgaaggtagtctccagggaatgggcacacagaagaggaaaccagatagaccacagtggtcttgctgcgtgaggagatggagattggactttggagaggctgacacagctagaagttgcagagtagagtaccagagaagaggaagctactcagagaaaaagctccagaagtctatgaggtccctttgagtctttgttgaacattaggccatgcaactattggggaatttctgtaaatccagggaaaatgactgagaagttgtaagctgaaccattcgtagcattcatacagagcggagagctattcaagcttcagccattcagaatggagtgtctttgatggtcaccagaaatatttactggagtcacagggggttatttcttagtagaatgactacactatccctagagggaaggctacttcagaccttccctagaaaacctttaaaaatagtttttgaagggttcaaactgatactttcaaactttactgcctgccagaatagagcctaacatttttagtcaacagtgtaacatttaaaatattc

SEQ ID NO: 180596 - DNA, 435 bp, Homo sapiens
atagcagagctgggatttataaacaagtttctcattgttttctttttcaaattttacataatttattatggtatattttaaatacatgcaaaatagaacagatgtaatgaacccctggtattcatcacccagcttgaagttaccaactcatggctgattttgtttcatcatgcctctcctactctcattccttttttgaatattgtgtattttatttaggtatgtttgagtaaaagaaaacaagactaaacactggctgatgttaggggtttattattcttttaaataagaaatccagagataggcaatggcgggtgcatgtttagtggcttaaggatgttagggtcagaaatctcttattttcttggctttcctctcattatcacaaggtggatattgtagttccagatatcattttcactttctagacaagaa

SEQ ID NO: 180597 - DNA, 297 bp, Homo sapiens
ttcctgtaattggtaaagaaggtgacaaatcactcattttaatgagggggggagatgtttggtagtttgtgttgcacaatgaccttgtctgacatggatgttttatgagatactatttttttcttaaggcaacgttgtgacagaacatcagatagtctgatagcatgagattagctcttggacatcgggagctgctttttttttttttttttcctcagtctaattgttgtctctttataggtattctttttttctgtggctgcttttaagattttttttctcattgtcttttatttt

SEQ ID NO: 180598 - DNA, 381 bp, Homo sapiens
aaaatccttcatttaactgttaagttcaccaaatcacttcttacatcatagcaattacgtaacacttgccctcaccaatacactgtttaagtatcttactcttctctcaatatgaaactttcaagtgatggtgcaattaatctgaaatgtggatttaagataaagaataattcaaaaaacaggccacattaaagtgggttgccctcctctaccccatacccctgttttcataatctgtaactgactactgggaagattatcccaatgctcatgttctttgatctaggataaatagcttttaagagtaaataagcctcaaaaaaagtgacttctaaggggtctaactgctaaatacaactgattggacaactgagttagtga

SEQ ID NO: 180599 - DNA, 782 bp, Homo sapiens
gcggctggtgatcaatatctccgggctgcgctttgagacacaattgcgcaccctgtcgctgtttccggacacgctgctcggagaccctggccggcgagtccgcttcttcgaccccctgaggaacgagtacttcttcgaccgcaaccggcccagcttcgacgccatcctctactactaccagtctgggggccgcctgcggaggccggtcaacgtgcccctggacattttcctggaggagatccgcttctaccagctgggggacgaggccctggcggccttccgggaggacgagggctgcctgcccgaaggtggcgaggacgagaagccgctgccctcccagcccttccagcgccaggtgtggctgctctttgagtacccagagagctctgggccggccaggggcatcgccatcgtctccgtgttggtcattctcatctccatagtcatcttttgcctggagaccttaccccagttccgtgtagatggtcgaggtggaaacaatggtggtgtgagtcgagtctccccagtttccagggggagtcaggaggaagaggaggatgaagacgattcctacacatttcatcatggcatcacccctggggaaatggggaccgggggctcctcctcactcagtactcttgggggctccttctttacagaccccttctttctggtggagacgctgtgcattgtctggttcacttttgagctcctggtgcgcttctccgcctgccctagcaagccggccttcttccggaacatcatgaacatcattgacttgg

SEQ ID NO: 180600 - DNA, 374 bp, Homo sapiens
caaactttccacgaagcacagattctaatgttatttcgtcttctccaagggcttgaagagtcacttctggaaatggcaggagaccactagtcacttgagctcttaagtaatgctagggtgagtggtaggaagtttattcataggaggtgtatgagttggtcatagcggaatcgggggtatgctattcgaattcatacacgacacagggaggttagacgtagggtcttggtgaccacaactactgttgtgtagagttcacggggagagtgcgtcatatgttgttcctaggaagattgtagtggtgagggcgtttattataataatgtttgtgtattcggctatgaagaataaggcgaaggggcctgcggcgtata

SEQ ID NO: 180601 - DNA, 311 bp, Homo sapiens
ccaaatggtaactcgcctctgaagttactcttgaggccacaaatttcctttggtgacagcacttggaatggtggtggtgaggagggaagagacagctgtagcattgatggccatcatacctaaatactcctgggcttctccaccccatctgcatttttcatcagcaaaacagagtcacatgatttttgaaccacacagtttctaaagttctgttccatccgttgggggtagtacaggaggcacaggtggccatagaacacacacagcagggttccaggggcttccacaacactcctggagtcatccctatg

SEQ ID NO: 180602 - DNA, 132 bp, Homo sapiens
aggaatgtggaggccaggaggaagaggaagaagggcagcggtgtagagtaggattccaggtggcccaactttcatcccaccatttgccgaatgctgtgcgccagatgctcttccaggcgcttgacatctaac

SEQ ID NO: 180603 - DNA, 228 bp, Homo sapiens
tactaacgccaaggtggaaatgtgcagacgtctgtcacaatccatcactcacggaagatttctgcagcttaccatgcatccatacattccacgcattgttcctctgtcgtgttttttttttttttttttttaaagacagagtttcgctctgttgcccaggctggagtgcagtggcgcgatctcgacttactgcaaactccgtctccaggcttcaagcgattttcctgc

SEQ ID NO: 180604 - DNA, 487 bp, Homo sapiens
aataaatagttaatgacattgtcatacacatttacgtcagttaaaggatggtagacttccaatttcgcagtaactggacaggcatgaaagaatacaacataaaacagctttggaaaaaattggcttcaaatccatctgcaaggtaggaggaagaggggaaatttcataaaaatgtaaacatgatcatttattcctctgagtgcaatttgctggccagtagtttggcttttcctgtgtgtggtagtggaatcgacaacttctgcctatggccccttctcagcattaagcaagcttgtaatggcatcccaggtgtcactctggcccttaattacaggctctcttctggtttgtgactttgtccttttaccatttgaactgagacccatcctctgcctgcacacctgatgtaatctaccagccatgagtgaagtctacccttggaagactgattgtgctcagttcggctctaaataaaatctttccatta

SEQ ID NO: 180605 - DNA, 446 bp, Homo sapiens
gcggcgccctttttttgggggagacagagtttcgctcttgttgcccaggctggagtgcaactggcatgatctcggctcacggcaacctccacctcccaggttcaactgattctcgtgcctctgcctcccaagtagctgggattacaggcatgtgccaccacgcccagctaattttgtatttttagtagagatgggggtttcactatgttggtcaggctggtcttgaactcctgacctcaggtgatccacccaccttggcctcccaaagtgctgggattacaggtgtgaggcactgcacctggcctgacatgtacattttcaagaaaaagctagatccattcagaaaggttttacccatttattcatcagggttaggtttgtgcttgtttgcaagtatctttgttcacagtgggtgttaattaaaaataaatgccaacatataggta

SEQ ID NO: 180606 - DNA, 981 bp, Homo sapiens
tttggtatgaattatttatattattattgcggatttaaatttgtaaattgaatatttaaaattatttaaaatttagagtattaaggttagaaagagaaattaatcttatcccgttttaaggaggttgttataagggtaaggttatgtcttctgctcttgagtttattatgcaaatatacagaattttgttttatttttgacactgagcaagtgcctcaaaatatgtcttcttgagccctgcgtctgtatagtaatccatgtggagcccagttttttttttgttttttttttaagaaaaatacctggaaaagccttgcttctaatgtaggaatttttccttacagtgagatctatgtaactgacaatgtttgtgggtttcacttcagctgccaggaaatttggtattacatgagcatttcaaataaagcaacagtgtataattttaaggcccacattagttttcatttttcactacttttgacaccctattctaaatttttgtttcactttatcttttgcttttaattggtgttttatgtaaaatacttatacaatctttatggaatgagatggggcagaatggaggagtatatccatgtaacttgattttattccactttccaactatatcttctttctgtcttaaacctaggtgattgtatgcactcttggcttcactccagtctaccctgttggttttggggcacatgtaactgtccttattggagcacttagttgctgctgtgggcagtgactaactcattgagttcctatagatgaaatgtaatctgtctgctccaaagctatgtaaatacactcctgttgtggagatttactaggccattaactgcctagtagcatgttttaagttaaaagagcaacctgctgggtgcagtggctcatacttgtaatcccagcactgtagaaggctgaatcaggaggatctcctaagcccaagagttctgaggctgcagtgagcta

SEQ ID NO: 180607 - DNA, 769 bp, Homo sapiens
acacattccaaaggaattaaatgtaaaaaaaaatcaaactcaaagataactagaaaaatatatagatatttttctgattataatggtaggatggtctttcctagcatgcaaagaaaaaaaagcccatgaaaattaagagattttaccacatgaatatttagtttttctgtaccccacaaaaaccaccataaacaaaatcaggcctaagacaaatatttgtaacccatatgctagaaaaatgatttacattctcagctttatttttaactgattttattgggatataatttaccacaccattcacccatttaaaatggacagttaatggtttttagatattcacataattgttcaaacattaccacaattaagtgtgtaatatttttatcgcttcaaaaagaaacttttgtacccactaaaagtcactccccgttttctcccaaccccctagccctggggggtttctactttccatctctatatatttgcctagtgagaatattttatgtaaacggaatcatacaaaaaatgctctttttgtgcctggcttctttgatactaggagggaatatacaactttcctgtagagtaatttaggcatattcatagtttcaaagttatttatagtggttatccaataattcttatttcaggaatttgtcttaaggaaataagagatgtacacaataatttatgtacaaagaggttaataaagcattatttgtaatagagaaaaatggaaagaattcaaatgctcaacaatagcaaa

SEQ ID NO: 180608 - DNA, 362 bp, Homo sapiens
agtggtatgccctgtggcagcaagagtgacaagtcttaggcctacttctgctttcactttttcttttgtctattgcttaaaataactgagctttatattttgttcccctcatcatgtgaaattgcagatgtttactggtttcattctttcttttgatgaactaactccccctctaatggatggtttttgttttcaaaacaaagctgtacatttcagtttgaatagctccctctgatataataaagttgttcttttaacccatgtaatcaagatttcctttcattttaaacttaaaaataatttggaagatgtgagtgataaatttccatgcagctgatttaaatattctggttcattttcat

SEQ ID NO: 180609 - DNA, 588 bp, Homo sapiens
tacttttgttgttctcctacagttttgtgatacagcagacatttaataaatatttgctatttcacgactgtgatgttccaaaataaattttacataccatacacagacgatgcccaattagcttcagcttatttcatctgtgtgtataaaaaacattttttatggtgaaatgaggtcatatgattggcacgctttgtttaataaatcaaggtccttttaccaaacttttccttacaactcttgccaattcattcaatagctctggaacctgaagcttttgcctcactactaagctgtatttccaacttggcattttccttttaaggtaacttgttaccatagtgttccctctccctctccctctcaccccatcccctcacactctttttctctctctctttctgttcctttgctttcactaggacacatggtactgaagatttattttatttatttatttttatttatttgagacggaatatcgctctgtcacccaggcagggtgcagtggcacaatctcggctcactgcagcctccacttctcaggttcaagtgattctcctgcctcagcctcccaagtagttagga

SEQ ID NO: 180610 - DNA, 647 bp, Homo sapiens
caagagagtttgtgagtagacgttgacagtgctgcagagacgtgtgtgtgtgatgttaggatcttcagctcatggttgtccaagtgtctgggagagatgaactcagccctgctgtctattagaggctccagtccagttagtaccttggcagcttcacaacaatatccagagggctcagtggtgtggtgcccttctccatccagaatggagtcactttcgtgaataaatagggctcctggctctagctgaattatttttaagttagatcataggcagtagtaccacctagaagtcaaaaagttggccatgcttgagttatatcattgtaaagcagactttttgtaagtgtgagaaaaatgtgaagctttaaaaacccctctgtacaaaaaggtttccaccctagttaataatatcataacatagtaatttgttcctaatgtattaagtcaacagatatttattgaacatttaggtgctatattactcaactggagtaaattactttactcccaagaagtagatgtctgaaggggataggagtgaacatgtcaaataataaacttgagcctgggaggtggaggttgcagtgagccgagatcgcggcacactgcactccagcctgagtgacagagcgagactccgtctca

SEQ ID NO: 180611 - DNA, 766 bp, Homo sapiens
cttgcaaattgctgggattatgggtgtgagccatgagcccggccccaacaaatgtaattttacttctgtctttctgatttggatgagttttatttcttttgctatttaattgctctgcctaggacagccagtatttattgaatatcaggggtgagagcattcttgcatcatgtgatatcctacaggaaaaccattccattttccttcattggttatttcagctgtggtcatttcatggatgatttttatatttttgaggtaaaactctacctatattgtttaggatttttacgaagaatgaatattgagttctgtgaaatgctttttctctatctattgagataatgtgttttttatctgtcattctgtgcaagtgtgtatcccattgatttgagtatgttgaaccatccttgcatcccatgaataggtagcacttggatgtttacaatccctttttatatcctcttgaatacagtttgctagtataagggtcttcaagaagttcatggaaaaatacatattatgaaaaatttgtgcataaatttcacactttttgtaccaaaataaaccagtataaacttgttataacgtctgaacaggctctagtttgaggcactcagaaggataagacatcagtttgaaaagaacctctatcacagcaatacaaattctgttaaaacaagaagaaacatcaaatttacgatgagaccagacgcagtggctcaggcctgtaatcccagcggttttagaggcccaggcaggtggg

SEQ ID NO: 180612 - DNA, 359 bp, Homo sapiens
aactctgtaagcttactaaacatccttgagttctactcttaaaatgagtgaattttatcagatgcaaaattaaatctcaataaaacatttaaacttttgtcctattcactttgcaaaatataggcattgtcaaatgccattcaaatatgggtaatgccagattgggggaaaaatgtgcttggtttgacaggtaatttgttagccgctgaggataaactcatatgcgattccattcaatcattcaaaaatatatatcaaatactattctctgttagtcactgtgctagtaactggggacacctgatgagcaagatagcacagtcctgactttcccaaagcttagtggaggcaaaggcaga

SEQ ID NO: 180613 - DNA, 258 bp, Homo sapiens
gaaaaaaaatcacgatatgaatatttgacaccagaaaattagataaaattcaactttcagtgtccataaataaaattttattaaaacacagccaagctaattcatgtatgcattgtctgggactgctttcacacaattgtggtagacttgagttatcatgacagactgtaaaaagtttcacaaactctaaaatatttactctttgtccctttacaggaaaaggttaccgaaatctgttctactgagtgtagaatcaat

SEQ ID NO: 180614 - DNA, 335 bp, Homo sapiens
caaaaatttctgctgtggcagcttcaccaggaggaacatcctgcactgaactctcccagcatcccttgtcatttgcatgggcaatttcagtcttgttctcccctcgcacgctgtcctcaaagagttggtatcccatcagtcactgtgacagccccacattatagttcagtgtaatttgtttattgacttctgaataccaaattccttcaaggagagtcacagacccacagcatgctggggaaacacggctggaaaacatgtaaatacagatgcagtctggcagcttctgatggttgccactcagaaaatctcccggggcggtcttcttccaaggg

SEQ ID NO: 180615 - DNA, 694 bp, Homo sapiens
gattacaggcatgagccaccacgcctggtccattccttctgattttacaatgcatttctaaatgtgtgaaattttttaatgttctttttgcttacctgtattatctaatttttaagaatatgttatttgtaatgtgaaattagaatgttaatgtaactaatatctgacaacactgaccaaaaaaaaaaaagttctgtcaagtatttttaaaatttcaaaactttcaaaaaatgtcacttaaagggcaacatctggatatctaaatgtatgatatcacctttctgtttctcaagtgaatttcaagtaatattgattgtatagtcctttaaaaaggtaagctctgatattaaagtaacatttaaaataatagtttgtacttaaagggggaaaagtttttgtggttttagtgttaagacttagttttagatgtgaagaagggcccatctaatgaaacttctccctcaaagcaaatatgtgcaggaaagaacaatatttataaatattcttgtaattttcacaacacatagcaattccccatgagtagtttaatcaccacagtaagcgagttctgtatggttgctccaagtgagggtgagagtagagaaatcaggttttcttcttcctataccctctagaattcttatataaggtgatgatgtatcacaaaggaaattcctcaatatcatactggaaa

SEQ ID NO: 180616 - DNA, 184 bp, Homo sapiens
aagataactttttatattttgaggactaaaatcagatgactatgtttggcaatgaggtcatcactgaccttttgagagacccctttctagagctgcagcgatggtagtgggattgccgtgggttcagaggcagagagggcaggagggcgacagaggggacagtaagcagtcttgcagaaagaga

SEQ ID NO: 180617 - DNA, 292 bp, Homo sapiens
ggaactgacatgcagtacaattttataaattatgggttgttgtagcctgtagttttaacatgatacaaacatcacataattatcctataaaggttaatttcattgctacattgacctgacagttgcaggagtacaatagctgtcaataagataaaattgtgtttttggtggttttggagaaagctttgaggacttgttttaggaaaaggcatttaatctatttacaacattatgttttggtattactggcatttcttttaaagtaattcagcatattatcactataagctca

SEQ ID NO: 180618 - DNA, 228 bp, Homo sapiens
acggaccagcgatggcatctctgtcataaatctgaagggacctgggagaagctgctgctggcagctcgtgccattgttgctgttgaaccctgctgaggtccctgtcttgctccaggaacactggccggcaggctgtgctgaagctcactgctgccaccagagccactccagctgctggccgcttctctcctggaaccttcactcgccagacccaggcagccttccggg

SEQ ID NO: 180619 - DNA, 458 bp, Homo sapiens
agggttcatccctgcccgctctttggggccatctgtgagcaagccctgtgtcacttgtttttgctgacatggagagctgtgacatgtttgagagttaacaggaagctttactccatttttccatttagatttatagagtctacggagaagctgggacaggaggaaaagcattaggcaaatacagtcagtttgttgtcatctgatgcaatactctggacacaaataaatgactctgcccattattcctcttgcttcatttgccctgagacaaaaaggtgaatccactggaaaatgaacgaaaggtcaccctgttttacagcaatgtctggacatgctctgccagtaggttccaactactacatggtaatgtggtgatggtaccaagttactggaatccagagtgagtccgtgatttgtcatggacataagtactggaatgatgttatggtctcagctgt

SEQ ID NO: 180620 - DNA, 322 bp, Homo sapiens
tttaaaaaaaaattcacaggaaaaaaactattaccagatcatcaataactggttaaacatgaaggactaaatttacacatttatctctgcaacctttaaaaaaaaatctattaaaataacaatgaagaaacagaaaaggtatacacccagaaaaacattaagaagagcagaggagacaaaagcagaccagagatgtcaacccatttttctaagatggaaagcagacttagcagggcagagggcagaggaagctgaaacctaagagtttgcacagtagaaaatcaatacatttgcatcacagaaactaggaagattccaaaat

SEQ ID NO: 180621 - DNA, 232 bp, Homo sapiens
tttaaaaaaaaattcacaggaaaaaaactattaccagatcatcaataactggttaaacatgaaggactaaatttacacatttatctctgcaacctttaaaaaaaaatctattaaaataacaatgaagaaacagaaaaggtatacacccagaaaaacattaagaagagcagaggagacaggtgggctacgtcaggtgggctacgtcaggtgggctacgtcaggggggctacgt

SEQ ID NO: 180622 - DNA, 378 bp, Homo sapiens
gcaacctctctcaggccacacattgaggaagggatggtgcctgaacttgagctcagctcactcttttaagcctaacacgctctacaatggctgaggggtgcagttgggacattttgcagaccaggtgtgtggagtggaacagggcctgccagtcctgtgagtgagctacctggggtaactttgcatctggagctgtacggcctgaatggctgccctgctttttgtacatatattgatgcatttcgtttgggctgcttgcttcctgatacatttctctcaaccagttaaagcttcgatggaagctgaatgttgcaactgatgaaaagcaattagtttggatgacatttctgattggcttccatatcatactattaatca

SEQ ID NO: 180623 - DNA, 688 bp, Homo sapiens
tgtcacaggtaatctgcttctcttaaagccggctgatggtagaggttaaacacatccaccgcatacctttgcagcaacatttagatgagtgtttgaatctctgggcactacagcctggccacactgatgcataaacctgcccatggcaggggccaaggtcagatcacactgtccctgactgggtccctcttccctgcaggcccaggctctgcctgtatctgacgttgggcccagccttgtagcaccaccacttaggattattctgaggtgctgactgacactttaaggtttttgtcattctccacttctgagcttatcaatgggacaaaaagtcagcgcctcggccctttgctggcctttcagccacctggcaagcccatagttggacagctccctccagagagcggcaccttgccatgggtgaaggaagggcaggaagagaggatgagcacagcaacactgagcattttttatgcaccaagggcctataacccgcttctgagtattaacttctttaattatacagttagatactatgatattgttacacccattttacagatgaggaaactaaggcctccaaaggtcaggcaacttgctcaggttttcatggctagaacagggagggtcaggatttgaacacaggccctctggctctatctacactctgttctcttgatcagatgtc

SEQ ID NO: 180624 - DNA, 199 bp, Homo sapiens
ctcgaactcctgatctcaggtgatccacccacctcggccttccaaagtgctgggattacaggcatgagccactgtgcccggctgttgcaattttcaacaggatgatcaagaaaggtcatctcccctggagaagatgacattttagcaaacctctgtgaatttgagggaggagcacgcaggtgatcagttcaggagagtt

SEQ ID NO: 180625 - DNA, 393 bp, Homo sapiens
cttgtttaaaagtgctgagatacttgtctaaaagatgggccttaagattgtggtgtgcttttaataatgtgtggggtaagtgcctctagaggcaagcatacactatgcttgagtaactttctctccattctgaatctctccctaaaggacacagtttgtaaatgtttgttcatgtgaaaagggaagattcaggtaccttttctgtcctactgatgtgtggggctatttttatgttttgttcttcacttttttctgtacttgtgatttaaaggtgccagactggttaccctcaaggctagtgtccccactgtatcccaagaatagaaaaaataatgagaggcagcaaaactggcctgtgtctgagtccagcatattaggctgacccactctaga

SEQ ID NO: 180626 - DNA, 450 bp, Homo sapiens
aataaaggtataaattcaattaaaactgaggaagaaataaagtggttggaaatagaagtcttggaaatggaaaaatcatagctgttgatataaaagacacaacagacttgatgttctctagactggaaataattgaagacaaaattagggaaataggagctgagacgttcccccagcatggcacagattatatgaaaagcagtgaagaatcagaacagattgcagagttagaggttctaagatgcatgtaatggaaataaagaaggcaactctgaaagtggagaagcaatgtttacagagatcataggggaaagaaaacatttgagaactgatttagtataggttttcagattgaaagtgaagtctctttatcatgtaggataaacaaaggtataagcttaaaggtaaatttaaatataaatttaaaagtaaattttaattgatattctg

SEQ ID NO: 180627 - DNA, 429 bp, Homo sapiens
ctgcgcccatggcctctgataaatggaatgattatcgtcagattaatcggcagatctctttaacagtgattgggtctcttttgtcttcatttgtctcacagagcctcaccttgtctcatttgtctcacggagcctatcctaccactttgcacatagtaggggtacatgttttattaaaataagaagcagccggtcagatttggcttccttccttgggcagagtccactgcctgtggatgtgggttatattttactgtggggctcacagggaaacactgctgtccagcccatcctttggagagcttcctgagatttgtcttcatagcctcacatttcatgacccagaatagctcagtgccatccacattcttagggatttcatggttcatcctcctccccaggttgttcattagaatcttagagcaggag

SEQ ID NO: 180628 - DNA, 290 bp, Homo sapiens
ttcagagttgtcttcagactcagagtacatagttctaatagtcaaggttcatatagttcaaaagttaactgaggttccccctaagctgtgtggccatgttattcatttgaaatatgactctgttcatgtttttgttttaggtttttagttctaggagttttttcctcccatgcttgttagttttctattctttttaaagtatgtatgtgaaacattaaaaattcccaaaagtcagaaccataaaatattatactcaagaaggtgtaagtccatcctccctttcttcatag

SEQ ID NO: 180629 - DNA, 341 bp, Homo sapiens
acagccacttcctgggtgatattggcaaggtgcccgtgcagatggctttagttttctcacctctcacatgagagaattgcactagggccccagggcacagggtatgggtgaggttttctccatccatattccacttgctttaccttactcaaagttggagaatggtcaaacacaaaagctaaacgtttggggagacttagttgggacgctgccctttgcttctgcatttgttctgacccagctgctatcacacagcagagctgtgcaaagaaagagccaaaacaggactgaccacttcctctgtcagctcagctctcattttggctgcagagaacaatgaa

SEQ ID NO: 180630 - DNA, 126 bp, Homo sapiens
gaattgttgatgattaatgtaaatgcatcttgatttgtgggttggtttccaagttaaggacatagaagcatagcactgattaaaattaaattcacacaagatccactcacctaatttcaaacgtga

SEQ ID NO: 180631 - DNA, 219 bp, Homo sapiens
acttccttaaccagcgcttctaaaagtatgggaccagctgccgcagcagccactgcagcagcctcacctggcaacttgctggtaatgcaaattctcaagcctcactacagacctactaaattaaactctggggatgggtccagcaatcaaagtgtaagcaagtcctgctggggatgctgatgtgcactgaagttagagaaacgctggcctagggcaatt

SEQ ID NO: 180632 - DNA, 339 bp, Homo sapiens
ccaggatttgaaatctgcccagtgtgacccaaacactgactatgaaccgaaggatgacctaaaactccactctgtgaaagactattggatactatcttattcagtgtgggctgccctaacaaaataccctagagtaggtagcttaaaacaacaaaaatttatttctcaccagaaactgactttctagcacgtgatcacagacttccagcctccagaactgtgagaaaataaatgtctgtttttaatcagtctatggtattttgtgatggcagcctgactaatgcaaatctgttctgaccaaaacagactttatccccctaataaaaaaagccaaagatt

SEQ ID NO: 180633 - DNA, 526 bp, Homo sapiens
tccaaaagacccgtcgcttttcctgtgtcccacagctgcctgtagagttgtggcaccataaactttagcagctggaaaagaggccaggcctggttccctcatcctgctgggtcctgctgggcacactctgcagtgggcaaaggggtctttctccttcattctgggtttagaaggcagggttctaactgggagaaagtgttattgctccgaaaggcttcttgggggctgggcaggtctttcaggaactcataaggccacagcttatggggaaagaaaaagaaacaaggaagtgggaattccaagggcagagattcttgatatgccatgggactgtgccaaggaatggaagagcaggggaagggagactccaggcaaggagagtcccaggtctgtcctcattgagtcgaaagggcgtatggcatactagagcgcgtcacccacagccccagctttactgtaggatggggaagacctgccagccatatcccggagtggtgtctgggaagaagcccttgagcagacccat

SEQ ID NO: 180634 - DNA, 311 bp, Homo sapiens
tgatagctgcattatttacttcaacaaactactcaaacaccatacgtcacagtttgctcatctgtaaaacagggataaataataaagggttaagtggggtaatccagatgaagcacttccatgtaaggtgttaatagttgctattgctgccactgctgctgccagaaggatgaggtcgcaggttattttgagtgtctggctagaggaagtgcaggtactgaccaggatggggactgggagatgatagaggaaggaaaaagtagtaaagacactacagcaatagcatctgtgggtttaagtaggttgggtgt

SEQ ID NO: 180635 - DNA, 255 bp, Homo sapiens
cttttgttgggtgtatgtattccaaaaatcttgtttgtaacttgtctttttaccatctttagggtgttttttgatgaccaaaagttcttgattttaatactcagatttattttatggttatacttttgtgtctttaagaaataattgacttttgtttttctcattttcgatgcccatatctgttaactctatagttgacacttatttaaaggcttgagattgcagtggtagaatagatgaagaagatagtttaag

SEQ ID NO: 180636 - DNA, 704 bp, Homo sapiens
ggtctcacttcggtgaatccatctattcacacaagccggaaacctcttcatccttactctgtccaattcatcaagttctgccaaatttgcttcctaaaatccctctcatatagatgtactcttctccagctgcgccaccttcctacttcaagttctgtcatctcttcccttcttccacccccaaccccaatgctaatttttccatactctagccagagatcttattaaaatgcagatcttgtcatcccctgctgcctaaagctcctccatggctttcccatcgctctagtttaagtatctaaatcctaatgtgacctacgaaggttctgccacggcttccaacttgctctcacacctctccacactctagccacctggcctgccctaggctcctggaacaacacactaagctccctcctgcctcagggttttatgaatgcaatttctgtgtgtggaatgtgccttcccaagtaccaagctgacagctcctcatccttcagttctcacttcaagagctgatttcttagaaaggcctttctggattccccagacaagatagttccacgcagaggatctcacagtaccctacacatttccttcagggtgcttaccatgctttgacattatttgtgggattattaaggataatctcgtcccattagactccaatgactacagggagcagttagttttactcactgttg

SEQ ID NO: 180637 - DNA, 331 bp, Homo sapiens
acaatttacaaaagaaagaggtttattggacatacagttccacgtggctggggagacctcacaatcacggtggatggtgaaaggcacatctcacgtggcagacaagaggagaggatcaagtcacatcttacatggatggtggcaggcaaagagagcttgtgcagggaactcccatttttaaaaccatcacatcttgtgagactcattcattatcatgagaacagtgcagaaagacctaccaccataattcaattgcctcccaccgggttcctcccacagcatgtgggaattgtgggagttacaactcaagatgagatttgggtggggacac

SEQ ID NO: 180638 - DNA, 679 bp, Homo sapiens
gttaaaatattacagattgaagcattgatatagacaacaaaaaacaaaaaaaaaaaaggttaaatgataactttttttttgagacagggtcttgctctgtcacccaggctgcagtgcagtggcacaatcacaattcactgcaacctcaaactcctgggcccaagttattcccctgccttagcctcctgagtagctgggactacaggtgtgcaccaccacacctagctaattttttaaaaattttagagagatggggtcttgctatgttgcccaggctggtctagaattggcctcaagccatccccctgccttggcctgccaaagtgctggaattacaaacatgagctgctgtgcccagccaacactgtattatgtatattttactacagattttaaaaatggaaaacaaaaagaatgcaaatagttctcctttgcccaagtcctgatccctcagctagctgcgaaagtatcaccaccaatgatggttgccaggggctagttactgttcagtggctataagagtttcagccttgcaagatgaaaagagttctggagatggatgatggtgatggttgtacaacaatatgattgtacttaataccactgaactgtccacttaaaagtgattaagatagtaaattttgttatgtgtattttatcacaataaaaagcagttggg

SEQ ID NO: 180639 - DNA, 465 bp, Homo sapiens
tgctggaattacaagtgtgagccaccctgcccagctaaagacccctattttttatatgggcatattcttgttattttagttatttaaaaaaatagtgtatattaagtacctaggatggccaggtcttgttgataatagggtgacaagacaaagaagatccttgcaagagtagctgggactacaggtgtgcaccaccacacctagctaattttttaaaaattttagagagatggggtcttgctatgttgcccaggctggtctagaattggcctcaagccatccccctgccttggcctgccaaagtgctggaattacaaacatgagctgctgtgcccagccaacactgtattatgtatattttactacagattttaaaaatggaaaacaaaaagaatgcaaatagttctcctttgcccaagtcctgatccctcagctagccccgccaggttcgggggttcattaaga

SEQ ID NO: 180640 - DNA, 209 bp, Homo sapiens
  misc_feature (12)..(12): n is a, c, g, or t
gctgtctagagnacccgtttggtcgatcactgtactccaaatccagcctgggtgacaaagcaagaccctgtctcagtcagtcagtcaatcaatcaataataaatgtataccattgttttactaggtaaatattttatatttatctcctgatgaagcctcattttttcttacttcctcactatagtatttagtgttttcttcagcagtac

SEQ ID NO: 180641 - DNA, 288 bp, Homo sapiens
aatattatagtgagacttcatgtctccaaaaattttttttaaaaaaatgagccgagcatggtgttgtgcgcctgtcatcgcagctacttggaaggctgaggtgggaggatcccttgagcccaggaggcggaggttgtagtgagctgagatcacaccactacactccaaatccagcctgggtgacaaagcaagaccctgtctcagtcagtcagtcaatcaatcaataataaatgtataccattgttttactaggtaaatattttatatttatctcctgatgaagcctca

SEQ ID NO: 180642 - DNA, 356 bp, Homo sapiens
aggtgccgtctgtcacccctttccttgaccaggaaagggaactccctgatcccttgcgcttcccaagtgaggcaatgccttgccctgcttcggctggcgcacggtgcgctgcacccactgtcctgcacccactgtctggcactccctagtgagatgaacccagtacctcagatggaaatgcagaaatcacccgtcttctgcgtcggtcacgctgggagctgtagaccggagctgttcctattcggccatcttggctcctcctaagtcttgctcttttcaaggtaaattttgtaaatgttgttgaagtaagggtccttttggtttttggtttttgaggtttttgttttgtttttgat

SEQ ID NO: 180643 - DNA, 477 bp, Homo sapiens
ctgtgcagcctggctctacatggtgaccaggaacacggccgccaaccgcacccaggttcgcgtttgtgtgaatgctgttaattcatcactgcacacaaggttccagcagagcccgaggaccagaggccagcacacacctggtcacgtcattgtcacaagttaggcagtgccccaccccaccaccaccgtgtcctttatgccaggtcctatgaaggtgaatgccagctcaggggtgtgtgtggagccggtgcgcccgcggtccaccgtggtggctgctggtgcagtagcatctgtgttggcttctgtggccatgcagggctgcctgtccttccccttctcggaatgtccctctggggtctacgctccctctgtcccagtttaaatgctccctcgacccaccttgggttataaaagtaacacaggcttactgaagaaaattagaaaagtacagagttcattcttaacatcgataagcca

SEQ ID NO: 180644 - DNA, 353 bp, Homo sapiens
tgatgattcaacctccagacggttgacactatttccactatcatttgtatctgcagaaaaccaggttggccccacagtctcagttatgaggacctatgagtaccagggagagtcattttgaggttatttttaatgtaaaaacacttaaaactgttccgaagacaggacacacagtgacgtgaggaggatgaggaggatgaggaggatgaggaggacgaggaggatgaggaggacgaggaggacaatacagcagcatcgcaagttcccccacacaaccatgccccagaccaggtcctgcgccaggggaggatcagcagcaggccttcccctcccactttttgggacagcccaaa

SEQ ID NO: 180645 - DNA, 304 bp, Homo sapiens
taaaaaattatgagctccttaaaactccattggactgtgaactccttgagggaaagtattttatttattcagcagctgatacagtgctgacttgtagaagatgtttgaaaagtatctgtgggttgccttaggtgagagaggctaaccatttgaatgtagccatattaagcacccataactgacagtacatctccaaatgaagggcaactctctgctgacccattcatttaaaaactgtctactgagcatctactttatggtaggcattgttctgagtgctggtgtcttaattcaggctgctgta

SEQ ID NO: 180646 - DNA, 435 bp, Homo sapiens
tgggtgaccttgggcacgttgctgtcatcctccaagcctcagtttccccatgtgcctacttcatggggtggtttgaggcttctgtgagattttgtaaagcaattcccacatgcctagagcaaagtaagtgctcagttaacagtagctgttagtattctgtgaaggcatctccttaactattatagcctgttcacctatgactaacactgtcaacataactgctgcagctgggccctttttcttttcttctttttttttttttaattggcacagggtttcactctcacccaggctggagtgcagtggcacagtcttggctcactgcagcctcaacttcctgggctcaagtgatcctcccacttcagcctcccgagtagctgggaccacaagtgcacaccaccatgcctggctaattgttaaattttgtttgtagag

SEQ ID NO: 180647 - DNA, 376 bp, Homo sapiens
gacctcatgatccatccgcctcggactcccaaagtgctgggattacaggcataagccaccatgcctggccgggcagtatttcttatactttaacgttcatacggatctccaggagatttgttataaaatagtggttctgactcagtgggtttggatggggactgagattttgcatttctaatcagctctcaggtgatgctgatgcagactgtgaggcaagtcaataggggataagagtctatcttttaattgagaacttgccatattccaaaaaaaaaaagaccaagaggaagtactctcttggtggcactagtccagcaggaatccattgcattcacatcaaggtatcacctaatcctgcatttgaggccttgtg

SEQ ID NO: 180648 - DNA, 357 bp, Homo sapiens
gagatgaagataatggtaagaatttttgaagccaaatggaattaatctaggaaaaggccttggaggggggaagtatttagtgcctgtttggaagcaacggagagaggtgggttggcagaaaagaggaatcagcaccctactagggaaaacaggacatttaaggcctgttaagatttatggagaaaatgttgaaatgtgcataggagccaggagtacgccagggagaatgaaatgcatcaagtgaaggcagggacaggaggaagaggttagccatggaccacagacagcctgaatctgtcatgactcacttttactgaaagtcagttatgagccagaaaatatgcataaatatttgca

SEQ ID NO: 180649 - DNA, 177 bp, Homo sapiens
agcaggggtaaagagagcaaaggagaagtgttgaagtctgtgacccaaacttagagcacaatgaaacctttgcctttcccttatgttgtactgtggcctaagtagaagagttgagatatgaaatgcttatatcttgaggtgtggctctgtaggatgatgtggaaaggagttttcttg

SEQ ID NO: 180650 - DNA, 594 bp, Homo sapiens
tgatattatctataggtgcaattcgggaagttgcaaattttgtgacctctggccacatgagtcctgagcagtgagggactgtagaaactaggcctgcattttagcagagttcaggccactcccacaatcctaaccttgtggcctttcattagctttacaaaggcaatttcagccccagaagtgggaggtgatagttttaggaagggactattatcatccttgtttcaaggttaaactgtaaattcctcccaaagctcctaaaattagcttggcttatgcccaggaacaactggacagcttggatgtccaaaggaagacggaattaactgtgtgaaatttctctgtcttttttttttgagacagggtctcactctgtcacccaggctggagtgcagtggcgtgatcacagctcactgcagcctcaacctccttggatcaagtaatccttccacctcagcccgcggggtagctgggactacaggctcacaccactgtgcatggctaagttttaaattttttgtagatacagggtctccccatgttgcccaggctgttcttgaattcctgggcccaagtgatccatctcagcctccc

SEQ ID NO: 180651 - DNA, 541 bp, Homo sapiens
aataatacatagttactgtagttataaagacagaaaaacaggaaacaaaacaatacttgaatacagaaagaaagtgacgtaaagtagcatttaaccctgttttggaagtcaaaattaaattaacatataagcagtgatgaaggttttcaactcttacccccaaaagaatacaattttgtgcaccgtttttgggaattctggttcaatagcatgtgcactcaataatcaccaatgccatcttgtggcaaaaattcaccaggagctttatgaacagattagaaacgatgacatttttaagtcagttaatttcaaaatggagctctgaaactaattggacataacagaggctcctgttctcttcaaggttatattaattatatggttaagaagataaagcaatgggcaccattctttaaatacgaaataagctgactctactataattaaattttaaaacagcaaccaaattaaacaaacatttaatatcttggcacttccatgggggaagggagggaaggggctcatctgccttcccaggaag

SEQ ID NO: 180652 - DNA, 505 bp, Homo sapiens
ggaagaagggagcggggaaggcaattcggcatgtgtccctgagcgagcttctacagcccctgcacagagtgggtccatctgccacattcctgtgagtcctgaacgtgaacgcacggccggccactgtgtgctggccggacagcctgaattctgaggccaaaacttccagaaaaaggcattgagctggagggactggcccttctaaggaaactggatgcgctgaatgaattaaatccgagccgattatactctacacacacacacacacacacacacacacacacacacaccacttttaaaagcaccattatagccagaaaccgccgacaaaagccaggccaggctgcagccaaacacgccagtgtttgggtttacaactccttggcctccccagtgttgggggtggaacccaggaccctagacattatttaaaagcacatttgggtatatacttggcttttgaaaaagcacttaaaggcccacgcacaggccactcccgagacag

SEQ ID NO: 180653 - DNA, 528 bp, Homo sapiens
tcatgggtgattgtggcttccagtcctaccagccactcactcctcccctcactcagaaggagctcagcagtcacgtgtcagcccatcagggcctgtgtctgcttggtccatgacctcgtcatctccaatgacctgctcctttgctcctctgctctgcacttcagccatccccactgatggctgcccaggcccatgtcaccacctggaactgctccacccctgaaattgctgaatcaggcacctctctacccacagccttcaggccctccagcccactctcagtcccttgtgggacacgggttccagactcagcgggacactaggccttgcttcctcccctgctaccccttctgtcttcatttcccgccctccccaactgaagttccctggtccatcattcgagcacttttctgccaacatccgcagctctcttggccgcccgactcatggtcccacccggctggcagccccccagccctggaggaatcccagcagcctccagcctggagccgctctccccctacctcc

SEQ ID NO: 180654 - DNA, 600 bp, Homo sapiens
atcagtggctatcattagtgttagcatattttatgtgttacccaagacaattcttcttccaatgtggcccagggaagccaaaagattgaacaccccaatataaatcatcaagacagatcttccctggttacagtctaggagggaggtggggaagatacattttcacaagtgtttacccctcaagacagaattcgacacaaaaatagagatacaacagagtgttaagagcatgacctttggaatcagagacttggctccaatccctggccctattacctttcttcttatctttttaggagacagagtctcctgtgtggcccaggctgagtgcatagtgattatagctctctgcaccagctctgttattttctagcattataacttggggaaaatcatgtaatgcctctgtgggtaagtcttatacccatcctatagggtagttatgagaatgaccggaatttacagataagcaaaccgaagctgcctgcaccaccccctgcttctgccttcggaaatcctacccagccttccagcgcaagtgtcaccttttcatccatgaagcctttgtcagtcttcctggcaataaaatataggtccttt

SEQ ID NO: 180655 - DNA, 575 bp, Homo sapiens
gtgtagaaagaagtagacatgggagacttttcattttgttctgcactaagaaaaattcttctgccttgggatcctgttgatctgtgaccttacccccaaccctgtgctctctgaaacatgtgctgtgtccactcagggttaaatggattaagggcggtgcaagatgtgctttgttaaacagatgcttgaaggcagcatgcgcgttaagagtcatcaccaatccctaatctcaagtaatcagggacacaaacactgcggaaggccgcagggtcctctgcctaggaaaaccagagacctttgttcacttgtttatctgctgaccttccctccactattgtcccatgaccctgccaaatccccctctgtgagaaacacccaagaattatcaataaaaaaaaaaaaaaaaaaagaaaactccccctttcctagtaaaatctatccttgaatccctgaatctacacctgagatgttaagaaattcatttgcagcctggtgagcaacaggtggcatcttcaaagaacccactttgcacactaggtggtaacttcgaaagtaacaccttgtatttaacaatt

SEQ ID NO: 180656 - DNA, 598 bp, Homo sapiens
gctactgtccctggggcactgaggccctcctcagtgacttcctccacctcatcttccgccatctccaagccaccagtgtccaacggactactgatatgtcccaaactcatcatttgtttattcaccaattcagagcccacctttttttcagcactgagctagcctctccttgctagaagcttacggtcgaaggtctccagccatcagaagaagcacgtggagcgctgcgtccgtgttgtggttattcatccagcatgtgttgagtaagggttgcacctgtgcctggcattacgccgatgcgggcccgcatcggcgtaaacggcgtaaggtttgggtctagggtgtaagcctgagaataggggaaatcagtggaatgaagcctcctatgatggcaaaatacaagctcctattgataggacataggggaaagtgagctacaacgtattacgtgtcgtgtagtacgatgtctagtgatgagtttgctaatacattgccagtcaggccacctacggtgaaaggagagatgaatcctagggctcagagcagtgcagcagatcattcatattgcttccgggagtgtgggagtcagctaatactt

SEQ ID NO: 180657 - DNA, 288 bp, Homo sapiens
gccttctgtgtgtccacaccaccccgaggtgacctggactcagggaatctgtaactcttgtccttttctagggcctagggacctaaacattgcctaggagtctggggacatggtgagttgtcctaccatctggggaaagtcgataccctaatcccagtgaccgtctctggggaacaggcccagggccgctccctgctcctccttcctcccttcagggaaggctgtgggagcctgggggccaacgccccattgggcccagcccctccctggctgatgccatggtgatgg

SEQ ID NO: 180658 - DNA, 267 bp, Homo sapiens
ctcagaattctgcttggcaaaggattatcccattttgtttccagaaaaaaaaatgccttatgaaaagtcattttgatatgattgaatttagcagaaacataaagattttggatttgtcatgttcatttaacatccagctgttttctaattcttaaatgaaagaccaaaaaataatagtttgctaaaatgtttaaggatattagagaactgtaacgttatttttgcattgggtagtattataatggcattcagttcaggttaacaata

SEQ ID NO: 180659 - DNA, 438 bp, Homo sapiens
tgtggcagcacaacttcaattcctgcttctgtcttccctctgtgtctctctgtcttcacatggcattcttttatttatctctctttttttacaaggacaccagtcttgctggattagtgtccaccctactccaatatggactaattttaactaattacatatgttatgactctatttccaaataaggtcacgttctgaggttctgggggttatatctttttgaggaaaatgattcaatccattaacactatctgttcttccagagatattttatcttccaaataagcctggatcctactgtcttagaaatacaggaattgactttctctgggctgtgttttgatgccatgttttcaccttttaccaagcagagcaagaagaaatgacttaatgaatggaactattgaattcactaaataaaattcactaagaatcatg

SEQ ID NO: 180660 - DNA, 745 bp, Homo sapiens
tggatggacagagggacgagggacgagcatctgccgtcgtgtcccggctgccctgcagtcgcctccaacacccgctgctgcccgcccgctgcctgcctgcctggcatctctctctcccgggctgggaccgtctcttctccctcctgtcttctacatgggatggactcaggagcgctcaacagatgctctgaaatcaatgactctgaatctagaagtcaaccggagaatgtgctcctcagagggccctggaatcttcccctcgtgcacttgggtttcagtttgctgaataagacggactctgctgcctgctcttcagagaaggttttggtggaggactcccctcaggtgcccctgcctggatcccccactgccccagaaggctggccttcagatgcctgggtagctggcttgcttgacccaagcatggacaagtgagaacagatgaaagaggccagcagacccaggacccagccctttctctgccaccagccagcactcactctgctgtgtgacctgagaccaggcagaccatctctctgggtctcagtttccccctctataacaccaggggctggtcttcatgatcccagggccctccccagctgtgcccatctgcaactgtgagattctgagagcagaggagggaaggcgggatggcccctctttccccaccgcctctctctgtcccccagggtcaccccaaagccgccccctcccccggctccctggaacttccctgcagctg

SEQ ID NO: 180661 - DNA, 725 bp, Homo sapiens
gtgttcgatatctttgcaggctgaatggccagttgacttgagatgcatataccatgccttcccccttttatctttaaggattcatgacatgggctgctgttgagggaaccacacatctatcttgatggcagaaatacggtatttggaaatcctgggaaaacctctctcaggataacattttcagtagtaggttttcctccctgttacctctggttcctattccattgccctttatcagtacaggcttttgaaaatgccatggattaaagaggtcccactgcccagggctgagcatttctttgcccggcctggtctctgctagtgggtgggtaagtggagcctttggaagaaggaatcggtgtatggactgttcaagacagacacatacttatctaatttaggcatttctagctgtaggaaaggcaatgatgtgatctattccaatgaagagtttacactttggaaactcagtttcagaaaattcttccataatccaacctaaatcttttctgctttactattttgtcttaagccagagataggcaactgctgttttcccgtcttaaaactctagaaaactggagtgtagagaatgggcaagatgagaatgcctcgtctatgtatgtggcttagtcaaaagctatttcctgaatctctcgtgtttagattttctcatcaacgttaatgaccactttcagggcctcactccctgctccccatcatgc

SEQ ID NO: 180662 - DNA, 532 bp, Homo sapiens
tgttgagttgttgctctctagatggagtttgaggattttctaagccaaagcatggagtgaaaggggccaggccctcaccagggaatgttcactgccactcctcacacttaccaactcagattcaagacccctgcttggggagaagtggctgaaggcaggcagtccttcagctcctctacaagtttaaataatatcccagccggccgggtacggtggctcacacctgtaatcccagcactttgggaggccaaggcaggcgaatcacctgaggtcgggagtttgagaccagtctgactaacacggagaaaccccgtctctactaaaaatacaaaattagcctggtgtggtggtggatgcctgtaatcccggctactcaggaggctgaggcaggagaatcacttgaacctggcaggcggaggttgcagtgtgccaggagttcgagaccaccctgggcaacatagtaaaacccctgtctctacaaaaaatacaaaaattagctgggtgtggtggtgcatgcctgtagtcccagcta

SEQ ID NO: 180663 - DNA, 415 bp, Homo sapiens
acgaaatgccaacttaactccactggcattttcagattttggcagcgggaggcattccggaaactctggatatctgactaggtagtgaaagttggtaatggaatttgtaggcgaagacttaaagatatctatgcttactatgttgaaaactcagattaagatttttatgtgaaactaaaacatatttaaaaagaaaaaagaactgaatggaaattcaagaactttaaaaacaatagcatatttaatttaatgtagatagattgaagaaagagagaaatattatcctgaaaaatatgacaaaaaaatttcaaattgaaatcaaaaagaataaaattggagtgtaagagaaagaagaaaagtagtgaaaaggactgagatacatatagttgcaatactggaaggagaagagaaagac

SEQ ID NO: 180664 - DNA, 317 bp, Homo sapiens
tgaggaggctggacagccacgacggacgaagtgtggtgtcactgcagaccctgcagttcaagcttttaccacaaacacctcacagtgctgctccccaagagtgagggacagtaaaaccacacattgcctccttcagcatcttagtaaagggaaaggtggggacagtggatgttgaaggtggctgtgaaggagaagacaagaggccgacagtgagcacgtgggcctaaaagccacgtctggcagaagaaggggtgcaggcagccggctgtgtgggaagccctgtgtgtataaatgctgtagcctcgtcccttccttac

SEQ ID NO: 180665 - DNA, 370 bp, Homo sapiens
tgactctagaggattactgatcttccgtgcccgctgtgccaattagagaggcctttataggtcaaagtcataggaacgcacccacttgacagatgggaagactgaggtgcccacaggatggcagagccagaagtcaaatgcaggtgtctacatggccccgactgtgccctgtcatcggaccgggaggggtcctgaggaagtctttagtacggctttgctagtttgagtcttagagagtgtctgcaggaaataggaagcgggaagtaggtttttaaagaaaaaagtgtttatgatataattccatttttgtaaaacaaaaagaaccatccatctctttatgtatgagtgtttgtttagggacggaagatca

SEQ ID NO: 180666 - DNA, 461 bp, Homo sapiens
tctaccctaccttctaggacttaaaaaaaaatactttctctcataaagagaacatatttaccttgtagaaatattgttctgcctgctatgtagagaacaggttggtgcataggagaaagactgagtttgaagagacaggtgatgatagtcaatactattgaaaataaatgatggaggttgtgtctagagtggtgacagcggatatggagaatagtggacagactagaaaactattaaagaggtgggattgataggagttagtgaatgatggacatggtgaatgatgggatgcagtgaggtaaagaagaaggacattgtcaaagataactcaggcttttgacatgagcaactgagataatagcaatagtagtactatttactgagctagagaaagccagagaaggagcagagtggggtagatcagagatgatctggatttgaatatgatgtgattgtggtac

SEQ ID NO: 180667 - DNA, 207 bp, Homo sapiens
taccactgagcacagtgataaagtgcagtttcatatttttctctaaaacacactcacacaacagaaatataacatcaagatggaaaactgtttctgcaaacagcaggggcccaaagatgcagtgggtaaggtttgttaagctatctcgttctgatcactgaaaataacaaggtttgaccaaaaaaaaagcgaacaaattttactgaa

SEQ ID NO: 180668 - DNA, 402 bp, Homo sapiens
gtacaggttatatgcaaaaattatagcattttatatcaaggccttgaacatgcctggattttgaagtctgcatggagtcctggaaccaatcccccatggataccaagggacaactgaacatgctttccaggatcctgtacttacagcataaaaatcatatatcctcctccaaaataagcttaacagaaatcttatttttaaaagtcatgccatagtttgactcatttatctattgccacatttagaattcaagatcactactgtaaacgaattctacatacagtttaagattaggaaaattaacattcatgtgaaaaatattcattttttggtttttattgaatattttgtgcatttcctctgtgacaagaataaataaacagtaacacactggccaactac

SEQ ID NO: 180669 - DNA, 215 bp, Homo sapiens
tctggtgacgggatacggaaagaatgcctatcaattcaaacccacacatgcacacacacacacacacagacaacacactagaaaatgggcaggggacctgaacacatgcctcatgaacgacgatacccctaaggccagcaggcctgtgaaaggcactcggtatcatcaaggaagctccaaccacgagatgcctctacatcaggatggttcaaaga

SEQ ID NO: 180670 - DNA, 445 bp, Homo sapiens
gaggaggcctcatggaacttacaatcatggtgaaatgggaagcagtcatcttcttcacaagacaacaggagagagaaggattgtgtgtaggaggagctgtgaaacacttaacaaaaccatcagatctcctgagaactcactcactatcgtaagaacagtatggcggaaaccgcccacatgatccaatcaccttccaccagatcctgccctcaacacatgggtattatgaagattacaattcaagatgagatttgggtggggatatagagccaaaccatatcattccacccctggcccctcccagatctcacatattttttacatttccaacccaacatcatgccttcctaacagtcccccagagtcttaaatcatttcagcagtaactcaacagcccacagttcaaagtctcatctgagacaaggcaagacgttttggcctataa

SEQ ID NO: 180671 - DNA, 602 bp, Homo sapiens
tggcttttttagccaatcgtgctgttctacccctcagttcacggtgattggctcaaagatatggtcatgtctctcattaggccaattaaatcctgcaagactcaatttcagaactcttgggtgactataaaggaagcagacactctttcccactggaagtgtcataaaagcctgaggctgagaggctaccacatgcagccccaaaacagaactgaggctgagaggctaccacatgcagccccaaaacagaactgaggctgagaggctaccacatgcggccccaaacagaactgaggctgagaggctaccacatgcggccccaaaacagaactgaggctgagaggctaccacatgcggccccaaaacagaactgaggctgagaggctaccacatgcagccccaaacagaaccgaagtagagctgcagaatgaaccctggtaaccatttttgtatactgaatcaagtcacatctcactcctcggtttctagtaacacgagccattaaattctcttttagcagtagttaaggtctgtttggactgggtttcctatcatttgcaattcaaataacactaatatgctaagtcacccactgtaacggt

SEQ ID NO: 180672 - DNA, 249 bp, Homo sapiens
tggagcactgcagcatgccatcgcagtgtatgaacatactactattcatctcgtctgctgctgatagacatttatttttatttaagtttttgttgtttttgctattaaaaagccttgatggacatttttaaaaattctgtatagaaagcaaatgccaccttaagtttgaaaataagtgacaaaatgaaaaaacaatttcaacacatacaacaaatacatagttaatatgcatgagatataaagtgctct

SEQ ID NO: 180673 - DNA, 214 bp, Homo sapiens
atcagatccccgttagaaaattaaagctacaagactaccacggtaacaagataactgaacctaacagagagaagacaagacaggaagttcttaccatctggaatacgtagtatcagccagtcctgttttgcacagaaatgaataacatggcaaagaccgagtgtttttccggttcccttctctccatctaaaatatatgttgttaaagaaaacg

SEQ ID NO: 180674 - DNA, 438 bp, Homo sapiens
tcctagctctgcccacgtattagctgtgacattaactatgtgttaagtagccctcatgtgcttgtttctttttcaaaagatggagctggtactaactacctgatagggttgttctgagatcaggtatagttgtctgtgtacaactcttcgtcatttatggcactctgtttaggggtgcatcagtcagcattgctgattcttgctgctgttggtgatgatggtagatatccagttggagaaattattggatctttttaaccagttaacccagttagagagggactcaataaaaccaatttaataaagttccttttggcacaataattgaattacaattggggatgtaaacttaaaccttgacgtgacttgtcaccggaagttggaatttaagtcaagggttgaatttaaaagtagtggttagccagaaacaaggggtta

SEQ ID NO: 180675 - DNA, 176 bp, Homo sapiens
ccatcgtactccagcctgggggaaaagaatgagacttcatctcaaaaaaaaaaagaaagaaaaaaattacacaggattctccccacttctttttctcttgcaaagaggtggtgatgaaccaggtttgctcaggcagatgacaatactcttgaaagtggtggcagagagccaggtgt

SEQ ID NO: 180676 - DNA, 777 bp, Homo sapiens
cttggggactctctaccccccacccccaccccaccaattagctgccccggaggaggagaggggcttttcctgaatatcctccagatgccgcacagccggcttctgcctataactcctgtcattatcatgtgtttttctcttgttctcagccctgtgaggtgagaagggaaatcgaggcagggagattggggttgcagccgcttctgggaggaatagaaaaaaaatttgagagagagagagacccatcaggagccccttgaaggagggtggctagagttaggcagaagcaagagggtttctgtggagagcagggaaggtcaggaagggaccccagatagcatcactcccagggctctaaaggagttctatttgccacaccaagttagtggaagagagagactggacatgttctccttaactatctccctaccctttcttaaaatgttcacccacgccccctctgtatctccagctcagatcaaactatccaaagccccaggagaggacccctccccaaacacacaccaatatttctgccttgggagtgggaatataaataatcagctccaccccactcttgggtacagggtggtgagaaaggggaattgcatagaaatgtaagttcaactctatccagaggcagcctaggggatcccttatccctaacccctgccctcttgcctcagggtccatcaacattgaactttcttgtttactttccagagaatggagatgacccagctcacctgacttagtatgttaccttcctcctgctat

SEQ ID NO: 180677 - DNA, 418 bp, Homo sapiens
cgcacccacggcctccacttcaagagtgaggagggcaagtttgcattctcctaatgagtaatgcatctagaatcagcacaacttttccctgattcactcttttagtgaggctacttttctcaaggactcctagcaaccccagattcttattttatcagtttcttattttattcctgtcacttctaagtatttgccaactatcattttctcagttttcccccatctaagccacaaatgcaactaattagttatgaaagtgactaagtcttttttatgtaaaattaaggataagaatcttactactaatgttctctgaatgatagcataactatcatttaagaaaactccagggctgaatactgccagactagctccctacatagctcatctttcaaggaagttactgaggaatgaaagg

SEQ ID NO: 180678 - DNA, 191 bp, Homo sapiens
tgtcaatttctacacacacaaaaaaaaggtctgatggaattttgataagaagctgtagataaaattgtggagaattgctatcttaacaatagtgggtccttcaatccgtgaacatggtgtatatctcttttacttagatttctctctaattctctttataatgttgtagctttcactgtagagattttgga

SEQ ID NO: 180679 - DNA, 1768 bp, Homo sapiens
agaggatttgtgtctgcagattcttctctaaggtttgtgtctcacatagtgagagaatcagccagccagggaaatgggacaggattttgtctctttccccatttcctcttctaatgaactcctacctatgctttatgactgcattaaggggtcacctcctccaggaagcattccctcatctccttacgctggttctgagtgtgtcgttcctgcttgatcccctcccagcaccatgtgtgtgagttctcacagctcacaccccatagtattactatgttgtttctacagtgggttcctgtcaggggttccaaacttagctgtttaggaggatgagtagattgtacaaccacaccaggcgggcctgatcaaatacagtaagaagtgtccggattggcaaaccagcgggtccctcttctagatgttatcagagagatactgttagagagaggttgctagatgttaatagaggctgctgttagattccagctccctcctcccctggtcccttttctctcctcatgccaaaagatagacccagtgttgccagagcttccacttttaaaagagaagccttttaaaatataaactctcctgatttttaaatgttttcagttaagtttttaaaggaacattcataggccaaaccaaatacctgtgggccgtatgtggcccccggggccagcagtttgcagctccttggttataggtgcctctaacccattgcacaagctccctcaggcatttcatgtctttcctttccattccccctgggcctagcagggagctggcatgtcacagtgggtgctccctaattattggttattgacttgaatgctagactgagcaagcacctccctgctcacagggtgttaacatttttccctcagaactgtttgtatgtaatgctattctgaattgcttcagttccttacatactttagtgatagtctgtatgtgcctggaaaagtcatcattccttagattctagacaactctgttcttctgttcttttcctttttcctttctctctccgtcccctcaacatatgtttttgttttttgttttttgccagttcttttgtatctggccggttaacacagggcttcataacatggggtcggctgttattaagcaacagtggtttccggtagctcactgactttgccctctctgctggtaagccattgctgatttccatcctggtaacaagcatgattttcagatttaccttcatttgcagtgaacaattatagcaaaattgcttaaagaaatgaaccttcaggtgtggcggctcgtgcctgtaatcccagcactttgggaggccgaggcgggaggatcacttgagcccaggaggtctctaggctgcagtaagctgtagttgcaccactgcactccagcctgggtgacagggtgagacatcgtctcaaaagaaaaaaacaaaaaaacacaaaacacaaaaaaccttttggcccccttcgcccccgcgagaagaagccttctcagaaacctcatccgttgtgggccgcgcgcgcggcccccaagggatcagggaacactgtggcacaaacgctggtccccagaggaaaacccgcgggcccgagacacacgggcctgggaatctcccccctttcacatcaggccccgcggggcgtcacccccgccgtttctcggccatttccggatggggtcttccggggtccatccggggactcctctcaccgggggttcccacgccacctccgcctttccctttgcccgccccccggga

SEQ ID NO: 180680 - DNA, 679 bp, Homo sapiens
caacactctttatacactctttcagataaagtttccttgaaattggccagacatctaaaggggatgtggtttttggaggccaagctatagaaactagaggatgacttccaaaaataacgatgtttttctgaatgtcgctgcattcctttgtattctcctagttttgactgcttagatctttccggcctctcagactgaggcaagggagaagcaagagaaactcaccccgagccagaagctcaggccagtacagcttactcccctgccaccagagtgaaggtcagccttcaacacagacacaaggagccccagaaggggaggagacgtcatacctctgtccctccccagatcagtctcctggcaggccaggctctctgattcttatctctagttaccccttgtttttctcaaaagaacaggtccctaaaaaaggagggagtttgcatgtctcggggccacctttgctaagcaaatgtctccattctgaatacagaggcaagagttgggttggaggttttgcgatgctgaggtaaactcccagctctcaactccagaggcttagaaaggctcagggcttggtaactggaaccttgcatcgatggagcagaagttggaccgcaggcttccccatggagagctgagcctggtttttcttgggaaagaagttgatctttgccat

SEQ ID NO: 180681 - DNA, 206 bp, Homo sapiens
actaaatttctacacagagtccccagcctattcagcccttaatgttctctgaatttgctgaggtaaaaaacaaagatttaaaaagatatcaggaggaaggtgtgataacaactccacaacactcttgatactgaagaatagacaatttactaaagtcagatgctaaaaacaggacgtctgctcagcatcttggtgtagaaattgaa

SEQ ID NO: 180682 - DNA, 389 bp, Homo sapiens
aacttaaagactgtttcttaatgagtaaggagacgaggattctactggtaatgctggagaacttcaggtgtgctgtgacagaaaaaatttaaaaagccaagggaagcagacaagcagcattatgggcaatgaaatcagaagggacagaggcagacattttaaaacacaaagattcaaaacatttttttttctttgagacggagttttgctcatctcccaggctggagtgaaatggcttgatctcagctcactgcaatctccgcctggttcaaggggttctcctgtctcagcctcctgaatagctgggattacaggtgcccgctatcaaacctggctaattttttgcgtgtttttagtagacatggggtttcaccatgttggccaggatg

SEQ ID NO: 180683 - DNA, 308 bp, Homo sapiens
ccacccctcttcatgtcaccgacgcttcctcagtatccacaggtcacgccacctctcttcctgtcaccagcctttcctcagcatccacaggtgacaccacgcctcttcctgtcactagcccttcctcagcatcctcaggtcacaccacccctcttcctgtcaccgacgcttcctcagtacccacaggtcacgccacctctcttcctgtcaccgacgcttcctcagtgtccacaggtcacgccacccctcttcctgtcaccgacgcttcctcagtgtccacaggtcatgccacccctcttcctgtcacc

SEQ ID NO: 180684 - DNA, 225 bp, Homo sapiens
ggaatatcaagtgctcctctttgtggaacttgctactgtggccagtcctaccctggctggatttgtagacatctagggcacaaggcaagacctgctatctcacatccatcttctgtggcttttgcttgaagtgagaatcaagcagacaggagccagtctcttttgtttggcttctgagcaggtgtctattgttcaaacaggaggtttcatcttgctgcacgcaca

SEQ ID NO: 180685 - DNA, 175 bp, Homo sapiens
actatatttagcataactatacagcataaactatacagcataaactattctgcattgcaatattatgaaaatatgttatgattaacttttactatataaaccaaattctaatttcccccccaattaactcagtataggatattgtttatatagtaaaagttaatcataacatatt

SEQ ID NO: 180686 - DNA, 145 bp, Homo sapiens
gcttggtaaggacaacatctgggacccctgtgggtcagcaggacaggaaagttctctctgagtgggcagttttgaaagtagacgcaaaggacaagaagcagcctgctgatcatcttcacatcttcagtagagcctgaccattctg

SEQ ID NO: 180687 - DNA, 493 bp, Homo sapiens
tcactgggttgggaggacgtgcatggtggccagtgttggccagaatttccaccacacaggtagggaattcctaccaccacacagatggtaggcggaagtagccccacgagggtggatcacagtaaaatcaccaggaagccatcggctcttggcactctactgagtttccatgggtgttaaacagcccggtgacatcggttctggccggccagatgcacaggggcgcagccagcctcccccatgctcacacatgctcagcttctttcatggaagattgcggcatcatttcaccttccaggaacacggagcagatggtcgggtcacctccccgcccaaaccctcccatgactgccctgcatgggcccagtcccttccatggagctcctggggccggtcacagcctggccaccaccctcctctgcgccctccgcccaccgcccacttccatccgtcccagtctggggccatccctgtcttgggagagctgggccct

SEQ ID NO: 180688 - DNA, 315 bp, Homo sapiens
aggagagtgctttcttcttggggattggattggtgttttcacctattcttccattttttttttgaagatgagctgcttgtagaggtttggagacatcaactgacttctctcttttctgtacctcctgaggcacccaaagcatgaatacagtttttttcttcttcctctctctttatagacttggtctttgatctgtgatctatgagaaggctgaagcccccttacaggacagtttacaatttactgggagtacatggaagtcctggactagggtgatgtggctgcctcccattgcacaggagcgattagcggagg

SEQ ID NO: 180689 - DNA, 590 bp, Homo sapiens
ggtgctggctccagcaggcctggctgtagctgggatggagcctgctcaggggtacagggcccctgtcaagtctgcaggctgagtgggcagggaagaggaggcctttcataaccgcacaagcaagaaggagcgtcagccacggagcagggtgggcgaggaccccagcctggacagagtcaaccaaacaagcgctgcctcggggtccctgggagtcaccacatgctggccactccctgcaaggcactggcacgcagatttgcctggctgattccagaatgttaaaagcaaatgactttgaaaatggatgggttgggcatggtggctcacgcctgtaatcccagcactttgggaggccgagccaggtggatcatctgacgtcaggagttcgacaccagcctggccaagatggtaaaacgccatctctactaaaaatacaaaaaattagctgggcgtggtggtgcatttctgtaatcccagctactcaggaggctgaggcaggagaattgcttgaacccaggaggcggagattgcagtgagccaagatcatgccattgcactccagcctgggtgagagagtgagactctgtctc

SEQ ID NO: 180690 - DNA, 342 bp, Homo sapiens
aaaacaaaacacccccacaaaccacatgtgtactcaacccatgactatatttaatacagtttggattgtagaaaatactatcttactgtgacattttggtgaaaaacgattgcaaatcaacattaatccatattataacaagtcccaaagtaaaacttccatatgacaggcatgtatatttatcagtaatgaactcattaactatttctaatagaagcccttaatcaattttcaagtcaaacaatttgttttgtcaatgtttttcttgtaaaatctttttttatttttatttttttaggcttttttttttttttttaattgatcattcttgggtgtttcttg

SEQ ID NO: 180691 - DNA, 406 bp, Homo sapiens
tttctccacacccttatttttagcagattaaataattgtaacccctttaactttatcttctaagtctatttttggcttttatctaaggcccctttaaattctccatgttgcttttggaaagctagagtccagaaccaaggacaggtagctaaagtgtttcacataagagaaactccatcaacaaaagtattgcgaagtctgtacaagcccagggcaatcaatgaaatctgcatgtaaacgaggcagttttccagacaatacttttcaattagactaacttacaaacttgaggaataacgagaaactacaaagaaaacatcaactgcgtcttcaaagcattttcaagcacaaaccctaatacagtttactggatgccatttaattgggcagctctaagcatgtagct

SEQ ID NO: 180692 - DNA, 327 bp, Homo sapiens
tatgtaatcttctgactgaggagtggtagaaacttctgcaaaggataaccaagtgaaagagatcagaaaagtgacacctcactcttaagtgaaggccctagggcaacacactgaatatgggaaatgatctgaatcctaaaactcaggttttgtgatatattcccccaactaggtagtacaagatatttaacaaaatctcagaagagtaagaagagcccttgtttagctaggttttttctttcactgtgcattttcctgagactatagaaaagtgagaacaagcttgagcttggaaggcaaaggaaatagatctcaaatatggtggag

SEQ ID NO: 180693 - DNA, 314 bp, Homo sapiens
tccatttgagccattacaaatgagaaacgtctcctgcttttataactcagtaatgggaatgtgactgttgaaaataattattttctttgttttgagcccttaagaaaagagactttattttaatgtttttttttccaaaagctgaaaaaatgctttttaaaaatctttaagtatagtggttatattcagactatatttaatttaaaataagcaaattgtaacaaagtataaatattttaacattcagcaaaatgaaatgataaagctaagagactatcctatgatttgtatatttattggtgccaagaaaagtg

SEQ ID NO: 180694 - DNA, 360 bp, Homo sapiens
  misc_feature (25)..(25): n is a, c, g, or t
tgctgggattacaggtgtgaaccanccgtgaccggccaaggcctagttttcctaagtgtctttatgggaccctcacacctgtacaccaaactccttcaagaggcaaactctctcctaagagggagacaaaagaaacagggccagtggtttcactgtagacaatggtctatctgtcctgcagatgagtcagaactaagaccccttgaggaatcatgttgctttggtgccggctgtctggtttctattccatatcctgtgccgcacccttcccccagccacagtgacatctggaggctctgaccacagctggcaggctctgtggtaccgcagaggccaatcttcaacaggaagtcttggggg

SEQ ID NO: 180695 - DNA, 246 bp, Homo sapiens
gactcagaggatcccgttctagccgcgcagtggtttcactgtagacaatggtctatctgtcctgcagatgagtcagaactaagaccccttgaggaatcatgttgctttggtgccggctgtctggtttctattccatatcctgtgccgcacccttcccccagccacagtgacatctggaggctctgaccacagctggcaggctctgtggtaccgcagaggccaatcttcaacaggaagtcttggggg

SEQ ID NO: 180696 - DNA, 323 bp, Homo sapiens
ttcttaggaattttaaaaaagaatttcttttcaaaatagaattactttacctttttcaaaaaaattttggccctaaaaatctaaatacattttaaagagaaccaaaacaacagctcgtttttttgaaagttgctttttgactgtcttaaccttctgctagtgaccagactctctattcaataaagcctatgtgccctttgctcctaaagaccctttcagaatgtatgcattcctcttttcacgattgttgctttgtgttttcaaacacacaaacatatttcactacctggcttctcagaactgattcgaagcgataagttgga

SEQ ID NO: 180697 - DNA, 129 bp, Homo sapiens
gagatcagactgaagagaagcaaaggtagaaacagggaggccaagcaataaacaatttatgttcaaagtagtatatttgtatttcctgagatattgaaggagagtataggagataaagggttaaggatg

SEQ ID NO: 180698 - DNA, 422 bp, Homo sapiens
ctattttatgagctgggagcagaaaaatagagaatacacttctgcccttcatctttctaggtatcaaagcctttctaggctaagccacagctaggactgttctcttttacacagtgaaatcatttcgaagtgagtagcctagtaaatttagaggagtaaactattcttgcctatgtcttcatgatctataatggaagataaatcctgttagcctgggcatggcaaggcaattatttcaactgctacgtttctgtggaacaaacaaaacgactccaggcttatgcatttcctatttaacggagaagggaagcagcactatgctcaccatgcccggaacactggttgtcacagaccagtggcaaccagaatggaagacaggccttgtctattatcaccactggatatcaaagtcctctgggcta

SEQ ID NO: 180699 - DNA, 266 bp, Homo sapiens
ctcttttccaagaagtccaaagagacgcccctcatcgcaaaggaagtgctaccgtgctgcctcgatgtcccccttgggtgccatccctgaaacatcgaacctcccatacctcttctccagccgtccccctcatcctcgttccccgcctaccctctcttcaacttcattcattcatccaacattcgctgggggatttctacattgacacgccccggacagaagcctggggtaaagatgatcaggaacacgttccctcccgctaagcg

SEQ ID NO: 180700 - DNA, 793 bp, Homo sapiens
aaacctacactttttaaaaattttttgttgttgttgttcttgttgttgttgagacggagtctcgctctgtcgcccaggctggagtgtgcaatctcggctcactgcaagctccacttcccgggttcacgccattttcctgcctcagcctcccaagcagctaggactacaggcgcccaccaccatgcccggctaattttttgtatttttagtagagatggggtttcaccatgttagccaggatggtctcaatctcctgacctcgtgatctggtctcgatctcctgacctcatgatctgcctgccttgacctcccaaagtgctgggattacaggcatgagccaccgtgcccggccactttttataaattttaaaatgtacaattgttatttactatagagttatttttatggtcataatacaaattatatatgagtataaataaaattcatttctaaactattaatattttttccaaattgttatatatttttctttgaacatgtggcctgtctgcctgcaaacatgcagactttttgattcacatagagttaaatatgtattagtctaaagacaaactttaggtgtaagaaaattatggaataagtgtgtgtgtgtgagtatgagtttgtacctattttcagaaaagaacaatatgggaataaaaatcattttaataaggtggctactataaaactaaaaaccttaaaaaatgctgaaagcaaatgtatactttgtgctttgtattgaatttattactgtacaatccatgacttacagttctgaaccttttcatg

SEQ ID NO: 180701 - DNA, 572 bp, Homo sapiens
caagaacggagacgactgacaatagatagatacacatgttatataagttaatattttgtttgtaaacgatgtctagctgccttgacctcccaaagtgctgggattacaggcatgagccaccgtgcccggccactttttataaattttaaaatgtacaattgttatttactatagagttatttttatggtcataatacaaattatatatgagtataaataaaattcatttctaaactattaatattttttccaaattgttatatatttttctttgaacatgtggcctgtctgcctgcaaacatgcagactttttgattcacatagagttaaatatgtattagtctaaagacaaactttaggtgtaagaaaattatggaataagtgtgtgtgtgtgagtatgagtttgtacctattttcagaaaagaacaatatgggaataaaaatcattttaataaggtggctactataaaactaaaaaccttaaaaaatgctgaaagcaaatgtatactttgtgctttgtattgaatttattactgtacaatccatgacttacagttctgaaccttttcatg

SEQ ID NO: 180702 - DNA, 180 bp, Homo sapiens
atgactcccattttacaggtgagtaaactggcacttgcagatgtcaatgaatttgcccaaggtcacctatcaatcaatggtaaagagagaatgtgaaaaacaggcaaccggattccccttacgggcttaattaaaccctgtagatctcactgggccttcaagctggaacttcctgagagc

SEQ ID NO: 180703 - DNA, 649 bp, Homo sapiens
ctgggctcgaattcctgggctcaagcaatcagcctgcttcagccttccaatgtgctggaattacaggcatgacccaccacacccagccctacttaacttttgacacagattacttgctattgaaaaggtgcataccccgtgacaagaggaaacataggcttaaatttataagaagaaatttagtgaggataaatgccaagtcctgttctttatatcagaaaatcagttacttagaagtaacatgctgatttaaaagctgtttatatataaaaaaacactggaattttttagagcactcaaaagtatgaacaataatatgttgtctgacgtgtcattagtaagagcacactgacaagaatgcagggagaccgggcgcggtggcccacgcctttaatcccaacaccctctgaggtcgagacaggcagatcacttgaggtcaggagttcgagaccagcctggccaacatggatgaaaccccatctccactaaaaataaaaaaattagtcgggcgtggtggtatgtgcaggtagtcccagctactcaggaggctgaggtgagagaatcacttgaacccgggaggcagaggttacagtgagctgagatcgcgccactgcactccagcctgggcgacagagcgagactttgtctc

SEQ ID NO: 180704 - DNA, 434 bp, Homo sapiens
acttggagacaggcagcacagtggcagaatgggtagtgccgacatgaatcctggctcgctccctcaccaccggccatgctgagcacattattgacctgctgaggcctcagtttccccacctgtatcatgaggtccatcatgcttgttaggattaaacgtgatagtgtgcggcaagcactcaacacagtgtctggccataacaagtgctcagtgatccccagctgcagtttgtgtccttactgctgtgatgaggagactccatgggggagggggacaccacgtagatggcctgggggcacatatctgaatctgtgtcaagccacagacccacagaaagtgccctttaatttccgaaatcctttttgcccatttgtgaatatgggtggcatttgaacgctcatgggacagagagctgaattcctcttttgtgtttg

SEQ ID NO: 180705 - DNA, 534 bp, Homo sapiens
tcttcagcctctgaagcctttacattttaacaaagggaatttcagagaacgaggcttaagcttgggtcctactgatagttgatgtctggagcactctgttgaaaaggattctgaggcattaccaagaaaaagttgtgtgattatttggcaatgactttcaatagcatgacaatggacagtggtaagatatatgctatgtgtttgccatatctggcttaatacaaaggaatatatccctaaagacagagtatctgggacctggattggggtaagagtatagacacataaagattttgttgttgttgttcttgcatgtgttgaagagaagcaaagtggaatctagctgattatacacatgaatttgtatgctgtattttttttggtggtctttaacttactcttttattgccaagtgtaaatctggtagttcatatatatgttattaccttttacttactaatgtcttctacctaaggacttgtaagttgattttcagttcacatatctgacccttgtttttcttttcctttttgg

SEQ ID NO: 180706 - DNA, 348 bp, Homo sapiens
tatacaaaagtatttgcagatatgtgtctcaaatataagaaacttataacagttgtctctaggaaggaaaccaggtggataagggagaaatgtagaagagatgtttcactgtatatctgtgaaagattctgaattgtgtactatatattaactagtaaaaaattttaattttggggccaggcatggtggctcacgcctataatcacagcactttgagaggcagaggtgggtggattggctgagctcaggagttcgagaccaaagcctcgacaacacgatgaaaccccgtctctactaaaaaacaaaaaaaaattagctgggcatggcggtgtgcgcccataatcccag

SEQ ID NO: 180707 - DNA, 168 bp, Homo sapiens
gaacctgggctaggagtgaggaaggctgaagagagtggagagaaaaatgaaagataactctaaaaaagctaagagccattattgggtagtagaaacctaagataaacttctcactgcaattctcccttaaattaaattctcttttgtgtcttaatgtcagttagaggc

SEQ ID NO: 180708 - DNA, 215 bp, Homo sapiens
ggagggtgaggtagagagatcatttgagcccaggagttcatgagtccaggaattcaagaccagcctgggtaacatagcaagaccctgtctctactaccccccacagctgcagcaaaaaagaatcatgagagtcaaagggccatttttcttttttttttttttttttttttttttttttttttttttttttttatatttttatcaggaagaaaaac

SEQ ID NO: 180709 - DNA, 130 bp, Homo sapiens
ggtggttctttcccacttctgacgggctcaagaaaattttgatttttgtcatttatccagcttttgcttcgtggtttgactgagagtgccatcctttactggtttctacatatgaaggagaagggttgtt

SEQ ID NO: 180710 - DNA, 524 bp, Homo sapiens
tcacagactgctgtagacgaggtggtgaagagctcagacagacatggaacccagccctggacatgaagcagatggcagtgttagccacagaaatcacaaagaaccacacacctacgtaagcacaaccgtttctgctcacccgtctcggcattgtgcaatcacagttggcaagacggctcatcgaatttggaggggaagtttggaatggccagacttaaaacgcagactatgtggcaagcagtaataaaaactcactgtcgggacagggggaatacctcagagaaggaagcagtcatccttgacttatggagactcagagcagggggcctgtcagactgttgagtgggacacagatgtgcccatccatatatgcctgcccatgaacaagtaagcaaggcgtctaatatgaatcccaatcaaaagacacaagtgcagaaagctctgccctcaggtagattcatagctgagcctgcttcctgcatgggcaactctatctacatgaggcccaggacacatggcagtgg

SEQ ID NO: 180711 - DNA, 590 bp, Homo sapiens
tgcgtgctcatgtacatttatcttcaaaagtacacacaagtgcacaaaatcatttaaaacaatttctgactttccatcttctctgtgttattcatcttaataacatcattttgtacttttttttgtttgaaacaatttgagaattatagaaaagttgcaaaaatactagagaacttttgtctttcatccagtttcctcaaattgttaaaatttgtatctcatcttctttactatttttttccatcatatgtgtttttttcttctgaggcatttaagagtaacttgcagacatgatgtccctttatgcctaagagactatgctactagcattttctaagaacaaagacattctcttatctattcacacaacaaagatcaatatcaggagattaacattgatgcagtatgttagctaatctgcagatcttgttaatatttcaattgtcccaataatgtcctttatagcaaaacaataataattattattcattactaaaatgaagaaagaaaaagaattgatcagggtcccatctgggattatacattacatttggttcttaggtctctagtctgctttaatctggatgagt

SEQ ID NO: 180712 - DNA, 333 bp, Homo sapiens
gttgggagttacacctctaaagtgagtgagttctgattcactcattcaataaaaataagactttttgtcagtgaaaaattagcagtttatcccattcttttaatttggtgagaaaaccccagtgaccatgtccttgttccaccaattcttttaatgagaaaagtcaccgtttaggaaactcttggcttcatatgaaaattgcataacatacaatgtcattgaatcctcccagtcatgctctgaggtaaggagtataatatccatgttacagttgagtagcctgagacttggatggtcattgcgtggatcctttccagtttcttcagtctaaac

SEQ ID NO: 180713 - DNA, 361 bp, Homo sapiens
ctagccaacgaactttactgatggaaaaaacagatgtgattaaccagaaaaaacaagatgtttttgctaaaggtctataaagttagtttcaatattgtgttgatatttacgatagagaagtataaacaagaacaaagctattgtttgtggccaagcagagaccaattttacaagtatgcctcaacttaattagtatataagttccagtgagaattgtatgctctgaatggactcattttaagtggattataagaacacaatcttctaaataaacagtggaaatcattttgattatattctattttcagttggatgtgcatgcacgatagagatttatgtgtacaaagttgaaaggttgaat

SEQ ID NO: 180714 - DNA, 199 bp, Homo sapiens
aattagcaaaaactagagagagaattgtcaaacagtgccctattaatacaagttctatttgaaatacaaataaaaggagaagtgatgctggaagcccagcatcaaggtgtcaccaagtttggttttttctgagacctctctccctgacttgagatggccaccttcttgctgtgtcctcccctggtgttttcttcatgtg

SEQ ID NO: 180715 - DNA, 425 bp, Homo sapiens
caaatttctcaatgtgggtccatgatgagcgtttgaaagggaattcagtttgctgggaagtgaagatacaagctaccaagttaaggcatcatgataccaaaaaacacaaaggaaccattgcagggaagtgctgcatgaaaaatcttaggtttattttggcagtttgcagacaccatgtgaattgagacacggagacaagggccatgtaatccaagtatcacctgaaattagtagaagggacaaagctgaggatctgcatcagaacaaagaaggaatgtcttcctcatgtttgggtctatagaagacattaaagaaaacttccagaaagtgggtgtgagccaccgcacccagcctaatttttgtttttcaaaacaaaaatatttttgttttgaaaatttttgaaatgtttaatagcgacagggttt

SEQ ID NO: 180716 - DNA, 604 bp, Homo sapiens
aatgataaaagaaatgtacacaggttcctacacacatgtgtgcacatgcccatgtgcacacatacacacacacaggccgtcctcagtacatgggaaggtcagttctccaatgtagcttctttcacaagtcttaaaagaattcccctttcgatcatctatattcattcctcacacagtcctagaagatttgtcaaagtctgtcagttaaggcaggaaaaagccctagagctaacagaagtctatgtgtcagcatcgcttaagcttcagctttatcatctacactgtcattttcacactgcagtgtaacttacttgtttataagtctcccacctcaacatatagcaggtactcaaagaatgtttgctaagctgtaaagacctcctacctctaaggtcttttccaggcctaactagtccatggagtttggatctgatgaatcccaggtgggactccggctgcaaagtggagcttgagcaggggaaggtgatacgtgagtgtctgatattcccgttcctatctcccttagggatttggtttgggagcccgccgtggttcttaattagtggagaaggcaggcaggacataagaccttccaagcatgggg

SEQ ID NO: 180717 - DNA, 397 bp, Homo sapiens
cataaaaaggcaggaatgtaaggtcctctgagctggccgcatcatgatcaagccatcgtgacatccccctgcccttgtgataatgtactttgtgatattcccccacccttctgaatgtactttgtaggatacatcctccctgcccttgtgaatgtaccccacccttgtgacaatacaccctccccacccttgtcaatgtactttgtaacatcctccccgcccttgagaatgtactttgtaacatccacctcctgcctgcaaaaaaaattgctcctaattccactacctatcccaaacctataagaactaatgataatcccaccaccttttgctgactgttttgtcagactcagcccgtccacacccggatgtaatacacagccattgttgctcactc

SEQ ID NO: 180718 - DNA, 585 bp, Homo sapiens
tttctatctgtaaccctacttgcttcacagcagcagaatgaattccggactacctactgaataattcctcttggacactgcaaaggtcattctttccccacaaacctgctccttattctgagttctccatgaatggtttttgcaacttgttaaccatccaaggcagaaagacaactgggcatcatccttgattccttcttctccgtcagtccccctatatctagtcagtgaccaagttccaaatttattgcatatatggtattctcatttcattcccactgccttaacccagatttcagtatctactttataaatagcctcctaactggtctccctgcacccagttctcttttccaatctatccatcacactcctttttttcttttctttttgagacggagtctcactctgtcactcaggctggaagtgataccccatcttataaataattaattaataaagtggtatctaatattgttggcacattaaaagaacgtcaaatcatactcaaaatataaaatccactaagaataaagagaagtgatgtctttaaagtgtctacagctgtatgagcttctgatagcc

SEQ ID NO: 180719 - DNA, 481 bp, Homo sapiens
agaatgaattcagcacccattccttgctttttaaacctcaaaagttcccgactcagtgaaaggcttccattttgctatcctcttctctgtctgcattttactctgtaatttattgacatagaagaggcctcgtgcaggctttcattgcattagtccacttggaagtcttttctccaatccatttgacctcaagctgcttttttgctgctgctgcatgtaagctagactgatccagctcaccttatgctgcttttgaaggctgaaaagccctgtgaccaaatgtttagcaggctgttcagacagtggactgatggtttgatctaagtccgtttcctgccttacacacacctccccatcccccaaggcaaaggtggaaaacccagcaagttacataagttgttggagcagtccagatggctggctgctagcccaggcaaactcgctttggagcacttggggatgcctgcactggcaatgaaac

SEQ ID NO: 180720 - DNA, 596 bp, Homo sapiens
caggagcctctggaagtgtcacttgcccctttccccaaaaaagcttccataccatccccctaccccagtccaccgcccagagatggtggaggggtagtgtgggggcggcagtggaatcagttcaggctggaggaaattttggcccagcatttgctaaagggctgcagctagaagcaggtgggtggagagagtgggaagatagtagccttcttaaagggccagttgcaaaatgatccagcagactagggagctgctgttgggggagaagcatggtttctgagagccactgaacagcaacacagctctcttactgaggcaggggccagccaggggtcctggcagctggtctcctgattcctggggagcctcatacttcaggcacaccctaccccctcacagtggcggtcattcaaagaatgtggtcggtcattctcatttgccagatgagaaaacaggctcagagaggggaggggacttacctgaagttacagttaatgcgaagcagaatcagggcagaaacctaggactccagactccaggccagtatcctttccaggaagccacccctgctccttaaagccaagctcagcctctta

SEQ ID NO: 180721 - DNA, 342 bp, Homo sapiens
agacggcagccatcccagcccagagtatgttggagtctggctaggtagatactggatccactcctgtgtgaagatctgcgaacttgggaatttcctcaactccactggtctaaggacaccagcaaaagatttggtgggaaggcaaagtcaggaggctgggtgaaccacaaggcaatataacaggaactgaaagtggctgagaatttaagtcatacagcccagggatcagctagacctttctttttaatcattttccatacagcctgcctagcaagtctctaatagcactatgggggggggtaataataataataataataataatgataataggccgggcat

SEQ ID NO: 180722 - DNA, 118 bp, Homo sapiens
cttttgttaaatgtatttatttaaaataattttaatactgtggcaaaaggcatccttgcgaaattgcatttatctaattttttgttactgatgtttagaaataaatttgctaaatttt

SEQ ID NO: 180723 - DNA, 531 bp, Homo sapiens
ttatcctcaatccatttatgctgtccattttcctgtcttctgttggttgctaaggagattagtgtgaaatggggtccctgtcctaaggggttaatcattttacactgctcactccccacagaagtcataatctgctgtgtgtgaaatcatgtttagttgctgtgaaaatgattacgatgctccgaatggaacatgatggcctcaggtgggagataagtattcagagcagatggactccgagaaaatacaaaagtacttccaggaataatgctcgctccgaaagtagagtgggatgaagagatggtacaaacaatatgtaagaaaatatgaaaaaaaataatttggtatatggaacttgattctgctggtggatttcccagctgtctccttttctgttctttttttttttaagcctatcatagtactcttggagtacctaaaagataattatcaaaacccagaagatggtgggaaaaataagtatgaaagatggaaaggagttgtcacttttcaatgaaattcccaagttac

SEQ ID NO: 180724 - DNA, 354 bp, Homo sapiens
ttattttcccaaatccttctcaaggcactttctcatcttcattttatagtttggacaactgaaccaaccaaccagccaccatgacctcctaattggggtctcattgccagttgattccctgagtcagtctgctccctgctggaatggtcttgggttgactcctgatgacagtagtgtgagcctggaggctactctgtgaacacatttctccccgtacccttcatttaccaaactttaaccctcttgtcctatcatcatctttcccatttttgttttattttgttttgttttttcttcagcctgggcaacagagggagactctgtctcaaaaagcaaagcaaaacaaaacaagca

SEQ ID NO: 180725 - DNA, 557 bp, Homo sapiens
ctcagtgatccactgcctcggatcaagtgctgggattacagttgtgagctaccgtgcccggccatgttcattttttataaagacgaggtctcactatgttgtcccggctggtctcgaattcctgggctcaagggattagataattctttctctctctgtttctctctttctggtcaactttgttgaagtaaaatttacatacaatgaaattcacctattttaagtatacaatttgataaatcttgacaaatatatatatacacacccactttcatcgctccagttgtttccttggtgcccctttgcagaccctgccctccttctggtccctgggaactactgatctgctttctgttactattgtttaatcctttctattaatagaatgtcatctataagtggaatcttatacaatatagtccttttttggtctggcttcttttacttaacataaagctttgaaattcttctatgatgttatatgtttctttttattactgagtagtattccattgtatggatttaacatttgttatccattcaccagttggtagata

SEQ ID NO: 180726 - DNA, 449 bp, Homo sapiens
ttatagactttatttctgttcttatgtgacctctgtgacactgtaattatttatgtatttttcaaattctatttaggacaccagtctctcccagatgatttctactctatattgtggaagttctatttgctggtgaagctaagaggactgaggttccctaccctatttgtagagcagaagctctatcccaggcctggtaggctgacaatatttagacttcaattgctcccattccagcttgttcgtagattagagattctgcaacagaaaaggcaagtcaagaagaccaggggctaacacctctttcccccagcacctactcatacagcaggtgggtatcactgtaggagaagtgggcccttgtgcagaagttctgcccaggagggaaggaaggcctgaagaatgaagagctccaaagctctgcctgagaggactgactttatttggaa

SEQ ID NO: 180727 - DNA, 519 bp, Homo sapiens
aattaaacattgatttctactttttttaaagtttttttcatagttacataaatcaatcactggttaacaatgtattacttgagatagcaagcatagttaccaacaccacatcttccagacaatattcacaaagaataattacaccaatgtcagaactttatggtggcagattctcttcaaaaagcatgtttagataaaaagcaaatgacaaattatcaaatccttccttctctcctttttcagctctgtaagaaaatagagatttgtggctttttattttttcatgctagtatcatatagtatcactctagcatagtggctcagctcatgggatttagagtggccaactcacagcccttgggcaagctagtaaatacactgaagcctcagtttcctcatctacaaaacagaaataacaggacctaactcacaagggtccttccaaggattacatttaattagatgatccatggaaagagctgagattcatgcctggcagtaagtattcaataaatatta

SEQ ID NO: 180728 - DNA, 367 bp, Homo sapiens
caattttcagtgaacctggaaagttttgcctatggtatcaccttcttctcaatatcttatcttcttcctaagggacacacttcatttattacagtccattgaaacccattttccatgaagagtaacctgaaatggaagaaaattccagagtcataattttaaattaagttagcttgatggccttccaatagaatggaagaagcaaagaaagatgttaaattctgcctccctttttttcctcttcctcaaacagctcagtcctgcctttgtttacttaaaatgtatccaaatatttatttctcagtaggtttatggggtatttttaaggtatttgagatgttgtccagcgtagtatatttttgtctcc

SEQ ID NO: 180729 - DNA, 406 bp, Homo sapiens
tctggcgtaagttgatattacacttccctcctgttttccagcctacgaaatggggctgacatctgttcctttctttcctgggtatttgtgagagtaacaagagattgtgtctccaaagatgtttggaataacttcacagacagtattttaaatagatatcaaagtcagaaaaaaatcagataaatatgtaatgatacaaaaattcagagaactgatagctgtggtaacattgggaccatctgtgtgcactggctggccttggactcctgtgtcctcctttcccctgagtggtggccaggccctgttgggggaagagagttgggagtctgatggttaattcccccagtgctggtcaggccccatgttgggggaagagagtcggaagtctggtagttgattcccccag

SEQ ID NO: 180730 - DNA, 106 bp, Homo sapiens
cctgataaagcttcaatgagagtggaggcctaggccagtttactgccattctagtgttccttcactgcaccagcatctctccttgggcctcctaccaggttaccca

SEQ ID NO: 180731 - DNA, 312 bp, Homo sapiens
tatgtgctgtattattttggtgagtaaaacaaaatgagaatggcaagaggaaggctggagagctaagagtgagccatctcatgtagggcttgacagctataataaataaaaaatctagactttatcctaagaacagagtcattgaagagtttcaagcataaaagtgtcattattacatttatgttttagaaatattactttggctgctatatgcagaatggtgtagataagggccaatggtgaatactagaagagcagatagtagactattgaaggaatacaggcaagttaatgaaatagggagaattaatg

SEQ ID NO: 180732 - DNA, 443 bp, Homo sapiens
caaagaaagtaaaatatctctttcattaatatttgttaaatattaattacatgttaaaatgatattttggatatattgagtgaaataaatgattagaatttattccacctgcctctttttgctttcgaaggtggctgctagaacattttagattgtaagtgtggcctgcatgatatctccctctatgggacagcactggtctcaattgtagggtcactgaggacatggtgcttccctcctggtggctttcggatagttggtgttcattgaatgtcttttgagtggacaaatgagtgaatgaggttgacgcataacacgtggtttccacttacctactatgggacctagacaggctgtttcacttctcttatatctgtaatataagcagagtaactggagcccttttgttcacctgcagttggatctcagcgattagggttagg

SEQ ID NO: 180733 - DNA, 153 bp, Homo sapiens
aactcagggaagattacttaagagtgagctgcgagagaaggttgactgtgaaacctaggaagaggagctgcggccgtctgcatagaagatagtaataacttgaagccggctgtaggagactaaatcacatcaatttatggtacctctgagtag

SEQ ID NO: 180734 - DNA, 365 bp, Homo sapiens
ggtctcaagagaaatgctgaaggggcagccctgcttccggctgcttagcagagtggtggcgacagggaaacccaggcacagattgcagatcctccgcccagggaggatgaccacgataacaagactgtcttacgtttatttagaatcttcctttgccaaggcaatcgtatttatagtagttgctcattttgagtataactttttaaaaacattttgattttctgaaatttggatgtcttacaagcaacatgaggacttaatgtaaggcttttttccacctgaaaatttggtgtgaattaaaattgatggtgacttggaattgaggaaatacgttttattacatcatttaatctctaaataatctg

SEQ ID NO: 180735 - DNA, 408 bp, Homo sapiens
acacctggctcatttgacaaagaaaaggatggaatgggcagaggggagatggtgcagcaggtggagaattgggttcacccgacctctgccagtggcatttgacagtgctgagggctcccccttctggaaacactcttttctacaggctcctgtggccacacttcctgtgttccttctacttctctggccgttctttcttagccttctttgctggcttttccttctcaatctggttcttttccctatcctctctcattacatattctatctgctctcacctattctcacagcttcaattaacatctataaaccacgattccataattcaactgtagacaaaaggttatcctctgagctctagacttatataccaaatagtctgccccatgtctatgcttggatggctca

SEQ ID NO: 180736 - DNA, 376 bp, Homo sapiens
acacctggctcatttgacaaagaaaaggatggaatgggcagaggggagatggtgcagcaggtggagaattgggttcacccgacctctgccagtggcatttgacagtgctgagggctcctgtggccacacttcctgtgttccttctacttctctggccgttctttcttagccttctttgctggcttttccttctcaatctggttcttttccctatcctctctcattacatattctatctgctctcacctattctcacagcttcaattaacatctataaaccacgattccataattcaactgtagacaaaaggttatcctctgagctctagacttatataccaaatagtctgccccatgtctatgcttggatggctca

SEQ ID NO: 180737 - DNA, 218 bp, Homo sapiens
gagtcactttctacactgttctggagggcacaaattagaacgggtcagggggaagtgcagtgaggaaggagaaaaacacaaccatccaatatgattttctcagcaaaagagacaatatttccaatgtctagatgcctatttaattattccacttaagttcattcttagaggggtcttgtcaataaagtcaacccaggctcttggtgtgtaacagcgtt

SEQ ID NO: 180738 - DNA, 215 bp, Homo sapiens
tctgaaatgtctgtggttttgcagttcccatgtccacaaactcacttggttgaaaatagttcaaaatatccaaagcatgagggagggagtgcctgcttttcttaaaaaggaaggacttgatttcatctacttaaaaagccacccaaacctagaacattttccgcaagagaccccctgccccccgcctctccagaatggctggagagtctcagcac

SEQ ID NO: 180739 - DNA, 703 bp, Homo sapiens
cacgtgcagtggctcacgtctgcaatcctagcactttgggaggccaaggcaggcggatcactcgagctcaggagttcaagtccagcctaggcaacatggcgaaactctgtttctacaaaaataaaaataaaaaattagccaggtgtggtggcacacgccagtagtcccagctacttgggggactgaggcaagagtatcgcttcaacccaggcggttgaagctgcagtgaaccaagatcatgccactgcattccagcctgagtgacaaagtgagatcctgcctaaaaaacataaaagataaaaaataaaaaaattagaaaaacagaaaaaggtcatttcttgtttttgttttctaagtgtatgcacacacacatttctcaaatgccaaagtttgtgactaattcactctttcataaagtaaggctgattcagggctaccctaggcataaagacagtctcactcccttgcgttcccacatgctgtccagagcagccagtcaagagtggggtcagagcaagcacaccgtgaactgctcatttcacacaaaccttcttacttgtgctgccacctgagcacatctctaggggtatagaggatcaggtgaagaccctctgtcacaggtgttctggagaaaaagcccatgacatcttgtaccaactagtgtgtggagaacttaaataagatttattaggtaggtgcaaaa

SEQ ID NO: 180740 - DNA, 1007 bp, Homo sapiens
gggatccagaggaagagagtgagtttcatggagaagggatttactggaagcacttgcagtaacaacaagcaaaagctgccaattaaaaaaaaaaaaaaaaaaaaaattgtgcggccggctagggccacaagagaaggttcaaacccaatcggtgggcgccgcggcccaagaggtaaggtggaccttggcacaacggttgacccaagagaactcggtccatgacacaggtcgggggtgtccccccaataaaaaaacggcggcgggggacacggagcgcttctcgggcagcactcacaagtgggaggtccgaggggcactacgggtcctacccaaacagaggcgcccgagagcgacgtcggggtattaaaattaccggccggccggtagtgggagacacacaacgaacaaaagagaaaaactaacatacgaaacaaacgaacagaacagcagaacaagaagccagaccaatcaaggacagacaagaccagagaacaacaagagaacagcacaaaacaaaaaacaagcagacaacgagacagcaacaagacacagaagatcagcacacgacaacaaacagaataaatacgacaaaacaagaaagacgaaaatacagcgcaaaagaacagaagacataaagtaaaacagcaaaagggaggaacgaagagatggacagatagcaaaaagtacgggcacaagagaggccagaaaggagaggaggcagagacggagagagagagaaagagcaagataagaagagacgaaaagcaagacagcagaacaagccgagacggaagagaaaacacacaaagcagaacaagcgagagagcgacaagaagagagcacagaaagagaaggaacaggcaagaagagagagaggacaagaggagaactccagagagacaaagaagacaccgagcgcgacagaaggaagcacaaaagaagggagaggaagaaagagagaagagaaaggggagaatagggaaatagaaagaggagaggaaagagag

SEQ ID NO: 180741 - DNA, 228 bp, Homo sapiens
actcagaaacataaggagagaatgaaacacttggtattcagaacatttgtattctttatataaaaactcctccctctgtgcagctgtgagctttttctcttaagcccaaaggccttgttgtacgtgacttcataggaagctctgcctggggtcctagcacgggaccaggttagacactgaaaaagtaaaaccaagttcatcatcgtcactaccaccactgacaatgtt

SEQ ID NO: 180742 - DNA, 164 bp, Homo sapiens
acatagtaacatcatgtttctcagaggctgtcacgtcctctagatatttctacctagagatacagtaaacgggctcctctgctgtgtaccaccagcaatattacttgtggtctaaactggctggtcttcatcactggttctggtgctttaagtttttttatatt

SEQ ID NO: 180743 - DNA, 204 bp, Homo sapiens
ttccctacagagactgaagtcatatcagtactgagaaatatggttatgcagagatgaaaaaagaatatttaatatcaaggtaatctgttaataggatttaggaggagagggcccaggtctttgatcctgtaattgatgccaaacaagagctatgtggtaatgttttggataagaatttaatgcattttgtatttgttgatatgt

SEQ ID NO: 180744 - DNA, 303 bp, Homo sapiens
gattctcccagatcagcctcccaaaatgctaggattacaggcgtgagccactgcgctcagccttcagtagctatttttacttcagaattactagtgaagaaaaaaagaggatctttgtgaaatttctacaaagactacccagcactgatgaataaaaaaattaattgttgtatttgttaccctagcgtaactacaaccacaatgagaatatgattcatgaatagattataaactcacacaacacagattattttcagcaacagccaccagcttttaagaaaacatctaccaaacaacaacatc

SEQ ID NO: 180745 - DNA, 210 bp, Homo sapiens
cctgcagagttgagggggtcagcgccgggtggagttgccgacgggcggggggcgtcactagtccgcgtaggcacctccggggtccgcaggcgaggtgggcgtgcgggctgaggcgggtggatcacttgagcctgggagttggcggttgcagtaggccaagattgcgaccctgcacttcaacctgggtaacggagtggggctctgtcccgc

SEQ ID NO: 180746 - DNA, 522 bp, Homo sapiens
aatattgtgtgtgatgaaatgggatgcatgcataaagcacttctacataccaaaatccagtagtttctaaaggagaagtatttgtgcggttgttagagttgcaagctgaactagttatttctttcatggaacatgaaatgagtgaccaacaaactatgattatttagatttgggtatttggaagacatttttcttaaggtgaattaaatgagactgtcacttcaaggaaagcaacttaaggctgggagcagtggctcacacctataatcccaccactttgggagggcgaagtgggcggatcacctgaggtcaggagttcgagaccagcttggccaacatggtgaaacctcatctctactaaaaatacagaaattagccaggcatggtggcagatgcctgtaatcccagctactcggggggctgaggcaggagaatcgcttgaacccaggaggcagaggttgcagtgagcctagattacaccattgcactccagcctgggcgacaacagcgaaactccatctc

SEQ ID NO: 180747 - DNA, 585 bp, Homo sapiens
gttgaaggcggtctttggccatagaaggcggcctgggtctaggcgtggaaacaaatagcattcccacttctttttgtttcaacaagcagttttttaactgaaagaattgttctttttggcaaaactgctcagaggcagcttcccttttatgttcaaattaaagggaaatgactctcttcccttggacttgaggactgtgaactggagctgtgcgtgttctgtgataaagaaggaggtgtgggtggattttaatcagagctgaactgagtggtggagtgagctaatacacaggacaggttatgagctgctggaagtaagaagtggctgtcaggcatcactcatcaggagagacccatgggggccaggattggtctcactcaaaactgtatgcccaaaaccagtgcctgccatgtaggaagtgctcaggaaatatttgttgaacaaatggtaatacaattaatcactgaagaagacatcctccttcaccatagacagatccttctaactttccctgctgtttccaagtagagcccctgtgggaagaggactcactgtcatgcctcagcttggtggagtttcaccgga

SEQ ID NO: 180748 - DNA, 537 bp, Homo sapiens
aggcctgtttgaaggcagaagggtgttgcaggaaagaagactggcaattttagagaagtaccacataaatatggattcaaagaaacagaaaaaatctagaatcttgctattcaaagtgtagctctcagacattcaatatcacctgggagtttgtgagaaatgcagaaacctgtgccccaccttagacccacagaatcataatcagcattttagcaagaccacaggtgataggacactgtattttcaagtttccacacacagcattgatttttttgttcaaacagttattttatttatttattttttgagacagtctcactctgttgcccaggctggagtgcaatggcacgatcttggctcactgcaacctctgcctcccaggttcaagcaattctcctgcctcaccctgtcaagtggctgggactacaggtgtgtgccaccacactcggctaatttttgtatttttagtagagacggggtttcaccatgttggccaggctggtcttgaactcctgacctcgtgatccgcccgccttg

SEQ ID NO: 180749 - DNA, 320 bp, Homo sapiens
aggcctgtttgaaggcagaagggtgttgcaggaaagaagactggcaattttagagaagtaccacataaatatggattcaaagaaacagaaaaaatctagaatcttgctattcaaagtgtagctctcagacattcaatatcacctgggagtttgtgagaaatgcagaaacctgtgccccaccttagacccacagaatcataatcagcattttagcaagaccacaggtgataggacactgtattttcaagtttccacacacagcattgatttttttgtttctttgagtccatatttatgtggtacttctctaaaatgaccag

SEQ ID NO: 180750 - DNA, 440 bp, Homo sapiens
actgaatggttggttggtttgaatagggagctgtaggcccactgtgcactgacattaattgtaagagctagagatgggctaagatcaagcttatgggatactttgataaatcgtaactaggaggccatatgttgatatcattccagccaatagtcaactggtcaatctcagaaattcttaaaaacacatacagatgttgcagcttttttcctgaagtacaagccaactgttaaaatctttctctatgccagtactgaagtattttgagaacacacacgcatgttcagtagtctggtaccagaattaatttccactctgggttcgattctgcacacacatcaccctctggttgctttcctaacttggttctgattactggcctaactcaagtataaagaaatgaggggacactattattcatcttggcaagtgtgaggttc

SEQ ID NO: 180751 - DNA, 812 bp, Homo sapiens
ccattgtggtagaacttttagtcatataacaggcctgacgtaccatcagagaaggcatactggagagatgccatacaaatgtattgaatgtggccaggtctttaattccacttcgaaccttgcaaggcatcggagaattcacactggagagaaaccttacaaatgtaatgaatgtggcaaggtctttcgtcatcaatcaacactagcacgtcatcggagtattcatactggagagaaaccttacgtgtgtaatgagtgtggcaaagcctttagagtgcgttcaattctggttaatcatcagaaaatgcatactggggacaaaccttacaaatgtaatgaatgtggtaaagcttttattgaaaggtcaaagctggtgtaccatcaaagaaatcacactggagagaagccatacaaatgtattgaatgtggcaaggcctttgggcggttttcttgcctcaacaaacaccaaatgattcattctggagaaaaaccttataaatgtaatgagtgtggcaaatctttcattagtcgctcaggcctcactaaacatcagacaaaacatactgcagagagtcttaaaacaaaattcaatgtggaaaagcctttagatgttctcctaacttctgggttcaaataattcatacttattgatatagcttgtatatttgtcacttccgtctgaaatctcatgtggaacttttaatcccctttattggaggtggggcctggtgggagatgattggatcacaggggtggatttctcaagaatggtttagcaccacccgctttttgctcttcttgggatagtgagt

SEQ ID NO: 180752 - DNA, 283 bp, Homo sapiens
ttggtcacatgctttcccacaccctccacgttgagtccatcaccaagtcctgttgattctgcctctgaagtatcttcctcctctggctcttgcccacatgccagcccacagtgctggcataatggaccctcgtggcacttctgctcagtccccacagcgttgtcacagtgactatttaaaatcataaagcaggtcttgctttaatctccttgattctcgttgttcttagagtaagatttagaaattctcaacgtggcatctgtgtatcagtccttttccagtt

SEQ ID NO: 180753 - DNA, 1179 bp, Homo sapiens
  misc_feature (1)..(1): n is a, c, g, or t
  misc_feature (3)..(4): n is a, c, g, or t
  misc_feature (75)..(75): n is a, c, g, or t
  misc_feature (791)..(791): n is a, c, g, or t
  misc_feature (963)..(963): n is a, c, g, or t
  misc_feature (1178)..(1178): n is a, c, g, or t
ngnnagataaatccttccggatcacggggctgccacgggagtggcttccaccacaccatctcctgtcctgggtgntgtggggagatgagtctggatcctacctggattctgcctccaagctgggggaagaaagctcccatgttgtgaggcataaaaaggcccacatgtcaaagaactacagcctgccagcgaccacgtgactgagcttggaggtggatcatccctcagggaagccttgagatgacagcaggctgggagggatgctcagccaggaccatgcagccatgctgctccggcattcctgaaccacagatgctgtgagatgacatttttttccctctacatgtgtcagcacttcccagatgtgatgatggtatttgaaagagcatgatctggaaatcctgagccgtgctgccacaagaaaatggatgcacagaggacaaggccaggcagcgcaggtcttcattacactgagactttgcctgagtcccatggtgccccagtgccctggcctgggcacatcagcactgccttctgtccaggccccatgagtctcagatggtggaccctggtgacggaaggctgggtagatgccatggacctttccataggtcatagccacagctgagcacttggtgtcttactactcagtggagaggagaagtgtgctgaagggtggtaagagagtgtgtccaggggcccagaccagagtgggccatgcctcatctagagagcaagcatcttccagaaaggagagcccttgggtccttttacagaagcaatcagaaaancatcgggaatctcccagaagactgaatgtaagaggacgaagggtccgggcacagtggctcattcctgtaatcccagaactttgggagactgaggtgagtggatcacttgaggtcaggagttcgagaccagcctgaacaacatggtgaaaccccatctctactaaaaatacantattagctgggcatagtggcgcatgcctgtaatcccagctactcaggaggctgaggcaggagaatcgcttgaacccaggaggaggaggttgcagtgagccgagattgcatcaccgcattccagcctgggcaacaaagcaagacttcatcacacacacacacacacacacacacacacacacacacacacaaacgaaacaacaacaacaacaaaanc

SEQ ID NO: 180754 - DNA, 231 bp, Homo sapiens
ctccctcactggattacgtaagcttcatgagaacagggactttgtccatttcccatcctagtgcctgtcagtgggcacacaatatatacagttgttgaatgagtgctggataaatggatggggagggtggtgagaagtgaaacttgaagactccagaacagctatcttgaaggatcttacatagggaagtgataaagttggttttgtatttgaatagatcatatggctgca

SEQ ID NO: 180755 - DNA, 164 bp, Homo sapiens
atagctggcataacatcacacagctggcaattggcagtgaaggcattgaatctacatctgtttgaaacctattaaatattacaaagtctgagtacaaacaaggagcaggagtaaaacaggatgctgggagaaatattatgacacagatccagatttggggcttg

SEQ ID NO: 180756 - DNA, 524 bp, Homo sapiens
taaaaattcttcaagatatcccgttttcatgaaggaaaaggctctggtgcgttagcatgacatgaatgcctcaggctctggcctctccccacctgtcagccttatctcctggcatttttctacacccatatcattgggctcccatcatctgtcaggctccctcagtctgaaatagcctctttctccttctcctccagccatttatctaattcctgtttataggtattctaattcctgttaagactcagctcaggtatggtctccaccaggttttccccaagtttcctttccatattgcaaaacctttccttgcaccttctgtacactttgtttagatttctgtcaacatatagttctctgaatgtttcttatacaaaagcaagaacccaagcaaaatatgggacccccccttttttcttgccggccccggggccccaatttggttttttttttttaaagggctgccgggggggaatttttcggcctcctgccccgggccttttccccggggttcggaatttaac

SEQ ID NO: 180757 - DNA, 692 bp, Homo sapiens
ggggaagtgtcaaagaatttgaggagatgaaaaacttcaaatcagtcttttttaaaaaagtagtcaaaccagtctctttttaaaaaagtattcaaacctttcttccatcccctgcttgtaaactcacatcctgaggaataatgacttgaataattctaccagaatccaagaaaccaaattggttgggggcagggggtatgttgcttttattgtttccaagatgaagttctctgtgaaactagaatgtggttcctcttatagaaccctctggaattagcaaatgattcccaaatagtacaggtaagactcctgagtattaatgacttcattatattttgttgccgccatacttcaagtcaggatgcttgatgacttgatgtgatatgtgtgtgtctcctcccatccaccttaagataagcaataggcaatatccaattgtgtgagaacctgcattgttcacatgagcctttgtcctggataacagctcctgttcatcaatatgatacattgcactctgactttctacttctgtctttctttgtggatattcctttctcctctctgattgctttttcttcttagaccattactctagttgatagtgctaggttatcattggatcccatctccctctccaataagcctgtgattgatactaatcttcctcatgggacacattttataggatgcac

SEQ ID NO: 180758 - DNA, 554 bp, Homo sapiens
atcttggggctggaggggggagggcgggacactgctccaacattcttggcctcatactaagcactaggcagcggcagtccactactggaatactctgaaggtaaataaagcaataataaaggtcatatccatctcgactacagacaaaacaaagtcaacccaccatactaatgccccgacagaagaatatgcccatatcaatgcataaatattgtttatctcagtctctaatctgttctgtttttagtttagcatttagtcaaaacttgtatgatacacaaaaatgcaaggaaaaaaaatcaccccattaccaagagataaaatggcagaaccagaccaagacatagccccaatgtcaacaaacaagcaaactgatgggtttaacaatagactaggtaaaattgaaaaactggggaaggaggaaataagctagaaaaaaatcccctcaaactaaattagtattaggatcattacgggaagagacatggctccaaggatgaggacccaaagtcgtggaaatggataaaagtcagattcaatacatacttcaagtc

SEQ ID NO: 180759 - DNA, 788 bp, Homo sapiens
tccaaagagacccttgtggaaacaaaagcaaccacagtcaagctcacgtgtttgctctagcaaagaagctttggaaataagattttcatcctactggggttaagagaagcccatgagagtaactgggacttcccttccaggaatcagcatgcatatacagacccaaataatgtgagtaaggacagtaagaccaacaggagaaactaaagagacccacatatgcatgcaaacacaggtactctgtcttggataagctcttgaactcatgaacagagatgagttctcttcaaggactatggaaatcactttgcaagagctgttctgattatgaaaatctgaaccttacttagatatcctaacccagtcatcctaagggaatgcaacaaaaagttgcttctcagtcctcttagcacatctgaacacataatcactgtatacatgccaactctcgcataaaactggaaatttcttgagggaagaaatcatgtctgatacatgtctaagtcccctttggagagctgtaccactgaggccagcagaataggtggagcagtaagtcaactgtgcattgacccatcaataaattgtggagtttggaacttcccagtcaggagttgttaaagagtcctcacacaccccaggataatggcaaagcatttgggcatctgactcacagagtgccagattacacaggcaccagtcaaataagaccttgtccatttcctatatagtccccttctctgccccctccctagaaacagcagagcaagtaatacaagagggaagcc

SEQ ID NO: 180760 - DNA, 395 bp, Homo sapiens
atatatatatttctagacttcgggtgcctggctgtctagtttaagatgcagttagaggctcaaggaatttctagacaccttttaactttgcttgggtcactcctgccctggtcagtggccttaaatccatttgatgggttcaagggctccaggggaaagaggagatgggtgggagcagactctctgtcccctgggtgtgcccagctgctgggaggccgcgtccccctcgcccgttctggtggcgcctgcctgggccccattcactggctccttcccatcaccttccctgggcctggacagtcgtgctggctgcttgcacggtttgtaaagcacttttagttaaacgatctcagacacactacattgaagatagaactagatacagtctgagcccc

SEQ ID NO: 180761 - DNA, 356 bp, Homo sapiens
caaaagatgaagatgagagaagggagccaggggttcgtttatcaaccttgagaacaatcgggacgcataaaggcaaaaatggacaacaagtgaggcttggttttgaagctttctttctttcttttttccttagacggaatctcgctctgtcgcccaggctggagtgcaatggcgcagtctcggctcactgcaacctccgcctcccgggttcaagcgattctcctgcctcagcctcccaggtagctgggcttacaggagcgcgccaccaagcctggctaatttttttgtattttcagtagagacggggtttcaccatgttgtccaggctggtctcaaactccgctggcctccgccta

SEQ ID NO: 180762 - DNA, 349 bp, Homo sapiens
attcctgtggcttagtttgccctttacctctagcaacatgatgcttctcacatcctctctgtcctgtctgcttatcccctcttattttcccatgcagcctgaggctggaaatgacttcttattttgtacttgctaggttgttgttacagtctccgtggccaaaaggttaaggaaaaccaggaaatatttactcaagtctacctttttatcttagtatctattctaatatgttctttactcccttcatgtatttatagaatacacatacttcctattcatgttaactagcaaatgtgcagcagagcattgaattaaaggatgagtaattaacaaattgatggatttctca

SEQ ID NO: 180763 - DNA, 656 bp, Homo sapiens
gggtgagctaacactgcgaaatgtatgcaggtagagttgctcttccatttaagaactaagtcatccaaaagacagtcagtatttggaggacttgactcctactcctttttctttatcatcagatgggtgattttttccaaccatcacatttccaaaatgaaaatgtaacagcttgcaacaattgcaatatacttaagatgtaataatggaaaatgagatgttattgattggagagggaggagaagtaaccacaatggtatcatcaagtcagaggaagaaagaaaattaacagatgaattcttcaagactgagatttggttgccacccactacagatggcagagtcctgagtagcagtccccagacaaaacaagatatatatttaatatgtgaggcagtcctcgaaaggacgctccatatcctttcaattgcaaggggaattccgcattctagagtgcgtcgcagctaaaacttacatcctacatccattctatttgacaataatacacagacactcaactgtttgtcttgcacttttgtgtgagcaagacaatttcctttttaattccagtgaaacaaagtatacagtggagctattttaacaatacctaaatcaagccatatgtttttggagaggtatattaagtgtggcatgtc

SEQ ID NO: 180764 - DNA, 617 bp, Homo sapiens
atcatcaaaacagtatccctgaagatatacagtcctcttccagcaaaaagttccatatcattttttccctctggtctaggaatataacatcttccattaaaatattttctatgtcctatataccatgcactccaatctcactcctcataaacaaactctgtgcaagagggtgtttaatatgcaacactgtttcttcagatcatatttgttcctcaatttattttaatacagtgtctaccccattaccattctgaaaccgttctaacaaaggtcacccatgacagctaacctgttaagggccagatcttacatgaatcattttcagcacttatccttttttacctctctgtagaaaggggtgcctccttcttgaaatcctctccttccctgatttctgtgacagagactttcctggactttttgctgttctctggctaggcctgcatcagattgtcattgactttcagcctgccacccacactctgcctggtcttctgccctcctgccaaaaaagctgtgttctgcactctcttattcatctcatcttgttggttttgagatggaatgtcattagcatctgtattttcggccaagactaggacatttagaagccataa

SEQ ID NO: 180765 - DNA, 387 bp, Homo sapiens
ccgtttcctcagctgtaaaaagagagaattaaacttggtaagttttaaaattcctttctatctcaaaaccataaatatgaacaataagtctgtttttttaagtaatcagcagtataaatgtattatatgtaactttgtatggctaaacaacctattagaaattagtattttcccactttctctttatttttttcacaaatgatttgtgttgattttagaaaagttagtacaagtaaataagaagaaaattagttaaatttgcctgattatgctacctcggaaataaccaatattaacattttgggaggaattgtggatgtgtatagatataaacatatctaaaatgtaaaatggaattctattatgtataggatactgtcacctgtt

SEQ ID NO: 180766 - DNA, 185 bp, Homo sapiens
attaattaaaactacacagatacctttgaatagaggttcttccacagcctcccatctgcatctgctttaggtaagtaaaactacattcaaaataaaggcagagaccttgttttattcatatctttgttcttcctggtgcctaacacggttgtgtaaataaataatttattgaaagaagtggtttg

SEQ ID NO: 180767 - DNA, 580 bp, Homo sapiens
ttgacccccaggccttttcccctcaaaactaggcctctttctgtcaagtgtaattccttttaccagcagccagcaaactatggcctataaggtggcagcccatattttgtaaatcaggttttactaaaacgtagccacgcccattcatttaagtattgtctatggctgcttttgttctccaaaggcagaggtgagtagttacaaccacatggtctgcaaagcctaaaatatttactactggggtctaaacagaaacaataacttgcctaagcacagtgactcacacctgtaatcccagtgccttgggaggctgaaggtggaggactgcttgctgtttgagcccaggagttcgagaccaacctgggcaacatggcgagattccatctctacaaaaattagaaaaatagccagttatggtggcacatgcctgtggtcccagctactcaggacgctgtggtaggaggatcccttgagcccaggaggtcaaggctgcagtgagctgtaactgcacctctgcactgtccagcctgggcgacagagcaagaacctgtctcaaaaaataaaaaattaattaattaat

SEQ ID NO: 180768 - DNA, 223 bp, Homo sapiens
ggcttcagtcaagcgtagtaccaatttagcaacaattaatataaaataagccacagaaaccgacagtgccaccgcattctcctcccccactcaacccagcgaaacacacacataaaacaatgagagactgagtgacctcttcgagaccctctgtctgtttctcattagacctactgcatgtgatctgtgcttggccttggacgttgggtactacgctttggca

SEQ ID NO: 180769 - DNA, 333 bp, Homo sapiens
tctgtgtggggttggtggggagtctgggtgaacacaggtgggtgggagggttatgtatgcagacgcagaatccactgatgtgttggttttaactgagcagtgagatagcacgtgatccccaaggaaagcgtatgaaatgcgtgagctgagcagagggctgcaaggagcagcagcaccgggcaggcggtgaagatcaaacaggaccatgtatgcagacagacagtgcctacactgagaagcgtccccacatttccaccggagacaggctccttcatccctcttggtttactgtgtgttcccaaggaagcctctgcgtcacaaatactcattgac

SEQ ID NO: 180770 - DNA, 752 bp, Homo sapiens
ggggacagtgagtcctgaatggatttctgccctggaggtgagggcacccctggtgccagggagaggccctaccacagcacaaactgggctgcccttcctgacccagggatgaaccagcctgggcactcaggccacggctgtctccctgtgccaggctcagcgccctggggatgagggcgcaaagaaagagacggggccgacaacacaggcccaacagcaggccctgtgtctgggagcggcagtttctccccaagtaattttccacagtttggcttttcctccacacacaggcttgctcacagagttcagatggtggctggtcctccagagggttactctgggccactcacctgctcggtgaccccacctgcattgatttctgccctcatcactcagctgtctccagcttgcttctcaaagccctgtgcccatctcagggatatggcttctccagcccccagagctcacttcaccccatcagggcctggatcttgggtagttatgggaacccctaaatgcaccatcctctctgggccagggccaacatttctgttttctcagaaggatcaaagcccctttcctagccctgccaggaggaagcagttttgactcgtgcaaatatctgaagcccatttgggattttactttggtgagaaataaatacacagccatctgcaaatgatggaaatatgacttaagtaactttttggtcgaggctcctgggccagaggccagatggaaataagaccttg

SEQ ID NO: 180771 - DNA, 198 bp, Homo sapiens
tattatctaaataaataaacctaaatactagttcagactataaaatgagtctgtacgcttagaaataaagttagtcttgttaaattggtaagatttttaaccatggaaagattcccaagaagttgtgaaaacgcctaacgatttagattctgacatttagtggttttcattttcaggtaatttcagagtaaaacccgc

SEQ ID NO: 180772 - DNA, 212 bp, Homo sapiens
tgcatttgctgttcccaccaactgcaatacattccccctctgcaaggctcaattccttacttcattcaggtctgtgttcaaatgcagttttattagagaggccttctccaactcccttcctggaaatcacccacctgcccagaggggacctctgggttccctcttccctgcctactctgggtcatcgtctggggtgggtctctctccaggcc

SEQ ID NO: 180773 - DNA, 293 bp, Homo sapiens
aatgatgttgacatttgagctacagattacatggccgaatgttgaggtaggtctgttgtaattaaagagaggtttggaaacctcgctgggctaaaagccaggcagcaacatttctagcattacttctgtgaattatagctgcttgatgtggggccaatacacactttcatcagatcctatttcccttttttttttttgacggagtctcgctctgtcgccaggctggagtgcagtggcgcgatctcggctcactgctacctcctctgcctcctggattccagcgattctcctgc

SEQ ID NO: 180774 - DNA, 350 bp, Homo sapiens
ctaaagtgctgagattacagatgttagcacctaagcctggcctagaattattaaaaaaaaatgtacactccacagacatttgtatactcaaaagaagttacagttcaataacttacttaagtcaacttaaaattgaataatattcctagacgaatagcttgaattgcttaacaattgttttaaagccttttaaattgtagatattgattcattcagtgactagagcattcaccagttcctgggatgtgttctaggcactgaagtggagaacaagtcagatacagtccctgtacttttggaggctccattctagtggcacaacagacatttgaaaaattaaagaaatggtc

SEQ ID NO: 180775 - DNA, 221 bp, Homo sapiens
aacaatcaatacaagaagagagagacatgccagcagcaaggacgggagtgggttgtaaaccagggatggtgattaattcttcacaactgaggggcattaaaaaaagaaatcagagtggttcgtggctattaattttgttattaaaaataatcaaggaataaagaaataaggtaataaaggcctcgaatggaacaattctgagaatgtgttctgggcaaagg

SEQ ID NO: 180776 - DNA, 186 bp, Homo sapiens
cattacagaaaatgaacatatttcttgtgcatttgagttatagactgacactcatatttgccacatgtgttcaatgaccttcaggtacatgatttaatcatttactactactctttaataccaaataaagcaagaaattatgggtttacagacattgaacactgacatttggaaagattactctac

SEQ ID NO: 180777 - DNA, 296 bp, Homo sapiens
taagtaattatcatggggatgaggccaggtctcagggtagaatgggatgggcctaacgtgggtagggggttgtttgtggggtcaaggagcttgcggggcaccagttccttgtatttatgtgactagggcaggacatgggctagaatggcctcctctctttttgtgtctgagacacttaaattatcacttagattactgacctattaatcaactaatctatttggggaacaaaaagaccccatgctgatgtgctcacagcagtcaggatggggtgcagaagaggagataagtgagag

SEQ ID NO: 180778 - DNA, 153 bp, Homo sapiens
gatcacaccactgcactctaacatgagtgacacagtgagattctgtctcaaaaacataaataaataaaaaatttcatgttgtccgctccatcccaccctttgtccaaagtatccacactgcaaatgctacccacccattagtcacttagtagc

SEQ ID NO: 180779 - DNA, 457 bp, Homo sapiens
tgtattcctttgcttttcactcttctcaacagtttcacataagctaacaattgcttgtttaaaattaattttttgtattgttggaagagctggctgctcttccaaagcggttgttcctaaccaaagtgtaatgaaaacatcagttgagtcaggagtcaggagacctgatttcaaatcctctttctttttactgtaactgaggaaccccaaacacctttccttaggctctctaaacatccttttctgtaaatgaagataatgccctatctattttaaagacaaaagaaaatagtaggttacttgttaaactttaaaacatagtataaatacatgctttatttttgtggacagcaagcatttccatttcttactgcttggtcacttttaatagcttctgaattttaaaactagcctccctcaacttctgagaaggacagaaaacaaaaacaccttttgg

SEQ ID NO: 180780 - DNA, 521 bp, Homo sapiens
gaaacatccagttttattatcttcagtattacatgtgtgtacatacatacttagtacagtgaactgttactttaatatttacaatctgtatcagcaaaaaaataccattagattgtgaaagagattctcctttagcaacatccttatttttcctctaaggacatgtgctcatatgtattaagattcctatagattcagattcattaccgtatggtataaagtgatttttccctgggtattttcactatgttacccatggatttcttcataaaagacagacaaatgatagagcaatgtaattgcttaacatttgctattgaatgaaaatattttttgcatattcagcaagactctgggcttgaaattcatgcattgacaagaaattcctttagccttcatgggacatatctagggatatacttagaggactagaccatagaattttatttatctatttatttatttatttatttatttatttatttccttatttttgagacagaatctcactctgtcgccag

SEQ ID NO: 180781 - DNA, 207 bp, Homo sapiens
tcaggtttcttcactgaaagttaccctctgctccctgatttccatactgaattcttgagaagaaagtcactatgtgtggccacatctagggagtggggagttaaaatccacctccttgaagacggagtctctacatgaataaactggaattactctgcatgggagatttgtcccttcttcgtttatttattctatcatttatgttat

SEQ ID NO: 180782 - DNA, 395 bp, Homo sapiens
tttattgtacatctattcataaatattgaaatttttttgcttattggacaaaagcagaagaaactgctgtcatgggagaattgatgatgaatattacttggttcttcaggctatccattggccacagggcatactggcatttgcctcatctagctgtagggggatgttaagggtgaattacaatttgggaagttttctcaccaagagaaaatccagcaagtagtaaagcaattcaagtcaaataataggcctcgtttcgacaatcctgccatgaggtcatagctagtacaaatgattactagctactatttacttctaattaacaattcccctttccccttggtttcagaagtttctgttttgtcaggagaggagtggcatgagcagtgggcaga

SEQ ID NO: 180783 - DNA, 691 bp, Homo sapiens
ctgggattacaggtgcccaccaccacgtccagctgatttttgtatttttagtagaaagagggtttcaccatgttgaccaggctgatctgtactcctgacctaaagtgatccgcctgcctcggcctcccaaagtgctgggattacaggcgtgagccactgtgcctggccacacctagctaatttttaatttttttcaaatggagtctctgtcacccaggctggagtgcagtggcacgatcttggctcactgcaacctctgcctcccaggttcaagcgattctcctgcctcagcttcccaaatagttaggactacaggtgcataccacaacacccagctaatttttgtattttttgtagcttcttccctggcccagaagcttttttttttttcttgacacggagtcttgctctgtcgcccaggctggatggaagttcattacaaagctctagagcagaaacaaaaggaaggaaagtgcacttggaagaggccaagtgggcaactcgagaggcaagtgccccatccggcctctgatgtagggttctaggtgttggcatacttcagggcctcgcgtcccttctcccaattcctcccttggggtgggctgcctgcacacacactggcctgctagcacttgggagggagcatgcgtagtgtgtttactggagcatgcgcatgctcacctgaggcgat

SEQ ID NO: 180784 - DNA, 634 bp, Homo sapiens
tgacagttcatagttcctccagaaaccaaaaaatcagcatgccttttcaaatactcagggaaaaattttaatttcagtaattactgttcattgttattattcttcaactttactgaatgccttattccatacaagaaaaggcataaaaatttaatcccagaccacaggagcttaaatttcccttaaaacaagtcactcattcgtgattatttacataaaatgcttctaaagacaacccagagatttggttgaacctacagtgtgcaggcaatgcaaattcaggtatttaaatcatgggaagttggccttcggttccctaacaaaattagacaagtgcataattatcgtttaataaaacaaaaaacctacaatttggggtcctaacgacatacacaggaattcagaaggaaacctgaaatcctttctcctttaaaccttctatatctggacaagggccctcattatcttctacttctatagctccttctcttaacacaggagctaaatttccttgaaacatgttatgaagccactgccagcacggtggcacttgcctatagtctcagctactggggaggctgaggtgggtgcattccttgagcccaggagttcaaggccagcttaggcaacatag

SEQ ID NO: 180785 - DNA, 236 bp, Homo sapiens
tttcatctcttgttgattatttttgattgtgtgtcagtatatttccagtattgcagggttcactttgtcctccacaattatttccactcgcagaaacattcatcattttctcatcaccttcagttgttaaaatctcttactttgttgtggttggttgtacatttcttatttgtaatgcttttgtttgttaaacttaatagtttatgctgtaatagtttatgctgtaatagtttatg

SEQ ID NO: 180786 - DNA, 587 bp, Homo sapiens
ggaagatttggtattgttaaggtggcagttattcacaaattgacctacagattcaagcaatctttattttatagaaatgggtaacctgattctaaacactatatgaaaatgcaggctgggtacggtggctcatgcctgtaaccctagcactttgggaggccaacacaggtggatcacctgaagtcaagagtttgggaccagccttggccaacatggtgaaaccctgtctctactaaaaatagaaaaattagccaggcatggtggcatgtgcctgtaatcccagctactcgggaggctaaggcaggagaatcgcttgagtccaggagttctgggctgtagtgcgctatgccgatcgggtgtccgcactaagttcggcatcaatatggtgacctcccgggagcgggggaccaccaggttgcctaaggaggggtgaaccggcccaggtcggaaacggagcaggtcaaaactcccgtgctgatcagtagtgggatcgcgcctgtgaatagccactgcactccagcctgggcaaatctaccgtgggcaaatctaccgtgggcaaatctaccgtgggcaaatctaccgtgggc

SEQ ID NO: 180787 - DNA, 2927 bp, Homo sapiens
  misc_feature (934)..(934): n is a, c, g, or t
  misc_feature (939)..(939): n is a, c, g, or t
aggagtcatccatcaacactcctgctgtcggtgctgcccatgttatcaagaggtacactgctcgggcccctgacgaactgaccttagaggtgggagacattgtttctgttattgacatgcccccgaaagtgttaagcacatggtggagaggcaagcacggattccaggtgggactcttccctggacactgtgttgagttaattaaccaaaaagttccccagtcagtgaccaactcagtgccaaaaccagtgtctaaaaagcacggcaagctcattacgttcttacgaacattcatgaagtctcgtccaacaaaacagaagctgaagcagcggggaatcttgaaagagagggtgtttggttgtgacctgggggagcaccttctaaattctggttttgaagtgccgcaggttcttcaaagctgcacagcattcattgagagatatggcatcgtggatggaatctatcgcctttctggtgttgcctccaatatccagagactacgccatgaatttgactctgagcacgtccccgacctgacgaaagaaccgtatgttcaggacatccattctgtgggttccctatgtaagctgtacttccgggaactcccaaaccctctgcttacctaccagctgtatgagaaattttctgatgcagtttcagcagcaacagatgaagaaaggctgataaaaatccacgatgtcatccagcagctccccccaccacactacagaacactggagttcctgatgagacacttgtctcttctagctgactattgttccatcacaaatatgcatgcaaaaaatctagcaattgtttgggctccaaacctgttaagatcaaaacagatagaatctgcctgcttcagtggaacagcagctttcatggaagtgaggattcagtctgtggttgttgagttcatcctgaatcacgntgatntgctgctgccacacttcagcgcacgcacagaactaatcgtccccttccccctccgcttctcagaaaacagtttactcctcctttgctaggcccgatgtcaccactgaaccctttggtccagataactgtttgcatttcaatatgactccaaactgccagtaccgtccccagagtgtacctccccatcacaataaattggagcagcaccaagtgtatggtgccaggtcagagccaccagcctccatgggtcttcgttataacacatatgtggccccaggaagaaacgcatctggacaccactccaagccatgcagccgggtcgagtatgtgtcttctttgagctcctctgtcaggaatacctgttaccccgaagacattccaccgtaccctaccatccggagagtgcagtctctccatgctccgccgtcttccatgattcgctctgttcccatttcacggacagaagttcccccagatgatgagccagcctactgcccaagacctctgtaccaatataagccatatcagtcctcccaggcccgctcagattatcatgtcactcagcttcagccttactttgagaatggccgggtccactacaggtatagcccatattccagttcttctagttcctattacagtccagatggggccctgtgtgatgtggatgcctatggcacagtccagttgagaccccttcaccgccttcccaatcgagactttgctttctacaatcctaggctgcaaggaaagagcttgtacagttatgctggtttggctccacgtccccgggccaacgtgactggctatttctctcccaacgaccataatgtagtcagcatgcctccggctgctgatgtgaagcacacctacacctcatgggatcttgaggacatggaaaaataccgcatgcagtccatccggagagagagccgtgctcggcagaaggtgaaagggcctgtcatgtcccaatatgataacatgaccccggcggtgcaggacgacttgggtgggatctatgtcatccatctgcgtagtaaatcagatcctgggaaaactggacttctctcagtggcagaaggaaaggagagccgccatgcagccaaggccatcagtcccgagggagaggaccgcttctataggaggcatcccgaggcagagatggacagagcccaccatcacggaggccatggtagcacgcagccggagaagccatccctgcctcagaagcagagcagcctgaggagcaggaagcttcctgacatgggctgcagtcttcctgagcacagggcacaccaagaagcaagccataggcagttctgtgagtcaaagaatgggcccccttatccccagggagctggccagttagattatgggtccaaagggattccagacacttctgagccagtcagctaccacaactctggagtaaaatatgctgcatccgggcaagaatctttaagactgaaccacaaagaggtaaggctctccaaagagatggagcgaccctgggttaggcagccttctgccccagagaaacactccagagactgctacaaggaggaagaacacctcactcagtcaatcgtcccaccccctaaaccagagaggagtcatagcctcaaactccatcatacccagaacgtggagagggaccccagtgtgctgtaccagtaccaaccacacggcaagcgccagagcagtgtgactgttgtgtcccagtatgataacctggaagattaccactccctgcctcagcaccagcgaggagtctttggagggggcggcatggggacgtatgtgccccctggctttccccatccacagagcaggacctatgctacagcgttgggtcaaggggccttcctgcccgcagagttgtccttgcagcatcctgaaacacagatccatgcagaatgagccctgcgagcaatagagttgaagcagcctctgctggacagtggactgttctatttttttcaataacc

SEQ ID NO: 180788 - DNA, 375 bp, Homo sapiens
tcattcagttttatttttatgatttttgctatattaattcttaccaattttaaaccaacatttttaacctaaatcaatttattttacattattttcaacttaaactgcttatacttacatattccaatacattaaaatataaaattattacaaatgttcacccatgtaagatctaaaattatctcaagttccaggagtggtagtgggcttacactttgaaaaacatgactagatgcaaaatttgagtattcgtcttgatggcttaaaaacatattaaacatacgctgggcacagtggctcacacctgtaatcccggcactctgggaggctgaggcgggtggatcacggggtcaagagattgacaccatcctggcc

SEQ ID NO: 180789 - DNA, 251 bp, Homo sapiens
agaatcacttgaacccgggaggcggaggttgcagtgagccaagatcgacccactgcactccagcctggggacaaagcaagattccatccaaaaaaaaaagaaatgctgtcatttgcagcaacatgttaagtgaaataaatcaagcaggccaggtgtggtggttcacgcctgtaatcctagcactttgggaggccaaggcaagaggatcacttgagctcaagagtttgaaaccaacctgggcaacatggtga

SEQ ID NO: 180790 - DNA, 421 bp, Homo sapiens
tattcagcctcttttgcctaatttgttgatctgaaagttgaagatattaatgtctcttagagtggtaatttttgttagaccctgaaacaaataaaacaatgctttgaatcttaaatactgtgtgcttattgcctcaaaagaagacatatttcatcttgcagtaaatccttttttgtcttcatttctgactttttcttccagagattcaagatatttctgtaaatccattagacactcatagtttataagcataatggcaatcacagtcaatggagtggagaaactcaactttgttgtgttctgaattcgaagaaaatatttatcatagtctctgttacagtccttaaccgtagtccgtaaatgaataaactacccctccagaaacggaaaacatggatattattatcttaatgattaacct

SEQ ID NO: 180791 - DNA, 460 bp, Homo sapiens
tgctaagtaagaatatgaaagcaagacaatgacatctcacagtgtggactttctccaagctctacactagatggttggctgcccgatgagttgcttccttcaagtatcaatagtctagaaatcaaagttcctattgtattctgggagatttgggagatacttcagaagctgagtgttttctagtacactggagacatgaaatgcatgactgtgtctggtgattctgttacatcttccttcctgtctctccaagcgctcagggtttctctgacaaaggtagcaaacccaactatctggattgagtttgaaacacttggcctccccagagactttattaacatgaacatctttctcagaataattttcatgtatttgtttaaagcagattataaataatttgtattaatcttcttttgagtcatctagcaccagtatttgtagattatctctttgttctaca

SEQ ID NO: 180792 - DNA, 306 bp, Homo sapiens
tcttcaaaactcttcaactattctggcatactgaccatttaagtaaaacacttaaaaccagcagatattaaagaaaatcattttgaccttcatgctctttcctttgcaaaaatgaaattcccatgtaaagatagcctgcccacagtaaaaggaatggcaacacttttatcttcaaggataaagaattgagaccaataaaatactgaacagaccttgttagaagataattcagtcatatttccacaattaactattctgtgtcgaatccagtttattggtaactgactcaaactactttactcaaaa

SEQ ID NO: 180793 - DNA, 302 bp, Homo sapiens
agggagggaggggcggaggggcccactaggctaaagccacaccttgtctcccctttaagctcaatatgtcactcccactccacccactaccccctgagctagggctcaggaagcagattgttaattgaagctggttgggcagacactgagcatgtcctgaggttagaacactctgctcaggagcacacttgcccagttaggcactctgcaagtatttatggtgtgccctctgacaggctacagggagccagggaaagggcattttgaacacaaagtgagaagcttggttcatttaaagaaat

SEQ ID NO: 180794 - DNA, 1116 bp, Homo sapiens
ccctgttcttgactcaaccctcactggattaggctggcctatccactcattgtatctcctctctgtcagccacaaagaaagtcacacattttagctgatttttaaagccattcctcagagtttctcctactctccctactctcccatttggtcaacgacagggatgggaggcagggaaattctgggctgaagagggcaggtccctggtgagggccccaccctcaagctgaaaagcctgaaacagcagcccaaagtgagaagttaacatcccagttttctcactcaaatgttgccttttccagaaccacccatggcccactccatgccctcatcttgtgcccgtgaaaactgcaggctcagccagcaaaggcaggagaagcagctggacatcagagagaagtgccttacttcagagggacagctcgacggtgtaaatttcaagaagaatcccaggagacagctggactttgagggaagattaccttccttctctgtctgcttttcagctcctcttccctctgagagccacgtccaacagcaataaaatcccccacatttaccatcctccaattcgtttgtgctacttcatttctcctggatgcttgacaacagctcaggtgcagtgagtgtggaggcaaaaggctgccacactgaccctttgccctcgctggcagaaggtagccgccttatgctaaaagacatagggtccactgagctgttaacacttaagccatccacagagggcagagctaaaagagtactgtgacagttcctctggggcttcgggggtcgtgggcacccccgccccgctgatgctgctgtggggccggtacggaattcactcctgcatgtgcccaagagtgcttccccagctcctcctgtacctgctcacctgtgctccccctcccacgaggggtggagcgcagcgggttcaagggagtggaatttgcccctgctggcgccaacacagttggcttgttccagcacccatgcactccagttcccacccacaaaggggtcagggaactatctggcttcgtcaccacaggctttgcttcacacttactctgaactcggattcacacatctactccaatgtctttgattcttgttttc

SEQ ID NO: 180795 - DNA, 550 bp, Homo sapiens
atgtgcacatacgatatggatatacatattatgtatatacatatatgtacatatatgtatacgtgtccatgtacataatatatatttggttggccactacaagaccaaggagagttttagttggggttaccgacttgctggttctctggctgtagctgtaataaatcgtgaatcaactttaaggttttttggtagtggtgggttggtctggtttggtgtgggcttgtgggtgccttgtgctgggttttccccgatagaaaatcaagcaaaatctaaatgaggcaaaagggcgctgggtgggccaggtgacaggcacctttccaatcctgtaacatttatctcctaagtcacagttcgtcctctcggggggaaaaattgttttaactagacccccctcccctttctaaacgaaagtataaaagaaaatctagccccttcttcgaggccgagagaactttaaacgttagccatttcttagccgccggctaaatgaacagactcttaattcgtcttaaagtgtggcattttctctagctcgttcaagtacaac

SEQ ID NO: 180796 - DNA, 321 bp, Homo sapiens
atggagacaagttaatggataattctaggcaatcgtcaatggctgacagtatcgctgaaatgtcacctctgatgaagtatacatcgccatagaatatgtcataggacaccacagggatctaaacagagaaattctgcagacaaatgacctagattcttctataaataaactgcaaagaagaaaaaaaaagagagaacctacaaaggtcttaaagtataaagcaatgtggacctcatttgaattcaactcaaacttaaaaacaaaaaacaacaaaataaacctaaaaagtgtaacttaatcaggcaatgtgaacaatactaa

SEQ ID NO: 180797 - DNA, 728 bp, Homo sapiens
gactcagaggtcccaaccttatgatatctttgtacttgtatatccattagttttatttcagttacttatcagaagggaaaagaaaaaaatggcactatgcagttaagaggaccattgcatggagggctaaattaactattttttattttcatgaatgaggatcaaataggtttcagatgtctcgacatctatctggagatctagatgatgatataaaattaaaatgcagaatgtaagtgtaataaaatttgtttctccatgattacattaaataatctttgacatatatttttcttaggtatctctcatgcagagtagatcaacatacgatttgacacagaatagaattttaggtctaaagaaatcttagacattagtttaactttctcgttctacaaatcaggaaactgaggctcaggaactaacgtgacttgtggtggcatagtcaagagtggagcctgggctcctgaccttgaatccaatcctgtacccatatatcagtattttctgtaatattttacttgggcttgaagatcaaacaggtttgataattcaggcttcaaaaaaatttaacaaatttttctcagccaggaaataataagccacacaatccaaatttactttgcctatacctcctttttccacaatacataaaaaaggccatttgttttctagaatgtccttttgaggatagcagtgaattactatgcctcctgcaatgaaaagac

SEQ ID NO: 180798 - DNA, 556 bp, Homo sapiens
gtacccgacggcttcaggaatagtgctggtataatagaaagttccggacggcttcaacggaactttctttaaggtaaggataagtataacatgattaccattgcttttctcttcttcaagagaaacccaaacatttaaaaggtcatgagtgatgcaacagaaccagtttttgaatcctcttaccgggtaaaaagggggctcttctgtaatctacaatttcaaatacatgtgcatgtcatgaaaggagtgtttaccatttccagtagccatcatcttagaaagtaagactggaaaaacggagtcagaactgggaatgctgtcccatcagagcttgttggggggcactcacgtgctctgttttgcctgtggagactgctggtaggaatgatgatttctggaagggaagggaggttggtgctggcctactgaaaattaagctcttcttttaccttcttgcctcttaatttggtgactgtgagattaccagtcacaggtagtcactgactactgcaagttaaagttccgttgaagccgtcgagatcctgctagagtcacc

SEQ ID NO: 180799 - DNA, 468 bp, Homo sapiens
tataacaaaatgatttgtgcaaaaacgctgcaattgatatcatatctttcatgctaatattatttgcatctttgctttaaaatcatgctcaacggaactttctttaaggtaaggataagtataacatgattaccattgcttttctcttcttcaagagaaacccaaacatttaaaaggtcatgagtgatgcaacagaaccagtttttgaatcctcttaccgggtaaaaagggggctcttctgtaatctacaatttcaaatacatgtgcatgtcatgaaaggagtgtttaccatttccagtagccatcatcttagaaagtaagactggaaaaacggagtcagaactgggaatgctgtcccatcagagcttgttggggggcactcacgtgctctgttttgcctgtggagactgctggtaggaatgatgatttctggaagggaagggaggttggtgctggcctactgaaaat

SEQ ID NO: 180800 - DNA, 950 bp, Homo sapiens
ctcctgtatcagcctcccgagtagctaggattacaggcgtgtaccactatgcctggctagtttttgtatttttagtagagatgggtttcactgtgttggccaggctggtcttgaactcctgacctcaaatgatccacttgcctcagcctcccaaagtgctgggattacaggtatgagccactgtgtctggcccacctgttttttttgaaggcagaaaaacattcaatattaaaagcattcaatattatttcaacctgccttggctctagtgaatgttcatgatttgaaagaactgaaagacctaaaggcagtgtctctattgttgactacaaatgtaggctctttgttggactatgactataatcacacactgataatatgacgcaagtagaggcagtactactaagtatctagcaggtgctttgaaaccccattactaagtcccagaagactgtttcctaaatttgaagtggaagaattaaatgactcaatggaaccctttagctgtgggtccattgatgtgtgagttttagagctggaaggaattataattttgttgtttataattgctataatatagaaattataattgcttttctttctacttatgagttaactagatccagagatattcagaaagtttttagctctatattgcatggtgctgcgtgagcggaggaccctctgaatcctgaaaccctcttggctctcttccacggaaagaggcctggggccccgtggagctcagtgcccgttggctgctggtctcgctgacaataaagagcctgggttgcaacaaaacacacaaaccacaacaacaaaacacaaaaaataaacaaacacagggccaacaacaaaaaaacaaacaaaagaggggggcaacacacggaaccgaaacccgtgtgagtcgcttaagacacaggggaaaacgaggaaaggagagaacatga

SEQ ID NO: 180801 - DNA, 196 bp, Homo sapiens
atagtgaatggcagagtaagagttcaaacccagccagcctggctccagagcgttctggtggtccagcagatgtcctagacctatatctagtggctactagtgcccagcatccaaccttggtaccagctcccactcccaataaggtcaggctgaggtgcagattcctagacagagggattctcctgataggggccag

SEQ ID NO: 180802 - DNA, 426 bp, Homo sapiens
tgggtctcaagattcttaaatatcaaagggggtccagttcatttaatttaaaataccgagttgccacattgttccaggcacattattaaatgtgggggacagaggtataaatagtttattgacttgccctctaaaagcttacaatgtagggatatatgaacaggatcaagagctgttgatttctagcattttatgtgtcttctccattcatctttcagagttctagtaggttatccgggaggctagaatataaagtcttacagtgattaatgagctccaaagaggcacttaacattccacagcaataattcctgccttttgtttcccctttggtttatttaaacaaaattattgtgtgggagaacatttgaactcaagctatgtatctactataaaagctattccacctgactagctacctgccta

SEQ ID NO: 180803 - DNA, 238 bp, Homo sapiens
cacaagaaggaggctaaacatcaccccggatattgcagctgctacaggacagagctggaatttaaactggttaagacttgagaacctgagatctttaacaccactctagaatgtgcctcatttacatgacttggggaacttgggttccagcccgtatctgtgtgattccagaatgtactctctgattgtgaaaccacagttctgtttcatgggctcccacatccttggggacttattt

SEQ ID NO: 180804 - DNA, 512 bp, Homo sapiens
ttgtagcagaaatcattagtatcatcagttaatcaaagcaggataaaaacaagctctacataacagtttagatttaacatggaataaagtagaccacaaaggcttgagttccttgagtgtctcaatgtaacagataactgttgtcccagggaaaagctttaagttgtcctattccatgcagaaatttttaagggtagaagatgaatatagtatcctagctttttgtggaggaataaaatgtttgactaaatcagtagatgctggccaggtaatggccagaacatcgcagggaaccctgtgggtcagtggcttaaatcaacaattcattcattttacagtatgtttccctgacagaacagtaaacagacctttcagaaacacatatatatttggaaatataaataataaatcacttctgacaggcaaattgaacttcacaagtacttgggcagtaacaatccaggtatctagatttgtaagagttgtctatctgcagtacatgccccaatgtg

SEQ ID NO: 180805 - DNA, 275 bp, Homo sapiens
aaacggcaccaaaaaaataactggtaaaggacaaactgttcaggagatttcattaagaaaacattttcattaaggagcaaataaaactaaatccttacctatgagcatagaattgtcaagataaatctatagatctaacagaaaacaacaagggaaatatcttttaaaataaaactgcaatggctaggcgcggtggctcatgcctgtaatcccagcactttgggaggccaagccgggtagatcacaaagtcaggagattgagaccatactgtcta

SEQ ID NO: 180806 - DNA, 663 bp, Homo sapiens
tatcccctgtcgtggctcaatttgggaggctgagacatgcagatcacccgaggccaggagtttgagaccagcctggccaacctggtgaaactccgcctccactaaaaaaaagaataataatacaaaaactatctgggcctgatggcacatgactgaaatcccacctactcgggaggctgaggcaggagaattgcttgaacctgggaggcggaggttgcagtgagccgagatcgcaacattgcactccagcctgggcgacagagtgaaactccatcttaaaaaaaaaaaaaagtaaaataaaaaattaaatgaataaatgaaattgaactacctgcctaaaacccagaaaggtgggtggggctggggggaatagaaagagtattcagcattgaggctgatgcagttaatgctaagtcgagccatcaattctttgtgacatcattttccttgatagtcctgttatcttttcatccactaagttactaaagcacaggctcggaggttgtggtaggcagccctgtggacccattttagacttctgacctccaggactgtgagatgatacaccaatgtggttttaagccttgaagtctgtggtaatttgtcacagcagccataggaaatgaatgcaggggtctttcctcatgtctcattccactccac

SEQ ID NO: 180807 - DNA, 473 bp, Homo sapiens
aagcaacattcaggatatagagtagagaagcagaatagaaattatttgctattgggagtttccacagcaggtaggtataaagataaggtcaaaggatgctgtggcagtatcagtaaagaaatgcttcagagtaacattggttttagggtaaatagagaagaaaattaagtttggaaggggctgatagcatgaaaatatcctgaagaatcaaggaaatggaaatatttgatcaaatatctagctttgtgataataaaaaaaacagctagaagaaaaacaataacaagagctatcgtttactgaataccattatgtacaaggtattatcctaggtgcattaattagttagctaattaatgaaagggtttcactctgttgcccagcctggaatgcagtggcatggtctcagctcactgctgtattcaactcctgggctcaagtaatcttgcctcagtctccccagtagctaggact

SEQ ID NO: 180808 - DNA, 144 bp, Homo sapiens
cacctggccaatgcctacttttcctttaaatctttgcttaaatgttactttgtcagaaaggcctttctgtcctctcagactaagccaggctccccccagttaatcactcttacagctccctgtatttttcctaaaatgcactta

SEQ ID NO: 180809 - DNA, 230 bp, Homo sapiens
ttattactgatgataactgatttaactatccaaatttctaccacattgtgtgctgtgttttaagtcttggggacagagaattgagcaaagtacagccttaagtactgatagcctttagtggccttcttctaaccagatttcccctaagtctgtccacattggtgtcatctttgggtgctgatttactctgggccaggcaaactttacctggacttggggaaaggtatgaa

SEQ ID NO: 180810 - DNA, 294 bp, Homo sapiens
gcgatgacctcgaaagttccttcccattaataataattactattaataattaatagcaataactaatgataaaacagaacagttgcagcaatatactgtaataaaagttgtgtgaatgtggtctctctctctctctgattatcttattgtaccatactcacctatttttggaccttagttgaccgcttgtaactgaaaccatggataagagggggactattgtgtaaggaaatgaagtcggagatatggaatttcatttcagggcttgctttcctgatattcagctattctgta

SEQ ID NO: 180811 - DNA, 523 bp, Homo sapiens
cactaaggaaacagcatgtggcaagaacccaacagcttataaggaattgaagcctcaattctgtagtctgagaggaagtgaatactaccaacaactatttgagtaggcttagaagtaaatcctccctagttgagtctttaaatgagatgttcccagatgacactttcattgcagccttgtgagagatcctaaagcaaaagacccagctaagctgtactcacagaacccataaaaactgtgagataataattgtgtgttgttttaagccagtaaattttggggagatttgttgcatagcaatagataactcatacattcacacaaatgaactacagatgatgttaagtaagtgctatgaaacaaaagtcaagaatggaatgagagattataacaggatttcctaatttaaatttaggtttagatctccactaaatggagttaaattttatcaaataatgtcattaaatggtcatgtttagtgataaggaaaaaatatttgcaataataatttatactttaattc

SEQ ID NO: 180812 - DNA, 277 bp, Homo sapiens
actgttcagatttctgtattagctgatctaccagacaatcacggtgggatggagaaaagtaggtaaacaattactctagagcagtatgctatggccaatcttctgaaaaagactactgtattttggtgactcaacttacagatttttcatttagtctacaaatctcagcatgcaataaggctcctgcctcctccattcccatgaaaacgttctgatagagagtaccagtgatgccagtgatgaagctacttgttattacactatattattattggct

SEQ ID NO: 180813 - DNA, 219 bp, Homo sapiens
cagcatttgtaaggatgcagcattcaagataccatcctgggagcagaaatggccctcactagacactgaatctgcctacaccttgatcttggacttcccagcctccagaactgtgagaaatacattttcgttgtatataattgatatagtttgaatatatatatgaatatatagtatcgtttgaatatatgtctccaccaaatttcatgttgaacagta

SEQ ID NO: 180814 - DNA, 462 bp, Homo sapiens
gtcgtggctgccttgctggtgcatgggctagagcattagttctgggattgtctggttcattggttcatttattcccttgctcactccttcattcaataataattgagtgctcactcagttgtttaagtcacgtgaagggtacaaatcagcactaaaatgctgcctgtttagccacgacagacattcttcctcctgtgctgcatacgcattcaaagcccaatgggaattaagatccaaactgtttgttcactcatggaatactcatgcaataaattgtttagtgccctcagcaaagagtccttgccacaaagcttattagtgagcagtccaagttttccctcatcttattaaatataaaatttgtttagaagtgaaaacagaaaaatacgttctgaaaaaggtaagtttttgtcccaggaaagatgcttgtgggcctagctgtctatagttgtcccagttccc

SEQ ID NO: 180815 - DNA, 464 bp, Homo sapiens
tctttattcccatcatccaaatgctcagtattattatggtattacttttcctctttccttcctccctccatttctttgtctttttcattttaaaaatgctttgaaacctctatttccaggataacggttggctggacactctgaagggacctcctactaaagatctaaaaggtgtgtgtgtgtgtgtgtgtgtgtgtgtctgtttggtgcggggtgaggtaggcattttctttaggttaaaaatgggaagaacacatgattatcgagaaatacaatctagaattctggttaaagctagaattttaactaatttaaattctagatgaagaacagaacaagctgggcacagtgtctcatgcccgtaatcccagtgactctaagacattgacgtgggagggtcacttgagactaggagtttgagaccggactgggcaacatagtgagacatctctaataaaaaaaat

SEQ ID NO: 180816 - DNA, 358 bp, Homo sapiens
agtgtcctgcattttgaagtacagtgtgacttgaacatcagagtaaaaaaatgttggaaagcaataatctatatttactcacaaaaggaaatggattgacctattgcttttgctactgaaagtgaagccttaaaacaacacaacacagaaacctgattctggtgtgttttaacatgtacaatctaattaattttagaattagaaggatatggtggccagtgatgtaaacactcaagtagtttgccatcacataattcaattccataggaaaccagatctcattactttgtgtcatggcactagctaaatggagtcatttttcaagttaggaatagcaattatttggggagcaacaatg

SEQ ID NO: 180817 - DNA, 714 bp, Homo sapiens
tattaatcaatatattaagaaaatattgcattaaaataacatctaaagttataataccatactatttaacttttctttaggtatttccaaaattaataaactcaattatacataggtgttacatgtcaaaattagccatggtaactctcacttctataatctgacctttctaaaaacctgaaaatcaaaagtttatcttgaatacatcctaaaaatagcagtaaaaagtgacttcataatggtgttgccaaccttggttgtgaaacattttactatggactatttccctcatagattgtgcccattaaaaatggttctgctaaaatttatagtgtaatagtgactttgagaaatacacaggaaggaaggaaatgtttggtcaaattactgcttaattattccaaagctggagtgactggctttgttttgcgcccttttactgaataacttttgataacaatcaaactgaaaagtcaagaaattaacttttatggaaattgagtcatgccttaaattcatttttaattcttatactgcttatttagtaaccaataaaactaaaccaagttgtgctatgaagtgaaggatcataacttcaaataagcaattccattttctccattatccctacacttggctggcaaagagtctctaggaattttttaatgtattatttaaaattgaaaatactaatgttcatactaatatgatgtt

SEQ ID NO: 180818 - DNA, 189 bp, Homo sapiens
ataattgtgatgttaattgctagttgaaagaacagcatggtgtatgtgagacatatggaatagtccgtggcagataggagtactcagctatgtatattccagaaatttagactgtaggttcatcttagagattctctcttctttcccctctcccctttctccctcctttttgtcccaacccccatcggt

SEQ ID NO: 180819 - DNA, 693 bp, Homo sapiens
gtaggaagtgcaggcgctgacaaagagcctcagccccgcgggctcccctgctctccagccctctcttgctctctcttagacgccagacaggcgcttcgggaatgtatgtgggagagtttgaaaattcatggtgtttctttcaggctctctcagcacttactgcggctacctctgctctcccgccacctgcacgtctgcagagggatccccgccgaaaagttgagcctaaggcagctatgaaggagaccccaactcgagcttcactgttccaaagcggtgggccaggcggctggagagaaactcgctcccgtgaggccacacccaggcctggcgcacccaccccgcggcagcagtggagggcgtcgccctcccgggccttccgacgcagaccctgccatccggatgctgcgggaagtagggcatcctcacgtccctgactcctccggctccgcgcgctcacggaacccaagtggagtgggaagcggtcacacaggcgtgtgccgtccccgaaatcgttgctcctgtggtggtgacccaaagcgagacaaagcgccgcgccaatacgggctgcagtgattggaactcaaacacacacatctctccgcgaatgtgttccatccgtgtaaatatgcctgggtgattgaatggatggctgaatgaacgctgtgtggatagaaatataaatgttacatg

SEQ ID NO: 180820 - DNA, 319 bp, Homo sapiens
acagggcagccatgtttgaggcttcaaagaggtctagtaaatgagggttgaaaagattgttgggttcaggaactagacgattacaaattttgagaaaaccgtttccatttaatagaggggcagaaatcactttacataggttgaggaatgagtgggaggtgaggaaaaggaggtggtgggcatgaggtcagaatggtgaacacagaataactgagaatcatctcttagttctacccacagattttacagttgagggaaattttaccagttcctgaaaaagtggttcgttaagggggctagtcttttgagacatcacacg

SEQ ID NO: 180821 - DNA, 876 bp, Homo sapiens
tgctacgattactggtgtaaaccatcatgcccagccaggctgcagaatttttattttatcatgtcagtaacagagagctaatgaaggttttgctaagtgccacacttttgggtgattaggcttctgattatattcagtgcatgttagagggagggaggagtagaactgataagaagtctttcacagtggctcaagtgagaggacattaggctctgaaccagagcaaaggcaggggaaagttaaaggaagagacagatttgaaaggaaagtggtaatacaatcaatgatgtgttacagtcttgatgaggagggggaagaaaaaggagttgaagacatacctaagtttttgatagagcaatgaggggaaaaggtgatgctttttagtggaaatagggaatgagacgtgtaaattttggagggtagactagatgatatgaggagaatagtaagtgggaaaataagtatcccatggagaaagttctttaatttacctctataatctgttatagctcccttgaaatatccgttgacaaggttcttcatcttcattgtcctgttatatctgactcaatctctcatatgctcattcagactcatttcctctctgttctgggggtagatgaaaatgacaaagtgccattgttcttataagaactcgccccaaataaaaacttttgacaccatttctgtcgtacatcagtagcctgttggtggttgtttggatttgtagattagattatacagggttattgaggtctctgcattctttgttgttttcacctcctcgtgaatttaggcctagcttgttgttgcccagtctcttttctgtacttgagatctatgtgagaaaccgtcgattcgagggaagctgctaga

SEQ ID NO: 180822 - DNA, 500 bp, Homo sapiens
accatgttgccccggctggtcttgagcgtctaggctcaagagatcctctcaaagtgttgagcttacaggcgtgagtcaccgcgcctggcctatccttccttttggcggtgagagcttacagaatttttttttaaatgctgtgttttttttcttttttgtctgcacaatgaaaatgaaatagtgtaaaactattagttttagtggaaatttggaatctgttacagtagcctgataactcaggtaaattattatggctctaattagctgggcagtttagattcgaagaatgattgcccagcacttgaacagactagaagggtctgtttaaacactcctaattcctggggttcatttttatttataaaacacatactttgggccaggcgcagtggctcacgcctgtaatcccagccctttgggaagccaaggcgggcggatcacgaggtcgggagatcgagcccgtcctggctaacacggtgaaaccctgtctctactaaaaa

SEQ ID NO: 180823 - DNA, 149 bp, Homo sapiens
ccatgtaaaggtacaataacttccttatgtcaatccagtgaagactttaggtttttattcttgaaacaatgttacaaagaaagtttggtggaaatgtttggttgcatattgtgactcccttaaaatgtccctaaagcatctgtttgtct

SEQ ID NO: 180824 - DNA, 568 bp, Homo sapiens
ttgtgaagatagaattggcagcatttaccacaagagcctaaggaaagggaaggagacacagataactccaagctggtgggcctggacccttacctttgataaggatggcaacagtaaccaacacactggaggcaggaagggaacaatcaccaattcatttggaggcaagaagagctcagagtgtgggcaagtcactcaggtggtgctcactttagcagaaaggctgtgtagatgagtgtttagttaaagaactgacattttcacggatatgccttgaaagtatgtaaatctgtatttcttaaatggttagcaagcggagccctcaacagcatttatcacctgcatgaacagaattatttattgtgctgtgctcctgtgaatggtattccaggaattggaaagatgcgggcaaagttttgttttaaaattaactcttaaagaactggaatttctctcattagtagtaaaagcaacaagaggttgccaaaagcaaaagtgttgagaaagaaacatgttccctttactttttctttaaattataagtgaatgggcatgacacaaaacagcg

SEQ ID NO: 180825 - DNA, 671 bp, Homo sapiens
aaaatgttgtccaagttggcatcagagctggagagttttaagaggtttagaagcctggccgtcaatacctacaacagttatggaggcaaatgaaacaggcctttgaaaagaaggtaatgtggagttggtagcctccatattgattaagaaggggacctacttaccctctactgtaagagttacccgaagcatctgtgatggtccaggaggcttctgagatgaccaggcagcatcagtcttcagccactaagccgagaagatctgggaaggagtcagtcagagagccttgggccagggttccaggggctctgggagtggctgccagattgaacaggagaatctggaaccaggagtgagcagagctggccccaggccttggtggctgtgtactagttctgtgacctgcaatcagtcacttaacttctgtgagctcctctctttccgtctgtaaaaaaggaatatgtactacccacttcctgagtagatgttgaagatgttgtaaaaggttcgagtcaaccaattaaaagcaatagatcacatgaagatgagtatatcttctgtttgttgggacataatccagagaggatctttctccccagatattatgggatggccacattttacagctgagagtggtaagtgatcaggtgaagcagagtaagtacctgtgg

SEQ ID NO: 180826 - DNA, 584 bp, Homo sapiens
agaccccctacataactagcaaagaaatccagcaacatataaaaataattatacaccatgaccaagtgagatttgtctaggaatataaagttagtttactatcccccaattgattacaaatcaataaaacactatataaatagagcatcttaataaaagcagaaaatgcatttgtcaaaatccaacacattttcatgataaaagcactcaacaaactaggagtagaagaaaacttcctcaaactgataaagggcatctaggaagaacctacagctagtatcatacttaacgatgaaacactagttgtctccccatatgattaagaacaaggcaagcatgtccattttcactattctatttaacattgtactggaggttctaaccaagaaaaaaaattaaaaagcatccaatatggacagaaatatttaaaactgtctttatctgtagatgacaaaatctttatccagaaaatcctaaggaatcaactaagaaacaattagaactaataagtgagtttagtaagggtcaagataccagaccaatatacaaaaatcaactgtatttccatattcttgccatgagca

SEQ ID NO: 180827 - DNA, 480 bp, Homo sapiens
gtcacatgctgatttgtttgtggggcgaatatttggtaaagatcaacaattcaaaactcttaactagggtgattatactgtaggtggcaaggtctggaaaacccttcagatcactctatacacaaaaagcttgacatgtgatcaatggaaagtgcatggctcagggtgacccagattatgccgcgggaaaaaataacctcaagtcttcatctgcaacctgaaaacaagaagggtatttttctttctcgtgttcatgtccagcacgagtttgcagggcgtgtggctcctgatccacatggaggggacagttgccatcttgcatattgccacttattgaccagagagaggcttctgcagggtctcacatgaataaagctaaatactttggccctaaaggtgacacttctgcacaaaactcatttcgccaaactaacttctggtccctgcaggaataaattgccagtgtctgtttttttttta

SEQ ID NO: 180828 - DNA, 175 bp, Homo sapiens
gactcttaactccttttcttcatgattgcatatatgtcacagcctctgtacagcctcatctgacactcctgggcaggatttgtttcttcctcccttaatacgctcagagtaactctcacattgttttgcagtgatatgtttacaggtctctctcccattgacagtgaacctccca

SEQ ID NO: 180829 - DNA, 256 bp, Homo sapiens
ctgggcaccagtttttcctcatacctcactggatgcttccttctctgcctttcctggttcttcctctgcttcctgagcacttcacattggagaacccccaaagtacagtcattggacctatcttttctatctagattcattttcttgatgatcccagccaatcttataactttcgatactgtctatctgctgacaaattccaaattttatatcctctaaccagactcataggtccaactgcctactcaccatctcg

SEQ ID NO: 180830 - DNA, 150 bp, Homo sapiens
cgtggtagaccagggtagtcttggaaaatgcaacatttgggcgcaaaggcagaagtgcttgtcctcacctaggtcgatgggggtagcgccctagccagggaccatgccctcctctacccagcacttcccttacccccttcctcatcattt

SEQ ID NO: 180831 - DNA, 555 bp, Homo sapiens
aggtcagcgacagaagccgtggtggtttcatgccaccagtttacctttgtcctgagctgtggaggttgtttaaagctatagatcaaatgaagcctggaatataagggtgcagttaggatgattgctgtgtagttattttttaaaacggctttttgaggcataattaacataagctgcgtatatttaaagatacagttagataacttttgatgtatgcaaacacatataaaacatgtataaaaccctcgctgccgtccagatgatgaacctgtccgtcacccagaagctctctcctacccacacccctttctccccaggctgcagcagtctgcttttgggcctgtagattcgttgccttccttagagctttgtctaaatgaaatcctacaatatgttcttcttttggtctggcttccttccctcagcgtcattattttgggctccttggatgcgtggcgtgtgctgggcagtgttcccctgcgtggatgtcgcgtttgttcctccatttgcccgttggagcgtgtggagtgtttccagttcttgactgtcacaaag

SEQ ID NO: 180832 - DNA, 187 bp, Homo sapiens
atattaagggaacttaatggcattaatgttattgttcttcaatatgataatggcattttgattatctaggatgtctttatgagttgggagatgccttcggaagtatttaatggtgaagtgtcttgatgtttgcagcttactttcaaatggttcagcaaaaatcatactaaaatatgtatgtataaat

SEQ ID NO: 180833 - DNA, 393 bp, Homo sapiens
gttgggtgtggcggcacatgcctgtagtcctagctactcagttggctgaggtgggaggattgcttgatcccaggagttaaagtctgccgtgagttatgattgcaccactgcattccagcctgggcaacagagtgagaccttgtctctaaaaaaacataataatggaaaaagttaggtcataaatttgaaggtatatcccagaaggtagaaaaacacaaggaaattgaaaataagaaaaactgaagaccgggttaggagatatatatccaaatcgtaggaattctagagagaagagagaaaaaaaatgagaaattgaagaaaatgctccctgaaccaaagaacagtggttttcagacagaaaagagcccacctaatgctcagattggtgaatga

SEQ ID NO: 180834 - DNA, 180 bp, Homo sapiens
ataatgccactgcattccagcctgggctacagaatgagactctgtatctcaacaaaacaaaacaaaacaaaaacacaacagtctgttctgtggaggccttgggcagatgctgggagctctgagcacggactggtccctctgttgggagcctcttcccttcatccctcctggttaacttga

SEQ ID NO: 180835 - DNA, 294 bp, Homo sapiens
acatatagccggacctctccctactgtatctttcctagtaatagccgttccttacctatttaaatatctcatgtggcctccatcaaatgcttctacttcaagccaattttaaacatacttttcgcgaaaagatatgttgtttggctctattattaaaagctgcttaatgcctcatctgacaaaaaatttccccttacagattttcagagtatgaaaggttaagactgatgtcccttctacattacttaggagagctttcaaatagaaaagcaaaaactattttatatacattca

SEQ ID NO: 180836 - DNA, 630 bp, Homo sapiens
atgcccacagctcccccaggaccctgaggccagcctgtggagggcctgtgatttgaacccttctacgaggcttcaaatcagtgctgtttgtcctggcctcataaaacctggctgcccagttgggattggtgtcacttgccttgctgaactgggcactccttgggaagagggtgggtgctgcgagaaggcggtggatcctggctgtgcaaccttcgcaggtggctgaacctctctgtgcctcagtttgctcatctgcaaagggggctgggattcctgcctacatgcatgtgctcaagagggaaagccggccaggcatggtggctcatgcctgtaatcccagcactttgggaagctgaggtgggcggatcacttgaggtcaggagttcaagaccagcctggcctaaatggcaaaaccccatctctactaaaaaaaaaaaatacaaaaattagctggacgtggtggcaggtgcctgtaatcccagctactggggaggctgaggcaggagaatcacttgaatctgggaggcaaaggttgcagtgagccgagatcccaccattgcactccagcctgggtgacaagagtgaaactccacctcaaaataaataaataaataaataaataaataaata

SEQ ID NO: 180837 - DNA, 572 bp, Homo sapiens
ggggtaggggtgaccaggaggaagtggggacagcctctgtcccacaggaaggctggctagccccagtgggtatgggggagctgggcagggaagagggtggactcccctctccctgtgggagggtgtgctgggcccatgaggccctcatccactctcagccaccttcctgtggagccctagcctcgaaggccacactatgagtgcaaggaggccacccacagcgctgctcccgcttcacaggtggggaaaccggcccagtgtcttgaggcagcccagccgcctgccctgtgcttcccccagagccttctggggaatgagaccttcgttacacgctggcgctccttacacccctacagcctttaagctaaggcctccagccccatcgctgtaagaattgtatgctaggcattctgaggacatagatgggggtccccatgtcggaaggagccaaggtgttggaactgggtccagttcctgggctggctctggtgggagatctggaaccctatgctggggctcctggacagccctggaggcatggcatggacagtgtgtcagccgcacaccgaggc

SEQ ID NO: 180838 - DNA, 600 bp, Homo sapiens
ctctgcttccctaaagaaatgaagtaattagacatggttggaattcacatctagtctcaaaatttagttaaaaattaccaaaaattccagaacatgaagaaaatctgaaaggatttagctttcaccactgatttgagttcctcccactctttgggaaggtgctagcaagctgtgaagtggcccaaatatgagtagaaagctgaaagagaaatagctaaaagagtctacaaatacctcctgaaaaattgagatttggcttgaccttagactggagggaattattaggaactctagaataaggccaaaaaggggaaatgtctcatttctaaaatatacccttatatggaattattattattattattggtggggaaaagtctttatcatgcacattgtaggtttagcaggacccactacccatcaaatgctacccttgactgaaaatcaccgaaccagaggactatactatctgtggaaccaatttacgttaatgatcattatatgagtgcttgagtggccagtgaattaggtttacaactcaaaccaaacacctatttctcctgatctgacctttgtcagaggattgaggatcatctttaa

SEQ ID NO: 180839 - DNA, 220 bp, Homo sapiens
acagtttcaggtttatatgtcagtctttcatccatagctaattgatgttggtataaagagtgaaataatgatccaatgttgaatcttccatttcatgaatatgacataactctccaattatttaggtttcaaattttttgcccaagtgttcttcagttttcagtaaagaaatttttcacatttaaaaaaaatttcctgttttagccaatgcagtaaggca

SEQ ID NO: 180840 - DNA, 453 bp, Homo sapiens
gatgtgtaaatcaccttgccctaggcaaaatgtctggtgaaaatgtttatgccccataatacgggaattaaaaatcagcatttaaaaagctagtataggccaggagtggtggctcacacctgtaatcctagcactgtgggaggccgaggtgggtggatcacctgaggtcaggagtttgagaccagtttgcccaacatggtgaaagcccgtctctactaaaaatacaaaaaattagccaggcactgtggcgggagcctgtaatcccagctactcgggaggctgagatcacacactgcactccagcctgggtgacagagcgagaccctgtctctaaaaaataaataaattgtcaggttgcgttatgctcccctgtggtagaagtgtgggtggtgttatttaggtagtacttggagagtgcccgtcagatgtctggaaacctaatttaaagtagta

SEQ ID NO: 180841 - DNA, 763 bp, Homo sapiens
gagaaattggagttggatcggatttctgaagtcatgcattccaacctcccacatgcggcaaaagtttcttttgtgttcctgacagtcctctagcttttgttggaaccagacccagcaaatatattcatctgtattccaacaaacagttctgattgaggccaaaaatttttgtgacatgcaagaagagagtgcaaatgaaatgggtaacattgaataactaccatttcttcaattatgttcttgtaggggccttaacaacttgggaagagcttggaagattgacagaaggttttcctgaggaatcaattcagaagaattctgttctagctatttggcctccctgaacttccatttacttaatttgtaaaacggagataattatacctgcttttcaggattgctgtgattgaatgagaaaacctgtaaagacccttaaagtgtaggacactcagaaggtgcttaggggaaaagatggattattttatcattgttgttgttactattattattaataattattaggagagtgtcttagtttgggctgctacaacaaattccatagactgggtggcttagacaactgaaatttatttctcacagttctggagggtgtgaagtccaagatcagggcagcagtacactttgtgtctgtcgagggcccacttcctggtttgtagatgtccatcttctcctgatatcctcacatggtggaaagtaaagggagagaaaacaagctttctaatatctttttataagggcatta

SEQ ID NO: 180842 - DNA, 276 bp, Homo sapiens
ctgtagactttatgaacactgtatacttaagctatgccaaatttattaaaaacagtttttctttcttcaatgataagttggtcttagcttactataagtttttactttatgaagtataaagtaggtttgtttacaccagcatcaccacaaacacatgagtaatgcaatgggctacaacactgccacagctgcccactgtcactgggtgacaggaatctttcagctctgttataatcttacgtgatcatatatgcatatgggtgtcatatatgcagt

SEQ ID NO: 180843 - DNA, 211 bp, Homo sapiens
caccgcgccctgcctgatccatctacttcttaccacttctatcgctaccactctggtcccgcgaaagagatgacattgtaatctcttccctggatcgttccagtagcctcttaactggtttcttggtttatgtcttttctctgtttcagtctgttgtcagtgctggagccagagctgttaatgtgtttgtcagatcagaaccctgcaaaac

SEQ ID NO: 180844 - DNA, 538 bp, Homo sapiens
ttcgccaacatcattttgtgccactctgccttgctcccccatcctcctccagctacaccagtccttctctaagtttctgaagaggcatccttacatcccgcctttgtatttgtgagtccctcaccctggaattctctgtcccagagctgtgaatggctgactggttcccttgtcctcaaccaagggtctaactgtccattcccttatcttgccttatttttcttcatagtactcattgccactcgacattgtaaatatattcattttcactttattggttgtttcttgtctgtctcccatctgaacataagctccatgagagtaaaacttcatctgttttgttcactgctgaatctccaatgtgtcagggtgttttgccctctagagtaagcacccaaatacttattgaaagaattaatgaatgactaggtattagctaggaacagtatttcagaatgaacaacgctcaatgtcacaaaattctaatctggtttatttttgaaaatacaagagagaaacattcacagcaccattatct

SEQ ID NO: 180845 - DNA, 214 bp, Homo sapiens
gaacgttaccaaacttaacaaaccaaactaaaaactgagagcaaaagggggctctgcattctcaactcctaacacctcgttagcacagctggctatatttcctggtgttttaatgttttcacctgatggggtaggtccttattcataatactgcccaatggacattgttcttctaaagttaaagcatatgaagcatgaagttattgaggttgaa

SEQ ID NO: 180846 - DNA, 504 bp, Homo sapiens
cattcttaactttgaacacattttgtttctgttgatgagtgagaatttagtagactttgtgatagaatcagttttacacttctatatgacacttcacagtttaaccaacactttaacatagaaatgtagacagtgattttagatcatgctgatttcacattcctttctaggcattgctgtgcattcgacagacaagtggctgaaattaaaaatatgatttgtaattgtagaatattttgaagccagctgcttcatagatttcacagtgaattgcctttgttgataaaatatgctgtattaagcctttttaaaaaaagtttttaatactgttaagtaatttagacatcagaaaaaatatggaatttgtactttttatttaaatatattgtttgaaacctgtcactattttatcttgattttttttttacttgtgtttaaccataaatagaatgattacatgtatctttcaaaaacgttctgttttttgtagtttctttagtctta

SEQ ID NO: 180847 - DNA, 2103 bp, Homo sapiens
gcagcgcggagatctcggccgccaagctccgcctcccgccccgggctgtgccccggggctcgcctgaggccgaccacccgcaccccacctctagcggctttgctcgaggcccaccttcttcccacccccggcaaactccagtaggctcgccctcgctgactccccgcccccgcgtcaactgcaaggggcccgcccatagccagttccggggcggttgctcacatcgaccggaactccccgccccctcccgcggcccctggggccgtaggaggccgcagcgaggaggtagagggggcgggggtcgcactagggtgtccctagagaacgaggactctgaaggcgggacatttgggcgacccccgggcggggccagccattaaacagtcccacttctgtgccagacactgaactgggctcttgacgggcatcatctcttaatcctcagaacatcccagggagctccacaggatccccatatcctgggccatgagtgagttgaaagactgccccttgcagttccacgacttcaagtctgtggatcacctgaaggtctgtccccgctacacggcagtgctggcacgctctgaggatgatggcatcggcatcgaggagctggacaccctgcagctggagctggagaccctgctgtcttctgccagccggcgcctgcgtgtgcttgaggccgaaacccagatcctcaccgactggcaggataagaaaggtgacagacgattcctgaagctgggtcgagaccatgaacttggagctccccccaaacatgggaagcccaagaagcagaaactggaagggaaggcaggacatgggccgggccctggcccaggacggcccaaatccaaaaaccttcagcccaagatccaggaatatgaattcactgatgaccctatcgacgtgccacggatccccaaaaatgatgcccccaacaggttctgggcttcagtggagccctactgtgctgacatcaccagcgaggaggtccgcacacttgaggagttactgaagcccccagaagatgaggctgagcattacaagatcccacccctggggaagcactactcccagcgctgggcccaggaggacctgctggaggagcagaaggatggggcccgggcagcggctgtggctgacaagaagaaaggcctcatggggccactgaccgaactggacactaaagatgtggatgccctgctgaagaagtctgaggcccagcatgaacagccggaagatggatgcccctttggtgccctgacgcagcgcctcctgcaggccctggtggaggaaaatattatttcccctatggaggattctcctattcctgacatgtctgggaaagaatcaggggctgacggggcaagcacctcccctcgcaatcagaacaagcccttcagtgtgccgcatactaagtccctggagagccgcatcaaggaggagctaattgcccagggccttttggagtctgaggaccgccccgcagaggactccgaggatgaggtccttgctgagcttcgcaaacggcaggctgagctgaaggcacttagtgcccacaaacgcaccaagaagcacgacctgctgaggtgagcgttagcaggatgcacagtcccgggggtggccttggaggctgtggccacggctagtcacctttcaggggttttacaacaggctttccaatcctggctggcctctaaatcacctggagagcctcgaaaaaaacagcagtggccagtccaccgggtatgtcccaaacaaattctgattccacagagtggggctcaggcatctgtgactgaccgattgatttgatttgtttttgttttgtttttttttgagagggagtctcgcctgggcaacaagagtgaaactgcatctcaaaaaaaaaaagaaaaaaaatttacgcttcttaaccatttttaagtgtacagtttagtagtgttacccatattcacattgttgtgtgatttattttttgtcttttcatgcttcttttctttttatccccaaagttttgttattaaaaatttgatacacacagaaaatctgaaagaatcatacaataaacatcagtatattctccacctaaaaaaaaaa

SEQ ID NO: 180848 - DNA, 1972 bp, Homo sapiens
  misc_feature (1888)..(1888): n is a, c, g, or t
  misc_feature (1896)..(1896): n is a, c, g, or t
  misc_feature (1903)..(1903): n is a, c, g, or t
  misc_feature (1906)..(1906): n is a, c, g, or t
  misc_feature (1909)..(1909): n is a, c, g, or t
  misc_feature (1916)..(1916): n is a, c, g, or t
  misc_feature (1929)..(1930): n is a, c, g, or t
  misc_feature (1934)..(1934): n is a, c, g, or t
gcagcgcggagatctcggccgccaagctccgcctcccgccccgggctgtgccccggggctcgcctgaggccgaccacccgcaccccacctctagcggctttgctcgaggcccaccttcttcccacccccggcaaactccagtaggctcgccctcgctgactccccgcccccgcgtcaactgcaaggggcccgcccatagccagttccggggcggttgctcacatcgaccggaactccccgccccctcccgcggcccctggggccgtaggaggccgcagcgaggaggtagagggggcgggggtcgcactagggtgtccctagagaacgaggactctgaaggcgggacatttgggcgacccccgggcggggccagccattaaacagtcccacttctgtgccagacactgaactgggctcttgacgggcatcatctcttaatcctcagaacatcccagggagctccacaggatccccatatcctgggccatgagtgagttgaaagactgccccttgcagttccacgacttcaagtctgtggatcacctgaaggtctgtccccgctacacggcagtgctggcacgctctgaggatgatggcatcggcatcgaggagctggacaccctgcagctggagctggagaccctgctgtcttctgccagccggcgcctgcgtgtgcttgaggccgaaacccagatcctcaccgactggcaggataagaaaggtgacagacgattcctgaagctgggtcgagaccatgaacttggagctccccccaaacatgggaagcccaagaagcagaaactggaagggaaggcaggacatgggccgggccctggcccaggacggcccaaatccaaaaaccttcagcccaagatccaggaatatgaattcactgatgaccctatcgacgtgccacggatccccaaaaatgatgcccccaacaggttctgggcttcagtggagccctactgtgctgacatcaccagcgaggaggtccgcacacttgaggagttactgaagcccccagaagatgaggctgagcattacaagatcccacccctggggaagcactactcccagcgctgggcccaggaggacctgctggaggagcagaaggatggggcccgggcagcggctgtggctgacaagaagaaaggcctcatggggccactgaccgaactggacactaaagatgtggatgccctgctgaagaagtctgaggcccagcatgaacagccggaagatggatgcccctttggtgccctgacgcagcgcctcctgcaggccctggtggaggaaaatattatttcccctatggaggattctcctattcctgacatgtctgggaaagaatcaggggctgacggggcaagcacctcccctcgcaatcagaacaagcccttcagtgtgccgcatactaagtccctggagagccgcatcaaggaggagctaattgcccagggccttttggagtctgaggaccgccccgcagaggactccgaggatgaggtccttgctgagcttcgcaaacggcaggctgagctgaaggcacttagtgcccacaaacgcaccaagaagcacgacctgctgaggctggcaaaggaggaggtgagccggcaggagctgaggcagcgggtgcgcatggctgacaacgaggtcatggacgcctttcgcaagatcatggctggcccggcagaagaagcggactcccaccaagaaagaaaaggaccaggcttggaagactctgaaggagcgtgagagcatcctgaagctgctggatgggtagccctcaaccctgcctcaggctgattatctggctaggggaggggaagggaggccacttccttctttgggcacaggaaacattggcctgggtgtcctcaatggnggagcctngagggcnggnctncctgggntttggctagctcnnaccnggacggagcctgtggtacgagctattccgtggccaagg

SEQ ID NO: 180849 - DNA, 1878 bp, Homo sapiens
  misc_feature (1794)..(1794): n is a, c, g, or t
  misc_feature (1802)..(1802): n is a, c, g, or t
  misc_feature (1809)..(1809): n is a, c, g, or t
  misc_feature (1812)..(1812): n is a, c, g, or t
  misc_feature (1815)..(1815): n is a, c, g, or t
  misc_feature (1822)..(1822): n is a, c, g, or t
  misc_feature (1835)..(1836): n is a, c, g, or t
  misc_feature (1840)..(1840): n is a, c, g, or t
gcagcgcggagatctcggccgccaagctccgcctcccgccccgggctgtgccccggggctcgcctgaggccgaccacccgcaccccacctctagcggctttgctcgaggcccaccttcttcccacccccggcaaactccagtaggctcgccctcgctgactccccgcccccgcgtcaactgcaaggggcccgcccatagccagttccggggcggttgctcacatcgaccggaactccccgccccctcccgcggcccctggggccgtaggaggccgcagcgaggaggtagagggggcgggggtcgcactagggtgtccctagagaacgaggactctgaaggcgggacatttgggcgacccccgggcggggccagccattaaacagtcccacttctgtgccagacactgaactgggctcttgacgggcatcatctcttaatcctcagaacatcccagggagctccacaggatccccatatcctgggccatgagtgagttgaaagactgccccttgcagttccacgacttcaagtctgtggatcacctgaaggtctgtccccgctacacggcagtgctggcacgctctgaggatgatggcatcggcatcgaggagctggacaccctgcagctggagctggagaccctgctgtcttctgccagccggcgcctgcgtgtgcttgaggccgaaacccagatcctcaccgactggcaggataagaaaggtgacagacgattcctgaagctgggtcgagaccatgaacttggagctccccccaaacatgggaagcccaagaagcagaaactggaagggaaggcaggacatgggccgggccctggcccaggacggcccaaatccaaaaaccttcagcccaagatccaggaatatgaattcactgatgaccctatcgacgtgccacggatccccaaaaatgatgcccccaacaggttctgggcttcagtggagccctactgtgctgacatcaccagcgaggaggtccgcacacttgaggagttactgaagcccccagaagatgaggctgagcattacaagatcccacccctggggaagcactactcccagcgctgggcccaggaggacatgtggatgccctgctgaagaagtctgaggcccagcatgaacagccggaagatggatgcccctttggtgccctgacgcagcgcctcctgcaggccctggtggaggaaaatattatttcccctatggaggattctcctattcctgacatgtctgggaaagaatcaggggctgacggggcaagcacctcccctcgcaatcagaacaagcccttcagtgtgccgcatactaagtccctggagagccgcatcaaggaggagctaattgcccagggccttttggagtctgaggaccgccccgcagaggactccgaggatgaggtccttgctgagcttcgcaaacggcaggctgagctgaaggcacttagtgcccacaaacgcaccaagaagcacgacctgctgaggctggcaaaggaggaggtgagccggcaggagctgaggcagcgggtgcgcatggctgacaacgaggtcatggacgcctttcgcaagatcatggctggcccggcagaagaagcggactcccaccaagaaagaaaaggaccaggcttggaagactctgaaggagcgtgagagcatcctgaagctgctggatgggtagccctcaaccctgcctcaggctgattatctggctaggggaggggaagggaggccacttccttctttgggcacaggaaacattggcctgggtgtcctcaatggnggagcctngagggcnggnctncctgggntttggctagctcnnaccnggacggagcctgtggtacgagctattccgtggccaagg

SEQ ID NO: 180850 - DNA, 1785 bp, Homo sapiens
  misc_feature (1701)..(1701): n is a, c, g, or t
  misc_feature (1709)..(1709): n is a, c, g, or t
  misc_feature (1716)..(1716): n is a, c, g, or t
  misc_feature (1719)..(1719): n is a, c, g, or t
  misc_feature (1722)..(1722): n is a, c, g, or t
  misc_feature (1729)..(1729): n is a, c, g, or t
  misc_feature (1742)..(1743): n is a, c, g, or t
  misc_feature (1747)..(1747): n is a, c, g, or t
gcagcgcggagatctcggccgccaagctccgcctcccgccccgggctgtgccccggggctcgcctgaggccgaccacccgcaccccacctctagcggctttgctcgaggcccaccttcttcccacccccggcaaactccagtaggctcgccctcgctgactccccgcccccgcgtcaactgcaaggggcccgcccatagccagttccggggcggttgctcacatcgaccggaactccccgccccctcccgcggcccctggggccgtaggaggccgcagcgaggaggtagagggggcgggggtcgcactagggtgtccctagagaacgaggactctgaaggcgggacatttgggcgacccccgggcggggccagccattaaacagtcccacttctgtgccagacactgaactgggctcttgacgggcatcatctcttaatcctcagaacatcccagggagctccacaggatccccatatcctgggccatgagtgagttgaaagactgccccttgcagttccacgacttcaagtctgtggatcacctgaaggtctgtccccgctacacggcagtgctggcacgctctgaggatgatggcatcggcatcgaggagctggacaccctgcagctggagctggagaccctgctgtcttctgccagccggcgcctgcgtgtgcttgaggccgaaacccagatcctcaccgactggcaggataagaaaggtgacagacgattcctgaagctgggtcgagaccatgaacttggagctccccccaaacatgggaagcccaagaagcagaaactggaagggaaggcaggacatgggccgggccctggcccaggacggcccaaatccaaaaaccttcagcccaagatccaggaatatgaattcactgatgaccctatcgacgtgccacggatccccaaaaatgatgcccccaacaggttctgggcttcagtggagccctactgtgctgacatcaccagcgaggaggtccgcacacttgaggagttactgaagcccccagaagatgaggctgagcattacaagatcccacccctggggaagcactactcccagcgctgggcccaggaggacctgctggaggagcagaaggatggggcccgggcagcggctgtggctgacaagaagaaaggcctcatggggccactgaccgaactggacactaaagatgtggatgccctgctgaagaagtctgaggcccagcatgaacagccggaagatggatgcccctttggtgccctgacgcagcgcctcctgcaggccctggtggaggaaaatattatttcccctatggaggattctcctattcctgacatgtctgggaaagaatcaggggctgacggggcaagcacctcccctcgcaatcagaacaagcccttcagctggcaaaggaggaggtgagccggcaggagctgaggcagcgggtgcgcatggctgacaacgaggtcatggacgcctttcgcaagatcatggctggcccggcagaagaagcggactcccaccaagaaagaaaaggaccaggcttggaagactctgaaggagcgtgagagcatcctgaagctgctggatgggtagccctcaaccctgcctcaggctgattatctggctaggggaggggaagggaggccacttccttctttgggcacaggaaacattggcctgggtgtcctcaatggnggagcctngagggcnggnctncctgggntttggctagctcnnaccnggacggagcctgtggtacgagctattccgtggccaagg

SEQ ID NO: 180851 - DNA, 654 bp, Homo sapiens
actcattcaattctcacaataaccttttgtagtaatgacatgttctgttattgcccactggtcagcaagaaaacggaagctcagtgagtatcccccttaaatatccagcagcagagactagagacccacgtgcctggagtccagattgagggatccatacaagaattttttctgatctactttagcaactccctgccgatctccatattcttccctaccaaacaggacacttaggaaacaaatgatcaaagtggaagttatgacacctattttacccctctttgcagtatcgattcattccgtctctttcctgtcctatcagaagaaaggatgtctctgaacatttactgtaaaatttccctacaaaattttaatataaaaacatgttctgaaaaatctcctaggacatgataattcttttaagtctaagaaggaactataagcaaaatatgtaagcttttaaaaaaaaaaaaaaggctgttagtctaccaaccagaacatttggcttccattcttcccaacatttttatacacaaatacatacacgtatgtgtataggcatctataaaaaattagaatggcaataaggtattatacctagcatattttctcccctaatatttatcatgagcatcatcactgattaaaaatcct

SEQ ID NO: 180852 - DNA, 511 bp, Homo sapiens
acgttgacacttcagtatatttcagagaggactagaggtatgtgaagttggggagagtaatagctgtagaaatatatacaggtagcaaaccagtcaactctgggccttgtatgtcatgcaaatatgtctggactatctggcagatgagagtgtactactaaatggtcttacatagtcaagtaacatatccacatttaaatttaagaaactatctttttgatggcagtgtgaatgtcaaagagtccaccaattcaacaaaataacaatcatatggtactatgctaaatgctgaagactgtactgtgaatcagacaatccttgctctcaataagctttggtcctacaaggggcaccattttaaaactgctgtaattatccaggtaagcgccactgaggcctaagtgaaggaagaataatgctgacaataatgactaccattcatcgagtacttggtgtctgtctgtcctaacccttttagccatattaactaaatcttcaaacaatcacgtat

SEQ ID NO: 180853 - DNA, 560 bp, Homo sapiens
  misc_feature (8)..(8): n is a, c, g, or t
  misc_feature (60)..(61): n is a, c, g, or t
actgtcgnggctgacgtagcagggagatgtaggcagtccaggcgtgtgtccatcactaanngaccaaagcagtcaaacgtgaggacacagagcatgggatgctgtggagtaggtaaaaatcaatgaatgagatgcacactcagccacatggctagatcgcagaaaggataatactgagtaaaaaatgtacaacaacgtctatagatattttatgtaaacttaaaataaatgcaacatggcaaaaccccacctctagaaaaagatacaaaaattatcggggcttgatggcacacgcctgtagtcccagctacttgggagggtgaggtgagaagatcacttgagcccaggagatcaaggctacagtgagctgagattgtaccactgtactccagcttgggcaacagagccagaccctatctcaaaacaacaacaacaacaaaacactatggcaaagaatctcatttttagtttaggtgcagtccaggcccagtaactgcaagtgagagacatgccatttgtagttttccttcctgcattggggtgaatacagctttccgttt

SEQ ID NO: 180854 - DNA, 474 bp, Homo sapiens
tcagattagatcatttctactaaattgtcttcaggctcattgatgcttctgccaacttaaactcctgttgccctatctagtgaattttccatactgctttttatagttttcatctagaattcctatttgttcctttcccatagtttccctttctctgttgagagttctcattctttgagtaattgtctttatattttcctttttcagtccttgctcatagttttgaatattctttgaagcatttatgtgacaaccacttaaaactcttagcaaaatccagtatttaggaacagtcaagagtcagcttccactgactgatttatctcaatatggtttatgattttctctttcttttcaggaattttaatggaaaaatgccggttgataatatattttttacgtctcacaaataatatataattctgcattctgttttatttttctaagattgttgaatttcctcttaatagcttg

SEQ ID NO: 180855 - DNA, 423 bp, Homo sapiens
ataagatgaccaactgtttggaataaagaatatggtaaaaatactaccaagatatttctcagaatagttgcattatttgcatctgtatatatttgcccaccttgaattcagatttaaattcctggttccctttttgatgtatcactttaaaaggtatataatatagtctaatgatctaggtcagtccactggtgtggaaaatgaatgggataagaatattaagaaaaggcatcttgaataatattagcaactaacctgtgttgaatccttcccttggctcagggctgggcctgtggtactttatatagcttagcacagtctgctggtggaggataatgtgataatgtatgaataatgataagtttagtgaagtgggtaagagcgaacactgagattcagtttaaatctaggctccaacattac

SEQ ID NO: 180856 - DNA, 434 bp, Homo sapiens
gtagggtttgttcttgttgctgtttattgtggttgctgtttgtttagtgactttcctcataattatgccaagtctgtattctacatcatgtgtggccactgaattctttgcgcagttaacttagtggttagctaatgattagacagatttccttaacctcttggaaccaacacatctactctttgctgagaggctctggatccatgcaaactttcaacacctagccaggcagtttctaactctgcctcagctttcacgttctgctcgcacagagcctcaaggtcagtccaaggggggttattattgccttctgaagtccttcctgggcacacacgcagccaacacacgcacatggccatctgcacaccaggaggatgtcagagcttatagaagccccctatggcctggcgcggtggctcatgcctgtaatccca

SEQ ID NO: 180857 - DNA, 306 bp, Homo sapiens
actggaggcagatgacaaacctgctccttccagttggttcctgtgagagcaaaagtctatcagtggggcatcagcaacattccttcagcttggcagcagcaattctttcaggatgtgacaagctgaatacagcttgtagtgtacagtttacacgtatcagcgtgaccctctcccgcccaccctcatttccctttcagagatctgctcctgcttcatgggcctcttccccaagcttctaagtttaatatttcagattgtttatttccttccctcagctctagagatgacagttgcttcacccagttg

SEQ ID NO: 180858 - DNA, 270 bp, Homo sapiens
gacgaacagccccacccagtaggttcatggcttctagaaatgcccagaagttaacattataatagtatgaatcagacactgcatccagagtttgtacatttcatatagtaactcttagggtcttagccttcgtatttttcaattgtacaaactagataattaatcagagatatgaattcaatttgcctgaagtcctcagtaatgcagaccatgggctaaatcttagctttgtgtttctttccctttgatactattctttttttttttttc

SEQ ID NO: 180859 - DNA, 952 bp, Homo sapiens
gttgcttgacatctcaaagatatcttctaccccttctgtcatctttctcctaggactctccattctcttactctggtctttgggtccacacagccctaggctctgagttaagcatcagaacacaacagaacacaaagaatgtaacagtccctaccagcaccatttagtcaggagaatgacacactgccttgttccttcatgcatgcaggctgctcacctttctttctttccttttttttttaagatggagtctggctctctcacccaggctggagtgcggtggcatgatctcagctcactgcaacctccacctccccgattcaagcgattctccctgcctcagcctcccgtgtagctgggattacaggtgcctgccaccacgccaggctaattttttttttttaagtagagacggggtttcaccatgttggacaggctggtctcgaactcctgacctcaggtgatcagcccgcctcagcctcccaaagtgctggggttacaggcatgagccactgctcccggcctgctgctcacctttcttatagtttaggcagaatgcagatcacagcttaataaagaggacttaattctgctggcggcatcaagcacactgttggtacctcagatatgtttattgtttttattgctctttgtattaatgtgattgtgtttattactactagtcctgtaagaacaacgtatctgaattttctccccactccattttgcctggagggtatttcttgcctaattccctcctcccctttcaattagtttctctatcttaacccaccccaacccattccagcatctctagccatttcaaaacagttaggtggagtctggatcttgtaaggtgctttttgctactgtccgttctgttgatggtgatttacctctagcaccttgctttcttggaaatgttatgggcctccaccaagaaggaagcatt

SEQ ID NO: 180860 - DNA, 499 bp, Homo sapiens
gccctgttcctactaacttaaaagtgcactagctgagcctaggacattttcaacctgtttttaagattttcatgcaaatcttctgtaaactgcatttctggtgctaaactgatgcttaaatgtatcttgtagttttgtgtgttggcacagcagtcattaagcttgtctttggaaagaactgttttccacctctaaagaagacagcaaaaaagttccactgttaaataagatattctgtgtttatggcacggaattccttccacaattctgtgcttgccctctccctgctctgggaatccttcccaggatgtcctgttgggctccatccacccactgcccaattcaggaaaaagtaacccttacattctcagcacaaacctgactgttctctgctcttatcaagttcaaaggcaaaatgagcaccttccccccatcctcccctcaccatggacagaagaattattccatttcctcaggtcgctacttctaaactggaatt

SEQ ID NO: 180861 - DNA, 250 bp, Homo sapiens
ggcaaatgtttaaattatttaaaagttttaggtcttctgtctaggagccagggcttggagtcagacaccttagaagtgtacctgatgctctctctgttctactgtggtgaactggcatggaaaccactgtggtgactgagcatcccatatgcttgaaattctaagcaacatccaatgcataagtgatagtttgtcaggattttgtaagaattcccactacggtcaaatcacctattgtaccatattttgg

SEQ ID NO: 180862 - DNA, 616 bp, Homo sapiens
acagagctcagcaaaaaacaaaaacaaaaacaaaaaacagaaacaaacaaaaacttagcttatgactttggaggtaggaaaagctgaaagctccctacattcctgaaattaaatgaaagatttcactcttgtgtttaacctggccttcagatcctagattagcaaagaatttgatgtaccttctacaaacctgattttgttcattatgactccacaccttgcttgctttccttcactactctaggaatgtggaaaagtttagctggatgtagtcctggcctaccagcaagctctcccagagagcatgggacagaaaagctcagagaccaaaaccaggtgttaaaatcacacgattcactcaacttgaaaacatagtgagaagcaaggggaaaaagatggtgtattagtctattttcatgctgctgataaagacatacccaaggctgggcaatttacaaaagaaagaggtttaattggactcacagttccacatggctggggaggcctcacaatcatggcagaaggtaaaaagcacgtctcacatggcagcagacaagagaagagagcttgtgcagggaaactcccttttttaaaaccatcagatctcgtgagactt

SEQ ID NO: 180863 - DNA, 295 bp, Homo sapiens
cactaggcaacaactagatatctgggctatcaggaaaactgtcccaggaaggcctctgccctgatggaaggacagctagaaacacagttgtaacagctaccttttattgagcagttactatctgggaggcattgttagaaatacaaatatcgatttatttaaaactcgccgcccttttttttttttttttttttttgaaacagagtctcactctgtcacctaggctggagtgcagtggcacaatctgggctcattgcaacctcagcctcccaggctcaggagatcctcctgtctc

SEQ ID NO: 180864 - DNA, 239 bp, Homo sapiens
cttagaggaccccggttgtagttgtctattgttaggttaattcccagatcctagagacatgattgtttttgctattgtgaatgacatcttgtatcatcatctcttctagttaattattttgaatacagaggaattctactgatttttgtaagatgatcccttaactgaaaatactcagttatcttattaacaaaatttttatctattgcatctatacatttttatgtgtaggtgcaata

SEQ ID NO: 180865 - DNA, 531 bp, Homo sapiens
agggagcttcatttctcctctatgtggaccataatgtatttccactgtctcctttggtaagttaacagagtttcctttggtcaaggagttctaagtccaaattctccatgacttccctgaggcccagacatttgacccaagggagccaagaggaggcagaaaggaaaaccctggtgcctcaaccttcccactgcagcctgacacccctccccaccatgagccttgaggattgaagcaggctaggtcaccgagtgaatgcaggggcattgcgggggaaggacaggggtcctggaagccacggtgagggtctgtcacatccagaacgagctccctttccttctgtttcatttgaaggactgtgctttgctccctgtgcctgccccacccccctgtggttctagagaggctgtcaatcccaggcatggtagtacatctccctagacaccattattggttcaggaataggcaaatgaccaagctgaactaagcaaggtcttccttgggacttctgttggagacaactgggaaagt

SEQ ID NO: 180866 - DNA, 648 bp, Homo sapiens
  misc_feature (501)..(501): n is a, c, g, or t
gcatgtgtgactggggaggggaagtcttcctgggggacgggagtgttactgaggagtgagtccagggggtttgttgggaatactctgtacattccagcaatttggctgtgaacctaaaactgccctaaaaaaaaaagtctgtttaaaaatttgaacagttaaggccggtgtggtggttcacacctgtaatcacagcactttggggggccaaggcaggtggattacctgaggtcaggagttcgagaccagcctggccaacatggcgaaaccccatctctactaaaaatacaaaaattagccagacatggtggctcacacctgtaatcccagcacttttgggaggctatggcaggcaaatcacttgagatcaagagttggagactagcccggccaacatgctgaaaccctatgtttaccaaaaaatacaaaaattagccaggtatggtggctcatgcctgtagtcccagctacttgggaggctgaggtgggaggatcgcttanactcgggaggtggaggttgtggtgagccgagatcatgccattacactccatcctgtgcaacaagagcaaactctgtctctaaaaatatgtatatataacgtttagtaaccacaaaatatttgtctgaagtactcattccaatatgta

SEQ ID NO: 180867 - DNA, 205 bp, Homo sapiens
tttatataagctgtaaccctatatacaggtgtgaggagttagtataaacatattacagtccacaggaaaatcgaatttgtgtaattcaggctagactaaagcttagctttatgcaaagaaataaacagcatagttttgatttaaggggcttggtttttcagcctgagagaatgactggattctaagaacttgagggtgctgatgg

SEQ ID NO: 180868 - DNA, 647 bp, Homo sapiens
actgggactttgtcacaccaggttaacactgaaataataaggtaggtgttatgaagtggaaaaaagctattattacaagggtagggattaaagaagtacaggtatcaaatttttccttttaggaatatgttaattaaaaatcactgtttccatttttctgaatgtggaagtaatgctactgcatgaaacgattatctaaatggcgtctaatttgtttaaaaaggttagtgctattaacacttgatgaaatagtggctgtcatttcctgaatgcctcctctgtgccaggcacttccttgaccacttttccttcactgcttatagggaggtattctgatgaggaagtggtgacaaagctaagtggtttgctagtggtagaaccaggttagaattcaggcctgtttgattttgaaggctgtgcagtttttcctttatccccgattgagtcatcttatttcacattttgtattggaatggagacgagagtctattttctaccatgttctgcacattttagggctagcacctaactttctgttgagttttttaaaactttaaagctagaaatcaggccgtcactctgacctatcggggcttctgctatgtgcaaaatcatttctgttttcatgtttcacttaatgagcattt

SEQ ID NO: 180869 - DNA, 180 bp, Homo sapiens
tgctgggattacaggtgtgagccaccatacccggcctgtcttacttacatttcttaaggcttatttgtcacacttaaatagtacctcattttacacatatttaattgagcactgtttatctttcagtgccttcatgtgttgacagcagggactgtgctggagaatacagttgaattttat

SEQ ID NO: 180870 - DNA, 314 bp, Homo sapiens
attgtaactgtcagaattagtcctaattgcagatgcgaaagctgccattataataaaaacagaggcagtgcaggcattaaatgtagcagcctaatttgtgagactacagaaaaggtagagtaaatgaatatttcattactttaattaccagggactactcttttcttgctgtcttatgataagtgttgctgtaactagcaacagcaaacatccactaaaacataaagtgcaataatcgtcctgctgtcaggatcaccactttaaaatacgagcagggaaaaaatataatggtttatctatttcttagagattgc

SEQ ID NO: 180871 - DNA, 459 bp, Homo sapiens
gatcctcacagtaacccagcgaggtggacattatcatcatccccattttaccagtttggaatctgaatcccaaagcgattgagtgacgtgtcggaggtatcccagcaagtctggatgtagctctgggaattcagatgctgactcaccacgccccataactttaatgctggagggtgtgatgggaacatattcctaggtgtccagagaggcagaataggaaccgtgagggtgagcaagtcagacaggtgggaggtgggctgagtcagggcggggaggctggtgtggccgcagcgacatctggtggccagcgctcttaacagccaccaggttcctggcctccaggtgctacttcaactcctggcttgcacctctggcagcggagcccttcccctgtggcctcccagaggctccagccaggcgagcactgtgtgcccacatctggctgccctgtagggggac

SEQ ID NO: 180872 - DNA, 269 bp, Homo sapiens
cctccaggcttatcctgggtcattctcttcctcattcttgagctcgtgccacactgaccttccaattctctgaatatgtcatgccccttctcacctaaggacctttgtacacagtgctcctaatgaccaggaggctcttcctttttcctctttgcccctctgactcctacttatctttcctaagtcaatataaacagcagggtttgtaggaaagaggctgccctctctcccccattgcagtttaaggtcctttgctttacagcctccta

SEQ ID NO: 180873 - DNA, 266 bp, Homo sapiens
ctttaccgtttccaactcttgccctccctgctcttggatgcctccgctggcccaaattcctgggagttggctcacgccagcatgcaacctgcttgttgctgggacctgcgagagtctttcccttctctgccacagagactgtaactacataaagggaaaaagggggacttaagactgggaggctattatgaacctccactgggaaaatgaggagtacaggaattcccagaaggcagctgctcatgtgggaaaagtgtaaagttgaa

SEQ ID NO: 180874 - DNA, 389 bp, Homo sapiens
ggctgaaattttggctgggtgtcagtatacttggacaattcataacatttatagctacatgatttttcttatttcaaattcaagtctactatttctgaatctctaggagtgatgatatctctagcccttgagcacaatgtagccacagggtatacaaagcaaatcaaaagcaagcactggaaaaagttaaacctagaaggaaatataagtccaataattccactgtgccagaaaacagaattgtcattgggaaatttattaaagtgaactacatgaaactgctgatatacaactgtttttgacctgcaaaaacagaaatttcatatggctcaacctaatgttattttctgttattttctctctctttttttttttttgtgtgtgtgtgt

SEQ ID NO: 180875 - DNA, 376 bp, Homo sapiens
agactgctatagaatattccatgagttccacagttttatgtaaggggaggatagtattttcagttttgttcatgataactttacgaacaatagtcagcattttgtgaatcttttggacagcagtggttctttacgtcgtaacttttgggaatagttacacagcattttccaaagtgtgttctctgaagtgctagtttatgggactcattgagacccataaaaaggattataatttaggaaacactgagttaaacatttgttcaatactccatactctctaatagtctatacacctgaaatacagtaggtagtgtttcttgaacttatttctccatagcctccttttctgggaatcaccctgtaggactagtgttct

SEQ ID NO: 180876 - DNA, 215 bp, Homo sapiens
ccatggtcttgagtcttggcacccacaaattttttttttgtgagacacagtctagctctgctccccaggatggagtgcagtggcatgatcatagctcattgcagcctctaattcctgggctcaagcaatcttctttcctcagccccctgaggagctgggactaggcacatgccaccatgctcaactaatttttgaaatgtttgtagaaacagggt

SEQ ID NO: 180877 - DNA, 519 bp, Homo sapiens
ttgccctcaatgcctctactatggtagctcactcaggcctgccttcgtccaccaatccatccttaaacacctcttcaaagtagactgcagataggcagcaggtattccactttgtagattcaaaaaatgaaatggagaaagaaatgacaccctctatatcctactataaaattgtgaaaaagctaagaatgaaaacctgatatccttaacttctagtcctttagttgagatgctaccaaagagcaaaacaaatacttttcactattaaatctttttttcctttaaatcacaagagttcataaaaatcatgcctggttaggtaagattacaaggtataaaaaaatgaattggctgtgcgcggtggctcatgcctgtaatctcagcactttggaaggccgaggtgggcggatcacaaggtcaagagatcgagaccatcctggctaacatggtgaaaccctgtctctactaaaaatacaaaaaattagccgggcgtggtggcaggcgcctgtagtccgagct

SEQ ID NO: 180878 - DNA, 275 bp, Homo sapiens
tctgtgacacacgcacactttcagctggagtatcctctctatagcccctctgaacggtctgtgacacacgcatgctttcagctagagtttgctctctctggttttcggtctgtgacacacgcacgctttcagctagagtatcctctctatagcccctctgaacggtctgtgacacacgcatgctttcagctagagtttgctctctctggttttcagtctgtgacacatgcatgctttcagctagagtattctctctatagcccttctgaatggtc

SEQ ID NO: 180879 - DNA, 221 bp, Homo sapiens
aacagataaatttaaagtattgggtttctctggaagttctgcaaattagtttagttcattccacagtttgatgcagattgacccttggtgaaacttcacagtaaaatacacggaatcttaaatataattttaaggaacaaaaacacaaatctctttaatgaatttatattctgctgtcaacaaaggctttcaaggaggcaataaatgttctctgcaatccc

SEQ ID NO: 180880 - DNA, 747 bp, Homo sapiens
aaccatgagaagtatgacaacagcctcaagatcatcagcaatgccttctgcaccaccaactgcttagcgcccctggccaatgtcatccatgacaactttggtatcgtggaaggactcatgactacagtccatgccatcactgccacccagaagactgtggatggccccgcgggcatcaactgccgacagtgcactagcgcgttcgcggcgcattgtgccaaattcctctgtgccactcggctctcctggcttggaggaatcggggaaagcttgtggatcaaggtcaatatcccgatcatcatcttccaggtagcgtagatctctccttcacagctgtgtggagctgatgctggtgtctgagtaggtcctgaagtgcccgtggtagtacttaccaccctgccatgagtataaggcatgtgcgctcaattgtgcgatggggggagccgatcagaggggtgcactcactctcatggcccctactctgggctgtaacgccgcacgacttgtacggtgagtggtggtcgttgtgaccctatcgaagaaaggtgattgaacacaacatgcctttcaacgatcaggtcagcttggtgggccttgccctgttagccactcaaactgactctaattagctccatgggctcatttgtccatggctattggaccaactgtaagtgtagtcgtagcaagcggaactgcggtggagtgtgcagcttcatggccccaaaatggccttccaaggaaataaga

SEQ ID NO: 180881 - DNA, 526 bp, Homo sapiens
gtttttttcagtagtgtgtgatcttgacagggaggaggaggaagatgacacagaacacagtattgggagcgtcttccaagaacaccattgctcatagggaatgcaaaccagggaagccacagcatcaccttcactgccctgctaaatctcattcttacctcggcaccctctggagactgatattttggtgctggctctcaggttttctgcctgccttgcttaaggtgggaagagtctttggaaagactcaacaactcaaaggaatcaaaggaagctacacccgtcactccaaagatggaaggaggacctcactatttgaggtagacagctaggatctgcccactgaggacagactcctggtacccttggatctggtcattgcaaagtggagtatttaatgattcaccacaggagcttctcatgctcaggcagctttgaggcaaaagactctaaaaatccccaagtaagggtaatatctcagaaacacaaagcactgcgttgcatatggtttatcacatgcagtatt

SEQ ID NO: 180882 - DNA, 418 bp, Homo sapiens
cttgttatgaagttcatcacagtagtatccatcagcatatacactcttcttttaaaaaaaatatttatttgttttgagacagggtctcactctgttgcccaggttggagtgcagtggcgtgatcttggctcactgcaacctctgcctcccaggctcaagtgatcctcccacctcaacctcttgagaagctgggaccaaaggcatgcaccaccatgcctaactaattttttgtattttttataaagatggagtttcactgtgttgcccaggctggtctcaaactcctggactcaagcaatctcacctcagtctcccaaagtgctgggattataggcgtgagccactgtgccccaaaagaaaaaaaaatttcaaatttcataccttaaaaattatctcctttatgagataacacctgtgg

SEQ ID NO: 180883 - DNA, 748 bp, Homo sapiens
cctgggcaacaggagtgaaactctgtctcaaaaacaaacaaacaaacaaacaaaaaactaaccaaccacaaaccactccattgccaggtgcaatggctcatgcctgtaatcccagcactttgggaagccaaagtaggagtttcacttgaggccagaagttcaagaccagaccaacctgtgcaacatagagagacctcctctaaaaattagctagcagggtggcatgcatgtatagtcccagctacttgggggtgctgaggcaagaagatcacttgaggccaggaggttggggctacagtgagccgtgattgcatcactgcactccagcctgggtgacagagtaagaccctgtcttaaacaaacaaaaaattaaaaaagaaaccctccgtcagtatcaaaagaaaagaatggccacaaacatactctctaaaaactacttgccaatctcgtgaaactaggacgcaaataccctctaaactcaggtttgatgtatgcttgaagaacaagagagaaagttcaaaaagagctctagttgcaattattaaaatggacagatgagaactatacatgtgagtaagtcagtggcctattccatgctgtagaatcactggagagcaggagtaaagcaaagggacactttttttttttttttttttgggaaaaagggtctccctctctttttcccagcttggagggggggacccgagcctcaaattcggaaactcggggccaatagggtgtcccgggg

SEQ ID NO: 180884 - DNA, 688 bp, Homo sapiens
attgtggaagctttgttcttttgctctttgcaataaatcttgctactgctcattctttgggtccacactgcctttatgagctgtaacactcaccgtgaacgtctgcagcttcactcctgaagccatcgagaccacgaacccactgggaggaaaaaacaactccagacacaccgccttaagaactgtaacactcaccacgaaggtctgcagcttcactcctgagccagcgagaccacaatcccaccagaaggaagaaagtccaaacacatccgaacatcagaaggaacaaactccagacacgctgcctttaagaactgtaacactcaccgcgagggtcagcggcttcattcttgaagtcagtgagaccaagaacccaccaattccggacgcagtaggatgatggttatcagagggtaggaaggggtagcagtggtgggaggtagagatggttaatgagtataaaaatatagttatatacaatgaataagatttagtatttgatactagatctagtttttgctactacaacaatgtgattatgaaggaagagagagaccttctcatgttgttttatactcagtacctgttttaagaagaaacaacaaagaagtaaagccaaagacaggcagcctggcgccggcctgaaaccaggcctgggcctgcctggcctaaatccagtagttaaaaa

SEQ ID NO: 180885 - DNA, 215 bp, Homo sapiens
tccagaaagggcaacagaagaagacacagtctcaaacaaagaaacaaacaaaacctttatcttaatttttatgtttctatattcatttttctcttttgaccacaagtatcttgataataactctacttctgatggtaactgattatttatcaattatccaatccaaatgcctttaataaatcttctctatccctttccttctccttttctggttt

SEQ ID NO: 180886 - DNA, 387 bp, Homo sapiens
tgggcagaaggatcacttgagtccagaagttcaagttcacagcgagccaggtagggcacatgccactgccctacagcctggccgacagcaagaccctatctcaaaacaaaacacaaacaaaacaaacaacaaaagaaaacagatcaaatggaaatcttaggactgaaaaatacaataatcttactgaaatggctcaagagaagaatgaagatggtgagggaagaatgaatgaatttgaaaatataacaacagaaattatccaatctgaacaggaacctgtgggactactaaaaaaaaaaggtcagctgggctcagtggctcacgcctgtaatcccagcacttcgagaggccaaggtgggtgggtcacaaggtcaagagatcgagacc

SEQ ID NO: 180887 - DNA, 466 bp, Homo sapiens
tttagcttccaagatcccaaatagacattaccaagaaaatcttggagcccaagaaaatatctgtaatctccaaaaatacattttactgataataggctctgagttcttattactcgaacacggcataaataaaacccgtgtaggtttcaatttcatcatctctgtccccaacactcaaattttttccatcctagaaatccacttgatccttaaccctacctagagtacctcctctgacgtgaagcagttgccagttttcttacctcaaagaagatactatgactcccaagttataactctcagtgtacagctcctggaacacttctggtattctccttcgacctatacacttaacctgccttcccaatgaagatcagttacttgaaggccttcttagcacagtaccttacagttttcaattgtaacttaaggccaggcacagtggctcatgcctgtaatcccagca

SEQ ID NO: 180888 - DNA, 552 bp, Homo sapiens
gaggagaagaatttcaggaagcatgaggtagctcaatggcaccaaatgctactcagatcaaggaggatgaaaccagggaaaggttatgactttgataaataggaggtcctaggtcaccctagagaggggattctcagagggtaatagggctaaggttgtgacaaagctaaaactccaaatgagggcactattggagagaattgaccactgtaggaaataaaatggtagaaagctggagggactagcaagagaagagacagagtctgcagagttgtaggaaaagatgacctaggagagggggagatgaatgatgcaggaaaagaataggaagagcagaatcaagggggaaggagacaatggagctaagatacaggtaaacttggtgccggggttgggggcagggggggctctgggaaagaaaggagtcattctccaaggatgctacaaatcacaagacagtcccaaatgatctcatttctaaaaacatcacaaagctatgctggagagttgttgaagagaaagtctttaaaactatttccatggacattcatt

SEQ ID NO: 180889 - DNA, 181 bp, Homo sapiens
acgaaacactagagaccagtaacagcaaaatggcaaaaccagaagtcatgagtaactgataaatggttgtcccgtacattactgtagattcccatagttggaagcttcccagttgataaggagggcttcccagttggaagtggagaaaggcactacagacttgaagtgggaggacaaaggt

SEQ ID NO: 180890 - DNA, 414 bp, Homo sapiens
aagaatcaagagagtcaccggttaacctctgataaatttccttgtgcgttacgaatttagtattccccctcttcctgaagctaaacatccccactatgtgataggatatttactgttttgtacttatcactaattctcgtttctacatctcctcacccgtttttacgggtgtatttgtcctcaaattataatcaggcatgaccttagagatctagagctcgttataaagctaacattacgttcagttctcgtgctaaactagctttttctcactgttgatcccagggccaccaacatcagaatcgcttgaaattactacctcccatttcggtatctggaggtggggtctgctcatctattttaacatagtgagtctatgcatattgcagttttgcagcagcgtgcgtagaagca

SEQ ID NO: 180891 - DNA, 579 bp, Homo sapiens
gtgcatgccaccacacccagctaatttttttattttttctttagtagagacagggttttaccatcttggccaggctggtctcgaactcatggcctcaagtgatccacctgccttggcctcctaaagtgctgggattacaggaatgagccactgcacccaaccattgttgctgtttctgaatagctgttattgaaatgtggggggaggaggtccaaatggattctcaaagtgaagtatatgttacctgtggatttaatttagctgtgcattcccagtcctttactgtcatggataatagacatgaattgtgtatatatatattttgccatggatagtatttttcttttcggagaaggaggggtttgatttgggcaaagtgtttatgggaaagagacagctggtgaagtgtgagtgtgtggaaatacatgagaaacgcctgatctctccatgtcatctgcgttggtagagccctgtgcttgccaggtgttgtggtgacaggtgcaaaacaagggtgcccaatttagaggtaaatgctaaaaggccagtgtcatttgcgggtgaattatttaattacagaca

SEQ ID NO: 180892 - DNA, 475 bp, Homo sapiens
cccacgcttataatcccagcactttgggaggatgaggcaggcagattgcttaaggccaggagttcaagactagcctgggcaacatggcaaaaccccatctctacaaaaaatgcataaaaattagccagcatggtggtgtgcacctggtcttgaagatccactgagcaatcaagataccctcctgggacgtcaggcctcagatctgcagcagcttttctacatcaggttggaggagaatatttgaagttcttatcttcctccaaacgtaagaccacaggcccacaaatggaaggctgaacagacagctgtgtccccttgctgtctaggccgcctcagacaccacagatctcccggtatcactttatccatcaggccttggcagggaggccacaagtgggctgtcttgttccggcctgtggctgccagccttacagaccagtggagcaggagagatgggcctcagaggaagagcggt

SEQ ID NO: 180893 - DNA, 229 bp, Homo sapiens
gaaaattaagatgcggcatggtctaatttaaaaagattaggtttggcagtaagccttactgatgaaacaatttttaaaaataaaaatcttatttcactgatgtggagcctaacctgttttttttttggttgtttgtttgtttttttagatgaaatctcactccgttgcccaggctggagtgccgtggcacaatctcggctcactgcaacctccacctgccgggttcaag

SEQ ID NO: 180894 - DNA, 306 bp, Homo sapiens
cagaagtgctgccgctggttgtcgggcatcgggctgctgttgcatgccccttcaggaggccttcacattggaaacgtgagcatgagtgacctactgagggccagaggcctctgggcattctgggatgagaaggaagctgcacttgacatctaagtcctcttccatcccacagtttaaaatggcatacagttatgggatatttcctatggatatgaaatctgatttcatatgcacatgtgtatgagagagaacaatgtaatgaacctttggtgtacactccaacatggtatattttatttcattgta

SEQ ID NO: 180895 - DNA, 329 bp, Homo sapiens
aactaccacccagataacgctgctcacataaaaaggtaggtagcacatgtgtagaaaattcaaatagtgaagaaagctataatgtgaaacaaaaaaacaaaagcttttccccgtctccttattattatcaatttctgttaaagtttgtcccagtgcttctgcatgtgtttgcggttgtatctgcttttacaaaatgtaaacaatgttcaatagcttgcctttttaatacattgcttgaaggtctctccgatatcaaaaatattactattttattattttcagccattctagaatattttacatactggaatctcattaaacccccatcg

SEQ ID NO: 180896 - DNA, 546 bp, Homo sapiens
tgcggtggctcatgcctgtaatcccagcactttgggaggctgaggcaggcggctcacgaggtcaggcgattgagaccatcctggccaacacggtgaaaccctgtctctatgaaaaatacaaaaaattagccgagtgtggtggcgtgtgcctgtagtcccagctactcaggaggctgaggcaggagaatcgcttgaacccaggaggtggggcttgcagtgagccgagatcatgccactacactccagcctgggcgacagtgggaggctccgtctaaaaacaaaaaaataaaagatagctgggcatctgtggtcctatctactcaggaagctgaagtgggatgactgcttaagcccagaagttcaaggctacagtgagctatgatcatcccactgcactaaaaaatagtaataaataaggtcggggtagtggctcacacatgtaatcccaatactttgggaggctgacgtgagaggatcactagagtccaggagtctgagaccagcctaggcaacatagcaagaccctgcctctacaaaaataaaatt

SEQ ID NO: 180897 - DNA, 381 bp, Homo sapiens
ctcccaggttcaagcgattctcctgcctcagcttcacgagtagctgggactgtaggcaagcaccaccacgcccagctaatttttgtatttttagtagaaatgggatttcaccatgttgatcaggatggtcacgatctcttgaccttgtgatccgcccgcctcagccttccaaagtgctgggattacaggcgtgagccaccgcacccggccaaggtccactttttctctgctgtttgaaatctttagatggattccttttgccattagtatgaaatccaaaatccttaccatgataaaaagctttgcaagctctggatcctccccactagatgtttttttctccaattctcttcctcttcttcatgatccagcacaccacgc

SEQ ID NO: 180898 - DNA, 388 bp, Homo sapiens
gaacggacgctgctttgtccaggtttttcagagccctagaggcctggaggggagccagtgaagaaatgagaactctgctctctacagctcgcctgtttttcccccattaattcaactgtcctcctccttccttgtttcaaataacatttcggtaatacagacagatgcctacctgcagggtacggccataatgcaaccttgagggggaaatgttagggtttaaagaaacccagagcaggaaggagccccttacccccacaggatgtagagagacttcctgtcgcctccctctgcaagccatcgccagctttggagtacccggagaaggagcacctggtggaggttacagctcaggcaaaggtttggaggatggatgtcagacgtggtg

SEQ ID NO: 180899 - DNA, 223 bp, Homo sapiens
actctttcaccacgaaacaccaactattaatacttagtctctataagcctcctaggatcctgttgtgttcatttacctaggtgatgtacatcatcctaaattctgccttttcattttgtattacgatgtatatgtacagtacatatttttacattgtcattgtgtcattcttaatggtcacagctgcctgaactaaacctaaagtcagacagtcaggacagtc

SEQ ID NO: 180900 - DNA, 467 bp, Homo sapiens
atgtctaaatattctcttaagacagattctcaccagcagagcaacatttttaagacttgggatacttactgctaaattacttttcagacaagttgggcaaatttgcacttttgccagcgtgtggctaggaggttgtcatacctccacgctcactacaatcttcctattttcacaaatgagtcaatgaacgggctggatttgttgtaactgtctctcaagtgatgctttctattggattcccacaatatgactactgctaacttttaaggactaagttaccattttaaatggaaagatttcatcttgaatgtgaagctggatatctataaataaaaaattgcagttggttatttggtgtttctcgtattgctagtataagttccttaaatattatatagatattatttttatgatttagcatttatcccatgataaaactggaatcatgtatgcctcatacggattga

SEQ ID NO: 180901 - DNA, 357 bp, Homo sapiens
ggctccttgtctcctgcccagaccaaggagagacttcttccaattctacatctgcccaagtaccattaatgtttattagcattaagttctgtagtgaggaggatgagagatgcttgctaggctgagtgcattctttggagatttccacccagagccctcgctgtctgcctcagtttctccacctttgtcagtgattgagcatgtatccagatgccagagtgtgggccctggtagggcctggctgggtttgccactggtgaagctgcagcaagcacctcctaaaggacttggcaccaaagtccagctcctgcctcttttgacctcatcgccaaaggtcttcccaccaggccaggatta

SEQ ID NO: 180902 - DNA, 184 bp, Homo sapiens
gggattgcctgccaaagcgtactacccaacttcacttccttttgggtatggaccacgtgaaactgagtgggctttaaaggcctggccattttgactgaacatgggacaactccatttcagttccgaagcttcctctttgagggacccaaggtcacctgaggatattgggtactacgctttggca

SEQ ID NO: 180903 - DNA, 660 bp, Homo sapiens
gaccataggaatcttgattctctagtttggttgattccacatttttgtgcctcagttttctcatctaaaaaatggggacgactgcaacagtaactatgataaacactgtgtaggtccttacacttacatcatttgatcctcagttgctaaatgatataaatagtatcatacctacctcatggcatcataagtgtgaatgcatgtataacacttagcaaagagctaagtgaccacacagttcattaaatgttcattatgaccatcgtctacacacatgtaactaacacaggctcaactgcttgctcaactaaaaagattgcagtggctactccggcagcgggtgctgcttcactgccgctcatcatggcactgagcagatgtcctggagccagggagaaaggcacaggcgggctgctgccttcatcccgggtctcccccacccgcttgagtgtgattcaggtgttttaaagatgtgtttggtacaacgtggtttcttaacacaaaccagctaattttgtacttaactggggaacagcattgagcaggcagccatctgcgcacttgcagcccgtggtatctcacctctaaacgccgcgtgactgctgtgtcggggttctcagtgagaactccagcaaaagattctgtagtgaggaaagggcc

SEQ ID NO: 180904 - DNA, 114 bp, Homo sapiens
tcacaaaaaaaaacaaatgcaacaacacgcagaatcccaattagaaattatagactatcccaccttttctactgtgatataatttcagttagcatcttatacacagcttgaaat

SEQ ID NO: 180905 - DNA, 243 bp, Homo sapiens
gtaactggagaaaatctttcaaagtaaacccagtgtcggagctaccccagtgtaggttatcagtcctggagaacagattttggcaaatctagataaagagtggctgcttggcctaagcaagttttttaagggactagtaaaaagtcatttcctatagaagctccgtgtgcactccagcacaaccccgggattgctttatttgttttgagcttcttccccatccttcctttttttttttccccc

SEQ ID NO: 180906 - DNA, 270 bp, Homo sapiens
ggatgatcgagcaaggcttgggactcggcggaagggagcttgtgatgcaggctagaaaagaggagtctcttcccctcattatcccaagcaagtcttcccagggaaaatttgaaatagctgagacttgtgtgtgtcatccttcccggatcctttccctgctccacgttgttctcatgcttgccaagggccctgaaaatacagtgtggtgagaaatgctgctctgtgcccaaatgtagctgacttccctcctcttctccctcttcccaaagt

SEQ ID NO: 180907 - DNA, 376 bp, Homo sapiens
cattgcacaggcttatgtgaaatatgcaaaagctttgaaaaataagtgcctagaataatcccccataaaacttttagatagattattatgaccctattcttctggtacaaacataaatgtgtttctgataaatgtattttattatgttttgcttcatatgaacaccctattataaattcaggatggttaaaagcaaactttaagacctctctcttcctctggcagtcaggacaaggttttttaaaccaaaaacatatgtttaaatttagctccacatgtgccagctagctattgactgaacactgacatgtgtttgagctctagggatctcaaatctctctctgcttctctcctcagttctcttacaccacacatc

SEQ ID NO: 180908 - DNA, 244 bp, Homo sapiens
tctgctagcctgacacgtttcttctttgctgatctttttaaacagtttatgtcccacaatatttatccttctccctcacacaccattcatttccattactcactctctgatttggctatacccatcatttctgaaatagagaatgcctgaacttctttgaaaatccacatgtcaaaatgtaataaaaatgttttcattgttacattgttttaagagaaatgaatggcttgctcaaccatcagtt

SEQ ID NO: 180909 - DNA, 270 bp, Homo sapiens
agtgccgttgacagagacccaaggagacaagaaaggtgtgtgtctaagtggattccaccaaacagtggtgcctgagcatcttcttgccttgacttttagcagtcctgagaagtccgcccattttctcagcacctgatggcggaactccaccagaaaagctccaagtacaggccatggactgacaagctttttagttcttcgaatggtcatttattttcagttagattggcacacatcacgttagtagtgtctagagatgtactggataag

SEQ ID NO: 180910 - DNA, 177 bp, Homo sapiens
taattctgtcaacaccaaagtattgttacagactacaattacaacagaaatttagagaacaggacagtgtgagataaaggtatattccatgtgtgagttaaaaatcttctctgtaggcctcacagcacatcatatcactcatcaaaacgctggaccctttcccatgactcaaagtgg

SEQ ID NO: 180911 - DNA, 243 bp, Homo sapiens
cacacgcacacacagacggacatccccagtgacacatcccctcccagtcctagcactcaggacttagaagaaatgagcaatgagtggtgggaacagaggctgacacataggccctggaaatggacagaactggatttgatgcctaggttcaccaatcgcttgctgtgtaagcctgggtaaattgctctacctctctgattctgtttactcacttataaagtggagaggggaatagtaccttca

SEQ ID NO: 180912 - DNA, 411 bp, Homo sapiens
gatagctcatcttttaagtcccttccctaaaagcctgtgtggtaatgggtgtggagtctgagtctttgtttctagacagggactagcaccaatgctggagttaattctcaccttctgtacgaattcattttagagacattgatgtgtcctgagcaatggctactatttagttttaagtctagatttgtgagacatttccatttaattttcattaaacagtttttcaaaaattatgactatatgccaagttggtgtcattatgtctcttaacttatagctatagttattttaatgtgcatatatttattccttctatgcaatactttctgcttggtccggaggattagaaagcaatttgtcattctgctttgcacacaattccctaacttttgaggggaaaggagacatctg

SEQ ID NO: 180913 - DNA, 865 bp, Homo sapiens
ttcctaaatgctcgctttctcttgggtggagcatatttgaaggtccctgggagacttacaggacctctccactgcccttttctctggcatctgcagtgcactctccaggtgacctcttgcacagtgccctgctattttgccccatggcatcttaccattgggctcttcttgcccttcaggaactccttttgggcaggctctatctggatggctcaagcttgggtactttccatgctttcctcttggtccgtgggaaactcccacattcttagcatgccaggtgctgaaataaagtctacccactagtgccaccattccaggtctgggctccagccaacctcccacatgtcccattcagcagacattggtctctatgttcatttatatctcccaaataccagtaaattcatgtcaggctcttccagaactctctctcagtgacttgcttgtggtctttgacaacactgggtcaggagttctgccacccaggaaacatccagccaaggactcagatgcccatctgtttcttacaggcactcccagtctcttggtactgtcctaccttggtctgcgtcctcccctcgcccctaaagaacaagaaacagggaataccaaaggactccagacagatcagcaatcaacaacagatctatctccatgagcgtgctctctttcctgtgtcaaatgtgtcatctcatagaggctgcaggtggcagtgggggccatgggagctggaggaattgtgctgtcttttgcgtggctggaaaagtatttttctacaatgtgggggtacctgtgtacacttctgtccttaagactcagctcaaactccaacactaatcaagagtgcctgtcaacatcttgt

SEQ ID NO: 180914 - DNA, 343 bp, Homo sapiens
ctcccaaagtgctgtgattacaggcgtgagccaccgtgcccagccatctccaagatttctcatatggctttctgagactccctagactcttatagtaatccatccagaatcatttcctcatgcatagtttttggtagataaggtactgaaaaaatgaatttcatgaagaaccaacggcaaggagaagaaaaagacagacatacatgacacagtgatctctgtgagaacacccacgctattctagactctgtaaggagaaaagggaagagggttcttgcctgagagtatcttacaataatttggatacaaaatagttaaagccttcttttattttaatgtgtat

SEQ ID NO: 180915 - DNA, 372 bp, Homo sapiens
ggcagagcttgcctttctcccacgagaaatgagaaaagtctcaccttgtctctgacccatgtggaaaaaatgggtgagatcaagatcaattggaccagatggtacaaaggatcatgcgagtagaggagtggcccaggatggtggagttgggctgggaggagggtttaccctgttagaaaagtatctctcaactctttcccattgttgttaacctgggcctggaaaatgagcaggacacagcagtgaggggaacaggggcttcagagttgggaagagcggaatcttaatcccagctcagcccttcttgccaaaccactttaactcaacaaacttgtttcccaaactgtgccgtggggtaggaggtgggtgaga

SEQ ID NO: 180916 - DNA, 350 bp, Homo sapiens
tcatatcaaacacaaggataggatctgcttctctttagcatcaatccaaggtgaaaaatcaaaatgttacccacgacactaataaacagtagtaacagtgacactgtgactatagcctacagttcatgttataataaaatcaaacagacatgggactatttctagacatggcatgatgctatcttataaaaagcattttataagtaatacgtggaaattgagaaaatgtcccattttgatgccaaattcaccacatttaataaatcatccctggctgtttccatgtggggctaccagatccatatttctgactataagatcaattaaaatgattaagcagtgaaatgtag

SEQ ID NO: 180917 - DNA, 544 bp, Homo sapiens
ctcctcctgcatcagcgccccacccaacagagccgaccaggctgggaacaccgagaccgagagcgcgtggctgtgtctacaaaggcctcctctttgagggagacacgcgaggcacgggtggggcgatgagacaggatcggccggtccttgacagtctctgaagctgggagaacatgaccccatgctctcctgttggagtcaccacctctttgccaacagccaccaaacctccacctccaattaagctccacccccatgtccccactgccctccggacatctgttcaccccccgctgaagtctctaatgggttcttccgattccacctgtccaaggtaaaaccctgaggttgtccctcctccgcggcacctccaggtatctggttgctcaggctgaaatgtttcccaaggccctggctcctcctccttccaaaccccgcaggcagctgattagcaaactctgactctaacctcaaaacatgtccagaattcagccacatctccccacttccccgcctggccctgggccccgctattccatctcaa

SEQ ID NO: 180918 - DNA, 855 bp, Homo sapiens
caaactcctaaccttaagtgatgtgcccatctcatgcctgtaatcctagcactttggaaggccgaggtgggtggatgacctgaggtcaggagatggagaccagcctgaccaacatggcaaaaccctgtctctactaaaaatacaaaaattagccaggcgtggtggtgcacacctgtaatcccagctacttgggagactgagacaggagaattgcttgaacccaagaggcagaggttgcagcagtgagccgagatcacgccactgtattcagcctggatgataagctgagactctgtctcaaaaaaaaaaaaaaggcaatatagcaaaacggactctctgggttctgctgcttggatatcagaaatctgactccatgaaagtgcatcatcacaatactgactttgtgtataagcattgagtgtgtacacaaaatgttgaaacttcctcgataaatgagatatccttttcgtacatctgcatttgtgaaagataaaatttcttgagatctcagctctttgggtgactgcatatgcagtggtgacccagcacagtttccatcaatctcgtcaaaagacttgaggttgttgggcacagtatttcagatgaccacagttaaaaagctgggtatacacaattaacaaccaaagtgatatgcatttatacctttccctttatgaccaatttctttataaatatggctcatctgctcataactgttagacccacccaactgtcattagtaacctgagtgtttatgcttgcaaaaatgtatgttgttattgtctgttttattatattaagtgatgtataaagtattctgttgtgtttttatgtttctcaaataaattccccttt

SEQ ID NO: 180919 - DNA, 1102 bp, Homo sapiens
agtgggcccaggacaagagaaggctctgcaacaggtccagggtgctgtgcaagctgctctgccgcttgggccatgtgaccagcagatctgtcaatggcaggtaggggagcctttgggtaggcccatagaggtgagtcacacctccagcctttagaactttggagcaagagcaaagtatgttttttccctctgggcaggtgggggagggtgaggagggtgcagaggggaggagaggggatccactgtcagaccccctgtgctttccagatttgagcattcagtgagctgtcaggtggggcaggtactgggagcacatgcgccccccctccgcaccaccagttcccctgccaggatgccccaccctgagcctgaggctgcacgggcccaaaaaccactaggaaaagtgaagagaggactcaagctcagagagggaaggacacttgcccagggtcacagcaccaagtgaaggatagggccttgctcattcatctggattttcagaggctgagtctggtaccaggccaaggggcctgaccaaggagaacatccaagaagcaatcagtagagatggctcaccactgtctctgcaaggcttgccccaggtccagcctagcccctaggcaccacattggacagtgatctaggtgaagacgaaggcctcctctccctggcaggcaagaggaagatcagggggagcctgtccaaggagtcagtggagatccttggggactggctgtacttgcacctctgtaatgcctccccctggggccggggaagctgagcctttctggtcagaccaacctgtcagcactgcagatgtgtaactggttcatcaacggctggcagtggcgtctcccagactgcaaagatgcgaatcagtttaccctttcccgaggtgggggtgaggcctcagatgtggcccagcccagtggcagcagcccttcagggctgcctgtgtctgtcccagcccccacagatgtgctctccctgtgtgtgtgctgcgtgctgctctgctcaggccagcgtggaaagcctgcagcccccttcccacggcgggagccggagccccccaatactctgactcctggtagcacactcaccc

SEQ ID NO: 180920 - DNA, 468 bp, Homo sapiens
agacagtttaattggaggcgtggctcggacgtaaattcaaggagctgcggctagaaagtgaatttaaggggcggggctgagacaatttctatggagagtctctaaccgctttctccgcctcttcaatcccctagcctttatcgttctgggctgtaaggacaataatgtcatggatagtcgtctgccccacagacccccttgcctttcatgcagaggttctatcatgacaaatacagccaggcgtgaaaaaccttgggtacttttctggagctgtgaacagtacgtggctctggagtctgccttaatgaaccttgggggcgggaggcttacaagggtatggggaaggatggaaggtgaagaagggcagtggacaaagctaggctgaaaacatagcacaagccctgagccaatatggagaattgggtaagactccaaactctggtgctaggcagcctgggttcaagtctg

SEQ ID NO: 180921 - DNA, 331 bp, Homo sapiens
acaagagctcccggcccttgttgtttactgctttccatagtcatttctgagaaagagaaaggtaagccttttctgctctgagctagagctggtctgacaaacacctaggccatggtgttgtatggttaaaactaaaaatttcacaacaccaatatcagacaaagttaccccctcactaaactgaaagaaatactatttcacaatcatatttgagcataaaaagaacactgttcaaaccataatatgatcaaacatcccagctactaatagtgacggttaattattttattttttatttttttgtgatggagtcttgctctgtcaccaggct

SEQ ID NO: 180922 - DNA, 179 bp, Homo sapiens
taacacacttgtgaaaactaaaaaattatcattcgtacaatactactaactagatttcagcagttttttactagaggatggtgtttgtgcacggtcctttttcattagccttacaatgtacagtcataattttgttttctgagttgtttaggttagttttttgttccctgaacccttca

SEQ ID NO: 180923 - DNA, 457 bp, Homo sapiens
atattaagaaggttttatttctaaccttattattttgcaggtgaggaaactgaggcacaacaatgttaagtaatgaagccagatttgaacctggacaatctgactgcagaatcagtgctcttaaccattgtttcttatttagcttgctacatggcataaggctcttaaagatagtgacatgatgcagggtttctcaggatacaatctatagacagcattggaacagcagatgttgcaaatgagaaagtcaaactgagttaagcacacctccaaacctacaggtgaggcactaagctctgtggtttccaaatcatcgaatgctagagctgaagagggcctcagagagcaagactccagtcaaggaagaaaaagccagaccagaaacaataaaaagaaaacgagcaaacaaaggagtcacaaagaaacagaactgtggcaaatgacgcattagacgaag

SEQ ID NO: 180924 - DNA, 431 bp, Homo sapiens
tgctgcctctagatggcacaattacatttaagaaaaggaaaaagtctttgaaaataaatagaaaaaaaatcttagtactacagtattttaactttaaagaattgtgtattacatttttttaagagattaaaagtctgaaagataaaagaatagcttattccttccagaaaaggattatactaatttaatagttttgaagaacagctaggaagttcacaaatagatgctttaaactggtattagactaaataaaaataaaagtttcacatggtgcaatatcacagcgaaggcttataaaatgcatttttgtgtatgttttgtgtttcatttattttgctcaattttttcttgttaacttataaatttctgacaatgttgaatattatttctcatcagtacatcacagtttattttatattcaaaactgaatg

SEQ ID NO: 180925 - DNA, 1019 bp, Homo sapiens
attctaccataaaaatatcgagcaagttactttacttcttagagactcaggtctccaatctgtaatatgaaaactgtgttagtaactctttatgaatattgtctaaaaactaaataagatattcatgtaaagtgattatcacagtgcctggaagttgatgaacaatcaattcttgtttatttgatgaattggatatttctgagcaaatggtttaaattactcaatgtctttaggtcctcctttccttttaattaaatgaattaagtacattaattttactaagtgatacgattcaattttcattgaggaagttggacttccctccaagtaggtcatctaatataaaattataattttaagaaatttcaattactattaagatgttttcctatttctttacattaagaacaaatttcaaacatacatctttatcagtggtattctagcatattaacaataatgactgttattgagaattgactctgagccaggacaatccatatgactcaaatatattatgtctcatttactttttaagataaccctctaaaacaagtactgtttttatccccacttaactaatgaggaaccatcctcagtagaatcagaatttgaatccggatctatctgtctacataggatcagcattgaatcattagccatattgccatactttataaatgtaatataattcagtcattaagagacataatatgatagtatttttaagaaataaagattcctgttaatccttccacgtacaattccctgtaatatattagatcaaattactctatctcctgagaaaatacgtaatcatggatgataaccttgaagaagaaaagaaaagtgtatttacagcagtgtcttcgcagattaaagccctgtctatattactccaaaatatttaagtcaggcaagaatggtttgtattttttttttttttttttttttttttgctgtacccgaaattgttttgtaaacttagctcatgcttctttttgtttaactgatggaga

SEQ ID NO: 180926 - DNA, 258 bp, Homo sapiens
gatcaaaaacacaggaaaggattacatctgaaataaaatttggtacccttaaaatatctgtaattcaacctcagaatgagtgtatcttttaaaagctctttgaaaacacttccccactctctttgtctcttttctttataaggcatcttctctttaactccctttgggaaacttcttataaatgaggatttgcatctccagggattactctggttaggaaagtgttttattaaaaaatatatgtttgccacagaatgc

SEQ ID NO: 180927 - DNA, 463 bp, Homo sapiens
ttaattacctttccaaagatgattagtactaaccttggatatgttttgccacagttatagtatattttatatataaaataatttaatatttcattttggatacagtgcatgctaatgaaaaattcatgttgaaagcattgtgtttttttttgtttttgtttttttttgtgacggagtctcgctctgtcacccaggctagaccaagatcacgccactgcactccagcctcagcgacagagtgagactctgccaatatatttaccatttctggtgctcttcatttcatttattttcgtctggtatcattttccttatgtctgaagtatttccttttgcatttctcatggtgcctttctactggtaattgaactctttcagtatgtctgaaaacatctctatatcatcttagtttttggaagatgctttcattgggcttggaaatctaggttacgggttttttatg

SEQ ID NO: 180928 - DNA, 387 bp, Homo sapiens
ctgtctgcttccaagatggtgccttgatgctgaattcttctgagggaattcacatggcagaaggtggaaaggcaaaagggacagactccctccatcatgcccttttagagggacgcctaatcccatccacgagggcagagcctgcatgactcagtcacctcccaaaggccattccttccaatactgttgcattggggattaagtgttcaacatacggattttgggagacacatgcagaagaccatagcaactttgaaatctaattttgggggtgggagggcagacaccattcagtttcttccagaaaaggctcctctgctttcctgcctaggaaattatagaatgggatgttagctttctacaaatgaggtgggagaaagggagagg

SEQ ID NO: 180929 - DNA, 290 bp, Homo sapiens
acttagctgtgcatcgtggcacgggcctgtagtcctagctacttgggaggctgaggcaagagaattgcttgaacttgggaagcagagcttgcagtgaactgagatagcacactgcactccagcctggcgacagagtgagactccatctccaaaaataaaaataaaaaagaaggaaagaaagaaggaaaacacatgatgcaggatacgaaataaaaattcttcagtgaaataacgaataaaaaacaatcacaacttctggaaatcaagaacacacttagagaaatgcaaaa

SEQ ID NO: 180930 - DNA, 676 bp, Homo sapiens
gctctcttgctgctgcttgacccctgtggtcagccagtgtgagatctgctccaggcctcatctgtcggtccccaaccccctttccgagcctgtctgctcagcattgtgaagtctctcacccgaggccctgtccacaggcagaacgtggacattcagcccagctccacctgcccgggttctctctgcgctgccacctgtgcacaccatggaggccgtacgaaccctgggcagctctgtcccgctgctaagtgtcgggccactaagaaaccctgaattcttggttggtctgctgttgctaagccacatccccccctaccctggcatgtgtcgcttcttgttagacccaagcacaggtccttgtgttcaatcccagttcatccttgtggatccacattttcatcctagaatccactttcaccattcccaatcactgtcgtctatcatgagaaggtctggcatgcaagccttttgtgtctttataccagctactgctctaactttaatggaaagggctggctggggaggataaggcccagcgtccctctggctgacactgctgtcaccattggtccctgtggggtgatttcaaccagctccttgctggctgtcctggaacttagcccacatactccaccaccttgtcctcgggggtattggaagatacttttcctggggg

SEQ ID NO: 180931 - DNA, 787 bp, Homo sapiens
cctgtttgattttttgagacagagtctcactcttgtcgcccaggttggagtgcagtggtgcgatctgagctcactgcaacttctgcctcttgggttcaagcgattctcctgcctcagcctcccaagtagctaggactacatacgtccgccaccatgcccagctaattgttgtatttttagtagagacagggtttcaccgtgttggccaggctggtcttgaactccttacctaaggtgatccacctgccccagcttcccaaagtgctgggattacaggagtgagccatggcacctggcctagggttgttatatgtttgacatccgtcccatttgggaggccttctcatcagtcattttatgcctttaatgccattctaggtaggcaggaaaggggtcagggccagtgggcccatgtagcagatagggaaactgaggcccagagaggacaagccacttcttcaagaggacccaaactggatgccagacaggccctctgcctctgggattttgcccatatggctcaactggcctaagtctgctggcccaaggaaaaatttcaacccaaccctgccctttcccccattcctctcgtgcaggggagttggcgggcctgcggcagcaaataatagctacgcaggagaaagccagtctagacaaggagctgatggcccagaagctggtgcaggctgagcgggaggcccaggcctctctgcgggagcagtgggcagcccacgaggaggacttacagtgactccagcgtgaaaaggttcaggcagctggggagggg

SEQ ID NO: 180932 - DNA, 1343 bp, Homo sapiens
  misc_feature (59)..(59): n is a, c, g, or t
cgctgccgcaggcgccggcgtctcagctgctcgccgccccccaccccagagtgcgtgcngggtgactcccgccacctttgcgaccctcctgagcttaggggactgcgagcgggagggagtctcaggcccccggccgcaggatggtggcggagcggtccccggcccgcagccccgggagctggctgttccccgggctgtggctgttggtgctcagcggtcccggggggctgctgcgcgcccaggagcagccctcctgcagaagagcctttgatctctacttcgtcctggacaagtctgggagtgtggcaaataactggattgaaatttataatttcgtacagcaacttgcggagagatttgtgagccctgaaatgagattatctttcattgtgttttcttctcaagcaactattattttgccattaactggagacagaggcaaaatcagtaaaggcttggaggatttaaaacgtgttagtccagtaggagagacatatatccatgaaggactaaagctagcgaatgaacaaattcagaaagcaggaggcttgaaaacctccagtatcataattgctctgacagatggcaagttggacggtctggtgccatcatatgcagagaaagaggcaaagatatccaggtcacttggggctagtgtttattgtgttggtgtccttgattttgaacaagcacagcttgaaagaattgctgattccaaggagcaagttttccctgtcaaaggtggatttcaggctcttaaaggaataattaattcttctaacgggatcgcagccatcattgttattttggtgttactgctactcctggggatcggtttgatgtggtggttttggcccctttgctgcaaagtggttattaaggatcctccaccaccacccccccctgcaccaaaagaggaggaagaagaacctttgcctactaaaaagtggccaactgtggatgcttcctattatggtggtcgaggggttggaggaattaaaagaatggaggttcgttggggtgataaaggatctactgaggaaggtgcaaggctagagaaagccaaaaatgctgtggtgaagattcctgaagaaacagaggaacccatcaggcctagaccacctcgacccaaacccacacaccagcctcctcagacaaaatggtacaccccaattaagggtcgtcttgatgctctctgggctttgttgaggcggcagtatgaccgggtttctttgatgcgacctcaggaaggagatgaggtttgtatatgggaatgtattgagaaagagctaactgcttgagtcagtataatggaggcagggaaatagtaataaaaaatgatt

SEQ ID NO: 180933 - DNA, 441 bp, Homo sapiens
gagaagtctcagcattcagccagtaggggttgttcctgtcaaccccttttattgcttctgccccaggatcagtgaattaggaagatgccagtgtggagacaagccagcatggagcatgagggctgggcgtatgctcctaagtaagaagtggcccgtcttcccttctgattcttcctcctggtccccagtgcctgagcctttgaggctattcccctcccagacagacattgctttacttctgcctttgaattgaagccccattctttttgtagtcctcgtagcctcgattttaggctgatggctccagtaaggggtggggatgggaggtgttgcaggggttagaaggaaggaaggctgtctcttccattattccctatcatctagtgagaatctaatgggaggggtgagttagaatagatgcccatacaataggagtctgag

SEQ ID NO: 180934 - DNA, 315 bp, Homo sapiens
tagcagctctgggtttataaaatagcaatttttcaaaataaaacaacattttttcctctgatgagtgctcctttgggccactagtgaatgtttgttgactcctattcaccaatgattctaatgacaattttgctgtttcttcctcataccagaggagattaaaaccaatgaactttagaaggtagtgggaaagactgtgaaaggcagcacagtgacagcagagatggccgctgacagcctggggggataggaggaaaaaattactgagtttcagcagagcataacaatagatggtcatgtcctccctgagtcatc

SEQ ID NO: 180935 - DNA, 367 bp, Homo sapiens
cctggtttcaatgcaaacttctgcttttcctctgagaactgcctgactttccttttgctattcccaatccctagttgtcgctttttctatttatcaccaagaggagtgattctactcaatatatcccagaccacacttctcaaaactgaagaaagcttttcactcctactcaagcatttaaggtcccctctgacatatactcaatgaacctacccaaactctattcttctcattcaggagagagtgactgtttatagtttcaacacacctaacatgtcccacctttgtgcctatactcatgtccttctcctgccgcattttacctactaaaaatcaaaatcctatctattcttcaaaacaatctcaa

SEQ ID NO: 180936 - DNA, 477 bp, Homo sapiens
ttctttcacttagcatactgtatctgagattcatccatgttgttgtatatatcaattgtttgttccatttcactgctgagtagtattccattgtatggatttaccagagtttgtttatctactacccaactgagtacaatctgggttttcttccagtttttggcaattacaaataaaactgctatgcagtcttggcaattacaaataaaactgctaaactgctgtatttgcacataggttttatgtaaatactcaagagtgggacttacggttgtatggttaagtgcatatttaactgggattttagaacacataaggaaaggaaacttggtgataggaaactgtattcagaaagtaggtgtaatagcttccagattaaaataataactaaaagaagactggaggaactgaaattttattttaataaataatatccagcactggcaagaatatgggaacacgccagtttaatgccca

SEQ ID NO: 180937 - DNA, 495 bp, Homo sapiens
tttgccctgctctaaagcatcctctaatctgacaactggagtgatctttgtaaaccacagatcttgctctaatgttcacagtcacctcccttctcaaccacatccaccaccctcatacctcctccaatctaggcagggatcacacgctcaaaaacttacatgtggctcacacctgtaaccccaacagctcaggaggcctgggcaggaagattgcttgaggccaggagtttgagaccagcctgggcaacagtgagacccagtatctaaaaaaaattataaaaatagaccagatgcagtggctcacacctataatcctaacacttcaggaggttgagagataaggatcatttgaagccagttcaagaccagcctgtgcaacacagcaagacttcgtctctacaaaaaaaaaattaaaaaattaaaaaattagctgggcatggtggcatgctgctgtagtcccagctacttggaggctgaggtgggaggatggcttga

SEQ ID NO: 180938 - DNA, 658 bp, Homo sapiens
ctagcttctttaacatcccctccaacagtgactctcacctcagagctccatctcatccacccattttcatggaccacatgctgaatgaacttcaccatcactcagaattgcactgaaatcataacttaaaacatgccagtttttaactataccctctacttaacaactcttttttcttatttttgttttgttttgtttgagacagagtctcactctgttgcccaggctggagtacagtggtgcgatcttggctcactgcatcctctgcctcccaggttcaaaggattctcctgacttagcctcccaagtagctgggattataggcatgcaccaccatgcctggctaatttttgtatttttagtagagatggggtttcgccattttggccaggctggtttcgaattcctggcctcaagtaatatgcctgcctcagcctcccaaactgttgggattacaggcgtgagccactgccctcggccaacaattctttttttcttcaaatacgtgtatacttcaactttgttgagactgctaaggcctgactcctatactttcttccgacctaccagctatttcctgtcttcgcttctttctttagcctatttaggatctgtgatttctcacttcagatactctcttttcaatattctcaatccc

SEQ ID NO: 180939 - DNA, 209 bp, Homo sapiens
caatgattatacaagctccaagcataccctccacacgaacatcccaacacaaaaacaattcttgaataacataagttttgaatttttgattgtaggagatatgcaagaatgcacctgtgactactttgtacttactacaaaacttttagaagcactggtgctctgggctgttacttaggtaaggggcagccaatgactggacccagggt

SEQ ID NO: 180940 - DNA, 241 bp, Homo sapiens
ctcacatctgtaatcccaatgctttgagaggccaaggtgggaggatcacttgaggccaggagtttgagaccagcctgggcaatgttgcagtacttcatctctacaaaaattaaaaatcggctgggtgtggtggcatgcatttgtagtctcagctactccggaggctgaggctggaggattactcgtgctcaggagttcaaggatgcagtgagcagtgattacactgtcacacttcagcctt

SEQ ID NO: 180941 - DNA, 470 bp, Homo sapiens
ggtaggagtgcactctagtactaaatcgaatgatgatgaatcttactgagatgacatttgagtaaagacttggaagggagagaattagctatacaaaaggaactagccccagtaagaccctagccctggtaagagtgagataatgaagcaggtatggccagaatgatagagccttcttaagcctttaaaggactttgaccttttctattgaaatgggaggagtcatagaatttttaaaggctaattggtctctgctagactatgcgtgggacaggggcagaagtagggagttgatcaggctatttcaataatccacttgactgataatggtgattcagactaggttggaagcaatggacattgtgagaagtggttgaattctagttagacttcgaaggtaaagataataagatttttgacatattgaatgcagagtgtagaagaagagcgaagaataactccagggtttt

SEQ ID NO: 180942 - DNA, 427 bp, Homo sapiens
ttagaagcaagatggagtcaactatgtcagatttctcttactgtcataattttgcaaaggcagtttcaccaccagttaaagagcaaggtttccaacaacattgcccttacttcagcagcatgcactttggcctgaccaaccacaaattcagggcttcctactaccccctcagactagagtgagtcacaaaactcgggaaagtgctatattcacgattatacaaatgaacaaccagattgaagaggtacatggggaaaggtctggaagagtcccgagctcaggagcttctttctctgtagggtcagggtgcaccaccttcctggtacattgacctgttcaccaaccaggaagctctcctgagctttgatgttcggagtttttatatgggttttcagtaggtagatgtgattaagtcattggccacgtg

SEQ ID NO: 180943 - DNA, 542 bp, Homo sapiens
acaacagaatggcaagtgttcctaacttatgtatgtgatgaaaggagaaggcaatggcaaaggccacagggctgcagaaacaaggcagatgttactgtagttggagtgacagggcaggagatcctactcaaggagacagacatctccaatgccagggaagggcgacagctgcatcgaaggctcactgaaggcctgccttacttaatgtgagcagatggcttgcaggctgatcccaagaggacagcagggacaaagctggaaagcaacaagctgtaggtggctgggcacaagtgtgaagggcacccatttggaggcagagatgcagatcagggagaatgtccagtaaaagcccacagagttgagtgaaggagactgagggagagtgaaacctgcacatgacaggctgtcaggtagctttccttcgtccctttcctccatttactcatcagtgaaatgagaccgacagtcccacgctgcagcattgttttaagaaagggaaagtgtatgcagcccggtgacaaaggcttagcatgttgtaaggg

SEQ ID NO: 180944 - DNA, 345 bp, Homo sapiens
accagatagggcaggtgcagctgctgagcggagagagtgaagtatgtacttatggtgtgaagaaaattgactgattcaagagttgctgccaaagtgtgtgtggtctcgtgggctcaggtgagacccctgcccacgctggcatcgaaggctgtcccatgtctgacttgtatcgtgcccaataggatggggtcctgacagctctcaggatagatgggtcacccctgagccaatcctgcccagatctggactgagcctgcgaagttttctggttagctgttgctgtgagcatgcctccaaagtttatgccctgtggacatttttcttctgcttatagtgattcccaag

SEQ ID NO: 180945 - DNA, 333 bp, Homo sapiens
cgctgaatagcttgacttgggcatcacataaacaaacaaaatggtcccatagaacaaagtgactgcagtgaggtgggaagcgcaggtggagaaagccttcttccttccctcagtagagcacaccttcaggatggagtgaaggatgtagatgtaggacacgattatggtaaacagcgtgctgataaggacagatgcagaggagatggcaggggatatttcagcaatgtaaacatggccacaagaaagcttcaagagtgggaagaggtcacagaaaaagtggttgattttatttggaccgcagaaggacaggttcatcaaacagcctgtaaaaga

SEQ ID NO: 180946 - DNA, 666 bp, Homo sapiens
gaatcacttgaacctgggaggcggaggttgcagtgagccaagatcacgtcattgcactccagcctgggtgacacagcgagactccatctcagaaaaacaaaaacaaaaacaaaaacaaaaaaactgtacggtctgatccaaactgttgctgtattgattcctcctcttgcttactgcctgttgacttctgagatgatagtttccttccccattctcagtatatccctaattcatccttcattgagcatcttttatcataaagctgtattctctttgtattaatatccttaccgtgtttcacagggcagaaacagctgggcttataaacaggcatagtccttttgaaggatgtggttgatcctacaacaacacactttcctaaggatgacaacaactcaccccacccctagaatggctggtatgaaccgagtttccacacagtctagctggcaatggggtcaggagccgttttgctacttcacatcttttggtcactggtaaatattaaggtactttgttttctgttttgtgaactctctctcgctctctctcacgatatgtcttctgaccatttgtttctatttctgcatttactgggtctaaacattgtacagaggttaaaaacagcactccaatgggcgtttcccaggagggtggggttcagtt

SEQ ID NO: 180947 - DNA, 1497 bp, Homo sapiens
ccttcaaggagcttataagtgagggtctgccatgaacgctctagtataatgttagcttgctgggtctcagctgactagtcaacagaaagaagaagaagggtctctgagctcctccccacttacagatcctgtgtgactgctcttcctgcatctcacagaaaaagaacatttccagttgttctcacggacttcaaggctagaggtcctccagcccatccaggaccctgggagccctagatctctccagcactctcctttgaatgtctatctactaatcatctctacctgaatgtgctgtgtcaacatcaacgtgtcccaaaccaaactccttctgtcctcaccctccaacatactcctctgtaaccctagacttgggtggagtgggaggggagtttgctattgggccagttggctttgtctttgaccactgggtgctggatcttactaccttacgggagagggacacgtaactctaaagaaacagctggaagagaagatttccgagggactccttcagagcaagagaggaagacagagatgaattctacatagaaagcctgagaaggcctctcagagatggcttccttgccctccccagatgttcacagggttaacttaaaaacgaagcatcatggagctggcaaatcatctctgcatcccaaagacagtgcgacatgtgataatgactgtgaagcgcagctaagcccgttagcaggaatgaccagggagtgagaggcagcgctggagtgtcaccctccaacatcgtctctttgtttgaggatcactaggaaaggagccattagaaaaacgctagcctggtaataggagggaaatggatcttggcagggctgtgttacccattgagaaattagcaaaaaacattcagggaagaaagcaggggcttctgtgcttacccattgaggctcttggggaataatgacacatggttaccacctgaggaacccctgctgaggcagctgacttgcccagtggtctactacaggctcaggtgagtaggagggtccttcccaggaggggcagtgatgctcaggcagggctgggatgctcaggctccttgcaagagctgatcctcaagtctgaaccactccccaggcactgtgtcaggtactagggatggggccatgactaagacacggcttcatcctcaggaagctcacactccctgacatggtggcactggagccttgagggaggcaggacagacctcatcacccccattccacatctgtgggcaaccagggaggttggggggagacttggtttctttgtgaatcgattctttgctactttgcttagcatcaagttcctcttgtcatggcaatcactcagaatactgagagggtgaaagaggatgggcggtgcagcgggtccggatgaaaacttggaggggtgggaactgctatgatgtcaactgacagtgcccagagagcggggccatcacaccagaaatgcctgctccattgccacttctctcag

SEQ ID NO: 180948 - DNA, 1033 bp, Homo sapiens
caggttgtgaaggtcttggatgccaggccaaggagtgagacaccatcatatagggactaggggacataggagagttttaggatgagatctgtcaggagtaattgtacacttttttaaatacaagaatttttcttgttctgccttcattttagtaaaaacgaagcatcatggagctggcaaatcatctctgcatcccaaagacagtgcgacatgtgataatgactgtgaagcgcagctaagcccgttagcaggaatgaccagggagtgagaggcagcgctggagtgtcaccctccaacatcgtctctttgtttgaggatcactaggaaaggagccattagaaaaacgctagcctggtaataggagggaaatggatcttggcagggctgtgttacccattgagaaattagcaaaaaacattcagggaagaaagcaggggcttctgtgcttacccattgaggctcttggggaataatgacacatggttaccacctgaggaacccctgctgaggcagctgacttgcccagtggtctactacaggctcaggtgagtaggagggtccttcccaggaggggcagtgatgctcaggcagggctgggatgctcaggctccttgcaagagctgatcctcaagtctgaaccactccccaggcactgtgtcaggtactagggatggggccatgactaagacacggcttcatcctcaggaagctcacactccctgacatggtggcactggagccttgagggaggcaggacagacctcatcacccccattccacatctgtgggcaaccagggaggttggggggagacttggtttctttgtgaatcgattctttgctactttgcttagcatcaagttcctcttgtcatggcaatcactcagaatactgagagggtgaaagaggatgggcggtgcagcgggtccggatgaaaacttggaggggtgggaactgctatgatgtcaactgacagtgcccagagagcggggccatcacaccagaaatgcctgctccattgccacttctctcag

SEQ ID NO: 180949 - DNA, 334 bp, Homo sapiens
agggagtaacgggaaccctgatttacagtcagtcaggagtgtataggtgacaacctactacttgtgattaccatctgaggttgggggcagccttgcgggactgagccattaacctgtgggatctgactaacttcaggtacatatgtgtcagaattgaattatgggacattcagttcatgcctgctggaaaactgcttggtatggaaaaacccccacacatctggtagcataaaaaaaagagtgtgttttcaagtcccacacagaaaagacaggtatatattcccagcaagaatttatcagttttgcaggaataaggcatacataatgatataca

SEQ ID NO: 180950 - DNA, 362 bp, Homo sapiens
cctgcactggcctaatcagagtgaagctcatgaattctgtgtgatgactggtggaagatacacctgtaaaggaaatagtaacatgtcttatgaccacatacagagagctttccaagaatgcaggaaacatcaactagattaagccagtgctacttactactgcagataaactcaaaatatttggagtttaatgtaatagaaatccatttttcactcagaaattccagttagtgggggtgtttgtgttggtgcttggctggatgaagctgatgaagggtctgtattcagcatccgtattccaagaccagtattcagttaacagatggagaaaaagagtggacgatagtgcttgagggatctta

SEQ ID NO: 180951 - DNA, 442 bp, Homo sapiens
ggtgatagagccagactccatctcaaaaaacaaaacaaaacaaaacaaattagcttgtatttggttatatggacatattagctagcatctttggtttatcttaaatcacctttaaaggggaagatcttgaccttcctaaatattctcatacaaccacaattccgatcttaaggaataggttgggtgatttgagtttatgggtatgctgtacatttatttggattttgttactttaccttcttggaatgcatcaactggacagttaaaaatatacaatttattgaatttgtttcccatctgaaaaatcatatgtattcattacagaaacatcagagaaatagaaggaattttaaaaaatcatccctaattccatttctaaaggcaatcactgttaaaaattgctttggtgtatttctttgcaggcttttctttttttcatata

SEQ ID NO: 180952 - DNA, 278 bp, Homo sapiens
tgaagagaatggccccaggctatacaccgacaacatgttcatgtgagtgcagcagaactgcacagaaggagggaaaagtcacaacaggagagtaccgcaaggctggccccagtaagacacaagaagcgaagtctgcagcggcactctgagtcacgacagaagagtaactgcgaggccggtcccagtgacatacacgaagggaagtctggagcggtgctctgagaagcggtccaaggggctccccccgaggaacactttctcctgttgcagggtggtat

SEQ ID NO: 180953 - DNA, 549 bp, Homo sapiens
ccagactcagaaacaatagaatgtggactgaaagtaggatgcagaccctgcgaagggcctcacttatacctccatgccttgagaccaaattcacaccctcactgtagtttcacatagacatctagaatataatagaatggtatatatgcttacattgaatgatgcaaaattgtgtatgactttccattgtgtatattcagtcacagtctcctgacagctaagatctcctcatgagagatggggcagcaacagcaggaaggcgggacagagtgaagcatctttgggacaagccacgtcaaaggccataaaacagacagcacatatttgactaccccatatttgaggaccaaggacacacgtaatggtcagggatatagagcttgatggcagtagaaccaacgttaaagacaagaaagacattggaaaccagcaagatatggtgagaggaagtggtgagaaaagtaaagggagggattccaagcaagggcctcaaatgccgtcaggggtttttttctccttcaaaagatggaaggttcagaagaaaatggg

SEQ ID NO: 180954 - DNA, 273 bp, Homo sapiens
tgggaggggattggatcttggggtaggatccctcatgaatggcttagcatctttgcctggtcataggtgagttcttgctcagttaaatcatgtgagatccagttaagagtctgagacctcccccttctctctcttacttccactctcaccatgtgacatgctgtatccccgtcaccttctgccatgagtaagagcgccctgaggcccccaccagaaacccagcatatgctggcaccatgcttcctctacagcttgcaaaaccatgagccaatg

SEQ ID NO: 180955 - DNA, 196 bp, Homo sapiens
  misc_feature (132)..(132): n is a, c, g, or t
ccttttagttatagccaactcagaatctctagtatgaacaattaacctgctattagaagttatcagggtatccatctcacgccagttagaatggcaatcattaaaaagattacattgcggataacttactanttccagctgcagcttttcagggtagtcgcccttggtcgtcgaggtacgcgagctcgtaattgcg

SEQ ID NO: 180956 - DNA, 354 bp, Homo sapiens
tgtggcaatgaggacaaccccacactgggacggtgagcccgggcaggtgggtgggcagggtgcccggctgtgtccttcctccatgaccggtcattctaatggcctctttgcttctctgccctcttgcccatcccatggccaccttcccttttccgtactgtttttctgttgtttattttaccctcccgctcttttttctccatttttcctccttttccggctctctgcgattcgttttctttctccttgtctgtttctgtctctccgctctccctttcactgcatctctgtctatgtctctcttctgtcttccaaaattgtttttgtctgcgacttctcctggtttctctgtct

SEQ ID NO: 180957 - DNA, 855 bp, Homo sapiens
tcccatagtgctgggattacaggcatgagccaccacacccagccggccactgaaaagttttaaaagaagtttagactttaaaatatgcctgcacacaactatattgggcaaagaatatagttttacttgtccaagaactgttgattaatttgcaccaatttggaaatgataaatactaactttttatggtatagtcgtttttgtttggctgaatccagagattatttccttgtatatgtatctagaatatgtcctactagttattgtttggaaacatactcgacatctttaattttggagtttaattttggtgctataattcagagatttaaaaaaggtttgagaatgccttgctaagtgatggcaggcttagcacagtggcaggcttagcacagtgtttggcatatagctgggtcccaggaattatttacatatgtaatggaggaaggagaaatgttttattcaatgaacataggctaaacaattcactcttcatttggaaaaggtgaaaaatggggaaatttagataaattgattatgaaacggttattgttccggccctatctcagacttgttgttgttgttgttttttgagatggggcctctgtcacgcaggctagggtgcagtgatccgatcatggctcacttgcagcctcgaactcctggactctaatgatcctcccacttcagcctccttagtagctgggaccacaggcatgtgccaccatgtctggctaattttgtttatttttcgtagaggcagggtttcactatgctgcttaggctggtctcgaactcctgggcttgagtgatcctcctgccccagcctcccaaaatgctggtattgtaagtgtg

SEQ ID NO: 180958 - DNA, 838 bp, Homo sapiens
tcccatagtgctgggattacaggcatgagccaccacacccagccggccactgaaaagttttaaaagaagtttagactttaaaatatgcctgcacacaactatattgggcaaagaatatagttttacttgtccaagaactgttgattaatttgcaccaatttggaaatgataaatactaactttttatggtatagtcgtttttgtttggctgaatccagagattatttccttgtatatgtatctagaatatgtcctactagttattgtttggaaacatactcgacatctttaattttggagtttaattttggtgctataattcagagatttaaaaaaggtttgagaatgccttgctaagtgatggcaggcttagcacagtgtttggcatatagctgggtcccaggaattatttacatatgtaatggaggaaggagaaatgttttattcaatgaacataggctaaacaattcactcttcatttggaaaaggtgaaaaatggggaaatttagataaattgattatgaaacggttattgttccggccctatctcagacttgttgttgttgttgttttttgagatggggcctctgtcacgcaggctagggtgcagtgatccgatcatggctcacttgcagcctcgaactcctggactctaatgatcctcccacttcagcctccttagtagctgggaccacaggcatgtgccaccatgtctggctaattttgtttatttttcgtagaggcagggtttcactatgctgcttaggctggtctcgaactcctgggcttgagtgatcctcctgccccagcctcccaaaatgctggtattgtaagtgtg

SEQ ID NO: 180959 - DNA, 1027 bp, Homo sapiens
cgaggcgtgaccgaggggcgaggcgtgaccgaggggcgaggcgtgaccgaggggcgaggcgtgaccgaggggcgaggcgtgaccgaggggctcgccgcggctcctgcgcctgcgcggcggggaacggcgaccggctgaggggactaggggagcgcggtgcttcggtggcggaggtcacggtggcctccatcctaaagggctgcgggcgtcccggacggcggtcccaagcgctgctcacgctgctcttaagtgagccctggacgaggcgcggtgggccctcatagtccgcgccggcgccctcgctccacaccgcggcgtccggccctgggctcccgccgatgtccgcgtgggacttttaggggatttgtttatttttgtacgttaaccacactagaaacggccccagaatgggctgaaacgtgtgctgctgaagctgccacctaaactcccgagagaagcgccgtttctcctccatggcttctcgccgacgccctcgctgcggccttccgggcccctcggttgataaaaggactaaatagtgacggacatttttaaggctacttaagaaatggcaaaaatacatttagaggtgtgaacccgaacacactgcgcgctttaagccccgcgagagccggggccgcccgcttccgtgcgcccgtagctcctttctcgggtccgggattcgccggtgccggggacagaaacctcctgccttcttagttcatgacccttgtagatgaacttccctgttttctgcactgcttagaccagaagacgggaaaccgtgactgccgcacccttccctgaagcaggcactgcccgtcgtccatcaaacgcgaggactgcgcccacctcgtaggaagggacgccgcggtcctgctaaaagcctccggctctgcctgcccgagggcaccctttcccctccccggttccgagggcggactccattcctctggagccggtgtttccgggtgggccagcctccaatgcctttgaataaccccccttacattagattctgaccctg

SEQ ID NO: 180960 - DNA, 575 bp, Homo sapiens
tatcaaataacatagtcagacggtagtctaaaaatattatcattctaaaatattaaactaattacaaagagaaagaaagtacagatcctactggtagaagtaaattttttttaaaaaagtacattcccttaattcaagaactctagttgacaaaatttgtctttcataaaaaagcacaaaaatatcctttgataattaatcaattctattcttggaatttattctacagaatgcttcaacaagtatacaaagatgtgtatgggaatacatattcaatgttcttaataataatgcaaaattgaaaataaattacacatgtataaaagaagctagttaaattatagtacagcaggtcctctaataacatttcattcaatgttattttgctgtagcactgaagagagaaacaaagcccgggcgctgtggctcacgcctgtaatcccaggactttgggaggccaaggcaggtggatcacttgaggtcaggagttcgagaacagcctggccaacatggtaaaaccccatctctaccaaaaatataaaaaattagctaggagtggtgacgtgtgcctgtag

SEQ ID NO: 180961 - DNA, 491 bp, Homo sapiens
  misc_feature (79)..(79): n is a, c, g, or t
  misc_feature (81)..(81): n is a, c, g, or t
ttcatcttctctacccctaagaatatgcaagattaggtcatcattctatttcctctgaaggttcataatttgacttttncnccttagtgccttactaaacaaaaagatttacttcaagtgttactcttaaaaagtgggcacaagaaaaaacccaattatcccaaggagtttttgagaatgaaatatttactctcttctctccagtctcagaagataattcctctcttcttcaaaccagtactcctaattccactccctcctgactcctgttgaacactgcattaccaattactctcttctctggatttccaatctttgtttctctattggctcctatccctatctaaaatcataaacaaatcaacttcactttatcctcttttttcactaaagctattattaatccttctctttccatttactccccaatttagtgattcttcaaaattgtcacttttccattatgtcacttttcaagcatcaactcaatt

SEQ ID NO: 180962 - DNA, 321 bp, Homo sapiens
acatcatggtacatccctagggaagttgagatttactgagttaaaagaaataaccaccattgttattattataacagcagtaacgtgaccaagactttgcgttgtatgtactgatgtatgttttccttaaaacaactctaaggggcagtgcctgtgacctgagaggttaaggatataattgctaatagtagaggcaagattgtctaactctagactctttctttaaagtagaagttaaacaaaggaatgaatgggtaacagtggactttcaggagcccaagcagtgttgtgggagcaatgtcaataggacagggaatctct

SEQ ID NO: 180963 - DNA, 176 bp, Homo sapiens
aaattctcacacacattcacacgcacatcacatgcacacacacatgcacaatctcaaacgctcacacacattcacacaccccacatgcactctctcaaactctcacattcacacacacatcacatgcacacacacatgctcacattcacacaccccacatgcacacactcctcaca

SEQ ID NO: 180964 - DNA, 576 bp, Homo sapiens
gaataatattacatgtactacaaatatacaacattttatccattcataaattgatttgggttgtttccacttcttggctattatgaataatgctgccatgaacatttgtgtacaagttttcctgtgaatatatgtttcctgtcaattttttaacctaatgttaaacttttaaaattataactgcttctcgcaagtacctgccatgaaattttattcagaatggaataaaaatatttctcgtgaaaagatatatgaatgaacagaccaggctatcatcatatgaaccacaaagcaccacctaagaagtactctgtcaacaaagatggaccttaatcgaatcaggtctaatgagaacggcactgccaaacagaacttcctgtgacaatggaaaggttctataagctgtgctagccaatatggtagccattagccctatgcagcttgtgaaacaagaaactaagtttttgattttttcaattatttttcccccttaaagggacagggtcttgatgtctcccaggctagagtacaatcgtagcttactgaagccttgaactcctgcactcaagcaatcct

SEQ ID NO: 180965 - DNA, 498 bp, Homo sapiens
ttcccctccagagcctactatgagctttagaagaatagccataaactgtaatgagaactggatgctgggtgtgccttttccttagccagttgagtttgataaaggaaaaatttagtgtaagaaaagaagatttaattcccctgaaaaatgggtgagtttgctccaagctgcgccacatgtagggatcagggaccgtgtgcggaaaagataaagagtccacggcaactataaacagatgctgaggcctcacgaggtggctcacacctgtaatggcagcactttgggaggccgaggcggggggattgcctgaggtcaggagtttgagaccagcctggccaacatggtgaagccgcatctctactaaaaatacaaaaattagccgggcatggtggcgggcgcctgtaatcccacctactctggaggctgaggcaggagaactgcttgaacccgggaggcggaggttgcagtgagctgagattgtgccactgcactccagcc

SEQ ID NO: 180966 - DNA, 197 bp, Homo sapiens
gggcagtgaaaaggtcattgcattcaggtgaccttgtcctatcctactaattgtgtgactctcagcctctcagaaactcagctctcttctcttcaaaagagaaacaataacacccgcgtcctcataggcttattgtgaggcttgccttcagtaagccatgtatgtgaaagcatgacaccttgcataattgaataaga

SEQ ID NO: 180967 - DNA, 334 bp, Homo sapiens
cttggaagctaaggttttagaaatcagcagctgtcctgatggcaaatattgtttttatatttttctactgatgcttgtcaaaggaaatatttgaaaatcgccggctggaatctgaggaaaatactaaggagctctttgccaggagacttctgaaaggggtagggacatgcctgctgggtgtttacaaaaagtcccttgatctgtgcccctctagactttatttcccctctgagcatggactaaaaatccctatttcagttctattctttaatacccatttaggaggcctgtactggctctgacctgtattctgaacttaggatgagttcttaag

SEQ ID NO: 180968 - DNA, 773 bp, Homo sapiens
ctcaggtgacccacccacctcagcctcccaaagtgctgggattacaggcgtgagcctccacacctggccagtggcaccttgttatggccgcctgagcctactaaggcaaggctgggaaaaagtaccccatctcgtgtgtaccccatctcgtgcataccccacagagttccaggctgcctggtgctccaggtactcccctctaagggaagggtggagggggtgcagagatggagaacataccctttctggagtgacacatgaacccaagacccagtaattcccaaaggaaagtgggggtgaagcagggtgggctccagacagcacagagaggtcagggacagaagtcagaagagataaggtgggggtgtcccaagagccaggttacccagcctccaggctgctgttcacatcccccagtcggtggcgccttgttttttagtataaaagtattaagtattttgagatggagtcttactctgtcacgcaggctggagtacagtgacgcgatctcagctcactgcaacctccacctcctggattcaagcaattctcctgcctcggcttcccaagtagctgggacaggcgcccacacacactgggctaataggtatacaggtacggcagatcagaatagtatcagaatcgttaggaagctcggcggcgcttgggaggatggctggggcatgggaggccgggggacccgggcgggggagcgcctgtgggcaaaaactcctcaaaagcatccgggagcaaccaaggcggactatgacgtg

SEQ ID NO: 180969 - DNA, 587 bp, Homo sapiens
actggttgcattgatctctccctaagctgccacctgccatcgcctcccacctttgatcctttgccatcatcagtgtcttcaaacagcactggtgtgttctgcctgcaaaaacaagcgtactcctcagtggaaaaataccacattccagcttggtgaagcaggtggtgtgtttcataggatggagcagaaagtagcatctcttcttctcaaacaagaaggaagactattagcacatcagcacagaaagtcgtgcatgatgaatcttaagtgctgcctcataaatgaaaatgtggtacagtttgaaaaatcagctttgaaaatgtattaagtccattattcaaacccaaagtcttaatttttttaaaaaaccaattttcccatctttcaaataagggggatggagcagatgatgttcaagatgctcaaaattctttttgctccgtgagatctaaaacctgaccttggcatcacgtaatgaccatcacagtcaacactgctcacaacatatacaatgggatgcctggtatgttttacagctattatctggactaaatatcccatttcatttccagcctaggtagacagaa

SEQ ID NO: 180970 - DNA, 141 bp, Homo sapiens
atcctgggttcctagggtgggccaatgtgataacaaggctccttatcagagggaggcagtaggatcaacagtcaggagtggaagatgtgatgaaggaagtaaaaggtgggagtgaagcaaggaatcagccatgagccaagg

SEQ ID NO: 180971 - DNA, 574 bp, Homo sapiens
tgacttcctccggaaagtgcctccaaaatacctggcattttccattatagaacttgaaaacatggcagatccgataactactgcttattttttttaaattttatttatttatttttttaccaattttgttttgcctaaagtaattcctctgggacatgatttcccaactaattctccaaattctcataactctttcactagtctttttaggataatcttctattctaagacaaagcctaacttcagtaaaattgtgtacaaacacatacaacattaaatgaaaccagatcttaaacagagggtgcataaggagtgtaacatggggacttcaggggaaaatatgcattagaagggaaagagaacagagttaagatgccagtggaggttgaaattctgagaatgagtttcagaatatgtgagaatatttttgagaactatttttaattctcagtagagtatagaaggatgtagcctttgaatgacgttaaaaattcactagaagtgtgaagaatgttataatatcacatgcctcaaaacacaaattccttaacatagagattaaaatgttttaaaa

SEQ ID NO: 180972 - DNA, 235 bp, Homo sapiens
gtatgttctttgacttgaaaagaagagtcaatcttcttttatttcagaaaagatttttaaatttatatattgaaatatatcttgatctaaataataaatatagttggcccgccatatctatgggttccacatccatggattcaaccaactgggatcaaaaatattccaaacaacaataaaaacaataaacaataaacaacaataaaacaataaacaacacaataaacaaaataaa

SEQ ID NO: 180973 - DNA, 385 bp, Homo sapiens
aagatggtaacagtagaaagggaaataaatggttgaattctgaatatattctgacaattcagccaataggattttctgtaggatttaatgtgaagtgagagagaaaggtgttgagaattaccccagctccctctgcccctattttggcctgagcaactaaaaggacagagctgcccttgagtgaagtaaggagcttatgcatggggtaggtttggtggggggaccatgaacagtcagttttgaatggtaggtttgagtttatcaaacatccaagtggaactgttgagtcagcagtagcatactctggtctggagctcaggggagtgggttaggctaaacatatgaatttgagagtcctcaggtgactgcaagggatcacaggggg

SEQ ID NO: 180974 - DNA, 598 bp, Homo sapiens
aggtataattggctcacagttctgctggctttactggaagcagggtgctgctcagcatccgggaaagcctcaggaaacttacaatcatggtggaaggcaaaggtggggcaggtgcttcataaggcaaaagctggagcaagcaagggggtagggaagggaggtgccagatacttttaaatgaccaggtcttgtgagatctcacagggagagctcacttatcaccaaggggatggcccaagacatttgcaaggaatctaactccatcaccaaactatctcccaccaagctccgcctccaacatttgggattacaattcaacaagagatttgggcagggacgcaaagccaaaccatgtcaaaaacaaacaaacaaacaaaagttgctcttcggcttcctttgatggctcatccctttgctataataagaatagaaagctctaaattctaaatccacactgtcccacatgcagccaatctctgtatgtgaacatcaagcacttaagtgtgcgtagtgtgaactgaaatgtgctgcaggtgtaaaatacacatcagatctcaaagacttagaatgaaagaagaatgtaggggcagttggcaag

SEQ ID NO: 180975 - DNA, 233 bp, Homo sapiens
ctgaggcatgagaatcgcttgaacccaggaggcagaggttgcagtgagccaggatcgcaccactgcactccaggctgggtgacagagcgagactctgcctcaaaaaaacaaaaccaaaaaatcagagccaatggtgtaagttctagtctgaaagcctgaaggcttaacatccaagaagagccaattttttttttagttcaaatccaaagactggaaaagactgataatccaat

SEQ ID NO: 180976 - DNA, 284 bp, Homo sapiens
aattcttaatatagcatataagacctttcagaaatgtctcccaaactgtgtcctgaggacaacctacagcagaagcacctggggtgcacattaaacatttagatttttgaatccaactgtaggaatgggccccaggaagctagctgtattttaaaattaagacactctaacaattctgatgtacatcgaaatatgagaaggcccactctacataatatggccccatcttagagcatcacagcattcatcactacctatctttagcatgcttttcttaaggcact

SEQ ID NO: 180977 - DNA, 325 bp, Homo sapiens
ttattaattatataatttgctttaatagcaattttgatgcacagatgaatttatgaatattatgaaatcttttccagaacagtcagagagttgagttagccaaattcccttggccaattaatgcctggatgtggctgttatctcaccagagcagaacttctgggacttaggtataaacatcttcaaccataataaactcgatgctatttaggaacacaccagaaacaaatctctgcactggtggggattctactctaaaaggataagtactatatattgatgtaaagagagattacagttagtactaattaagcaaaaaattttg

SEQ ID NO: 180978 - DNA, 589 bp, Homo sapiens
aggggcaggcagaaaaaggaaagcaggcagttagatgtgatggtactgtccagaagcctatagcatggaggaggggatgcaggctggagaaccagaagaggtttcagaggaaaggacacttgagctcagtgtgaaaagactttcgagtgacccaaaaatcttaaattagaggctccctgttttgtggctttaaaataaaacattgtccttatgtctaatgtccttggttctcaagagggagttgtttcgtgccgtatttcaaagcatcacacttctacatttccgtctgagactcgccttttggacaggaatgcaccactgccagcagtcttggctttggtgggaagaaggtagaaggagctcatcaggttcatagaggaggaaataccaattcttagaaataaaatggttcataagaggtagaccaaaggtcatagagctctgttggctttgttcagtggcattcagggaatgaagcctcaatgtcttgtcacatttagggtgggaagagaaaatcatgtaggaacagctgtgcttaaaacataagcatatcatcttgggggtgaagttggggaggtgatctaagatt

SEQ ID NO: 180979 - DNA, 457 bp, Homo sapiens
atggacagatagacaccagagagatatgcgtatttcacctgcatgcttgaggctagagaaacatgatttattcagaactatttcaaatactgtaactaacctggtaattttgtttaggaaaacattaaattcggaatagaaggcaattcagaatacctgtctgttatctttgtcttgtcatttttgagatactcagttcctggaaaatattatgataatccatcttgctatgtagtatttcaagttatatgttgagcctctgagcttgcagagtgaacatttctattcatagacagtgctgttgacatcagtggggagatggcacaagctttgtgccctaggaaagtttaaaagctagaacattacactgcaaaccctatgtcaggaaactttgttgcagcaactaggcaaggaaaccctaccactgtacccataccttgttttagtagaattatgt

SEQ ID NO: 180980 - DNA, 208 bp, Homo sapiens
ttggaaagtatattgtgagaaatttttacccaaaagattttatttttatactctttgcttgatacacatacattgcacatcaacattacagagaaacacaagagataagtggaaggaacttgttgaaaaataaagcttgagaactgcttataaatcaaagtaagtttcagattgtgacatttcattgtaaatggcactaaaacattaa

SEQ ID NO: 180981 - DNA, 307 bp, Homo sapiens
tgaattgtgtatgtgtgtatatctgtatgaaatgtagtcaggatctgattttaccatttcccatgtggataacttgttccagcattccttcttatctcagagaaaaaggggtccttcttaacactaactcttccacctgttctttcagtttctccatctttccacctttcaaaatcctactccattacttaacctatttcatttctcatcttaatttctttttttctaccattttcatattttctgtttacaaatgggcttatgttccctctatttccttcaacccacatttatacatcagttaagg

SEQ ID NO: 180982 - DNA, 715 bp, Homo sapiens
tacaacttctgttcttttgcatggtgctatccagttgtcccagcagcatttgttgaaggctattctttcccctttgaatggtcatggcacacttgtcaaaaatcagttgaccattgtagtaggctgttcttgcactgctataaagaaatacctgagcctgggtaatttataagaaaagaaacttaaatggcttacagttctgtaggttgcacagaaagtaaagcagcatctgcttctgggaagcctcaggaagcttccaatcacagtggaaggcaaagcaggagtaggcatctcacatggcgagaatgggagcaagagtggtaggggtgccgtatacttctaaatgaccagatctcatgagaacttactcactatcgcaaatatggcaccaagccctgagagatctgccccatgacccaaacacctcccaccatgccccacctctagcatggaggattacaattcaacgtgagatttgggtggggacaaatattcaaactaaagcaaccatacacacaaagttttatttccagatttacagttctattgcattgatcactgacatgattactgttcctttgtagtaagttttgaaattaggaagtatgaatcttcctactttgtacttctttttctagatcattttggctattctgggtcctttataattccatatgaattttagattcagcttgtcaatttcaacaaataagtc

SEQ ID NO: 180983 - DNA, 366 bp, Homo sapiens
cttctcttcctcttccctccccttgggaagaaaggcttgccttcgaaagaagatagtgagttggcaaaaccagcatttactcacttcatttacccacttcaaaatcttgggattatcagagaacattcctcctcctcatcctgcatttccagttagtcaataagttctgctgattctaccttctaaatggtaaattctctccatcagcgccattgctgctgtcaccttaattcatgtgttcatcaccttggcataatctactggtatctcttagttgatcaatctgctcccagtttcttcctcatgcagaccatctgctacagagtataaaacattatcttgatgcaaaaaaagaccacattactt

SEQ ID NO: 180984 - DNA, 679 bp, Homo sapiens
aggtagctgtgggggtctcaaggactccctctttgacaaggctttgaccttgtcctacaaaacccagttatagcaaagatccttctaagggagttcagagaaaccccaccctggcccctccaaacgtgatacccaatgaagttctgttacccctattcataactcatcagctttctcttctgtaacccttgatacctcaccaagttccatcctctccctcaatttacccttgaactataggttcaatactgttgttgctgcatgcaaggttgaggtcaatctctctcccatattacagttctcatgacccacatcacaactgtcctgaataaagccttctttgacatttttaacacgatttcagtacaatctttttttacaagggacagggacttagacttgaaaccctgcttcacaagtctggaatgcataggggataatatgctctctccctgtgggaaggaaggagggtgtcctgagagtatctcccactcacatatccagaactctgggtcagacttctctcctcatgaccactccttgttgtcactccataaactgggtgagatgggggactgtggatacaccattacccagacagtgttctacggtggagctcgcctcctgcagtgatgggacacaatgcctgggagtcctgtttgccaattcagcccttacc

SEQ ID NO: 180985 - DNA, 389 bp, Homo sapiens
tgaagagatctggtggggaaaatttataaggtgaaactgaggtgcttgtgagacatccaggtacagatagattcagagaactggataaatggatctgtcacttaagagagagatctgggttggtaacagattcgggaaacatcagctggcaggtcaaaaatggtttaacactggtaaaatttcatatggttcaacctaacaaagagaagttgaagtcttaagagggacagtgtggtcagtgaatcaaagtccaatgagaaaactccttgcaacactaggagtaaagaacataagaaaaggagaatgagacagaatggtagaagtagaagagaaaccaaaaaaaaatttttttttttttttgagatggcgttttgctcttgttgcccagg

SEQ ID NO: 180986 - DNA, 111 bp, Homo sapiens
atccaaaatataatatgtatattattttaactttatgctattaacatattttattcaagaataagaaatagaggatcgcaatcaaggtcctatattacaccctgtccttac

SEQ ID NO: 180987 - DNA, 390 bp, Homo sapiens
ccaaccaccacctgcaactccaccaaaaacaactcagggatgtacctcagcctaggcaggcttcagctgcctggaattgtatttgaatattaacatagatccagccgggtgcggtggctcacacctgtaatcccagcactttaggaggagaggcaggaggatagcttgagcccaggagtttgagagcagcctaagcagcatggcaagaccttgtctctgcaaacaaatttttaaaaaattagccaggtgcagtggtgcatgcttgtgatcccagccacttgggagactaaggcaggaggatggcttgtgcccagaaggttgaggctgcagtaagatatgactgcaccactgcactccagcctgggtgacacagcaagaccctatctctca

SEQ ID NO: 180988 - DNA, 266 bp, Homo sapiens
atctacacagttcagaaacatcatatataccacagcccttctatgttcctagccccaccatcaaattctaccagcagcttttgtcactaatcatatcctcttcactaaaaaggtaatcacatttttataattcatgagtgattaatctgttttcatacatcatattggaaaatcatgttatattccagactcctgaggctgatgctatctctctcccacatatatcttagtttctaagagaaaaatatgtggtttaagctctgatg

SEQ ID NO: 180989 - DNA, 328 bp, Homo sapiens
gccccaagtcagttttaagtcctagagacaattacctaaagaagaggctggaactcctagaaggtaagaccctgcgacaccacagagtagatattcatggtaatgattccccacatcctccaaagggtctatagccatttattcaagtaactgtatactggggaagaggaaagacctgggcattttaaggactgctggatacagggtctaagctgacaccgacaccagataacgtgaagcatcatcatggcactggggcacgtggggaccatggaataaatggaattgtggcccacgtccaactcacagcaggtctactggatccacc

SEQ ID NO: 180990 - DNA, 479 bp, Homo sapiens
ggaaatagcatttgcataggcccttacaaagctttattctcggtcgggcacagtggctccctcctgttggcccagggtgctttttaaaaattgagatgtaattcacattgcacagtttcacttttgaaggtgtgaaactcagtggcttttagtcacgcattcacagagttgtgcagccatcaccattgtctacttctagaacattcactcgccccaaaaagcaaccccatcaaccatcactcccaagccccgggcaaccatgaacccacttcctgtctctgtggattggcttgttctggacatttcacacgagcgaaatcacacatcacttgaccctcatccccatgggcggccggacgggcagggtcctggcagcttcaagggctcttagagattgagtcgtgtttccagcacttgcgttcttttgctcacccctgagtctccgcacgatttttctccttcccacacacatctcactg

SEQ ID NO: 180991 - DNA, 433 bp, Homo sapiens
ggttaatgaggatgtggttctgcaacttgcacttccatttcaaagccatgcaggccattgatagatctgtatggctcaaagagatgccctatttgttttttatttttattttttcgagacaagatctggctctattgcccaggatggagtgcagtggtgtgtgatcttggcttagtgcaacctccgcctcccacgctcgttatcctcccacctcagcttccagagtagctgggactacaggcacacaccctgtgcctggctaaatcttgtgtttttctattttttgtggagatggggtttcactatattgcccaggctggtctcaaatttgtgagctcaaggtatctgtctgcttcagcctcccaaagtgctgggattacaggtgtgagccaccacacccggccaaaacttggcatgtttaattgctggcagg

SEQ ID NO: 180992 - DNA, 615 bp, Homo sapiens
tgcctgtctgtctgtctgtgagtgcttatctgtgtattgtgttctgcttcctgtggttacagaggcgaggtaggacataccaccaagctaagggggtcatcagctcatcttctgggcatgggaacccccactttcttttggtggtatatgcccactgagtactcccggcttgtaatacacaagtgttctcattcaccgggtattgcttttgctgcttgctgcatagcacaagtggaaggatgaagggaggaacagcctaattgttcctactattgtaacattacaaaaatcacactgaatattgattcgggactgcctcttggtccccatatctgctttgcccaagcttggaaaggaagaaacctgggcaaatatgtatttgtttatattatcaacttgatccaatacttctgtagaagtgttcaaacatttttaacagatatactacttttcaaacaaaatgttatgtagaggatcaatatattaggtaagagcaaaactgatctgcttgaagcagaggaggcagccctgaacatgaaccgctggtctcccctctgttcactgcagctcctgagaccctccatggaatcctagaactctgcagggcagtttaaa

SEQ ID NO: 180993 - DNA, 504 bp, Homo sapiens
tcctgcacacaggttctgatttgccctggcgtccccactacagtatgccttgttggtatgaaccagtcttcactttttctgttcttctttattactacaattaggaaatttttctgtcatacaagtcacaaacaccttgtcatccatgacacagaatgcacatatgctaatatttcatcgtatttaatttagagacctgtatgtgaaatgattctataaacactatagatacattgtaagtatcctctttgcacctttcaccaatcacacccattctccatgtttttatgctttcaggaacatgtgttgcctctgtaaacattacatcatactattttggtgttctcagctttacttttcagctttacgtactatactgtttttgcccttctgtaactttcttactcaacattgtttttgaaatccatttatatagatatcttattgtaatatattcattttaactactgtcggttattttaattatatgaatttatcatcatt

SEQ ID NO: 180994 - DNA, 285 bp, Homo sapiens
cattagtctcttttgtgcttttgcccctttcaccatgtgagaacacagcaagaaggcaccatctttgaagcagagcaagccctcactagggttggccctttgatcttgaactactcagcctttagaactataagcaataagtttctgttgtttataagttacccagttgaagggtggttttgttgttgttgttgttgttgttgtttgagacaggttcttgctttgtctgtcacctggctggagtgcaatggtgcgatcatagctcattgcagcctcgacttctca

SEQ ID NO: 180995 - DNA, 403 bp, Homo sapiens
agataacaccagacatgtggcgggtactcagatcatcctgaaacatacatcagccatgtcaagtggcctcttttctaccagtctcattccctgtaggttgcatagaatgaccaacctgaagtagggaagcctgaactaagagtctataaattggatttttgttccatttttgcttctgattagctgttgactttagacaatttattttagtatttagttttataatgtgacaaataaggtggttagactaggtgacaatactctgtaaaattgtgtaattgtgttctttttctatctttaaagaagatgataagatagctcagggctatgcttctgaaactggattccttacatccctgggaatagctgtttgccaggggtctgccaagtacatggcattttc

SEQ ID NO: 180996 - DNA, 158 bp, Homo sapiens
gtttaaacacttccatcaaacataaaacaaagccggtgtataggttataactttgtagacaacctgccgtggccaaccccactcagaatttgtatgctttcatattgcgttgatcttctttaaaaaaaacaaaaaccatgtattagtgtgtgaaataa

SEQ ID NO: 180997 - DNA, 378 bp, Homo sapiens
caacacttctttgtgtattttcttagctgttcgtttttctcgtctgtaaattatctgtttaggtccttcagatttttcaaaattggactgttatgttttcagtattgttatgagttcttgtttcaattatttatgacagttcattttcttttttaaaatagactttttttttcttagagaaataagaaaaaataaaaattaaaatagactttgtgttttagagagtttcaggttcacagcaaaattgatcaaaaagtatggagagttccggccaggctggtcttgaacttctgagctcaagtcattctcccacctcggcctcccaaagtgctgggattacaggcatgagccaccacacctggcccctttgcccatttt

SEQ ID NO: 180998 - DNA, 710 bp, Homo sapiens
cggatcacgaggtcaggagatccagaccaccctggctaacacggtgaaacactgtctctactaaaattacaaaaaaaaaattagctgggtgtggtggcgggcacgcctataaacccagctactcgggaggctgaggcaggagaatcacctgaacccaggaggtggacggaggttgcagtgagccaagatcatgccactgcactccagcctgggagacagagcaacactttgtctcaaaaaaacaaaaacaaaacaaaacaaaacaaaacaaaatcccaccctcagctccacggccctctctagccatagtggtccccttgttcagagctacactttctggcaacgtctaggcttgctgcctccacattctcagcacccacacaggcctcatgaaacatccaccagctttggtcctaccatgcaccaagcttcatctccagggccactcgtccatgttgctcggtccaacaggtactcctgaccgctcagcagcatctcgtctagttcttgaaactttctctccttccaacctccaagtcgctcccctcccctgatttcctctcatctgcagtctttcttctcagggtcctttagctccagcccagccctggattcccacagcctgccgagcactgccatgtagatggcacacggcatcttgaacttgggtgtctgagaccagctgtagttttcacacctgcctctgcccc

SEQ ID NO: 180999 - DNA, 194 bp, Homo sapiens
accatcctaagaaaaagaaaaggggggggaaactaagtaaaaagaatgaagaggtatgatccacactgtttgaaagctcagatagcttaaatacaaatttatggaaagttgcagccttttttcagaatacaattatagcaaatgtaaaaatatttcttcctaatttctttgacgtcctgggtcaacaaagcccc

SEQ ID NO: 181000 - DNA, 314 bp, Homo sapiens
ctacccattcaaaccagagattcccaacactgtctacgtattggactctcctggggaacttctgaaagcttattggatgccctggtctcaccccagactgattgcatctcctaggataggttgggagccctggtctaactgaaccatgatgcctcctgcctttcgtttcacgttttataattttcaaagctctttctcctaaagatcccatatgatttccagaacaacttttggaggtacatggaggcaggtagatgaaggcagcatgtgaatgctttgtccattgtgttattattgcattcagtggatgaaga

SEQ ID NO: 181001 - DNA, 318 bp, Homo sapiens
cactaaaaaaatcctgaaagtaaccagagagaaaccatgcattatctatagaagaacaccaattcaagtgacagcagttatttttcatctgaaaaactggaggtaagaaggaagtggcacgacatttttcaagtgctagaaaaaagcaaacctgtcaactcagaattttatatccagagaaagtatccttgaaggttgagggaaagtaaagacattctcagataaagaaaaattaagataatttgtgccagcagagctaccctaaaagaatagctaaaagtatttctctaaccagaaaggaagtgataaaagaagtaa

SEQ ID NO: 181002 - DNA, 948 bp, Homo sapiens
ctcagttccagaatacatttgattttacatcttatttgagtatatgatgtcagttgtagccatttccatctaactgtgcttgccttcattttaagctctgcttaaattctttctcatagagtgtgaagttattttgaaaatggtagcaacatctgaatccttagaaggatggccatggcactgggaggttgtgattgaaaagtccatgggtaaatgtaggatttcagcagtcagcagtgacactacagacctgacagatacacaactgacaaatcaaaacatttgtgtgaaaatgagtacagaaaggaatgattcagatgagtcagttgatcaccccagcaaaaataatcattgtcagtcttctctccatccatctgggaagtgagttattcttttaagagttgcaaagaagattcaggaaaacaggaaaaattaccacagctctttctggtgcttgtaaaaatacataatatggtgcatttttaaaggtggtggtctcagaaccacattttgagaactgtcaaagataggaaccattgtcagagttcagaagagagatcatttcaggctgcagtagtcagggaaagcttaatgaaagagactggctttggtctaggtcttgagagatggacaggatttgaatagatgagagcagggagaaaacatttttcgatgggtgaaatgccaagaacaaaagtacagaggtgggaaacaatagtgtaaggggagtgcagaatcaaatagtttgactcaaaggttcttaaatgtggtccatgaaagaaaattaaggccctacttctgtcaaatgacatcactcacttcagacttggaagaaatgggcagctctgcatatttctcttcagcatgcaaatgaatgaaactgttgatgcctctcagtgcatccagcttcacattttcatgtgcttgctgatgtcatcaaaggagaac

SEQ ID NO: 181003 - DNA, 581 bp, Homo sapiens
ctgagtgggagaataagaccctgtctttaaaaaaaaagtttcgggatgttttcccgtaacatttccactcctcccctgctgaccaggaagtagtcttatgaacagccgtgaggaaggctaagaggtgtagactttattttgggtcgccctgaccagatatatttggagttctgttactgttgtagcaaagggaatagatgttggttgccaattaatggtttgccactaacagtggagacaagagcatgtccttcgatgttgttggagtgttggacacatggaccactgagagcagcctggccagcgtcgctatcgctcagtaaatattagctcttgttattgacattactgttgctgatagaactggagtttggatccaggtggagggatggtgcagaggaaggaaggctggagctgagactccaggccccctccctgttagcagggaagcttgctgcattgtattccccctcaggacagtggtgacgaccaacccctctcactggataatggggaagagctcaaagaaccaatgtctatgggtgctttgtggtgcaggcctgtacaagcggcctttgtcc

SEQ ID NO: 181004 - DNA, 524 bp, Homo sapiens
ctgagtgggagaataagaccctgtctttagaagtagtcttatgaacagccgtgaggaaggctaagaggtgtagactttattttgggtcgccctgaccagatatatttggagttctgttactgttgtagcaaagggaatagatgttggttgccaattaatggtttgccactaacagtggagacaagagcatgtccttcgatgttgttggagtgttggacacatggaccactgagagcagcctggccagcgtcgctatcgctcagtaaatattagctcttgttattgacattactgttgctgatagaactggagtttggatccaggtggagggatggtgcagaggaaggaaggctggagctgagactccaggccccctccctgttagcagggaagcttgctgcattgtattccccctcaggacagtggtgacgaccaacccctctcactggataatggggaagagctcaaagaaccaatgtctatgggtgctttgtggtgcaggcctgtacaagcggcctttgtcc

SEQ ID NO: 181005 - DNA, 177 bp, Homo sapiens
aactcctggtctcaaaggatcccacctcagcctccctaagtgctgggttcactggctgagccaccgcaaccagccttagtttatatatagtgcttagagaattagctagcatctttaaaatgtggggtttttttcaatgtttaaaattttgcactgtaaatctttttctatgtgttt

SEQ ID NO: 181006 - DNA, 217 bp, Homo sapiens
cacacgtacgcataagcacgcagtcacacacaggtgcatacagacgcgcaaccacagcgccactctccctccccccacggagttgcctgtgtctcttgaggaacagaaagcaaagcaggagaccccagcacactggatggagggtcccgggcaggagggtcagggccagatggaggtgggaggagcggctggagggtggtgggggcagccagagggt

SEQ ID NO: 181007 - DNA, 422 bp, Homo sapiens
tgcctaaaaatttccagcaaaagggattccccagtgccttcgcaaagtctctagactccacgagaagaccttgtgtcctttccatctctcttatgccacaaaccagctgttcccctcagcagaggagacaagagctgtgctgattcttccctgccatacagagacatgggagctggagtgtgacctcggcacacccatttccttattgtccaggaatccagactacagccttaacctttgttaaggcttttagtaaattactccatcagtccaagagacaattaaaacaaaaacaaaatagcattgtgtttttatagcattgtgtttttagcacagcggtatatataaaaaaaatcaggccaggcgcagttgctcacacctgtaatcccagcactttgagaggccaaggcaggtggatcacc

SEQ ID NO: 181008 - DNA, 175 bp, Homo sapiens
aaaacaatttaaacaattgagggagtactgtttcttggaagcactttatcatcaaacagctgttaagaacaggaaacaaacaagaaaggagttaatataaccacaacctcttcgaagaaaatcaggatactgctgactcacaagttaactgttgttgcttcccatttcttgttca

SEQ ID NO: 181009 - DNA, 811 bp, Homo sapiens
  misc_feature (1)..(1): n is a, c, g, or t
ncacacacaccaacacaccacaccacctaacagctacgtacgaggcctgcctgttaaatacggacgagggctgggcggcagctggtgaagtccctggcggccctccacacagggccatggttcgacacacacctcccaaaacgccccacactctgggcctctgctggatgtggcctcttcctggagccccacctgggcactgaggtgaagagccccggagccctggcagacacgagggcttggggcctcaatggccgcatccactctgctccaagcccaccatggccagtcccgctccctgacaagggcaggcacgaagacgccgagggcggagcagccgtagtcaggcacctgtgtgcctgccgcacttgccttctgccatccgtgacctagagggctaccaccctggcaagatccgggttgtctcttctgggcatggtcctggcagaaggctcctgtgagcaggcaggagcttgatgactggctcacatgcaggtcacgcagcacctgagctgccccaaagctgccccatggggtcgcacgtcggagccatcatcacatcctgatggctgcctggggcagcgtgggaggccagagtctgcccagggctctccaagacgatgcttcaggtgtgctgggcccaggccatggtgccatccgccagacagccccgtgtctgcagcaagcagctctccacctcacatcatgggtatctacagggcacagccacagaactgatatccagaaatgcacgcgcacacacacacacatgcacgcacgcacacacaccctccaggtcagacatgccata

SEQ ID NO: 181010 - DNA, 703 bp, Homo sapiens
cccagtcctgctggatggggaattctgttctggctttgttggaggaacagccccgttagagtccagggctacctgcctttgcagtctctgtgtgcctctattctccttataaatatcaaaattgttaggtaaagtggttggcaggaaactctcaatccacccttaggaaaaaatgcttcctcttgttgagtctttgaaccataatccccttaaaccctctacactgagcacatataagcgctattgggatgattgtttttctagaacattttatgtcctcagaacttttgacaggtgccttttttcatcggcagtttgcagatgcagtgtgggtggaagaaggatactcctcattttaagtgaggaaactgaagaatacagaggtaaatttaaggcaaagctcaacagtcttaaaaacatagaagtgaatttgtagttgggactatgtcccatgacaaagatgtgactctctttcctattccctctgagttttgtacagatgattttggttgtccttagataaaagcccttcaatcaagattatattcaagaggaaagaagctgagatgtaagagagtggtcgaattatacgcaattatttttttttataaattttcgaatttcatgaagtgagcattttagagtttgaacacaaccatttaaaattaaaaccccataacactataaacacagttaaagctta

SEQ ID NO: 181011 - DNA, 218 bp, Homo sapiens
catatctacaatgttggagaattactatctgtgtaacactagactctgaagataggagataagaaataattataattgggctgagttcggtggcttacacctgtaatcccagaactttgggaggccaaggtgggaggatcacttgaggccaggagtttgaatccagcctggccaacatgaaaccctttctctactaaaaatacaaaaatctaccgggg

SEQ ID NO: 181012 - DNA, 718 bp, Homo sapiens
aggccgaggcaggcggatcatgaggtcaggagttcgagcccagcctggccaatacagtgaaagcccgtgtctactaaaaatacaaaaattagccaggcgtggtggcgcacacctgtagtcccagctactcaggaggctgaggtaggagaatcacttgaacccaggaggtggaggctgcagtgagccaagatcatcccactgcactccagcccaggcaacagtgtctcaaaaaaacaaacaaaaaacaaaacatacaaataagagctttattcttgtggtacttatattccagtggagacatagatgtcaaatcattaatcatactactaactttatagttagtagtgtggaattagacctagtgccctgagttgaaaaacattcaatctgagatatgaaaggttgagtataatttgttagaagaaagatagaagtggatgggtaatggaggaaaggatattcttagagggaatagcctgtgttcctctgtgaaacgggaatgattaaggtgagagaagaaatgaaagaccatgcgcctgttagcatagagggctggagatagtgtagcacaagaagatggaaagctaggtaggattcagatcatacagggcctcatacgccactttaagtatgtatctgaagagtaaaggagagtagggttgagaaagagaatgatatgaagacatttgtgtctttaatttcactctaggggcatgat

SEQ ID NO: 181013 - DNA, 537 bp, Homo sapiens
cttcctccccttcagttccctggggcaccctgctttcttccccataaattccatcttttgcgtaaccagatgacactgggtttttgtttcttgtaatcaaaggaatcttaaccaataaaactccgaacacagtgctacacactgtcccaagctatcatcccaatatcgccttcccagataatcactcagagacctcactggggtcccaatctcaaccctggcccacgcccccagcttttcactctaccctataactggtgcacttccaggttgcagatattatatttacaaacaggccctccctcgataagtgcttgtgagattgaactagatgtcccaaaacagcaccaaaagaacactctgaccactctacaccccttagcagctctgcttcatgcctggcgtctcactcagtatgcaaatatgctctagaaagctctaggaaaaccagacattattgtgtccactggacaaaagatatggaaactaaagcccagagaagggaagcatcttgtcccgggtgacttgccctgacac

SEQ ID NO: 181014 - DNA, 777 bp, Homo sapiens
aaaatctgcgctccagcagctgggaccgaggcatgagagcgttgaatcatgagtggcaccgttcgcaaaaattggtgtctttgtacaaagacagtgccacaacacaactcagtgaccatcgggagagcagcctcatgatgggcgatgctccatcagttttctcttgcgatcttttgcatagatcggtcccgccccgcatatggcgatgaggactcaagagacacggaaaacgttttctttctggaaaacatgaaataggcttgtagatggacaggaagtcaagggacaagcggtgcgccgcagagagcgaggacccactcttctattcctttgcggaggcacggacacacggtgtggcccgaaacagcggcaggagagtgagacccgggctccgaccgcggtgacggagtctcactctgtcacccaggctggagtgcagtggcacgatctcggctcactggaacctccaactccctggttcaagcgattctcctgcctcagcctcccgaatagctgggactacaggtgcccaccaacacacctggctaatttttgtatttttagtagagacggggtttcaccgtgttagccaggatggtcttggtctcctgactggtgatccgccgctcggcctcccaaagtgctgggattacaggcatgagccactggcccggctaaaaattttttaaatgtgtaccttatgggtttttttttaccacaatttaaaaaattaatttataatatacatgcagaaaaatgcacaaatgacaagtatat

SEQ ID NO: 181015 - DNA, 355 bp, Homo sapiens
gatcttcaatcttggaggtggagcctaatgggaaatgtttggatcatgggggcagatcctttataaatggattggtgccttcccagcagtaaatgtgagtgagttctagctctcctacttcatgcaacagctggttgtttaaagagcttggcaccccctcttctctctcttgatcactctcttcaccttgtgacacccctgctctccttttgccttctaccaccattgtaagcttcctgaggccctcatcagaagcagatgctggtgccatgccttttttttttttttttgagacagagttttgctctgtcacccaggctgcagtgcagtggcgggatctcggctcactgcaacc

SEQ ID NO: 181016 - DNA, 725 bp, Homo sapiens
gccaaagtgagtcacaagccaagtttaacttcaaggagcatgcccccaagcctctgattctaagtgctaccgtcttaacacatttgagctcctgtaacaaaatgccataagctgggtgacttataaacaagagaaattatttctcccagttctggaggctggaaagtccaagaccaaggcactggcagatttggtttctaatgagaacctatttcctggtttatagatggtgccttcttgctgtatcattacacggtggaaggggcaaacaaactctctggggcctcttttataagggcactgatcccattaatgacagctctgcctttatgacctaatcaccttccagagcccccacctcctaatgccctcactgggggctaggtttctccatatgaattctggggggacacaaacattcagaccatggcagcgctctcttccctcacagcgtggctggctctccaactacaacaccatgccccatggctcacttccaaggagactttctggagaggtttgtcctaagagacagaagaatgcatcctgcctcaagttttagttgcataggttcaccctacagtgaggtaatagttacacattcttaatgaaaagatccaaaagcccaatacatcctgttctgcagcatataaagcatcttcttcagacctggtccaagactactctgggatttttgagtcagaagagagccagagcctattcag

SEQ ID NO: 181017 - DNA, 201 bp, Homo sapiens
aaaaattcaacaacagcaaaccagcaaacagaaactcactgaggtagtgaagtgtaagcaggaagctgtgtggccaggtgtgaggaactgtgtagaactctgggaggaatgagagtagccccttcagcttcactgcttgctggtatgtgggagggagggccagggttccaaaacttccagttcttaaatagaagcctgcag

SEQ ID NO: 181018 - DNA, 310 bp, Homo sapiens
cacagttgttgaagatttacaggcaagccgtttggagtttaaatgtgagatgacaccaggggcctctaatgtacagtggagctttaagcatgatatgggggcagaaaatggtctgggaacccccttctctgagatcttagaagttctgttctattgactccaggcagggctgcagccacggtgcacttcatggactcataaatataacattattggacaaaaaaaccccaatccttctctgactgattaggcccagattggtcagcccataaatcaatgctgaataagaactataaagttgtgaatcaat

SEQ ID NO: 181019 - DNA, 387 bp, Homo sapiens
gcgaaacacggtcccctcccccaaaaaaagcacattttgatgccttgcacaaaactggcattgatttgaccaggacaattgagccactatgaggccgtattctgtgtcaagagaaccaggaagaacagagtatatccctagcaccaacaataaccattgtcttgggtctacaaccttgaacaagtcactaaacttttcagattggaatgccaaggcctctgctaactccaaggaagcctcagttacagtactgaaaatacataattatacataattacagcagggacccatgaggaaagttctgtaatgcagtatctggcttaaacaacatacgcaaattgtgagcagcagactagttaaccacaagctatgttgcttttgctatct

SEQ ID NO: 181020 - DNA, 695 bp, Homo sapiens
taatatatgtggacaaacaaaaatagcttcattgttaaaaatataaataagaacataatatatagattttctgcaacttgctttttcctctttgatggtcagaagaaataaactacttttgcatgtttaccacactacatttgatgacccattctttttaaaaatgttattttttagtaatttttatcttttgtagagatggggtctcactatgttgcccagtctggtcttgaactcatgggctcaagtggtcctcccacctcatcttcccaaagtgctgggattataggcatgagccaccatgcctggcttgatgactttgttataaattttcttatgttgtttaagggctgaactttggggaaaagcttcccacattcattacattcataagatatggattttctgattttcagcaaggccttggctgtacccgaaggctttcccacatttcttatagtgaaaggtttttggttttttgtttttttttccccccagtatgaattccttgatgtccaataagagttgagctctttgtaaaggctttcctacagtcattgccctgatagggtttatttccactatgagttttctgatgcccagcaaaggagatttgcccagcaaatctttctatacctgaaaaagatttcacatttaatatggtgatagagtttctctcctgtatgaaatctttg

SEQ ID NO: 181021 - DNA, 641 bp, Homo sapiens
ggagtctgaggtggcagtgaactattatgataccactgcactccaggagtgagaccctgtctccaaaaaaaaagcaaccattcgtttcccaaaagctgtttgcagtgttgcagtgccttacagccctcagagctttctcacacccatcggttcctcgtaagtcctgtgaggcagacagagctggagttaagagtccattttacagaagggaacactgaagcctccagtcatggagctgaggagtggcagaggctggagctcaggcctcttgcctccccagctgctcagcctgcccggctgcgtcctcactgccctgcaggggacacggcatgccaaggcagagtggctcctggatgaagctggggttttgggtcccacagcccgagttcccagcccagtaccaccatttcctggcttgggtggccccgtgcaattcccgaaacctctgagcctcgcagcagccctgtgaggaagcctcagtactgctcctacttgacagctggcaaaactaaggccccaagagagtcccatcacataactggctgacagaagagttgggatttgaatctcgaaataactcccttccatacaggaccctaccctgggctatcgctcgtgttcccatctccaccaacatcacc

SEQ ID NO: 181022 - DNA, 401 bp, Homo sapiens
taaagacctcagaatcctagattaatgaggcgccacctcatgggtttttacaattgcttgatctaaatctagagtcaggaagaactaaacgctggatcaagtgagccatgataagaggctatagagagtgaccttgagaaaaaggttatgagagcattactgtcacagtagactaccaggaggcaatgtcttctgtcctgttgggatcctgtggcttaaaatagatgagagcgggccagctgtgcctgtttctgatagacgtttggtgtttggcaaaagcagtgatgaaggtggaccaaacaaggatgacatcactaagacccaaagggatgactgagctgttacctcagactagaactgcctgtgggttggagataagagtttgaatgtgggtgtacagg

SEQ ID NO: 181023 - DNA, 589 bp, Homo sapiens
tttgagacagagtctggctctgtctcccagcctagagtgccatggcacaatcgtggctcactgcgaactatgcctccctatctcaagccccatcctctcatcctctcacctcagcctcctgagtagctagaattataggcactgagtagctagaactatagataactgtgcctggctaatttttagaaaaatctttttgtagagatgcattttcaccttgttacccaggctggtcttaatctcctgagcacttaagcgatgctcccgcctcagtctcccaaagtgctgaaattacaggcatgagccactgtgcccagcatgtacatctctttcactggctgtttctgagatttagcctttaaaatgaaccagtaaaagaaaataaattggtgagatgcagtggttcatgcccataatcccagcattttgtgaagttgaggtgggaggatcatgtgagctcagaaatttgagaccagcctgggcaacataacaagaccccatctctacaaaaagtaagagaacatagccagatatgctggtacaggcctataatctcagctattgccgcgtactctgcgtgtacactgct

SEQ ID NO: 181024 - DNA, 120 bp, Homo sapiens
aagatgtgagagagctagccatgaggatatctggggaaagatcattctatgcagacgaaacatcatgagcaaacatatatgtctggcgtatttgatggatggccggcgacaatgtggctg

SEQ ID NO: 181025 - DNA, 549 bp, Homo sapiens
gacctgcatttacaagatctgataagcctcccctcccctctctcaatggtttgcagcctgactacacaagatgattggaggggtttaagatctgcttcatttgaaagaaaaaaaatccctattaacctttagagattaattgctttggattgagtattgcctctcttaacatcttctaaaatgtaaatactttctggaaggaaggaacacattacgttttttacacattagtgagttttatcacatcagcctcctctatttgaaatagctgggcagaacgagctctaaatctctatctttagggagggaggtagagagccttggaagatatgagggatacgctagtcccaaggactaacacagggctggctgaccctttgtgattaccaaggacacggtaagggtgatgctgggaggggaggggagggagaggccctgagggttgtcgcttctgtcctggggcctttgattgctttagctcccctgtggacatgtgggaataaagctgcttctgagaggtccctatgaccccggcagccaggttaagca

SEQ ID NO: 181026 - DNA, 433 bp, Homo sapiens
catttacttcctaataaatttttactttcttcattgatcacaacctggggtagctgctcagaatgctttgattcctctcacttaccctgacctctatggtgatacatgtgttttacctctaactaatttaggatttttgcaatttttttaaaacaagcaaactaaaggaaaatacaacagcataggaacaataattttacaaggcacatatttcatattctaacgatgcaagactagccatgaattaacttgagtggctcaatttatagaacactctatctctagttctttcttctccttcaactttgaaactcacaagtgaaatggagaaacttcctgatcaccagggctctctcacacaacactgcttctcaagcaattggcttattggagagtccagtgcagtcaatgcatagcgtgagcaataaaagtc

SEQ ID NO: 181027 - DNA, 313 bp, Homo sapiens
gaacattttccttaacctatactggaggtaaaaaaacattgattaatgaatttttttaaaacaattccatcacctcacgttaaaataatttatatataaagaattcaacagtaaaatacaaacaagaaaaaagaaaaccacaggaagtaagaatcaaacatgtatcagaagtcttgccagtggaagctttgaatgaggaacagaatgacatgccctgatttatatcttaagaggatcactctgttttgtctgcaatagttgagaaaacactaacaggaatcaagagcagaagcagggatactagttgtttcat

SEQ ID NO: 181028 - DNA, 445 bp, Homo sapiens
cggcccagcgatcaccctataccaccacacccgtctaatttttgtagttttttagtatagttaggattaagtttggctgaattgattagaaaattgaaagtaaggggcttaaaaatgttagtattcatttttatctcatcccaatgaaatctagatataggcagttggatgctggcataatagcaccacaaagttattagggacctcggcaccttccagctcatgtctacaccatataagtgggtccttatgccctggtttctatatggcaattagagatgtcactgtcacgtccaaattgctggcagctggaaggtgaaagggacaagttggaagccaaagggcttgcttgctattatatttagtgactattgagtgatggctgaactttcaaatacataaattgaaagattacttataggcagtgctttccaggtgggtcgcc

SEQ ID NO: 181029 - DNA, 534 bp, Homo sapiens
gggtacaacatggtgtaccatctggcatctcctccatgatggcagaaggaactgccctctcttagtccacccccacctcccatctgtcctctcctcagttgcacatgttcccagctgtgttcaccatcagggaggttttcatccatgtccaacctcctaacaaggaactctggattccagctagaagatggggacagagaaatgtttaaaggcactcctaatgtcaacaagaagaatcaaattaaacaaaaaagcttctgagtggggtccagggcctcaagaacacatctttatactaggacttggacaaagactttgatgaagggaacaaatggggaaaatgcagtccctgcttgtcctctgtaaagctgaaggcggtataaacacttccagacattatttctagccagggaaagatgctgaccagttgcccaaagccaaagactgccaggagtaataagaaaactctttaagcatgattttcccatctgtttaatttcttatgctgaaaaagaagaaaaaaatataaataaa

SEQ ID NO: 181030 - DNA, 696 bp, Homo sapiens
atgttggtcaggctggtcttgaacacccgacctcaggttatccacctgcctcggcctcccaaagtactgggattacaggcgtgagccactgcgcttggttagaacttatttaactttttaggcacttggtaaacggtagctgttagtccatgtgtacttttttttttggtgggggggggagtcatgctctgtcacccaggctggagtgcagtggcaggatcttggttcactgcaagctccgcctcctgggttcacgccattctcctgtgtcagcctcccaagtagctgggactacaggtgcccgccaccttccatgtgtacattcttgtttaacaattcaggataggtactgttactcccctttacaaatgagactttcagaggttgattttctcatggtcaaacagctagtaagttgtgaattcaagattcaaactcaaatttagagctctcattttaaccactatgtaacaatgccccatgaggcaaagggataatatgtctagtatacattctggtatattaaccattgtcagcactggtgactgaaatccaagaactcttcataagtgggcttactaaacaaataattttatctgttgggtgcaagtcattttttttttccaaatacgattaagaacaatctgccatttatgggttttagctacaacagagaaacataagagggaaactcac

SEQ ID NO: 181031 - DNA, 728 bp, Homo sapiens
ggcagtctcttcatttaattggatttgcttcgtgtgtaaatctcctcaagacaattggcatgtagacagatggtgggagaacgagggctccgacaaattgcttcgagatcaaagtgttcagactggcaccaacgataaccacaagagtgagaaaacgtgcatccctcccacgggcctctcagaattctaagatttctccagctccgtttgcaagttgcactgggggctgaccaagtttaaagtgaggtttgaacttgaaacacaagagcttcaaaccttcacttgcagagttgatttttctaatttaaaacagataagagatgtcatatttgctgatacaaatatgattctaaagcagaatgtgatttttgtgtgtgttgctgcatttttattgtatttttattatcccaggaggtacctggcttctcagtgctttttttttttttaatctacaaatatttcatataagggacctttaatttacggggggttccaaggggaaagaaaagactgaattagatctggagggatagggctatgacactccggaggcaccccatgtggctttagggaagcgtctgggcacacgcggttccaatgcccctcagacagagcttaattccttcattgagccaacccggttgtggggcttgaacagatgtccggaatgtgaagggtttaacttacggttctctcaaaagggtcctagttacaggacgagctcagga

SEQ ID NO: 181032 - DNA, 143 bp, Homo sapiens
ttagttttatgtgggggcaatagtcactaaaggcttctgagatgcacttgaaagataagtaggtggggtgcttctgagaagactcttccatgttctttttcctgccagttgcacatgttttaaaaaaatactttccagcttgg

SEQ ID NO: 181033 - DNA, 293 bp, Homo sapiens
tagatcccagggagattaacaaagtctgtctcctctgaagatagaattcaagctgagttcttctagaaatccatgacctctagttcttctcttccagtgtcaactttatagcaacggcagtctgctaaactttgtgtaatctcaccctgtcatatatagcccagactttgaccaagaacttgtgaggaattcacacatattcaatatcttctcttccctctatctaccctctgttccccattctcatcctacatcattccctccattccagtgccctgccccgtggatttcag

SEQ ID NO: 181034 - DNA, 235 bp, Homo sapiens
catgcattcataagccgaagttgattttcatggataactgatggtagcacacacacaaaaatgattctggaaataaagtctttaagcacgaattttaaggttagaaactggagagcttttcaaaggaaagaggaatagtcacagagaaaaaaagaataatttggaagttatgtaatgtatgttaatagaatgagaaaacagaaaatagggagaattttgaaatatagaaataaag

SEQ ID NO: 181035 - DNA, 216 bp, Homo sapiens
gagcagcggtagagtgaagagatgacatggcaagatggagaagcacaagactgtgtaacctactgtgcaataagcaagagaaagggcacagagatggtaacaactctggcaggcgcagcggggccactgctgggaagtagggggtagaactgtggctctcggcaatgcaaacagcatcggtggcagccacagaattatttccactcagtggtcttg

SEQ ID NO: 181036 - DNA, 522 bp, Homo sapiens
aacaaacagaaaaactaaattattgctacttttacatatattttgtttatatgatatttcataattttaaatagcatgttcttcaagacctaaggtttgtttaatagaactagaagtactatgaagaaacaattttttagaaggaagtttaacagtgtaacaatatatgttttatatatgatgcatgtttactttcagtcattcatatcctcagaggactcttgtaaacttcaaggaagttttgactatatctggaatacaaagggaaaaatggaaaaacaaatatattttagaaaataatctagttaacagacatatcctgagtctctacctaatgtataatcagcaataaattaagtctttggattttctgcaagttctcccaagtctttcaagttatactgctatttgtgaggggtttttttttccctagaaatatctgtaaattctatgtttaattagtttctttactgctttatatatatttctgctaacagataatttgatcttgttaaaggactt

SEQ ID NO: 181037 - DNA, 410 bp, Homo sapiens
ggggctgacctagaggatccccaagctgctcacattttagtcactttatccatttttaggtgcataaggtatgcctgaagaatgattagaaggatttataatgaaatataaactctgatggtgcttgatttttccaaaggctattactttaacacagaaaaaagtgatggccctaacatcagatttatatattcataaataagtggcaacaattgtctgagtttgggaggtaagacatttgtcaatctgggtagcactgtagcaggcaggctggatgatcaagttcacttaataaattacttacccagctgtgatgtggaatagtgggaaatcttcaggagtaacaaattacttacttgtttaatatttccaacactaaatggaaagtgtgagcagcgttgaagaaataa

SEQ ID NO: 181038 - DNA, 287 bp, Homo sapiens
aaattaccaaccattctgtaaaatgagggttagaccaaaaaaaggcatatttctctagttcttttcaaacatttaaatgtcatactatgttgaacaaaagccagtgttgtactattagtccaacttactttcttaataaaatgccataaatctgttttactttgggatgtaaattactcttaactggtaagagaagaccattttcctagagcatcagtttattcaataataagtaaattaaaacagcattttattattaaacttagaattacagtattacttttttt

SEQ ID NO: 181039 - DNA, 557 bp, Homo sapiens
ttttttcaaagtcaatgaaagacattaacccacatatacaagaagctcagagaatctcatgcaggacaaatactaggaaaactgtattaatttggggaaacaataataataagaagaattaaagcttactgtcttgtcatcataaaaaatggaagccagaagaaagtgatttggtgtcttaaacttctgcaacaacaacaacaaaattcaacctaaaattctataattatccaaaaagtccttcaaaattgaaaacaaaagtaattcatttttagatgaacaaaatctgaggcagtttgtcactagcagacctgcactacaagaaatactaaaggaatttcaggatgaacagaaattattccacatggaagcctggaccttcaggaaggaaagaagaccccaagaaatgaatatacagtaccatttgtaaacgtattcactttactgattaagcaataaaatcaacaatgtactatgaggtttataagatatacagatgtatatggcaaaaataacacaatgtgtagaaggaaataaatggaattacatagctctta

SEQ ID NO: 181040 - DNA, 123 bp, Homo sapiens
taactgctgttaataaagagtttggattttagccactgaagatatttcgagaagacattatcctcatagttgtccttaacagtaaatcaaagactgattgatttgttttcctctcatttgact

SEQ ID NO: 181041 - DNA, 172 bp, Homo sapiens
caacaccacctggggaaattggcttaatggctcaaactgggactacagaaagaccaggttttaccccaaatccgaatactttctttgctcatcttcctgtcatgtagttttgcttctcttatctaaagaactgtgttattggagaaagctttggctaaattcttttgcaagt

SEQ ID NO: 181042 - DNA, 689 bp, Homo sapiens
agcatatcccagaaacaaagtgtattttagatgtctgcttatcaactctggttgaatgattttaagaacctagtttaagtttccgtaggggtaatatgattactcaggatgcattcgtctgcagtatacttcatgttatgtaggttttcccaccttttccaacatttctccaaaagttatccttctcccagtttaactgctaaaatgccattggtagggtctttgcacttcaagccatcttgaggaaaagcttccttctgagagttagatcatttggcaagggtcaagaacagaaagctgtgtttttaatctaaaggctaaggtcagatttattcttagatttctcttcagattcatctgtacttcaatatctagtttccatagcaactgagatgcagtttgcaggtgggtaagaaaagagaaatctttaggtgtaaagaaacttattttttaacctagagagagaaggtatcaggcaacaccttcatagtttttataggctaaagcctatattcttttttcaggacttcaatgtttcactgataggtgtcatttcctttttcctgaagaggccattcaactcttcttgacacagtcgcagaaaagattgctgcttctgtgttctgtttaatcacagtcaaactaattaactaaccaatttaacaagacagctaaaagaacttatgtgg

SEQ ID NO: 181043 - DNA, 738 bp, Homo sapiens
gtatagtaggggaggtccttgcttgctagataaacaaagcaccagaatacctcctgtgggagggctagagggaccctttcagggcatcattgcactcactgtgttcactgcattcttttttataccaagattaatgaaatgaacgctattgcgatgatgttgaagtattgtttgcactctattcccatccagtcatctcgaataggcagctcattcccctctcatatcaaaattttcctacaatactaatttgacctccaaaatacagccctacacctggaaagctttttttttaaagggtgaattccacaataaaaatcaacagctactaccatgtaatgagcatttcttatgtgcctgccacaagacacacaggctccgcccttcatgtcttctctcctaatcctcgcagccagccagggagggtgtactattcccatttcacaggtgaggaagctgagacatggagaagtgaagtgttctgccccagcttacacagctaatcagtggatcagattccattctggcctcctagcgtcaccttcccggttctgggggaagctgccacaggatgttcaacaagggagaggtgttggggctgccggtaagaggtgacactctggcagaagtccaggctccagaaaacaggctatgaactagaggcagttcagaagcacagaagcataatttaaaaaatctgccaccctgaatcctgcacgttggcaatttctcccccag

SEQ ID NO: 181044 - DNA, 676 bp, Homo sapiens
tctagaactctaaatcttctcagtaatgtcatacagagtctaacaagaggaaaagcatccttaagtcagtctatttagataaactcttcaagtccctatataaggacgtattccactagcaagccagtaaatttttccaaggtcacataatcttacatgaaatggaacctttcatcttagacttcatcaaactcaattttttcccttctagattcactttgtgtttatgcatgcatgcacgcgtgcacacaattctatcagcagctgtaaactacccacatattttcttaatctctttttttcagtttttcttcatccttaaaagaggttacatttcattcctggtcaactcttaaaaagaattatgtaatgttgggccttcatattaaagagagagactggttataagatcctttacagtccattcattttattctgatgtctaaccagatagacactagcaagcaaaacttccctcttaatcctggaccaaatgcataattttactgtcactttcaaaaatctgttatgactgaatcaaaatccttttaaagaaaggaaaaagctccttttgtgtcaaatagttgaacaacatgaaaacagtatgagccggttaaagatagattgaatttttactttacacggggatctctagatcgaccacagcatcagctgc

SEQ ID NO: 181045 - DNA, 625 bp, Homo sapiens
gtcacatgtgcatgatgtctcattacattccccttgggatcttggcatcagtacctcctaataacctccctactcctttttccattgtaaaaatatcccagcagcaaccaagctgtcttgagtccataccattacctcacagtgagcctggaaaactatctgatccaaaattcacagtctcctttatttactatctgtttcaattttcctttgtcatttatacttgcatttgcctccttttaccctaaccaatttttttctctcatgtgcatatatgtattccctctttcccaacactgtcataattacttcaaataattattcaatcctatcactttcatttttagattttcctttttggggggaggaggattattttctttttaaaaatgttaacaaaatatttcaaacttgcagaatataaccaatatccatgatcctatctctcagaattaattttttaaagaaataaaaacatatatttggagtctcctttgtacttctttccaattccattcttttccatccaccccaaatccatctactctcctgaaggtggtgcatattattctttttaccatttgtactcttatttatgtgtgctacaaacaatacatttttgtgg

SEQ ID NO: 181046 - DNA, 218 bp, Homo sapiens
caacgcagcatctcccagtttgcgatctgttcactagaataaactctctttcctccaaattcttctctagaaaacttttgttcatagctctttttaccctgcatggctttgtggccttatgcattggttatttggaaaatatcagttcactgagatttgcatacatgagggaatgagagtgaaaggacaaatagtttactattattataaaaatactt

SEQ ID NO: 181047 - DNA, 750 bp, Homo sapiens
  misc_feature (750)..(750): n is a, c, g, or t
tggtctggctacacaatgttactagacacatctgatgtgaagtactcttgaaagactctgtagattactcatgctagacttttggctttccttaacctgggggttccctgaagcagaaagaattttatttatccctatattcaagagtccaggagagtgcccaacacaaagcaggtgtttcataaacacttgctaagttaaaggaatacacaggcaggcatggtggctcacagccccatgcccatggaactctgatgaagcccacagatcatagttctccgaaatatgtagcacattctcaaggacaaaactaacacttattttttatacaaaaactatcctgtgatttgaatacatagtttgaaattatgttctaggtacattttaaattacttaccttgagggtgccttttgagaaaacgttgaagaaaataatatattagtgattctttggagctcacttctaatttgaagggatttagttcatttttttcattccaataaaaatgaaaataggccgggcactgtggtgcatgcctgtaatcccagcactttgggaggccaaggcgggcagatcacttgaggtcaagagtttgagaccacgcctgcaaaaatggtgaaaccctgtgtctaccaaaatccaaaaaggaaaaatatctgggtgtagtggccagcgcctatagtcctagctactcgtgagactgaagcgagagaatcacttgaacctgggaggaggaggttgcaataacn

SEQ ID NO: 181048 - DNA, 628 bp, Homo sapiens
ccagaacctggctaaagggtgggcttcagggagtttcctctacaggggtctctcccacctccgtactccaggaactcttttgttcactggttactttattcaacaaatattccatgagcacctacacagtgccaggctctgggctgggtgaccaggagggacaggagaccccatatgtcgggaggtggacagacagacctctagagaaaaggcttgtaagaccaggtcgttggacacctgctccaggtcagtttccctgcgttcggttactcattccttaagcatttattgaacacgactgtgtaccagccacttcaagacccagacaccgacagttcttcattgctacagggacagtgacacgcaatacaggcccctgccgcagtcacatggaaggattctcatcattgttgcacccatggacacacacaggactgttctgtttgtcagcacacacacataggtgcacacactcgcaaaagtttctatggtcactatcagttatatttcacccatgggctcacaggacagcttctttctctctctctctctctctcctcacacacacacatccctgcccatttcagacatccacagtggtaaacaaggcacctacatctacacccca

SEQ ID NO: 181049 - DNA, 516 bp, Homo sapiens
tattgtacatgcgtctacattgttagatattagacattaatatctaacaaatattccttaaatttatattgtatatattttatgttgtagagtacataataaactgcttatgtttttccttaaatttatattttatatattttatgttgtagagtacataataaactgcttaagttcagatgtttaataagaagctttttatagtaacaaaacgtagtatgttctaatctgaaatttgggagagatatggcttaaatttgataatttagactgtgtaactaaggcaggtcctaaaattgcatgctcattactttgaagaaaagttattcttttgacaattaaatctcaaaatttaaacatgtagaggaattacatacagaattaaacagaaatgaatactaagtgaaaattgttttttaatatataaggtccataatgaaaacagtgatgtcaaaatggaaaaaaaaactaaaaatgcaaacaagtgcaaaagcaatatttccccctctgctagca

SEQ ID NO: 181050 - DNA, 218 bp, Homo sapiens
aacatgtagccattcaactggcttgttctaaccttctccttcaaaaaagcaaagttctctgattgaataaatgactgcggagtcaaagtataaatgactcaatagaatccttcagacttgagcttcttggctgccattgttctcttacaggtaattttaggtaagatagcccatcaatagagtaccctgagtttcttggtttgcacaattacttaata

SEQ ID NO: 181051 - DNA, 859 bp, Homo sapiens
  misc_feature (764)..(764): n is a, c, g, or t
  misc_feature (767)..(767): n is a, c, g, or t
  misc_feature (815)..(816): n is a, c, g, or t
  misc_feature (832)..(832): n is a, c, g, or t
attctgcatggtgactctagaggtatcccctcacgttatacttctcatgtaaaaaaatttgggggggatgggaaaaacaaagcagagcccaagaattgattacaaaaaatatttttagaacttcatatctcttatcaaatgggctaatttaattgatcttaactatgaaaaaatcattaaagggatctacaatcaaccagtagtatttctgcttttttcatttagataaggatattaatttgacttttcaaaatgaagcataggaagagtgttcattatataagaaagtgctatttagaagcttatggaatattgtatttaaatattatagttgggatcaagtatcatttaaaaaatcacagaaatttacagcattctaagaccatttagtccactttacttaagttacatagctagtcaaaaactcagtctttcagtatactccagttcaacatcatagctcagcagtttgtctccggtattaagtatggagggacattcctatcaatggccactggcccacaggatggtaaacaatcaactgaaagacacaagttaaaagaaatttcattagctacgatgttagtttttaagaagaaaaatgtttttaaaatcacacagctctttaaattgaaaagaggtgaaggagagctttttattcgacaacaataccaagtagtttttttttttctttttttttctttttttgagacagatctcacactgtggcccaggctggagtgcagtagcatgatagttacagncanaggggtcccaatctagaccccaagagagggttcttggatcttgtgcannaaagaattccagggtnatgccacagtgtgaagtatagcgtgag

SEQ ID NO: 181052 - DNA, 636 bp, Homo sapiens
tattggcctgtagttttttccttttgttgtgtctttgccaggttttggtattaggatgatgctggctttgtacaatgagtggaagaggcatccctcctcaatttctgtgatagtttcaatagaattggtacagttcttctttgtacctctggtagaatttggctgtgaatccatctaggctgagacttttttggggtaggtttttattactgattcaacctaaggattcaatattggtctgttccgtgtttcaatttcttcctgattgaatctttccaggaatgtacgtgtttcttctagattttcttgtttgtgtgcatagaggtgttcataatagtctgaggatcttttgcatttctgtggaattggttataatgtcaccttagtcacttccgattgtgcttatttggatcttctcttttctttgttaattttattaacgatctatggatcttgtttatcctttcaaagaaccagcttttggtttcattgatccttgcatggatttttgggtccaatttcgttcaattccactctgattttggtatttcttttcttctttcagctttggggttagtttgttcttgtttttctagttcctccggggaagatgttagatcattattttgagatctt

SEQ ID NO: 181053 - DNA, 315 bp, Homo sapiens
gttaacacttcctccatctctcccctaggggaggcaatttgtcaaagattgttgttggattttacacacagggaaatctaaggaaggtgtggaaaccagaccaggactctcgtctccctgtttacagggtcttaaatgggggagccactttgggttctttccacaagattgctttgtaaaaaaaacaagaaacaaacaaaaaactcaaaaaaacagccctgacctaaatattcacaagggaccttaggcaatatctgcaaacaaaagtgaatgatgagtggaatctgtcatctttacaactaagacagctccaga

SEQ ID NO: 181054 - DNA, 469 bp, Homo sapiens
actgcacttcagcctgggtgacagagcaagactctgtctcaaaagaaaaaacaaaagataaaatcagaaatgaaagaggagaaattacactgataccgcagaaatacaaatgactaaaaaagactaccacagacaatcatatgccaacaaattagataacttacaagaaatggataaattcctagacacatacaacctactatgattaagtcatgagtaaacagaaaatttgaacagaacagtaatgagtaagaagattgaattggcagtaaaaagtctatcatcaaagaaaatcacaggatctgatggctttgctactaaattctaccaaacatttaaagaagtatactgattcttctcaaattcttccacaaaattgaacaggagggaatacttccaaactcaccgtacatggcatcactctgatactaaaagcagacaaaaacactataaaaagaagctgttacaa

SEQ ID NO: 181055 - DNA, 828 bp, Homo sapiens
gtgacatgtgctgactagagcaggaggggtagccaaggctccaagttctattctggacctgttgttgatttgaggtgtgacattcagcaatctgagctgatgttctgtagctctgattggtttctcatcttctgcagagagagtgaaagaggctgtgcttgcaggggaaaaggtgaacactggtctcctgtcctttaggagagcttcaccattacacgtcctgcctctcatttgaatttccaggcttttttagagtctcgctctattgcccagattggagtgcagtggtgtgatctcggctcactgcaacctctgcctctgggtttaagcgattctctcacctcagcctcccaagtagctggaattataggtgcgtgccaccatgcctggctaatttttgtgtttttagtagagacagggtttcaccatgttggccaggctagtctcgaactcctgacctcaagtgatccacccacctcggcctcccaaccaggcttttttaaatgcagaaaccgccgcccccagagttaatatggaaacccagcaatgttgtttatgttttacttgaattcgtttcatcagaattgcattccttttaacagtgtgattagatcagctcttagaggggatggcagcttcagtagggtttaggacaggacaggaatatttgtgtggggcacacactttggctttgatagcttgaggataccaggtacatgataatttagatggataacagaaacttgtgtcccttgagagccaggcatgtattagatgctttcatacattatttaattgtaatacaaaccaataaagtattcccatttt

SEQ ID NO: 181056 - DNA, 431 bp, Homo sapiens
cctaaggtctcctacatgaaaaaaaagggggaactacagcagtatgagcaagaaatcctggtggcttctaggataatgataagaaagatggaaagaaagatgtggactaattcaaaatgtattttggaatagaatcataatgattggatattagatacaagaataaagaaaggagcgaaaaaatgactcctagatttctggttgaaacatctaagtagattgtggtgccatttcctgagacaagaaagatcacaggaagtgcaggttagtaaatatagtcaagaatctcatttcggataacgtaaatttgagacgcatgagagatctctaagtggaaacatcaataagcagttggatggactaatattaacagtcctaacaagagagggagacctggcctggagacacagaagatacagaagctgcccagc

SEQ ID NO: 181057 - DNA, 241 bp, Homo sapiens
gtaatccatatgggagaggggccttaggttcttttcactccagtgacatagcacttgtaggattttttttatcttaaagactgttggagaaccagaaaccagcataaaaaagccctggaggcaaaggttgaaatggggatactcctggggagagggctgcccttagaaatctgagaatttcctgtcaatcaacatttgcctggtctcacaggcctccatgggctggaaataaagtgaaaat

SEQ ID NO: 181058 - DNA, 188 bp, Homo sapiens
aaatatataagaagcaaatttaatacactaggaaaactcccatagaccagggcagtaactgatggcaagtggattttaactcagctccattaacccattatgtcttaagagcaccatttctgttaaaattaaagaaggttttacacataaggaaattcacttgattatggagaaaaggaaaacaacag

SEQ ID NO: 181059 - DNA, 425 bp, Homo sapiens
gtgccattatagctcactgcagacttgaattcctggactcaagcaattctcctgcctcagcctcccaagtagctaggactacaggcaggcgccattcctctcagctaatgtttttattttttatacatatggggtctcgttgtgttgcccaggctggtattgaactcctggcctcaagcaatcttccctcttcggcctcctaaaatgctggggttacaggtgtgagccacttcactcactttagagattttcactttatgaattgataaatacagcattgcatcacttaatagggatacattctgagaaatgcatcatgaggcagtgtcatgatcgtgcaagcatcacagagtgctgatacaaaccgagatggtacagcctactaaacacctaggctatatggcggtatctgttgctcctaggct

SEQ ID NO: 181060 - DNA, 253 bp, Homo sapiens
gaagaggcatgtgggaaacctctgtgctgaggccaggagcaggaggagcgtgtttgcttcgctgtcggaggacagtgtccacatggccctagagtcctttctgccactggggagtgaggtggaaagtaaacacacagggcgggcggctggctttgtttctccttggctttctggttcagggcctgcagggagcagctgcagtgtgtgtcagaagtgagggtttgagagcctttatggtttcattctctcttgc

SEQ ID NO: 181061 - DNA, 162 bp, Homo sapiens
tgggcactgtagtcccagctactcaggaggtggaagcaggagaatggtgtgaacccgggagccagcaaatgtttattaagcatctactacattaggcagtgtactaggtgccgatatggttgtgaacataatagagaaatacctgcttgctttttagtgcaa

SEQ ID NO: 181062 - DNA, 547 bp, Homo sapiens
  misc_feature (19)..(19): n is a, c, g, or t
atcagccggtccgaaaacnacatagaggcaggttacagacaaaaaggagtgggaattgaagataacctcaactatgactttcagaactgaattaggagaaaatacgaagagaaaactattaatacacaaatccaaatggaaggagaccaagactttggccacagggcagagagaaggggggaaacaaaagtcattttcaggaagtggcaaaatttaccagccaactaacccaataaaaggatagcaataagctaagtcaatttttgaagtttaacatattaaagaactacagacgtgggaaatatggtttgaataataagaacaactcgatgcactaacagtttgtttttgtttttaagaaacagggtatccttatgttatccagactggtctagaatccctaggctcaagagatacttccaagtagctgggaccacaggcacagggcactgcacccagcttcgatgtactaattttgtatttttagtagaggcggggtttctccatgttggtcaggctggtctcgaactcctgacctcgtgatccg

SEQ ID NO: 181063 - DNA, 667 bp, Homo sapiens
ttttaagggagagtgggtgggtgtggctacaaacgtgtagcaggaaagagccttgtgatgaagtagttctgcattttgactgtagtggttacaagctacacatgtgataaaattgcctagaagtgtaatacacacacacaaatgattcatttataacttgaaatgtgaattagtcctatggattgtaccaatgtcaattttttggttttaataatgtactagaattatacatgaggagagatgcacggtgcatgaacagaaccttcctatacattttgtgcaacttcctgccaatctctaattactctgaaataaaaaagatttctctaaagtttttggggttttatgtattacttattatcgtaaagtaataataatgataaccaacacttaagtagcatttgctagggccaggtatatcagggcatttaaccctcataacaacctgttatgagctgaactgtgtcctcccaaaattcctatgttgaagccctaatctccagtactttagtgtatttggagatagaagcataaatccaataaaactggtattcttatgagagaagatcagggcaaagaatgagagagcaagtgagcacgcacagacaggtatgcacacagagggactacaatatgaggccacaggaaggaggcagacatctgcaag

SEQ ID NO: 181064 - DNA, 109 bp, Homo sapiens
tggagatccacacctgactaggaagaagaaggatgtgcaaaaccttcagtctgccaaagtaacaatagataaccaaagaagccccagagaagcatgttttcctttaaat

SEQ ID NO: 181065 - DNA, 329 bp, Homo sapiens
atctgtgcatcaattccatagactgtgacagaacttctagaacttaataggccagaatcttccaaaacaataagtttcatctctaggcttagagagcagaaaccattttcccattgtggagtaaggagtgagagtccagtgagaggaactttccttcaaaaaatggcagaagacagaatctgcattatcatattatgaatgccccttgtatatacggcagcaagtgaatagatgaacaaaagaagaaatttgactttgttctttctaaggaaagatgataatgcagaaccacttcttaggcttgtgaactaacatggtgattaaggtgt

SEQ ID NO: 181066 - DNA, 617 bp, Homo sapiens
cagttcaaatcttttgttttagatattagagaggcaggaagtgactctctactgtgtagcatgatactcagagcccaggaacttcttcagaatcccagtttgacttccaaaacgccagtgtcttgcttttatttactcttgtgggtggcagtaagggaagggagcatatctccttagcaaaacatctcatcagaacacggtccatagcacaaattattaattaaagacttacgtggaggctcaaatatagagccaaagcataaccatttaacaattatccttcaaagcaattttattcttggcttttggtggaaaaaactcttaaaaataaaatgataattctacatatgggatttgtgatgctatttagcaaggatatgctttattgcctgacatcccctttattttggcagaatactatgagatttctcattacgtttccatttgctgcggaaagtggagaaaagttcagaggggggaagactaattaaaaaaatggttgtctactaatccattgaactaagccttcttaacagtcatgctcttcttaatagtatgaacacacattttgtattgattgcagagaataaagaaaaagaaatgacttgttttgaact

SEQ ID NO: 181067 - DNA, 332 bp, Homo sapiens
aaatctgttaaaacagagtctggtctgaaagtgaaacatctcctttccgcttttcttatgcctttaatggttttttaaactactatatttagacgcagaaaaaaaataactgaggcaagatggttctggtttggaaaaagccagagagagagagagagaaagagagagagagaggttaggatataagcctaaatgctatcaaatgcctagtgtttagtagttatgaaaccgaggcatcaacttaatatccttctcccagcaaattatccagggcaaagtcatcgctggggccagaaccttttcaacagattggactcgctacatggtgctga

SEQ ID NO: 181068 - DNA, 249 bp, Homo sapiens
tcaacagggtaatgtatggtaaatggtctaatataggactataaaagcttataacaaagtgaaagctaccaatactattagtctaaattgaggagcagagccttactctaatctcatctttcttccgtgtaagaaaactccttactggcttttctttgcaagaatgctctggacgttttgtctcttcccccactccacttcacttctcctatcccttcatttcctttctcttctgtctcctcttcctcc

SEQ ID NO: 181069 - DNA, 404 bp, Homo sapiens
aatcccctccaacaggcatttcctcatctgaggcatcaaagaatgaaaaggggcctccctgctcacctggcctataaggatcaagcctggtgcctcattgacttctttaatcaagtcaccaagtgcttactatgtgccaggcattattccaaatgcttgaccaaatatgaatacatacaaataggaacccccataagatcctacaaggcaggcttgactttacagactgaagtcagttacatcagctgtggaacttaattctataaacatagagaactgaaggtttaatgtaggtgttcaaatttactcacctggatttaaatctgccccccatacacacttgttttttccctcataacacctgagttgcttaaatgatgtgtgtgtgtttgtctgtatacatg

SEQ ID NO: 181070 - DNA, 184 bp, Homo sapiens
acttcactgcactgcatctctggctctgtaattgaggggcagctgcttcctggtaatgcaataaaacccaagggcccaaaagaaaggcttagaatactcctctcccctgccctcaactcccaagtgcctttccaccaaactgctgtgtgggaaagtcacctctccagccttgtcactcccgtac

SEQ ID NO: 181071 - DNA, 593 bp, Homo sapiens
ctggcttctttcacttacagtgttttcaaagtttattcatgttgtagcatatgtcagaacttcattttttaatcactgaataaacttcattcttttttatcactgaatttcttttccattggatgtatagaccacaatttatccattcatccattgattaacatttgagttgtttccacctcttgggtattgtaagtagtgctgctgtgaacattcacaagtatttaagtatctgtttttaattctttagggtttacatgtagaagcagaattgctaggtcatatggacatcttgtttaacttttgtggaactgccaaaccaactggctacactattttacatgcccaccagcaatgtaccagggttcctattactccacatcatccccgacccttgatattttcaattttttaaaaatcttttttctttttactttccttagtctttcctgtgtcgtatctttttttttttttttttaaactaaaattatatgacaaatagcacttatgtacaaaacttatgcagtggtaaaacccataatatttggatgaaaacaaaggttgtctgaattataagtaatgtcaaacatctc

SEQ ID NO: 181072 - DNA, 545 bp, Homo sapiens
ttccttctgtcacgcacattttcaacacttgcagcctcatttaacgtcaacttacattccttcatctgtggatccttgctctctggcttggttcttttggataataatgccaagttcctacccatcacaggaatcgtgattggaatccaccagcccagcaccctgtactctggtgccccaagtgattacatgtgagcctcccagaaagaacaaatattgctcttgccactcctctccaatgctgacaggactgagtcctggggcaagtggatccgggaattgcattgcagacaatttcgcagtaattccctgtctggagaagcacaccagttaacactagactgtcacagccctaggagaggtaagaacaacaaagcccacattaccacgatgtcttctggtggcaagaaatctttctcccaccaccatccccttcctcccggaatcccttgccccttcctatgtatctcttctgctctcacttgaccaccttaccctgcttactcataacctcaccttgcacagtgccaacacggcctctcaag

SEQ ID NO: 181073 - DNA, 213 bp, Homo sapiens
tgatgctgaggtgatctagaggatcccgttcaatttctacacatgtaacttaagtaattaaataagaagatgtagaagagaaaaattctctgaaggatcattccaaagacatagttggaaattttgattatgtgctaatttaggtaatcttaggattttcaggagtgtggtcttatatctgtttgttcatgtttcttaagtttagaagatgaa

SEQ ID NO: 181074 - DNA, 269 bp, Homo sapiens
agtagctgggattacaggcacaccaccacacctggctaatttttgtatttttagtagagacaggttttcgccatgttggccaggttggtctcaaactcctggcctcaagtgatctgcctgcctcagcctcccagagtcctgggattataggcatgagccactgtgcccggcctggcatgtattcttaacttgtagggaaattacttcagagcacaagcctcgctcattacatgtacagactcctggccctcgtgatcatggaatggccc

SEQ ID NO: 181075 - DNA, 407 bp, Homo sapiens
cttccattatctgagtgcctacccagctctctccagagctcaaggtcctccttttcagccagaggcctaggtgaccccaactctatgagcaaaactgaacttagcatccattatcttttctcccaaatttgctgctgcttcttttttttttttttaaatagagatagggtctcactatgttgctcaaactcctaggctcaagtgatccacgttccttggtctcccacagtgctaggatcacaggcatgagtcactatgcccagccccaatttgcttctttacctgcattctgtccaggtgactcccaaactaagcatctttcttagcatgaagtccctctcagttgcctatcactaacaaacgcaaccgataagaacagtgaccatggccctgcccctagcatgaac

SEQ ID NO: 181076 - DNA, 403 bp, Homo sapiens
ttgcccctcgaagttcccaggcaagagtcagagaaaggttccctgtgtcctcctaactccatggtatggatcagacacttacatgtgcagatcctctttctcccttggctcacagcaccctggcaactctcaccaaataaatcctccttccaaatcctttctccagtcttattgtttactccttattacttgccatgtgggttttagggttgtctaactagttctcaacaataccacttggaaaatgtgtaagtactactggatgttgtcccttaattcattttaatatctgatgttcacataccttggtgtctcagttaaaatttcttattttcttatagaagcaatagcctggttctataaagacattaatgatattttttaaataaagttttaatccaga

SEQ ID NO: 181077 - DNA, 244 bp, Homo sapiens
ttaatgaaaggggaacttcatgtctctcattctcttcagtatcctgggcaactgtgttccccacaaatgcctgccatgctcttcctcatgctattcccttatctaaatttcccttcctatctgtctccattccagccctcaggtcctgaagatgtcgggcccacccatgttcctatgtgggtgctctaggttctagcactccatggtcattgcttgtgtacaagcatgtaatctcctttcatcg

SEQ ID NO: 181078 - DNA, 529 bp, Homo sapiens
agggaaaaagtctaaggaaggcttttattatttatttatttatttatttattcttcttttttgagacaaagtctcactctatcgcccaggctggagtgcaatgactcaatcatggctcactatagcctcaaccctctgagttcaagtgatcctccctcctcggcctcttgagtagtgggactacaggtgcacaccaccacgcccagctaattgctgattttttgtagagacaggctctctccatgttgcccgggctggtctcaaactcctgggatcaagtgatcctcccatctcagcctcccaaaggcctgggattacaggcatgagccactgcacccggccctgaggaagatttttaaacaataaactagcaagaggcccagtgaggtggctcacacctgtaatcaatctcagcattttggaaggccaagttgggaggcttgctccagcccaggagttcaaggttgcagtgagctatgatcatgccactgcactccagcttgggtgatatagcaagaccatgactctg

SEQ ID NO: 181079 - DNA, 109 bp, Homo sapiens
ggtggcattctttagcataaatctgttaggcattcagaacaagtctctgacttatgctttatttttgcctttaaaaaattttacttgtggacctacattccaaattgaa

SEQ ID NO: 181080 - DNA, 580 bp, Homo sapiens
ctgaaatctgaagacacgtgtgcagaaagagactttcagaaaaaattcactggagcaatatgaaagtgcaaattacaagtagtctatatgtccgtcacttgggaaatggcaatgaatattcactggactcctgccatgtttcatctaattccatagttggcaagctacagctcaaggacagaatacagcccactgttttttggtttgtttatttgttttgtagagatagggtctctccttcttgcctaggttggtctcagattcttgggctcaagcagttctcctgcctcagcttcccaaagtgctgggattacaggcttgagccactgtgcctggccagcccactgtttctgtaaacaaagtttcattggaacataacgacattcatttgtttatatataatctatagctgctttcatgatacagttgcagaattgattagctacaacataagactgtgtggccctcggtgttgaaataaaatatttactatctagccctttacagcaaaagttcactgacccccgatctaagttaaaatgtcttcaattgtaaaatgcaccgttactttatgtaccac

SEQ ID NO: 181081 - DNA, 195 bp, Homo sapiens
ttctgatgtttatatactaccttctacacttttctgtttttgcgcagctacattatttttaaagtaccaacatataaattaatgttgattcaagtgttagtatagaagctgatatttttaaatgactacatcattttgactttaacagcttttagaaagtattatgaaggtgaatcgttgttgattgtaattgtt

SEQ ID NO: 181082 - DNA, 109 bp, Homo sapiens
tgatgaggaaacagaggctcagcttacagtacaggggagatctaaagctaggacaggtgactgccgcgcccaggctcttgacctgtaggccctttcctctccagaggct

SEQ ID NO: 181083 - DNA, 366 bp, Homo sapiens
actgacaccttgactttagcccatgaaactgatttcagactctggcttccagagctgaagagcatatatttgcattgttttgaggcactgagtctgtcataatgtgttgcagcagcctaggaagctggtccacggtaggaggcagccccggggaggaatgatggtccaggctcagaagccatgcatgtcacctcccctcatgttccatgggcgagaacctggccacatggcagctcccaactccaagggaagctgggaaatgtagtagagctggacacccacatgtccacttagtaccgaggagggtgggggcgctgggtggacagctacatctccgtcacacgtgttgtattgagtcctacagcc

SEQ ID NO: 181084 - DNA, 598 bp, Homo sapiens
ctaggcaaggcctggtggtggcttggaccagggtggtggcaatggggctggagagatgtttggattctggcagattgacagtatttgctcatgggttggatatggatatcagagatgagaggagttaaggatgatttttaggattttggtatgattaactagaaggacacagttttcatttaccgattggggaagcttataggaggaacagaattgagggagaattatcttgatttggggcattctaaattctataaccaaacagagaatttgtataatcttctggacagaagagtctgaagttcagggagaggtctcggctgtagttgtcaccatatagtatttaaagccacaagactggatgagatcacagataatgagtgtagacaaagaaggtaagttatgtaaggactggatcatggaacacttctgacttaagcagttagagatatgggaaaagaaagtatttcaaggatgaggactggctggtagtactaaatgctgctggaaagtcaagtaagatgaggactgagaactgcccatttcattgagcaactggaagtcaatgaagggagagcttatcaagagccctctcact

SEQ ID NO: 181085 - DNA, 689 bp, Homo sapiens
tataaaagtgctctgtgtttcagaaactctctgtgccttctctgtcttctatggtgggattccccttaatttatcatttaatgtattatatttgaactgtgtgtttatattttttccttctacactgtgaatatagagacaagttctgatttatctttgtctccaagcagtacctggcatatggaccattatctctcaaagcaataatttcggttactgggtacagagaattctacgtagttaatagttttcagctgttcaaaaatcaggtatccagtcagtgtgttttttgactcagggacatacatattaaggcacacttattagggcaccaggtcaaggagtaacccctcccaccaccccttatctgattggaatatggccagcctattcttattcctgccaagttatttttccagacaacattttataaaacccaggtatcttgtaattgtattttactcaaaggaagtatactctaaggaaattgtgtggccttgaggtacacagccattaggcatttaaaaaatatatttaaaaagttttatggaatatttttaaattactgaaaatcagaatcacccagatttaagagatcttaatattttgctacatatttgattcatatctttttgttgtttaaagaaataaaatctcacagattcaaagggtccctccccatccccttc

SEQ ID NO: 181086 - DNA, 367 bp, Homo sapiens
agtgttgggattacaggtgtgagccaccacacctgacttaagtctatattcttttaaataaatactaattcttggtgagttatacaatgtagcatatttgggtacagtgagaatatgtgaaaattttggccagtaatgtatttttatgaactattgaatttttagagtcttgctctataccatatgtagatttcaacatcacctttagtcatggcatgttttcagtggtaaagaattaaatcatgagctacctagtcaactctaaacagtgaaacactggttacaccattttatgttaggcctttcttttgcgcttctgtttactttttttttggaatttgtgttagtctgtgtttgatagaaaatg

SEQ ID NO: 181087 - DNA, 521 bp, Homo sapiens
tttaatgtatccctgttccattaatgcatatgcatatttaatatactgcttaccaagaaaatgttttcatttaatattatgtgaacattttcccatgtcattaaatagccttataaaacaagatatttaattgatttaaattacttgatcatatgcagtatcataattgaatatcttactatcaaattttttccaatttttaatgtaataacaaatattacattgggtatccttatacataaatcttttagaccacttgtgattatttcgtggggtaaattgcccatcccaaatccccataaaattaactttctatgttatgaaaagttgcacagagcttaaccaagaagacaaggaacgccatgcttggagcactcagcattaacgaaaactgtccccacttctcctcgtatttattaatctttccgccagtgccatggaagagaagggctgctttgttcaaagtcttcaggcacacaggtagggttacatggtgatgttcccatctgcacttatttccc

SEQ ID NO: 181088 - DNA, 355 bp, Homo sapiens
tgggatattaatgctgtataattgtgtgagatcacgggagacaatcaaaaatgttccagtcctcattaattgaagtgtacattgttcgatgaaaagtgcatcataaattaaataggcttaataaaataaagtgaaattactggggagaagttgcctctgttggcaatccttagtctgaattttttttttttttttttgcctggaggtctgtttaaaaagaaatagcattacttgattggcccttcatcccaattaataattttaacttcgataaattctgatttcagagttatgactagtcacatcttagcttttccccttgctggttaattggggtgctggggttaatctaaat

SEQ ID NO: 181089 - DNA, 455 bp, Homo sapiens
acagtggcacaatcttggctcactgcaacctctgcctcccaggttcaagcaattctctcagcctcccaagtagctgggattataggcatatgccaccatgccaggctaatttttgtattttttgtagacacagggttttgccatgttggccaggctggtctcaaactcctgaccagccctccttgaccttccaaagtgctgggattataggcgtgagccattgcacctggcccagttccctgggatacatgtgttttaattcattttctgttgctagtaacagaatacctgaaactgggtaatttataaggaaaagaaatttatttcttacagtgatggaggttgagaagtccaacttcaaggcaccacatctggtgagagccttcattccgatgacagccttcatgctggtaagattttcttcagagttccaaggtggtgcacggcatcacatg

SEQ ID NO: 181090 - DNA, 113 bp, Homo sapiens
tcaaatccacaccaaggagaggttctaactcatatgtaggataacatttgtgatgaagcaacaggaatctgattcccactaaatcagtaaagttcccactgaaaaggccagtt

SEQ ID NO: 181091 - DNA, 128 bp, Homo sapiens
atataaaaatgctgagtgaactgtaaaactgaatacagatgttagtaatttaagccggtttccagctgagccagaccatctgggtttccttgctgccctccacccaaaggtctcccaaatggggcggg

SEQ ID NO: 181092 - DNA, 121 bp, Homo sapiens
ccaaatttatcatcagtggtcacctcagagcacctgaattcaggcctttaagtgcaagtaggatgcagaattctggaagagccagtaagtctgtggctccttgggtactacgctttggaag

SEQ ID NO: 181093 - DNA, 349 bp, Homo sapiens
tgatccgcttaaggagctgcgaatgagagtcaggcccagtgctgtggctcccacctctaatcccagcactttgggaggccaaggcagaaagatcacttgagctggtctcaaactcctgggctcaagtgatcctcctgcctcggcctcccaaagtcttgggattacaggtttgagccaccatgctcaactggaatcttttaatgtaagatcttttatatatatatatatatatatttatatttaaagagatggggtctcactatgttgcctaggttgtagtgcagttgctattcacagatgcaattatagtgcgcctacagcctacagcctcaaactcctgggcttaagc

SEQ ID NO: 181094 - DNA, 405 bp, Homo sapiens
gacgtatcttccttaaaagtaagaaccactcatacctaacagttcacctagcatagcccatacaccaatatttactgggtattctttcctgtcttccttatcatctcttttcttagcctctcttgctctgttggttttcttcagacttacaagcaaaatgagaaaaacgaagtctctagaagtccaggctctatgtttcatcctatttctcgtaagtttactgaggtatcaaatctaattatggcagtcgtttaataactgcaaaacaaaaatatttagagatctggcaatcctcaaattagagcttcttctgatactatctttaaccattaaaaatctatttcacatcccacagaaatatccacatctttccactttgcctaagaaaatgtgagagttgccctt

SEQ ID NO: 181095 - DNA, 116 bp, Homo sapiens
ggccagccagtggcatccaggatggatcacaccgaagttctgcagacactggctcctcggagaatggatctcctggtgtgtcaaaagtgctttccagcgattaggatgcagtgtaa

SEQ ID NO: 181096 - DNA, 185 bp, Homo sapiens
ctgaccttctgcaagtcacctctctgggggcactaccacaggaaaggcaatgtgcaagtgatgggactgcttcatccaaaggtcaatcccaagctaaatgaccctgtcattttgcaggccgaggcacaagggaggccccattcatcttccctggagtcggcatccctttgattgcggggccacct

SEQ ID NO: 181097 - DNA, 587 bp, Homo sapiens
taaggacacacataggctgaatataaaagaacggaagaaaaaatgcatgcaaatgttaaacaaaagggagcaggggtggccatatttatgtcagacaaaagagactttaagtcaaaagttgtcacaagaggtaaagaagaacattatataatgacaaatgggtcagttcactagaaacatataaacttttaaaatatatatgcacccagtttcagagcacccaagtataagaagcaaatattgaccaaactgaagggagaaatagatagcaacacattaatagtaggagatttcaaatgccactatcaacaactgatagactatcaaggcagaaaattaatatgtaaacaaaagacttgaacaacactgtaggcaaatagttctaagagacatatatgcaatgttccatccaatagcagcaaagtacacattcttctcgagaatatacagatcattctccaggatagatcacttgttaggtgataaaataagtcttaacaaatttaaaaagatcgaaataataccaagtatcttgtctgatgacaatgggatgaaactagaaatagtagcagaaggaaaactgaaaa

SEQ ID NO: 181098 - DNA, 703 bp, Homo sapiens
ggggtgttggtatattttggtgatggtaactccttgttgtagaacctaaaggcaaccacagtaaaccaaagagggctaatctttctcaggcatatgcccaggacggctacccagtcatgctgatacctgcagggagactgaggaactatctttgggaataatatcattggagggaaactgatatattttagaaaacgggataattttattgattccctttaggaaaaacgaggagaatatgggagatattaatgaatgaaatttaagttctaaatcatgattttaaataccggaatgaaattaaccaggcatggtggtgagtgcctgtagtcctagctactcaggaggctgaggtaggaggatcctttgagccgaggtgtttgaggttacagtgagctatgatcacaccactgcactccagcttaggcaacagagcaagaccttgtctcaaaacagaaacaaaaacaaaccccctccaaaactagaatgacgtatttcacttaatgtaatgtcctccaggcttatacatgctgttgcacatgacaggatctcatccctttttatagctgaatagtattccactgtgtatatataccacattttctttatccattcttccattaatgggcatttaggttgattccacatcttggctattgtgaatagtactgcaataaacatgggagtgtagatgtctctttga

SEQ ID NO: 181099 - DNA, 342 bp, Homo sapiens
ggacatccgatagcctagctaacataaagactttggtggaaataacttttaagaacctcagagaatttaaaactaagaagtagaagcaacccaaggaagcttgaaccatatggagcttgtgttggggaaagggaaagagtgaagtgaataatcttaccagcagccttgtgatagaggaagagaataaatgtaaatcaccaactgaagaaagaataaaaacaaaggactgttttagttaatagagaagaagaaacagttttcaaggccagaggccttggaagcattgaactaagtaaagtacattatactgtttttacagtttaattaaattatcagaaaaca

SEQ ID NO: 181100 - DNA, 972 bp, Homo sapiens
ccacgcgtccggaggctgggggggaagcatctacattttcacatcctgcctattcggagcagcaagctggaggtgcgagggcccagagcaaaaacacacactgagtacctggtctctgccaggaactgtgttaggcacgagggatgggccttggaggagacacaggtattgtccttgagagtttccactggtgaccttggctgtaaagaggagaaaatgcagaagttcatttcttgccaaattgctctagctagaacttctagtacaatgttgaggagatgaaacggtgaaaccacgtatccttctcttgttcctgatctttgggggaaggctttaggtctttcgccattaagtatgatgttatttgtggatttttcataaatgccctttatcagactgaagtatagcggtgcggtcacaacttgctgcaggcttgaactcctggcctcaagtgattgtcctgcctcggccttccaagtacctgggactacagatggagtctcgctctgttgcccaggctggagtgcagtggccctgatctcagctcactgcagcctccacctcctgggttcaagaaatcctcctgcttcggcctcctgagtagctgggactataggcgcccgacaccagcatgcccagataattttgatatctgtagtagagcccaggtttcatcatgttggccgggcctggtctcgaacttctgaactcgaggtggtaccagcctggcctcgagcctcccaaaagtggcgggggcatcggacgggcggtggaagccaaccaataacccggggccgcaaaatagacctgccaagtaaagacaattgcccgctgtatcagtgtgattacgaggtcacacgacacgacgcagcacagcggggtgtaggcacacatgagtcggagcacagaaacacacggggagcatgcagagcagacgaccatggacctggcgcaccacaccacaagaggctg

SEQ ID NO: 181101 - DNA, 768 bp, Homo sapiens
tggccggcatctgtagtcccagctactcgggaggctgaggcaggagaatggcgtgaacctgggagatggagctttcagtgagccgagattgtgccactgcactccagactggccgacagagcgagactccatctcaaaaaaaaatcagctgggcatggtggctcaagcctgtaatcacagctactcaagtggccacagtgagccatgatcacgccatttcactccagccttggccatagagtgagaccctgtcgcaaaaataaaaaaaaaatagctgatggttttgggagtcacacagacttggactgaagttcccatttgttctaaactcataaagtttaaaacaacctctctgagcccctggaaggtaataactactttgaaagatggctgtaaagattacaaatactatatagaatacaggtctagcctttaccagttgtttaatggtagctgttaagaataggttggtttggccggggacagtggttcacacctgtaatcccagcactttggggagctgaagtgggcagatcgcctgagatcaggagttaaggaacagcctggccaacatggtgaaaccccatctctactaaaaataaaaaattagccgggcatgatggcatgcgcctgaagtcctagctactcaggagactgaggcaggagaatcgcttgaacctgggaggcagaggttgcagtgagccaagatcacaccactgcacttcagcctggctgacagtgagactccatctcaaaaaaaaaaaaaaa

SEQ ID NO: 181102 - DNA, 415 bp, Homo sapiens
attatccgtcctatcgccaattggcagcgggttatatctttttctatatatattcgagggtatagagaaaccatatggctttcctgtatctttgataactcttgccctgtgaaacagataactgcaccacttgaaattatatttagcttttcctttcagcactcctctcttaaaatctatttttccatttctctatacctttgtattccctctctcaaggaaaaggaaatcattttccttctgctcttccaacatagcttcaccttcaccttaaattttaaaccttctagaacaggattactctaaatgattttttaaaaagcattcaagatcgtatgacatattattcaggcattaaccgcatttattgtcaaatgctactgcttctcaatccctacctctccctcactctcgc

SEQ ID NO: 181103 - DNA, 336 bp, Homo sapiens
attatccgtcctatcgccaattggcagcgggttatatctttttctatatatattcgagggtatagagaaaccatatggctttcctgtatctttgataactcttgccctgtgaaacagataactgcaccacttgaaattatatttagcttttcctttcagcactcctctcttaaaatctatttttccatttctctatacctttgtattccctctctcaaggaaaaggaaatcattttccttctgctcttccaacatagcttcaccttcaccttaaattttaaaccttctagaacaggattactctagcgattagggttataagctcctgtagagcac

SEQ ID NO: 181104 - DNA, 596 bp, Homo sapiens
ctgccctgcagctcctgctgtttacatttcactcggtgtagccataggcagagacctcagggagaacctgattcggcttggattgagtcaggttccaccccagtccagtcagttgtggactgagaggtgatgaggctgggccctttaagacaaatctgggtgggtggagtctgtgcttaatgaagttgtgatgttagctgatggcccagaagggactggtaggtgcctctcattgtctggttgggaagcattctcttaagtccaagatgatgataaatagtattaggccaggtgccgtgtcatgcctctatacccagcactttgagaggccaaggtgggaggatcgcttgagcccagaagttcaaagccagagtgggcaacataaagagaccctgtctctacaaaaaacaaacaaacaaacaaaccaaaaaaaccccacaacaattagccaggcatgatggcgcacaccagtagtcccagctactcaggaggctgaggtgggaggattgcttgagcctggcgggtcgaggttgcagcaagctgtgatcacacctctgcgctccagcctgggtgacagagtgagaccctgtctcaaa

SEQ ID NO: 181105 - DNA, 237 bp, Homo sapiens
gcgactagaggatcccgttcttgtgctgggccctttaagacaaatctgggtgggtggagtctgtgcttaatgaagttgtgatgttagctgatggcccagaagggactggtaggtgcctctcattgtctggttgggaagcattctcttaagtccaagatgatgataaatagtattaggccaggtgccgtgtcatgcctctatacccagcacaagaaacgcacgccagcacaagaacca

SEQ ID NO: 181106 - DNA, 742 bp, Homo sapiens
gtgctggaattataggcgtgagccatcatgcccagccctccttaattttttaacatgaattaataggacctggacacacacagcctcatttatatcggcagccatcacagcctgccacatgtcagatgaggtctctggggctctcactccttgcgtcgggggtgatgccacatgtggcccagctgtaggtcacattcagctcctgtgttcaccaggatcagatggaatgccagcacatcttaccctcctgcgccctgggagtttgtaataatctacgaatacgtagatttatttcagagaacattttccgaatcctgttgcgcatacgcacaaaaatattggctgcagtgtgtttataaccatgaaaattccaaaatagcttcaatctcctgtgagaggggagtggtggaaggccctccagcacgtgcacagaattctttcttcagccatgtaaacatgaaaataagggttaaaaatgacttcattatggggaaaagggacaggatgcaaattgttcaaatggcatgatgatattataaggaaagaaaaagatgttataaaaggtcacataaagtcacccacaggtcagcagtcatgtcatgattagctgctctgtgccagacacaggctggaaattggtagatgctctccccaggaagtgggcagcagcccctttgtgcctctgtcacctctgttaggctcctggaagcccccttcattgctgcatgtaatgacatcttcg

SEQ ID NO: 181107 - DNA, 721 bp, Homo sapiens
ggttttaaatgagacagtgctgatttttaaaggcaacctaccagaatggaggttgttgattattgattctcctttttcactgcagaatattagtacagctgttttgagtttgttttgtgcttaataaaccttacatcaattttgcagttcctagggaacttggaaaactagggatagatcatcatttttgttatcagtagccacaacttttttctcctcagtgtcgttggggtttcttttttttcccctcaccgctagatgttttgaccgaacattatgttcagtctgttctttgctacccttctcctgtcccatcatgcatgactgtgttctttcttgtttttttccttctactcttcaacagctgcccctgacaaatgtgctaaaaataacaagtagacttacatatatggagagattgggtacatgagacatagtagctttagggcagcactctgggcttctaggaaacaaggacaggaaaagtcagtgagattgtaatatgcacttatttttagcgtcttaatagtgctttcctgaaatactcctccttagtgtttggcttatacaacatatatcacgtttgctgaaagcatgatgattctttttcatatcttttgaaataaaatgtatttcaccttaggaattgaagtttcagagcaaagtcgttccttagtgccacgtaaaacatcatatgcagaagctgatcgaaagctgcttt

SEQ ID NO: 181108 - DNA, 151 bp, Homo sapiens
ttggcacacctgacagtgagaggagagagggagaataggactcaaaacattgcagtcgggggccacctagcattggtacaattagttccatctagggtagcctctgccatttaaaaatatactcagtgaagtgaagttggaaagcttgtaa

SEQ ID NO: 181109 - DNA, 787 bp, Homo sapiens
tgccagccaggctggtctggtcaccactgcaatgaatcctgccctgttggctactatggcgatggctgccagctgccttgcacctgtcagaatggcgccgactgccacagcatcactgggggctgcacttgtgctccgggcttcatgggagaggtctgtgccgtttcctgtgcagcagggacctatggccccaactgctcgtccatctgtagctgtaacaatggtggcacctgctccccagtagatggctcctgtacctgcaaggaagggtggcagggcctggactgcaccctgccatgtcccagtgggacgtggggcctgaactgcaacgagagctgcacctgtgccaatggggcagcctgcagccccatagacggctcctgctcctgcactcctggctggctgggagacacctgtgagctgccttgcccggatggcacatttgggctgaactgcagtgaacactgtgactgcagccatgctgatggatgtgaccccgtcacaggccactgctgctgcctggccggatggacaggcatccgctgtgacagcacgtgtccacctggccgctggggccccaactgctctgtctcctgcagctgtgagaatggaggctcctgctccccagaggatgggagctgcgagtgtgcccctggcttccgaggacccttatgccagagaatctgcccccctgggttctatggccacggctgcgcccagccatgccccctctgcgtgcacagcagcaggccctgccaccacatcagcggcatctgtgagtgcctcc

SEQ ID NO: 181110 - DNA, 105 bp, Homo sapiens
acttctagtacaatgttcagtagggatggtgagaggggatatcctttccttttttctgaccttagggggaaagtactcagtctctcacttataagtatgatgtta

SEQ ID NO: 181111 - DNA, 703 bp, Homo sapiens
tgtactttagctagaactttttgtagttcttgttcagcttaaccagctaaaatataaagaatacaattgtaacaggattttcttgaacagcttattaataataggagcccagttaattctgcatggaaagttggacttagatatctgtttgaatatgataatatttagagtatataaaaatgacccaaatctaccaaatctagagacgaaagctgcaaatgtctgagatgcaaaatacactggataggattaatggccaattagacattgcagaagaaaagttagtgaacttgaaggcccagcaatggaagcttttcccctgaagtctgttatccttctactaaggaggaatggtgtatctcttattcagttggtatatcctagatatctgtcgtgcacacgtgtgtgtgtttcctaaaaacagtgaagacaagagtcttccttttggttcatttcatcactcttgcctaaaagcactgcctcaagttgtcaggactcattcattcctaagactggaagtgtttataaggaaatataaatgtttgagggtattatacctttgactgcttaggactgtttttgtgggatgaatagtgagtatactggtatattgcttcctgcttttaggatctgctttggtgaaagcacttaagactctcttgataaacactgaatatttgttgaccttgtttatctaatgagg

SEQ ID NO: 181112 - DNA, 201 bp, Homo sapiens
aactgggacacagcaaactgtagcacttaaatgactatggttttcccctatggacatcatttggaggagagagggaagtgacaactaaagttttgagaactgaagagaatcatgtaattccacatcttcgattttactgctgagagaaggagaatggatcaaggccaccctgctgattaagagcagagtcaggagaggatt

SEQ ID NO: 181113 - DNA, 714 bp, Homo sapiens
aataacaaaaaaatatcaagtgggaaggtgaggcagcttgggcaatgtatgggcatgaggctatggtggtgcaggaataacagccagtctgggtagccacagaagcacccagaaggaagtggctttggagccggtgtaggacacaggaggcagcatggacaggctaggctgggatggggccagctaagctgggagacagcaggctgactggggcaggtgtcagtgctgaaggaaccctgagaactcaaacctctatgttccaaagacccccatctccatacctcaagttcaagggctgggtacaagatccagacctcaaaacccccataagtgctgtcttctgacctcccactgtgatcctgaaagtgtgagcagagattcagccctctggggcagtggaccccatcctcaggcactgcagcaccatgctgagagtgttatcaggaccagtggtgagcatcaggcctctccatggacagaccgcacccagtgggcctctagcagcccactcttgtgccagagagaagcacagaaaattcacttccaggaatacctggagagcacacaggcctagcctcttatccaagtcccctgggctacaaagcaactcccatcctggcatgtcttgaagcacgtactactgtgacttgctgcacagtgagcagaccctgaattctgaaatcacaatttttcctacacacaaaaaaggacaat

SEQ ID NO: 181114 - DNA, 597 bp, Homo sapiens
ggggcgtgagggaggggtgtcaagtaccagtggaggcacggggaggggtcctgccctgcacctcagtttcaggggagggctctgcaggctgacagcagctgggtgacagcaggaagcagctgtggtcagcagccactcagggctggcatccatcctattgtctcactgaaactcatgacagtgggaggtgaaggtgacccccagatagtccccagagccagtgctacatgggaagccctgccctcctggggacagggggatggtcttgggggatgagagtcccactaaggagctgagcccttcctgctcctaagcccgcagcttccctgctcgcctacagccggcgagtgcagcacaggaggccaccgtagtgccatagagcgtgcacctaggcgtgcgtgccagtgagctcagtgggacggttcggcaggaacacggcttgaacccacaccaaggctggactcggcacaggccagagggaagccccacaggcctagctgagggacacaaaaagaacaaacgcaccccccgcgccacagtggaaagtccccagaagcagcagtttctacggcacagcagtgaccactcccgtgccac

SEQ ID NO: 181115 - DNA, 343 bp, Homo sapiens
gttgagcacagggaaaagttactgaaactagattgtccaggtgaaggcaggagccttctgccacatccattcacataatgcttatctcagctcttcctcgtttggaaagaccccagggccccaagcctcatacctgctctcgtggttccaaaacttgcagactcccaggttgtagcccaggcaaaccatacaaagatgggtctcccaaaacttaaaagatgtgaaacaagaagtggtttcttggattctcaagcggttgagaatccgagctcaggaggtcaaagtgggcttggtggctagacgccaggcaccagcaccagctgggtacccttgagtggttttt

SEQ ID NO: 181116 - DNA, 348 bp, Homo sapiens
tgaaggatctccactctctaggcacagcctcggtaacaccgattacagctcacaactggacaagcagggaaagcccagcactttggaaggccgaggtgagaggattgcttgaagccaggagttggagaccaccctgggcaacataggtagaccctgcctttaaaatagtaataaaaataacagttgtggtggtgcacacctgtagttctagctgtttgggaggctgaagcaggaagctcgcttgagcctagtaattgttacagtgagctataattgtgccactgtactccatcctggaagacacagcaagactccatctctccaaaaattaacaaacaataaatatat

SEQ ID NO: 181117 - DNA, 653 bp, Homo sapiens
taggccgtggcagccgaggagggaaatcaggaactgactcgccctgcaggagcctgccagagcccctctctccccggggcagaaggaactggggtgcaagggaacgtggcagagccatgtgcccccaccgccttgttgcacatggaggaaaccaatgccccacaccagaagctccatgccagaagcagaattggagccgggtcttctgcctcctaatcctgcgctctctgacccacatcaggggtgatgagaaacaccaacagccgagagttaaactaagagtataaaacttgggtgccgcggattcatggatgcccaggcctgcgctctgctggccgggggctgaggcttcctccctttcctcttagtattcatcggcacacctcagtcctccctgcccttctcctgggccacaattctccccaagaaatcaccccattcaaaccttgcattgtgaacccaattctttcttccacggaaacacttcctgacccttaggaatgatggcagaggaccctaggtaccacccttcagcccaacgcttgaaaggcgcccagcatcctagcagcccctccctgcagggcctcctgttcacagtagatgttagcagcttttgtcctgaaccctcaacagtgcccgtgactaacggtgag

SEQ ID NO: 181118 - DNA, 550 bp, Homo sapiens
ggtgtgagagcacacccctcagccatgctgtcatgcctgaatctgatggacattgacagagtccaagagccaatgtggcagggcctgtcctggaacgcatgcaaattgattcatggaatatgggctatggatagaaatttagctataaggtggttagaattatgtacagagatatgggtttgcttgataatttagacattgttaacaccctcacagtctctcttctgctgactattcctgtgtggttgtgtaaataatggcttggaaagaagaatgagtagctacctgtgaaataaaccatcagttagatagatcgacagtttgtgtactgatttattaggaaaggtttaacaggccaggccctaatattttttacagcaaatattgatctattagaattacagccagagaagtctgagttcaggtagttcctgcaggagcagtcagaattggtgctcttatttcaaggcagagagaagggaggtctgctaataatagctctaatagcattgtgctaacattgtctttacccctcaaatgctgggtttgc

SEQ ID NO: 181119 - DNA, 465 bp, Homo sapiens
cccaaacacttcttaatctgataaacaactttagcaaagttccaggatacaaaatcaatatataaaaatcagtagcattcctatacaccaaaaacatctaagctgagagccaaatcaagaatagaatccattcacaattactgcaaaaagaataaaatacctgggaatacagctaaccagggaggtgaaagatctctgcaaggagaactacaaaacactggtcaaagaaatcatagatgacacaaacaaatggaaaaacattccatgctcatggataggaagaatgagtattgttcaacacacaaataattcaggctttagaaggagctggaagagagaagacatggatggacgtggggctcacacccattaggaggctaaggcagtagtagttggggtggcagaatattcagtagtacactaagactgcctcatgcttagtactgcagtagtactacagaatgc

SEQ ID NO: 181120 - DNA, 883 bp, Homo sapiens
cttatcttttttattcatctaatttcaagtaaatatgtaaaaggtaaaattgtttttccatctactacctaaaatcatcttgtatatcttcagtgctatgtatttttcacaatgggaagcagtgagataaagaagtaaagaaaatgggaagagaagcaacaaacaactgcttaattgatagttctttgaaagcaagggtaaactggcagaagaaaggagttaatgaacaggagaaatgttcattaatatggtctgtgtttgagaccatatatgaaagtgggttcttagggaacatttaacgacgacatctttcaagatcaagtctgggaagaagaaagggaccaataggatgaaaaacccccagttggcaggagtagcaataactttaccaacatttgtaggttgtcaacataaaattaccaaggttaagtaaaagcttaaataaggccgggtgcagtggctcacgcctgtaatcacaactttgggaggccagggcaggtggatcacaaggtcaggagttcgagatcatcctggctaacatggtgaaatcctgtttctactaaaatacaaaaaaaaaaaaaaaaaaaaaaaaattagccgggcgtggtggtgcatgcctgtagtaccagctactcgggaggctgaggcacgggaatcacttgaacccaggaggtggaggttgcagtaagcccagactgcgccactgcagtccaggcgtggcgacagagtgagactctgtctaaaaaaaaacaacaacaaagcttaaataaaaccagcagctactttttgctatttcttttatatagtgatactctttcttgtgaatttcctcttcctcttcctcctctccttctcctcctcctcctccccctcctccttcttc

SEQ ID NO: 181121 - DNA, 802 bp, Homo sapiens
gttgatttggctgacttagaacaaattaataatgatcttaaacaaacttaagggactataccatagactcaagcagtaatagcagcactcataaatagactccaacgtgggtaaattcagagatctgatggtttccttaaaaaaatattacaaaaagttaagtgatttattagtctcccatttgctccagctggaggattttgatctgaagaaggaagaattccccaagtattctagaaggaacttacttcactgaactgcaggttaaactgtggaaatcttacttctttgcactgaatttaaactcctgacaaagcgttgcttaacaggctggggttggaggattagggagaggctgttgaataattattcatagtagtcagtgaaactggaatagaagcaatgtattttatcactagttgaaaatataaattaaatcaaggaaaattctttatagctgaaaattgttacaagatggctgcagctggagggaaaatacatgtgcccaccaaagcgagtaaatttaagatgaagatcctctttggaagagataactgaaatgtaattcctcaattcagtaggtggaataacaaaagagaacaagtaaaattgcaacagaaatcagaatataacagggtacccataagcaacaattataatgaagacagtgaagaatctctccgacccttgcttgttttcagtgctgtcaatgcaaagattaggcagtgtgctgtttcctacacaacaattcttttagaagaacctcactgcaacacttctagaaaaagtggtgataggactg

SEQ ID NO: 181122 - DNA, 201 bp, Homo sapiens
tcaaccatgatttatggttcaatcatcttttcctgaaacaggactatataggcaccaaaattgtggcttttttagaaacactgtgcaagtaattcttgccatgtctctatagttgttgggtttcattattatgttatgaataggtgaagctaagaataatagtttatgctgtaatagtttatgctgtaatagtttatgctg

SEQ ID NO: 181123 - DNA, 205 bp, Homo sapiens
ccttcctttacccaggggatatatcgagagcatcatctctcaggaggaggtgagatttttaagttgatccaaagggaccatgggttttaaatgtttcagaaatatttttatatgtcattcctcagaggtatattcccagcagaataaaggaatgtaaagaattgtggtgtctatcatatagtagtgcaggagaaacagcaaagta

SEQ ID NO: 181124 - DNA, 182 bp, Homo sapiens
attcagctatttgttctattcctcaaagaattcctgtatcaacaaagagcttcgtaagagaaggcctgaatatgaaaggcgggaactctgtctctttagggctctaagcttttcttgaaaggaagaaaaaaataaatagtcaaacttcagattatgaattgtgcttgctgatactactatta

SEQ ID NO: 181125 - DNA, 276 bp, Homo sapiens
caccccggcaacatccattcgaagagcttatccgtacctcccctcctttatccccaaggtcactgggtcagagctcacggagtcattcacaacacgatgtttaacactgagaggctctggaagtgctccttcaagactcagaagaagacccattgctgagacaatcgtgttctctctctctctctggatcaccgcccagagacaaggacttccggagaccctggcttccccggctgctgcctctcattcctgcacctgtgggatgagagttcgaag

SEQ ID NO: 181126 - DNA, 645 bp, Homo sapiens
gtgtgctctcttgctcttctgctttctgccatggaatgactcagcaagaaggccctcaccagatgcactcttcttgaccttggacttcccagtttccggaactgcctaatctggtcagctgctgtgagctgcaggagaaggagaaaggttcgcttgggagcactgctgaggaactgatggcagtacgagatggagctaagattggaactgaggtctggctataaagctgcctttatgtccatcgcatcctaagggctgctgttgctcttctgcctctacactgatggactacgtcagaacatcaatatgctgtattgatgataatggatgatattttcttagttgtgccaatattactcttgagggaagaaatgatgccaagccaggccaactcctactcctcatctgattcagcccagtgatgagctctgtcaagaagacctccaagatcagccccctctatgctctcatagtcccctctgctgattcctattaagtcctgttcttgccagtgagacgcctgctccagctttgccttccaccatgagtaaaggctccctaaggcctcccaagaaacagatgccaccatgcttcctgtacagcctgcagaaccatgagccaattaaacctcttctctttataaat

SEQ ID NO: 181127 - DNA, 125 bp, Homo sapiens
ttaagttattttgtttgttttatatttatttttgaaaggacagaaaaagaattaaccaaattgcggagatggattggggtaagggaagatgtgatcttttaaaacttttaatgatgtataattcg

SEQ ID NO: 181128 - DNA, 570 bp, Homo sapiens
gcggattattccccctggctcaggaatcatccaccaggtgaatttggaatatttggcaagagtggtatttgatcaggatggatattattacccagacagcctcgtgggcacagactcgcacactaccatgattgatggcttgggcattcttggttggggtgtcggtggtattgaagcagaagctgtcatgctgggtcagccaatcagtatggtgcttcctcaggtgattggctacaggctgatggggaagccccaccctctggtaacatccactgacatcgtgctcaccattaccaagcacctccgccaggttggggtagtgggcaaatttgtcgagttcttcgggcctggagtagcccagttgtccattgctgaccgagctacgattgctaacatgtgtccagagtacggagcaactgctgcctttttcccagttgatgaagttagtatcacgtacctggtgcaaacaggtcgtgatgaagaaaaattaaagtatattaaaaaatatcttcaggctgtaggaatgtttcgagatttcaatgacccttctcaagacccagacttcaccca

SEQ ID NO: 181129 - DNA, 592 bp, Homo sapiens
gcacccggtgaaactgccttgagtacttgacataagtcagcttggtcttctaaagagggcaggttacttttcatcaactcctttttacacctcaggacactgagactcacagggcggtattgaatttccccttgtcactattagccagcgacaggatggggcctggaactcggtgtcctgctgactccttctgggggcttttgcttggtttaatagctttgggaaagagcacctcagtatttgtgtgtctgtagtttcctcttttaaaactggagtggggcagtgtcacgctgtgactcgttaaaccaaatcaggatgagagtgcctccggggaattgtgtccttgtgcacattaacgcccctcacataggtgtggcgtcaataggaagtggtgagtcaggggagagggggttccgtggactagaaaaaactctccttcgacttctatttagttctcagaaggggataggtgatgttgatccaataatggactaagagccaggagaagggctccgcgggaggatctcttgagctcagcagttcaagaccagccggggcaacatggtgaaacaccgtcttaaaaacattttgt

SEQ ID NO: 181130 - DNA, 648 bp, Homo sapiens
agtgctgggacactgaacggcctgagcggcaagggaggccccctttctgccaggctcactgctgcacttttagtccctgatggagagaaaagaatgtccatattccccaaaccgttccatgcgggaattttgcacttgcagttttctttggttggagaagcactctaggaagaggatctcagaaggtggcaagttacaatttggggctcccaatgggagtgaggagctgactgagtcagcccttcccacaaggcctcctttctggtagtgtgtattgaggagggagatggcccgctctgccctggtataacccaaacctcagggctgaggccagagatgtgggttgagcccttcttgctaactagtttttagctgagactggatttgtatggccggggttggggacagacaacaggacatgcaggctttttcttttgacctcctgggttttctgcctggcactgcaattgggagggaggcagtgaggagccacaactgaaagaggggtgtggagatccccaaagctctgttgcagacacagcgggtgcctgcgaaaactttagtgatgccagaaaaccgtcctggatgaggctgcagagcgggtaagctgcttaggtggtttggtgctcagagagggctgtgtatgcc

SEQ ID NO: 181131 - DNA, 315 bp, Homo sapiens
acttttttgacactgccacatttttgttctattaccctttcaaatacttcttacctacttcccatttgtggctcctccttaatcccacactctcaatcacacagatttctaatcaattttgtttcttccttcttctttgtaccccttgtgcaatcagtccccaagtcctgaagtgtacttcaggggagaagagacacatttaacttgccatgttgtcatctagtattcaatttgaacatctcagtctcttttcaggtgcctaagatgttctagaaatatactctggaaaacttcgagtcagatattaaaatcagg

SEQ ID NO: 181132 - DNA, 1138 bp, Homo sapiens
agaaacaaccaagattgccgggagcctccagaagctaggaagaggcaaaaaagaattcgcctacaggtttcagagggagcacatctgccaacactttaattttggacttctgacctccagaactttgagacagtacatttcttttatttttattccctagccccctgcagtttatgggactttactatggcagcctcagaaaactaatactcattttatgaatctgaatgctcattttcagaaacttttaaataacttaaaagaagaaatgcaaatggccaactaaggaacaactggtgcatcttaatggtaatcaggaacttgcaagatagtaccacagtgaggtactattaactgccaccagattggcaaaaactagaagaatctggcagactcaaatgttgtcagggatattgcataatgggaactctcattcactgctggattatgaattgttggaaccactggaaaactgtttgctattgtatccattaaaggttggataggagaagcaaaagcaatgtgggagaaaccaagtaaaattctacaagaaggtagcaagttagaggtctgagaaaaatctctaaccaggttccaccaaggtggtggataagtcagtggaaagctggatctctgcctaaagtcacggtaggatgagaagtagaaacgagcaaaaacaggctagagtgcacatctatctgacctcatcccacactgacaggtgccttgcagaagaaactgctggtacacttttccagagagttgcacacattcctggcctggaagttggaagagcagaggcaggagcgtgggctgctcactgtcccacttaacccaacaagttggcagattcacagcaacctgagaaagccaagggcacgggccccatgttagcctgtttagcataatgactgttactaaacttctaccttctaaatcctgtgtagatttgtctgtgatcaagccattacccagaaccaggtcagacagagaacctgggaaatagttttagcttagctgcattgacacaggatgaaaccaccatagttcaccccattgtgatcttgacatctatacatggctctttaaatcatatgtaacttccaaataaagaccctagtagattaaaaaaaaaaaa

SEQ ID NO: 181133 - DNA, 739 bp, Homo sapiens
aaggtgatctagaggatcccggtatacataacttggttccatgctttgttggtataaatatttaagaaatatttgttgattgaatgaataataaataaatgaatggcttccttgtgtttcctgccttctttaccagggttatttgccttcaactttcactggaccctctatgtatcaggcatggtcttaaattctcttcacacattattcagttgagggtagtcccatctaccatatctccatagaatcggtcccaagcctggtacttagaactgccctgcattgtcaggctccccctttgccaggtggtgcctccctaatctgaaatcatggactgagtaccttcaaaagaaaaattaaaccaaagatcaggaggagatgcttctgacttagtgagtctagaagaccctggcctcccttgcccactctgcccagaaactgaatcccagagagatgaagttatgggtttcatacctgtgtctgcccatcaacccaagggggacaaatgccaacatagaatgacagagagggaaggaagaaagtgtttttcctaattaattggctctaaaagtggagaggaaccaagttgggttattatagaagcatcagcgtccgacacaggtcttcaactgccatgcaaataccccctactctgcaccatgcagttcccatggtttactttgttgtgatgtaactgtgcatgtttctacctgacccattgacacggctttgtgcgtga

SEQ ID NO: 181134 - DNA, 860 bp, Homo sapiens
tctctgtctctagctctagctctcactctcactctctcctggtcaccctgtctagctcctcaccttcctttctccccttcctgggagtctcctgacctctggccaccaatatttgtgtatggaacagataaaggatataggattgctaatctaggccaatccactggtgagtggaggaggagcagggggaggggattatactgaaaggagccctgtctttggggagaaagagagagtagggtggacgctggcctggcacgactcccctccacatacccacacaggtcagggtgtgtgtgtgtgtgtgagtttggtctggagctggacgggctgactgtctcagacaagttacttaacctctctgtgcatcactttttctaactatgagatgaggataatacattccaaaaatgcagtgtggatttaaggtgagaatgcacgtaagttgcttagcatggtatattgtaagggctcaataaatggcagcttttatcatcactccagactcttgtcctttctccggggtccttctggagccaggacagctgcatcttccaatcccctcctcctgccactgcttctccattcttgggggcccaaattgcctctcagttcctggacccatcccccttgcctggctcccagggctactcactatggtgtccccgtgtaggggatgaggctgggatcctgccctctgcccacaaggtctggagggacacacttcttcagtttagggtctgtttttcccttctctgcaggcctcagaggggaggaaaggggacagccataaatgatgtaggggaagcgtacttgctgagggggacaataagggatgagcagcgtccagaaacctaaat

SEQ ID NO: 181135 - DNA, 405 bp, Homo sapiens
cgatcacgtaacaacgtgtatgtacttaacactactgaaccgaacaacggttaaaatggtaaattttatgttatgtgttttctaagattagaagagttctggagattaatcacataacaacgtgtatgtacttaacaccactgaacctaacagtggttaaaatggtaaattttatgttatgtgtattttactacaatttttttaaaaaaaagaacttaagggaggacaaacatttcagtggcattgatagaaattagttagacaaaagagtctttttgctttacggctaattaaacattacaaggtactgctgaagggggctctggttttgctaaaagggaaatacaataatttatgagatttttgtgcagctgatctcaaatataaaaacgaggtttgtggtcc

SEQ ID NO: 181136 - DNA, 320 bp, Homo sapiens
aaaaaattagtatttcagtggtagtctgtagaaaaacctacaacttttgcattttcctgagacaaagaagtagcagaggagacattctctctctctgtttttttttgtttgttttttgtttttgtttgtttgtttttttctgagacagttttttgctcttgttgcccaggctggagtacagtggtgcaatcttggctcactgcaacctccacctcctgggttcaagtgattctcctgcctcagcctcctaagtagctgagattacaagcacacgccaccacgcctggctaatttttgtatttttagtagagatggggttt

SEQ ID NO: 181137 - DNA, 571 bp, Homo sapiens
tggctggtttcattcccctcctgtcatggtcagcccgtctgatcctaacaatgtaagctaagtcctctccccaccaacggaagcatctgccatcagtcttgctgccctgagcctggcaccagagttcactccagctgtagccttcctccccatctggctctccaggttcatgttctagacttttccttctttctaagttgtcttttttgttcccttcagattctccctcctggggtctgaagctctgctctgctccccagatctcttggctgtggttcagagaccctgtttggaattgcacagccctgctccttcagcctggacacctgtccccttaagtttttggctgggcatcttgtttccaacctagtctctttaaaccccctctattcaggctctcagtcccacctctattaattcacaggacagttgattgtttaaaagggcatagaacacttcccctctcttttgctccctctcatgtgaaatgctggctctctaatatggtttggctgtgtccctacccaaatctcatcttgaattgtagctcccataatatgagaggaccctg

SEQ ID NO: 181138 - DNA, 152 bp, Homo sapiens
ccaggtagtgaacacagtactcgatacataggtttcaatcttcattctcctcccacccttcaccctcaagtagactctggtgtctattgtttctctctcaatgtccacaagtcctcagtgtttagctcccacttttgagtgataacgtgggg

SEQ ID NO: 181139 - DNA, 434 bp, Homo sapiens
tcggagtgtaagaggagtgcagagtgctctccgcagctagtaattagtggacagatgagatgtaaatgaagatttaatattcagtcttaccaactttcagggtgagggggtgatactgagaatggggtgatcaaacttcttaggactgtagaaattttatatttattatatccaaatagcttaaaaatgaatgcaaataagaaataggggaggctttatgagactgtaggttcttgtgcttcacagctaatgggcagaataccattgggaaaacctgaaggatttatctccatagcaaaacaaagcaaggcaatattcagcagagtatttctctgaaataagaagtataagaagtctaaggctttctgtgtttgttatgaggcctctataggtagacagagacacagcaggggaatatctaagatgaaccaggt

SEQ ID NO: 181140 - DNA, 308 bp, Homo sapiens
acataaaaaaaaaaaagagagaggacaaataatcaagagttccaattaataactaatttttaaggcctttgggaaaaaaatttaaatattattgttaagacttttttgccccagcagtttcctttccaagtcatactgaacactccttccaatctatttatggacataaagtggacatagggattatgataccacatctcttgcttgaaatcttccaaaagttgaggcactgttacctacaaaatcaaatccaaaattactttgagaattcaaaggatcccttagatctagttcctctttgagtactc

SEQ ID NO: 181141 - DNA, 563 bp, Homo sapiens
cgcagcggctcacgcctgtaatcccagcactttgggaggcgaaggcaggcagatcacctgaggtcgggagttcgagaccagtctgaccaacatggtgaaactccatctctactaaaaatacaaaattagccaggcgtggtggtgcatgcctgtaatccccgctactcgggaggctgaggaaggagaatcacttgaaccgggaaggtggaggttgcagtgtgccaagatcgcgccatggcactccagcctaggcaacgagggtgaaccaggtccaggaagaaggtgcaaagacagcattccaggtaaaagaaacagcttgaacaaaaagtgtgtaggggaaccgcaagcggtcttgagtgctgagggtacaatcatccttggggaagtactagaagaaagaatgataaacagaggccagtttgttaaaaacactcaaaattaaagctaggagtttggacttgtggcaggaatgaaatccttagacctgtgctgtccaatatggtagccaccaggcacatgcagccactgagcacttgaaatgtggatagtctgaattgagatgt

SEQ ID NO: 181142 - DNA, 415 bp, Homo sapiens
aaccccctcccgtccctccatctccaccttctctgtgcttgggtgcaccctgtggatacagccggcctgagggaccgcagactcgtcgggctgctttctgatgagaggattaacaaacaattgccggctgcgaccattttgcaggacaggcatcttctgcgcgcaggccacgtcgggcctgcccgggctctggctgcctggaagtgctcccgctgttcaccccgcggaattaggggttggggggcagttccccgcaaatggtaagatgaagaggcctgagcagtttcgtggaggggaagaaacaggaaaacctcttcaaaagacaaaaagctggcactgcattctctctctgtagcaggacagaactgtctaaagacaagacccctttggccaaaataaaggaacctgaaacatt

SEQ ID NO: 181143 - DNA, 923 bp, Homo sapiens
cccaaggttgttatatcttcatgtcctcatttcttagggaggtaccttcagaaccaatagtgacccctaacttctctggtggtcggttccatgaaaggcaaaggagtgtgagagaggagtggatggtcaacctcccactgccatggtaacatgggtgctggctgatgggagcagaaaataatttagtgaaagtctgtgggggcagtcacaagatgtctgagaaaactggcgagccagctgctgaaaacagggacaaggaagcctccgtggctggagcccaaatcacactgcagacccagacaccgtgaccaccaccatggactccagagagagcagcttatagtactcaatcagctgccactaccaccatccagaacaccagatgttgtagccatggctgcagcaggaatggatgtcccactgtccctgctcctcggtgtgacttgctcccaagttcagggcaggtccatctgattggctgagtctggaatgtctgcctgtgcctcagctgtgagggaggcagggaaagtaagccttttcagcttctgtcgtgggaggtgggctctgcctcctaccaagaatcaaagggtggaggatcttcaaacacaggaaaagaacccggatcctggcacccccaaattttcagagtccatttcagagcataagaaattgagggtccaagatcattcatgtaagaagtttagagggggaagaaaagaatgataaacgaaaagaacagcaatagtaaaggatcttttctttgtttcagtaagatgaagaggcctgagcagtttcgtggaggggaagaaacaggaaaacctcttcaaaagacaaaaagctggcactgcattctctctctgtagcaggacagaactgtctaaagacaagacccctttggccaaaataaaggaacctgaaacatt

SEQ ID NO: 181144 - DNA, 225 bp, Homo sapiens
cggcagctatccggttcaatgggtgtgaggagtcagttatatgttagggattgtttaggtagtgggggcaagctatccggttcaatgaacaaggacaggaggaagagcagagccgggcactgtggtgcctgcctgtccctaggcgggacgaccgtcagctgtcggggctgagccggtcgggaaggaaacaggatatgaggaccttcattcatcccttacatttct

SEQ ID NO: 181145 - DNA, 195 bp, Homo sapiens
cgctggagccttctctaattccctgaaactattatttttctcccttttctgaattcttcgatacacactcaccaagcgttctggttatttatgtttatgtcatcttgcttgcttgactatgagcttcttgcaggcaggggatacatctgactgaaactcttacccctaatacctggaactccaccactgcctttg

SEQ ID NO: 181146 - DNA, 102 bp, Homo sapiens
atgtaattgtgctattgagattgtgggaggtaaatatggaatcagggaaatagaatgggctgataatgtgttttcctaaagaacagatgggattggccgtgc

SEQ ID NO: 181147 - DNA, 410 bp, Homo sapiens
cataatcacattattttcaggataggggaacagagagagacccagaggaataaagtattttgggcaagatcacacgatagatataagaaaagcagagaagaataaaggatcttcagaggccaagaaacagcataagcagtgctggatgcagaatattcaccagcaccacctagcgcacaggatgcagggcagggtggaatatgatggtgcccgcccagccacagccagcagggggacgggccatcccggaagcacttaagcagcacgcactgtggtgtggtggacgcagaagccaactgaaagttagtcatctcacagtgaccttgtgcttgttaggctagacgaggtccctgtgagatggccaagccacatctgcacaagggcctggcctgggatgaggacaaagcagg

SEQ ID NO: 181148 - DNA, 237 bp, Homo sapiens
cattcaagaaagaaagtctaaagactataatgggcgtacctgttgctaaatttgtaaggtttcatttctaaatcaaattagagcattaaaaagcaacttaattggagtacttttctttaactctcccacaaatggctttgctcagctatatttcattattgtgcttttagctttcactaaggccatacaaaaacatcacaccttctggtaacacatgcacacacaaatatagataca

SEQ ID NO: 181149 - DNA, 519 bp, Homo sapiens
ccagtcacgattactcaagtgatctgcctgctttggcctcccaaagtgctgggattagaggcgtgagccactgcacctggccttgaaatatctatcttaatatatcctgcatcatttcacgcagtgtgaccggcgctagaaagttcttgtaggggcaggaatgctgtctgggtgtcaggggtagggacttcatcatttctctagatctagggacagttggacttgagagaggggtctcatctgaatttcagtcagtctactttcttcttctgaagcttcccctttaaagaggcttttggtattaaatgtttgctactgtatcaatggacttttaggatcacagaatccaaaggcagtatggaacaagagagcttaaaaattagagtatgagaccctgctgtgccagtcgtgtggcttagaagtcctgaccttgagcgaataactgtccctctatgaggctgtctctgcatctgttaaatggggataaataatacttgctttacttgccttttaggatta

SEQ ID NO: 181150 - DNA, 768 bp, Homo sapiens
gcttttaacatgtataacaaatattaaaaatgtatgctatgacaatacggttcattgttatggtttctttaggttcatttcactttcatggatttacaagcactgtaaatcttgggcctgttatctttgcacattttcttgtgcccattttcatctaaggagaaattaaggagtagagaaaggatgtaagtctccttaaggctactcagaattataaacagtaagaaatagaagttctatagcaagattcttaaactgttgaataaaatcttcctttcctataaaaagactgttctgagtatccatacaagtatcatttataaccacaggcagggtatgtatgggctttgatttcaggtgctgtgttttgctgaagtctgctaacagcctctacatcaaattcataatgatattaaaatctatggttcttagaaaaagaatggttgagaatgtgttacaaaagcaatttgtctcatcatgttaatgttgatgccctcttatcccagaacctggctgaagctggagtcaaaatctatattggtttaattttaagtggccttgtgaacaagtgcattcaggcaatgaaggaactgaaagctacttagaccacccaggctcctggttgtggactctcggatggggctgggcattgttaaaggaggttgaacctacatgcttaaagtttctgtgaaggaggagttgaatttttaggacaatgtcagttgcttttattgtaatcatggtgacaaactgaatttattaatgagc

SEQ ID NO: 181151 - DNA, 175 bp, Homo sapiens
caaaaagaaaggacactggaaggatgagtgttcagaaggcaatgagggaaatagccaagaccacgagacaaagaggccatcggccaaggctgccgcaccttggggaaccaaatactgatctgatcaggctggcaggagccgaaggacgtaaggaacaggacagaccgggaacctt

SEQ ID NO: 181152 - DNA, 362 bp, Homo sapiens
tggaaggctgcagtgcaagtggttttcgtggtaactgcattttgcagggagtgtcctgaggcacagtgctttcagtctctgtggaaaacactaacagctagatctggggtatccaatcttttggcttccctaggccacactggaagaagaagaattgtcttgggccacacataaaatgcacgaatatgatagctgatgagctaaaaaaaaaaaattgcaaaaaaatctcatcatattttaaggtttacaaatttatgttgggccacattcaaagctgcccttggcccgcgggttggacaggctcaatctagatgtttatgtgactatgacatgcaggcagcctgcccagtttgttttaaagt

SEQ ID NO: 181153 - DNA, 567 bp, Homo sapiens
ttcctccccgttgcaacagcagttttgagtagttgcaacagagacgtatggcctacaaaacctaaaatatttaccacctggcccactgcactccagcctgggagacagagtgagactctgtctcaaaaaaagaaaaaagaaaaaagcagttaggcctgctgtgttagctttttctgcatagaggcctacaccaaatatgacttatttatcatgttacttttcctgtttggagaatcaatgaaagaatgagaatgcttaattcctgagaaaagtagatgcatgctctttagaaggaaaaagatacagaaagaaggtgaaagccgcttaagacaaattgtagctcttcacagtttcattcattattgaagatctttagctgagcttggcttatcctcagagttctctgagaatgtgcttctcaaagtggaaattgtttagcatatggggtggtgaaaaggactgaagaactttggtaataaaaaccaaagcagcaggaaggaagtggtctgattagaaccaagtgcttgagcagggaaagacagcgtaagaaagagactgaagctgctg

SEQ ID NO: 181154 - DNA, 334 bp, Homo sapiens
agagtcacacacccttatgaaggtgtattcgtatatgacagaactaagaattctgaaaactactacttgctaccatatggcaaattaccaaggctccgaacatctgtcatgtatttcaaaaatgattcactaaatattaatcccattacatgctaatgaaatatccctagttgccaagtaattttcaaaaatgcaccaactaattaaagaccaaatcacatatttgactaaaggacacgtttcatttaactcttagctggacactttcattgaactctggattgcccagtaaccaaatgtaagatgacattgtgtatggtgaccaggccgaact

SEQ ID NO: 181155 - DNA, 293 bp, Homo sapiens
accttggcacggttcttctagtcctataagtgccccgggcctgcgagccccgcgttttgttagtaccgccccctattcctgttagcccgccctctagtctaatatggatcgccacttctgtctgggtccctgatgttgttagtgtgagtaaaggcccttgttttgcaagggtctctaaattggtcagggcccctttaacctgttaaggttgcttggtcctgttaaagccctccgttcttgttaggactcctcgattgcctgggtccccaatcctgtcagggcccccatttccc

SEQ ID NO: 181156 - DNA, 185 bp, Homo sapiens
caaatattttgaagcttctgcttacctcagtaatttaaaaaacattttaaaatcaataatctcttctcttttctcacttacttgaaaatagacacttgattttctccatagggaattaaagaggctattgaaagcaagtggggcagacactcgcttgagcaggaaccactgcatgctaaatgcat

SEQ ID NO: 181157 - DNA, 311 bp, Homo sapiens
ttttgttccaagccagttttcttctctgttacagctaaggcatgagaaagaatagactaccagcttatttgacttttgataagttcatgaagcagcaatagccactttcaggtcataatccattcttttctctctgtttagttgctatagtttatttttttgccttgcaaatatgggataaatgtggctactaacattcaaatattcagacaagtttcttgacaaaatcagagaggtgttttttgcctgttgtttcttttggtttgttttctttagaatactggacatttgctctaagttatctgtcatgt

SEQ ID NO: 181158 - DNA, 411 bp, Homo sapiens
cacagtgagaccctgtcaatcaatatgggcatgcacctggccctacaaaaatacgcctggttacttggggtagtgagtagcttctcggtcctccccattccccactgtcctctccattccccactgtcctctggggagttcttcttgtcctccctgggcaaaaccttgacccttgcttctgctttacgctcatttcggtctcatgaaaaaccatttcgctgatgcaaaactctgctttcaacctaaacataatcaaacatttccactttttttctttttttttgagatggagtttcactcttgttgcccaggctggagtgcaatggcgcgatcttggctcaccacaacatccgcctcccaggttcaagcgattctcctgcctcagcctcccgagtagctgggactacaggc

SEQ ID NO: 181159 - DNA, 354 bp, Homo sapiens
cgatcaggttctctccttttctgtgtgcccgacaccatgatacccaggaactcggactgccgctagactcaggacaaacaacaaagctggggatgctcacttatcatcccctgggaagggaggcctgagagctggtactggttggccaagttcctggcagagggccttggtttctctggcagggaagaagtcaccatacgtctccaggcactggttagcttgctgcctccaaaggagttaactgtgttcttcactagaggactcaggtgtcaagcatgctggcaaggtactggctgccacctgaaacctccagaaagctacattgttcttttccaggttctgaaagagagagta

SEQ ID NO: 181160 - DNA, 402 bp, Homo sapiens
  misc_feature (52)..(52): n is a, c, g, or t
  misc_feature (55)..(55): n is a, c, g, or t
ggagttttattaatgaattaggaatttcagaggccacttctttctgcccttnccncacccacccctcctcctgccccagtcccagccaacactgtttttctcctggatggtcacatcatcctgactccctgcttttgctcttcttgccctgcagtctgctctaacatatctgtcaaagtaacttcgttagtaaaatttaggttacattatgtcatgtctctgtacaaaacccataaataactcctcttcccattcagtgcgaaatcccacattctctctctgtttttttttttttgtttgagacggagtcttgttctgtcacccaggctggagtgcagtgagccgtgatcacgccactgcattccaacctgggcaacagagtgagaccgtgggggaaaaaaa

SEQ ID NO: 181161 - DNA, 969 bp, Homo sapiens
aatttaaattgaatatgtatttttatgttatagtggaaagaagatgaacggggagtcagacagcttcatattaaaattctggtcctacctcttactcacttataaaatatgggcagtcttccttaggcttgttgtgaggattagtgataatgtatgtgtagtgtaagtgtataacatgatagaggaacttaggaaaagatagctgtaattcctttgtaatcggccccagaaacacacatttctctacttagtttgtacttactaaatcccatatgtctattcatttgtatttatatgtttatccttctttaaagtatttgatatattggtacaacttattgctgagattaagttatctgtccacacttgtattagggttgcctggcttatcttataaattcagaagcattcaagctgagtttttaatttttccatttggtgctaaatagaatactggataattataattcagctttctaaaacgtagcatttttaaagtaatacatgtgcatagtttaaaaagcaatttattactaaaagccttatcaaaataatattttgatttttggccttcatacaggctgttgaaaagagcagataaaggatggaaaaaaggaatggaaagggagaggtatttcggcagcactggttctttgtgtgccaacggcttaaaacctttttttttttttttttcctttgagacctatatgattgatagaaagctattatgtgtccattgacagagcttagaaaaaaaaatgtcttcatgaaagccaggaggataaagtaggtatataaatctagagaaagcttaaacagcggttgttgttgttattctaattttgccttgtttttccttttctcattattactccttctcagttagcattgcctttggcagctttcccaaggaaagtaaaagttgtcaagtgaatataaattaaaatgcctggtgatggaaaatggagt

SEQ ID NO: 181162 - DNA, 348 bp, Homo sapiens
caaggctgagaatttttaaaatgacaaggatatcatacctcagaaccaacccctgccaaaatactacaggataaatatagagaaaaccaaaccaagttatattaagtaacaattgctgaaaaccaaaagaaaagagaaaatctcataaccaaccagaggaaaaaagatcaattgccttcaagggggaggatgatttaagacaaaaacaacaacaatccagaagtcatcggaatggttttttgttttcttttcgagacggagtctcgctctgtcgcccaggctggaatgtggtggcgcaatctccgctcactgcaagctcttcctcccaggttcactccattctcctgc

SEQ ID NO: 181163 - DNA, 537 bp, Homo sapiens
gcaagagtgaacttgaacttcactcagtgcaagagtgaacacacactttgtgccggctttaaagaacccagcacaaagccagtctgcatggcctagagacatattttgctggacaatgattacttgtttttctttttgtttttcttgtatttgcctgtttgattggttcctgacataccagaaaatcactgtgaaaacattagcttaacatttgttaaggaaacaaaaagacttcggtgaccacaccttataaaccaaacagttttgtaaatcactttggaaaatttcactaaaaaaaaaaaaatccttcacaatataataagtaaagaaaatttaaaaccacaaaacattactgtgtttgtaggggggggttctgatttacagagtaaccacatagtaattataattattagaatgtccagttttcaaaaacgttacaaggcatacaaagaatgggaaagtgtggctcattcaaaggaccaaaataaattgacagaaaatatccctaaggaaacccagacatcaaacttaccagac

SEQ ID NO: 181164 - DNA, 560 bp, Homo sapiens
gccctagacttctttctccaggctcccgttgtgtggcttggctgcccactacctcattcccatcaatggacaatggctgggagagaaagcctccgtgactgtatcacggaacagtctccactccaggttatggatccactgttgggcagttctacactgctcacatccggatgccgattctgccagcaaatccatctgattctatctctctctccggtctgtctaactctaggttctgcacatgtctaacatgtggttgtgtgagtgccagagtgcaagctcttgggaggcaggggacacatttattgatgttgtatcaccaacatttagtacatgcctgctaaaaagttactgtcaacatatttgttgaacaatgattactggatgggtggatgaaacatcaatatgacttgcccaagggcagttatgaatgtctccaaaactatttcaggggtaattcatgaacatgtcctctgaggattcttcttccatctctaagtcagttcctatgatatgactacctcagggcaagaaagtcactgtgtccctgctacaacaaa

SEQ ID NO: 181165 - DNA, 284 bp, Homo sapiens
ctgagcaacaagagtgaaactccgtctcaaaaagaaaaaatgagtgacacttgattcttaccttaaaaggagcctgagagctaatagtgtaaaatgtgcaaactaataattgattataatacattaaggtaaatgcataataaatttttacataaagatcaaagtaggagagagtaattaactttgaaggaggttagtaaagacctcacagaggggaggtaacaggaactttaaggatgaatggtgatttgcagatgataagcagtgacatggggcaaaaaagc

SEQ ID NO: 181166 - DNA, 265 bp, Homo sapiens
gactcatgcaccataattggaagcaccaccctagcaatatcaaccattaaccttctctctacacttatcatcttcacaccaggcattccgaaccaaataaacaccttcatgttagccagacttcctgaaactatcgcacactaaaatctattcattggcctttcaataaacagttcttgagcacctactaataatagccaatcttgatgagggcttaccacggccaggctcttatgtaaacctcataacatcttgatgaggcagg

SEQ ID NO: 181167 - DNA, 815 bp, Homo sapiens
gctccaagcaggtgccttaaatgaatggtattgggtatatcatgggttttaataaagagtggtaggaactgtggcaaattgaagagtacatgctctaaggtatccacttgttagttctagtatattgttggcatgaaggagtgtagactttgaattgctgatcttctgatttcttttcaaaaagaagccagaagtctggaatttttaaattgtgaattttctttattttaaaatgttgatgaacaatttaaattttaaaaatgtgtatacttagggataaatctgataaaaataatgaaataataaacttaatgaaataattaaatgaaaatattggccgggtgcagtggctcacgcctgtaatcccagcactttgggaggccgaggcgggcagatcacttgaggttaggagttcaagaccagcctggcccacgtggcgaaaccccatctctactaaaaatacaacaattagctgggcatggtggtggccatctgtaattccagctactcgggaggctgaggcaggagaatcacttgaactgaggagacagaggttgcagtgagctgagattatgccattgtactccagcctgggtgacagaaccctgtctcaaaagagaaaaaaaaaaaaaagaaaagaaaatataggaccttttacactgaaaattataaaacattgccaagagaagttaaagaagacctaaataagtggagatataccatctgcatgatttgaaagacccaatattgttaagctgtccagtcttccccaaataatctaaagattgtgtcttccccaaaatctcagcaggact

SEQ ID NO: 181168 - DNA, 508 bp, Homo sapiens
agcatgttaaaatatgtggtctgaagttccctatcactctcgatttgcccaccagccgggtctgcggtgcccgtgcaaacgctgcagctaggatataggggggaggaggggcgggagaatgacaaagttctaaatgcagcagtctgagccctggaatatctttgctttcagcacataaactttccagtcctggctgcctagccattttattcctgcattcacatttcgactcttcaaaatcatatcttgcagtatcgcaggggccagtacattgccccagagcgcaccaaacctggtataaacccagaaagggaaacaaaaatggatgtgtgctcaggaaaaagggggaaaaaaaccgtgtccagaaaatgtccggccgcacacatttcctggcgaacatttggaatctatagctttaggaaaaaccgatctgggacgcgctagtccccaggaactgatgcccccaccctcgggggattgccggcttctccgcaccctggggcggccg

SEQ ID NO: 181169 - DNA, 850 bp, Homo sapiens
agacaagaagcctcagaatgacagtaaagagtcataggtttgaacttacccttctgcagatcccggacaagatcccagaaatgacacaggattccttcagtgccactttgtcaggcaaaaatccctgtggccactgtgacctctgtccagggcttctcttggacccactgggctcactctgcccgcttggcccagcaggctgtgctcagctcacacccacttggatcctgtgcccaccacagctccacacttagcccgtggctgagccaggcatgctgcgagtggcttccacattgggtgccagcatgtagaagaggagaacgtggtggcatccaaaaactcagaaatgtcagcaattgcagcaccccaaggagtgttatagcttttgcttggggagtcccattatctgggccctcagaagtgtcacggctcttcactcctgtagctctgcaagtgggagcatgttacgagctcttttatttctgccactcacagcttggtgaacagggatgtgttacagctctcttgttcccacagtccagttcttgtcccatgactaagaggaatgaggtatgtggacaatggagagcaagtaaggcagaatagaagtttattgagtcaaagaggaaaagctctcaactgcaaaaggggaccaaaagtgggtagccgtctgtgaggctgattgcagggtttttatatgtttggaatgaggaggtgtaggctataggtagccttggaaaagggaatattcgatcggttaaaaagcattattcagaaagaaccaatcagtaaagagtgggcaaacaggaatagaagttttcactctggtcatggactctattcagaactg

SEQ ID NO: 181170 - DNA, 269 bp, Homo sapiens
ccagcgtggatgctgaggcccaggaggtgctgagagtgagtgagggctgctagcatgttgtcacctttcactaagacatggtggttgtggtgaacaatgctgctaagatatggttgtacaaatgtctcttggagtcctggttttcagttcttcagggtgtagaaccacaagtaaagttgcggggtcatagagtaattctgtgtttaattttgtgtgtgtgtttagttttttgagaaactgacatactgtttttcacaccattttatatt

SEQ ID NO: 181171 - DNA, 294 bp, Homo sapiens
agaagcttttcctagagtaatggaaatattctcaatgtggttttggatggtggctccgcagggtctgcagtggacacactcgctgacctcatgcaatccggcgactctgctgcagatgctgggactcgtgggcccccaccgtcgggggagccggtccccataaactctgccgtcgcgggggccggtccccgtaaactccaccgtcgcgggagccagtgtctgtaaactccaccatcgcgggggccggtccccgtaaactccaccgtcgcgggggccggtgtccgtaaactccac

SEQ ID NO: 181172 - DNA, 554 bp, Homo sapiens
taatcagacctgggaagacagacacactatgcagagatctcaagtgatggcataagtccatcatgctacggcaaggtcttctgacctcagcattgttcacatttggggccaagtaattctccactgtggtagtgggggtggcgtcctatgcattggaggatattgagcggcatccctaggctccactcacgagctgccagtagcatccctcccacaagttgtggcaattaaaaatgtcctccaggccaggcaaggtggcacatgcctgtagtcctagctacttgggaggctgaggcaggagaatcacttgaacctgggaggcagaggttgcagtgagccgagatcacaccactgcactccagcctgggccatagaccaagactccatttcaaaaaaaaagaaaagaaataccatgtcaggcaaaaaggcattcctttgtttatttctttagcgaacatgtactgaatactcacagtgagtaagggaaagtccttaccttgatggatttttgcgcataagtaaatcgacagatattgtaaggtcaggttgtggtc

SEQ ID NO: 181173 - DNA, 757 bp, Homo sapiens
gaaggaatgtaaaagtagctagggcttatcgtggtatcatagcattatagggtatgagacctttggggaaactgaggctcacaaaggctgataactttacctagagtcagtgactgctaatggcagactcctagcgtctgtacttttccacacttacccgttcatatgaaatagtctgggaaggtctcttttaaaatgtatcgtgacctctcctataaacctcaaggttacatatgttaaagaaatgtagtcggctttcctcatgtgccgaattctgaatcaagcttacccaaacccccaaatcatttccacagagcagaggaaaaaaacaaaacaaaacaaaacaaaacaggcaaatgtgaatcatgggaacctattataatgatatatagcttgtcataacacattataatattacagcaaatgtatttaactcactgaacgttctcagggggctcttagctccctttaaaagtgttctccaaatctctgcagcaagatggagctgcctagtccacctcacttttgaccaaaccaccgttacgagaatacctattgaaaacccttacactgttgctgtttccctgggcttaaaagtatgtttggttttgtcagtacctggaaacaggaagttgagatttgaggagaaatctttggcagttgtgcactaagcttgcgggagttaggagtctgttgccacggaaaccacactgctgcctcatttattaatggaggcttggtgaacttccggagatac

SEQ ID NO: 181174 - DNA, 249 bp, Homo sapiens
tcggtcctgcaagcgtagtacccaataacacaatttttggaaaaacaacaaaatctatctagtagatatggacatgctggaccagcctgacaaggctgcaccaccagcactgcctgtggtctcatccttgggcaagacctgctaggctaccaggacagggttgactgtagatagagacaattgagaacttcccagatgccaggactacagtctgaactgccttgggtactacgctttggcagtcctttt

SEQ ID NO: 181175 - DNA, 270 bp, Homo sapiens
ccctgaggattcccaggtcttttcccctcaaataaaaaccaaaagaaaagacctaatcttaaaactactatgtaaggcttcaagggctctaatctgcacccagtacctgggacacttagggcaagtacactgataataaaacaaaatttaaattgaataccatgctcatcaataatgaatattcaccatcaacttatgattccaactacatgtgtgctacattcagaggtagccaaagtaaattttaaattctgagggttttgttttccg

SEQ ID NO: 181176 - DNA, 334 bp, Homo sapiens
atttccatttgaggatgcttatcctatcctcaccgcaatgatggttggaaattgtgtctctgcattgaactgcacctaagcagtaagcagaagagctgtactccagatacttgtgtcaggggatataacggaactctctgcctctatcaaagctcagaggaggattgcctgagggaatagctgtacctccattcatttagtacatccatttcgaagtctatccttgggttatccagcttagtgagacctataaatctgtaccatatcatatcaaccgccacttattaccctttactgaattacactttgatatttctactagtggcctatgtat

SEQ ID NO: 181177 - DNA, 721 bp, Homo sapiens
tattcaatttccaaaccaaatttcaagagccccctcgtcttcctccccttcccccgttacctctatgaactgaactctgcatttgttacctaatgcaagtctgttaaaatgggccattcgtcaccagggttaagtttgccagtggtaaatgtcgttcctgtaggttactccacagacagaacataattagtactgaggtcctgagagtggctgttagtatacatagattcagggataaaacttgttcgtgttttcagggtttctgtaggattattgcttcacaactggttgacagatggtggggttatgcattgaaattcaattctaaaaatgctgtccctttctttgttattcttttatatgacatctttggtagactgtgttttcatctgaaacatggcgttttaaaaaatgaaattgggcatgttcctttcggcagaattgtgcttaatagttggtgaggtttctatgggcgatgtggaaaacctacagcggcacagaaacgtatttactgttttcatgaggctgagactaaaagaaaggtagttaaacagaattctgcatctgtgagccatacttccttatgttttaatgtcagtccactcactttttttgcacagaataaatgacaagaaactgcacatggtcctggttttgctttgcatcattatttatggacatttagagattaagtagtgaaatcttcaacctccctgtggtt

SEQ ID NO: 181178 - DNA, 196 bp, Homo sapiens
cattctacccgaacaacaaataaaaggctgaagagactaaaattaaccactcttttagatccacaggagagtgaggtcacaggcaagctgcctcccccagttgtacagacagacaggcaaatacaggaagtcctgacttaactggagcaggctcagtagtggaaaggactgcaggaacaagtgttggggtagaaaa

SEQ ID NO: 181179 - DNA, 363 bp, Homo sapiens
caaggtctcacagctgaggtaaagctcacatgcatcacatctccttctcatggtatctggatgcccataaaatagagtctaaactcttgattgtgatgtaaaggctctcaatatgatccagtcctaccattccatccacttgacctccagtgaccaccattgcacttatgcctgagtgccattgaaattgctgttgcttctgtctggaataccttctccaacccttgtatgccctcataatttctctctgtttgcttcttcaaagctcagatcaaatatcacttcttttgagaaaaagataccactgcgtcatttcaaccgttcttgccaggtgaaattaatgtaattgactgaatgattgtg

SEQ ID NO: 181180 - DNA, 136 bp, Homo sapiens
agaggagaccgggggtgaaggaggtggggaggaggtgaaggaggtggggcaggtggctctgctgtgagaggaggaggtgagcaacccccttgaaggtttctttctcaaaatgtggacctctggcatcctggtatgt

SEQ ID NO: 181181 - DNA, 634 bp, Homo sapiens
ggcgactctagagttcccctcgaattcgacgtttcccctaatatttttaatgagtagaccttaaatcttaccttataacttaagattaatatatagcctcttattgctgacatgttttgtccatatgtgtatgtatattgtccttttaccaatacatctcaattggtgataatgatttttgtgtcaataaagataattactgttgtatgttttccaatataaaggaaaaacaaggagcctataataataattcaagaaaactcaattaactatttcgtgcatacctggtttctgtacccaggactccaaagtcttatgtgaagaagatgtcgaggttgggtgtggtggctcaaacctgtaatcccagcactttgggaggccgaggtgggtggatcacgaggtcaggagttcgagaccagcctggccaacatagtgaaaccccatctctactaaaaatacaaaacttagctgggcatggtggcgggtgcctgtagacccagctactgaggaggctgaggcaggagaatcacttgaacctagtaggtggggttgcagtgagccattgcactccagcatcggtgacagagcaagactccatctcaaaaaaaaaaaaaagaagaagaagatgtccaag

SEQ ID NO: 181182 - DNA, 614 bp, Homo sapiens
gacctcatgatctgcctgcctaccttggcctcccaaagtgctgggattacaggcgtgagccaccgcgcctggcctaatttttatatttttagtagagatggggtttcaccatgttgttcaggctggtctcgaactcccgacttcaggtgatccgcccgcctcggcctcccaaagtgctgggattacaggcgtgagcccctcactgcgcctggtccaaagtaggtacattttcaagaaaagttacataaaccaggcgcggtggctcacgtctgtaatcccagcactttgggaggccgaggcgggcggattgcgaagtcaggagatcaagaccacagtgaaaccccgtctctactaaaaatacaaaaaattatccaggcgcggtggcgggaggctgtagtcccagctactcgggaggctgaggcgggagaatggcgtgaacccaggaggcggagcttgcagtgagctgagatcatgccactgcactccagcctgggcgacagagggagactccgtctcaaaaaaaaataaataaatagaaaagttacataaaaagaaaaggaaggtattttcattaatatttaattaacaagaaaatgcagttaaccataactttg

SEQ ID NO: 181183 - DNA, 597 bp, Homo sapiens
cagtgcagcctcgtgttcaagtgatcgtcccacctcagcccctgaagtagctgggactacatgtgcgcaccaccatgaccggcttgttttttgtagagacagggtttcatggcattgccctggctagtctttaacttctgggctcaaatgatctgctctccttggcctcccaaagtgctgggattacagacgtaagccactatgctgggccaccaagatactatttatttccctgaatatgacgtggactgttcctgtaggctggtcccttcacctcaggaccctctttgctggtattgtttggggcttctgcgcctgtatatggggatgggacctgaccctgctgatctggccagcactgccagggtttcctgttgcccatctctcggtaaaacatcccttataaacctttgcaaggaaaaacctctgttttcttccctccatcccatttttccttaatgtgctaccctcgtctgtattcataggaactttatttaacacttgagaactgagagtaattgacatttctttcttggctgtccttcattctgtgcacccagacctattgctttttctaccacattctttttctctttt

SEQ ID NO: 181184 - DNA, 586 bp, Homo sapiens
gattaagggatttattatagaaattggtccttcctcaaatagtagaggagctggcggaagtaaaggtcttgaaggaaagtgagaggattagagaaagtttcaccagaagttcttgcgtagggttgggcaggtcagaactgcaggatgctgatgagggaccatagcagggaacggatgaaacattccaaaagctgctgctgcctctgtgtctgtggagttccaaaccctgtggtctgcagccatgtgtctggtgctgggtggagcccttgctgctcaacagggccgcttgttaggaagaaacagggatcagagcagaagaaagcaaagacaagctggaccccattgggcacctgccgttgtccatcatggtgtttccatcaaccttatgagagtggtggcctgttttcaggttcactttccaagtctcattaagctccccatatggctagccgtaccccaggaccatagcgggaagggtattccattaaatgagagttcctggcttaccaagttgacagttgtatgattcagtgtactctacaaataaggacaacatccttaggactatactgccgtgagccgctgg

SEQ ID NO: 181185 - DNA, 667 bp, Homo sapiens
attgtgatccgctatcactagctctgcgacgtttctccatctctccccctcttcttgggcatccctgtaccctgagagacaaaaatgttgaagattagaccaactaataaccctacagtggcccctaattgttcaagtgaaattaagagtcaaaattcttcaaaattaggaatgtcatcattaatgaggaaggcatgttgaaagccccaagacaggctgaaaactagatctcttgtgtcaaacagccaaaatatgaaggcaaagttttagagggaaattaaaagtgctactccagtgaatacacaaatgataagaaagtgaaacagttttattgatgatagggatagagttgagtggtctggataaaagatcaaaccaccccccaatattcccttaagccaaagcataatccagagcaaggccctgactctcttcaattctctgaagactgaaagaggcgagggaggtgcagaagaaaagttggaagctagcagaagtagggtaatgaggtttaagaagcagtcgtcggcacatatttctgtgtattcaaccctataaagtgaatacgtatttagcactttgtaatatataaaactatggctattacaatatgcggaacacatgcaaaatataaccgtactctattttaacttcataagagagatgc

SEQ ID NO: 181186 - DNA, 215 bp, Homo sapiens
tatagtatctacacatgttaaattattttaatttgacattttatttttgcaatgaaaatttatggtctaccacattcatgcatttcctaatctgatcaagaagttaagttccaactattaactcatggaataattaacttggaaaaagctcatcaaactgtaagcaatggttgattctaattctttcttcactttcaaaagcactggcatgtcag

SEQ ID NO: 181187 - DNA, 428 bp, Homo sapiens
gataaataatcccaaagatgaagcagggagggaaaaagaaaatcaacacagaagcccagatcctcccgcagcagctgtagagaaattaacgttgtcagttactgaacaaaggcaagacccactcacaagcctggttaaacaatacagaggaaaatgacaaaacgtgattcccacgaatcaacacgctcctgtctgggcaaacgagctttgagaatccctttttggatcccaaaaaggagaaggcaaagttacctgtcagcttaatggcctgtttccaaaattacactcttatttttctgtgggtggtgggagttaaaaaaaaggaagccctgttccaaccacaaaagcaggatcgcgggtatcgtagcagatggaacggtagaagccacctacgctgggtgagcccccggatgatccctgccaccact

SEQ ID NO: 181188 - DNA, 377 bp, Homo sapiens
ctggaatcccatactctactgactggaatgcaaatggcaaagacattttgaaaaacaccatgggactgtaggaagtcaagcattcgcttcccatacaacaacacagcaaaccctctcctaacttattcaagagaaacaaaaacaaaagacctgtactcaaatgttcagtagctttgctcataacagccaaaaactggaaataactcaaatgcctaccaactgggtaaactggatgtaataagtactcacaaagtgatctcagttctaaaggtatttttaaaaatcacttctgaacaagattaatgaagacttcatagataaaaataacacctgaggctaggtgccgtagctcataactgtaatcccagcactttggg

SEQ ID NO: 181189 - DNA, 612 bp, Homo sapiens
  misc_feature (557)..(557): n is a, c, g, or t
  misc_feature (564)..(564): n is a, c, g, or t
  misc_feature (590)..(590): n is a, c, g, or t
agagctccttgacattatcattattataattattactgttactgttaaatattttactgggaataggaaaatctaagcaatttttgaaggctttactgagtgagaaaaaaatacttattctttctccatagttctatacattttaaattttaatattctttagttgattattgctaagaccttgaaacacccttttccccttcaaatctctgttaatcttcaagttaaaattttctgtttatatgcattcttgaaagtatatgtattcacttcctattacagtatcaattaccacaaatttagtggcctaacacaaaagaaattcttatcttacagttctggaggtcagaaatccaaaatcaatctcaatgggttaaaatcaaggtgtcagcaggactgttacccttctggaggctctagggaagaagtctgttttgaaaattcctttctgtctcttcttcaggctgcccatattccttggctcctggctctgtatcacttcaacatctaacatcatcacatctccttttctgactctctttttttttttggcaccncgatccnttccttcctttaaagaaacatttttncctttaccccagataaatcttg

SEQ ID NO: 181190 - DNA, 162 bp, Homo sapiens
ttaacttcttatatgtactaatgaaaacctaaaataaggatatttcacttaaccagagaggccagaaaagtgatatttgaactgagttttgaagaattactggaggttaaggaggaagaaagtgtgttttaggcatagaaaacaacattttcgaaaagttcg

SEQ ID NO: 181191 - DNA, 711 bp, Homo sapiens
gccatttcggtggtgcctgttcttaatcctttaataaattattttgaatgattttttaaaaggcagtgtgattgtgaggtgagtttagtacaaattaaaaaatgtcacatcagttgcaaacagacagcacataattatgagctaaacactgtttcagaaacagtagtgacaataaataggattcggtataattagtcctcctgggacagatctcttcctctgttctttgccatatattttaataatgagattagccatctaatgccaatataaccagactgtagtattaatacacagaaaaattattgctagtaacagaagatttaaagacatgagggtgatccggattatatgcctgcaggttaaaaaaaaaaaatgtttcttaaactctctttatcaatatccttttcgtgagccactgaattcttttgtttttctgatcatatgaataacccgtcttaagtatgaatattgtgacaatagtaatagcaattactttaagagaatatgtttctatagagataacagaggggtttttccctaccattcctgtatgaaggtttctgtgtttttaattaaaattttaagaaattcatctttgtcttagcataataaaataaacctcactagacaatcaggacaccttgttattcttagatacattattatagctcaagaaataacaaatgttaagcctggaggatttgtatt

SEQ ID NO: 181192 - DNA, 454 bp, Homo sapiens
gtatgtgttggcatgtgtatgtgtgtacacgtgggttgggagaggcagaaaccaaagggaagacagggtttccagagaggcagcagcagccctggcttctccccttgagtgtccaggctgctggaacaaatattccattacctactgtgtgttaagcactgctcctgtccttgaactcacaggaagacaaaaacaagacagttaggttcaagcaatatttccaggtgccagcattgttctaggcactggggatacaaaaagacacattccttgccctccaccaaggtcagacacgacacacccctggagtcggtggcacttcagtgagtagagccctgtacagggcacccaggaagagctgtgctcaagaccagaaatcgtggagaaaggcatagttgaccctgtcctgggcagcaaaccctttgagaggggccacatcccctaccctgccctg

SEQ ID NO: 181193 - DNA, 134 bp, Homo sapiens
agaagtctttcaaaaagaagatgtatatgaaaattgtatatgtacatgtacacacatagattcccaagagaggatctgcaaagatacacaccaaattgttaaccatagttactgctggtgtgagggaagttcag

SEQ ID NO: 181194 - DNA, 260 bp, Homo sapiens
tgggagtttgcaaggggaggggacattgcaggcaggtggaacagcatgctgagttctgggggctagtgatagcaaaacagagacagaaggtaaaagaaggtatgggtgaggcatgctcagaagctttgactaggtctgcaagcagttgaagggtttaaagtagggaagtgacatgatcagatttatgtttaattttttttccaactctttatttcataaaatagagtaagtgttcctaagtttaggtttagaagttgata

SEQ ID NO: 181195 - DNA, 675 bp, Homo sapiens
cgtccgccgttggggcccccagcccgcgcgcgtgaagcagctagccgaccaagccccggaaggcgagtgccggagggggcgggacagctcctccggggccagcgggcaccaggcttgggggctgaggcccagcggcccgagaccaactgggctgaccgaggccgcctccccgccagccctggggtccactgcccggggagcagctcccttccgaggtcagactcgggcttcatcctctcttgccgcgcgccgagcggttttcaactctcactgctagaattcctccaaccacccaggatagcaggaccgagatacatggccacccatgacccggagcgtccacttccagggacaggcagtggtgattggcttcggttgtcatctgtgccatctgtccatggttcgagaagctgctgttcacgttttggggaggatcatggtttgagggctcccgtggtagaatttggggagctctcataggcagaaggctgagaaaagttggtgctgtgggaagtcaactggcagccgatggagtcgggacccgggaggaatggaaagggaacccagataggaagctactgcagtaggctcagagaggtgatgacggcagggctaagacagcggccttgggcggtgactgggaagaacgttgaacaccgtgtttgggctgaagaa

SEQ ID NO: 181196 - DNA, 332 bp, Homo sapiens
ccactgttgtgctttcttggctgtgattaaggtaggtgttactatgtgtaagagagtcacgtatagttttatgatgttatgtatgcttaattatgtggtttataaattaagttttgtaattctgtttggaaatcactaaacagtttttaaagttcagttcaaaaaaatttctatgtccgctaacgaaattgtctatcttgtttttctatgccgagcttttgttttctgtggctaaaaacatgtggaagaaaatgttatattccatgcttgggaagatgccatgttttagtcgacctgaaaaataaaacatatgtctagatggttatgtgtcc

SEQ ID NO: 181197 - DNA, 350 bp, Homo sapiens
agggagtaagttctatcaagagaaaagtccaaaaagagtcaagattatagagggtaaaaaaaaaagaaaagaaaaaaaaagaaagtaaataagaagaaaaaaatgaaaaggcaggggagatagaagaaaaatgaaaagaaaaagagaaaaaaaaaaacagaaagggaagtgcaaaataaagataagacttgctaccaacagtttctctgatggaatgggtactcattccatcatggctatggctacagcaggaatctagataaacattttctatttcacatgactgaatttgaaaaacaacagcatatacatacatcagagactttcagacaatagagcaactacccccg

SEQ ID NO: 181198 - DNA, 778 bp, Homo sapiens
aacgtgaccagttttcccacgtgagacgggtctaggtgtagtcttaaatctatgtttacattgccaggatatacaaatccctcggagaaagaacaggagtgctttaagatttttcagtataaattttactgttagttagcatatagtttgtcaaaatattttaatgaaatcagtgactttttaaattgaatataaaagtgtcaaaataaatgtaaatatgacgtagcttgcatagtgagagacagacctctaagaagcagtaaaatttaataatagcaattttcaccagtgtttttcatgccctgtggttatctgtagcatatatttagagtatatgtatgtgggcaagggttggggccaggaattaaagacctacacaacaaaatacatgatactgaatttggagaactggtcacaacatgccaaagaaaatagaagagaactaggaactggacattgtatttcataactgaaatgatgagaaagaactggaaaattgccagccttttaaccttttagaaatagctatgtgtgtagttagtacaggagatcattttcttagagcagtttgttctaaattcaaatatgtcagcagacttagtggaattcaaagtattttagaaataaaacatctaatgttggaaataagagagcacaatatcataaaaacagaggtagtttaacaaagtttttagattgtccaagagtttatcaaacccattatctattatggtaaagtctcgctgagtaggatgtttttaacttaggctactccaaa

SEQ ID NO: 181199 - DNA, 384 bp, Homo sapiens
  misc_feature (181)..(181): n is a, c, g, or t
aattatctcatccatttaatagcaggttgaattaagtgtttcctgacctcttacctgtctttcccaatgactctgattttcttgggaagggttttgagcagagagatgacatgttggtagtggtcttacgagtttcactttgacagaatgtgtaggatgtgttggaagggtgctacacccnttttaaacaaccagatctcctgagaactcactatcatgagaacagcaagggggaaatccgcccgatgatccagtcgcctgccaccaggcccttcctctaacattgtggattacaatttgacatgagatttgggcaaggacataaatccaaaccatatcaaaggggataaaccagatgaatgcagagaaaccgtcgaattcgag

SEQ ID NO: 181200 - DNA, 598 bp, Homo sapiens
  misc_feature (395)..(395): n is a, c, g, or t
aattatctcatccatttaatagcaggttgaattaagtgtttcctgacctcttacctgtctttcccaatgactctgattttcttgggaagggttttgagcagagagatgacatgttggtagtggtcttacgagtttcactttgacagaatgtgtaggatgtgttggaagggtgtattagtccattcttgcattgctataaagaactaactgagatggggtaatttataaagaaacgaaatttaattggcttacagttctgcaggccgtacaggaaacatggctggggaggcctcaggaaacttacagtcatggtggaaggaaaacaaaggggaagcaggcacgtcctacatggctggcgccaggaggaagagggcgaagcgggggtgctacacccnttttaaacaaccagatctcctgagaactcactatcatgagaacagcaagggggaaatccgcccgatgatccagtcgcctgccaccaggcccttcctctaacattgtggattacaatttgacatgagatttgggcaaggacataaatccaaaccatatcaaaggggataaaccagatgaatgcagagaaaccgtcgaattcgag

SEQ ID NO: 181201 - DNA, 263 bp, Homo sapiens
atagctgtaaatgaatatattataaaggaaataaaacttcaaatcaataacctaactttataccttaaggaactaaaagagaggagtaaactctgtgcaaagctagcagggcagaagtaataaataatacgagcaaagataattagagaataaaacacaataaggaaaactgataaccaaagttgttttttcttaaagatcaacaaaatagacaaacttttaaactagattaacttcaaaaaaaaaagagagtgagagaaaag

SEQ ID NO: 181202 - DNA, 362 bp, Homo sapiens
ccctcaatttgctacaatttttaactatcatttttgccaactttattttgaaataattttaccctcatttagaagttgcaaaaatagtacaaaaatttattctgtaacttcggtagcttcccctacagataacatctttggaaactatagtaaaatgagcaaaaccagtattacataattcacacttgcacaatactattaactaaactcagaccttattggagttttgcaagtttttacatgcactcatgttttttgcattgtggggaggtgtacagtcctgtggaattttgtcatacatattgatttgtgaaaccactatggtaatcaggacacacaactgtctgatcactccaaaaagc

SEQ ID NO: 181203 - DNA, 474 bp, Homo sapiens
gaagatcaggctccctgtctgcaaatgcctgagcagatatggtttgagggcccccaagaattaggacccatgtggagggtctagtcttccccaggccacactggaagaattgtcttgggccacacataaaatacactaacactaacaatagctgatgagctaaagaaaaaaaaaatatccaaaaaactcatgatgttttaagaaagtttacaaatttgtgttgtgccacattcaaagctgtgctgggccacatgcggcccacaggctgcaggttggataagcttggcctgagggatggcctggggtaggtttcagcttaatctaagccatggttctctttctcttgaccctttccccaactaactttttaactttttatagatttagaggaagttgcaaaaatagtagagttttgtgtaccttgacctagtttgccccaagggttacttgttacataactatagcacactatcc

SEQ ID NO: 181204 - DNA, 863 bp, Homo sapiens
  misc_feature (521)..(521): n is a, c, g, or t
gtggctagcagaagagaaagaaggtttaaaatgccaacagccagaaacccatctgtggaggaatctcccaatcctcagactgataagataataagtagagagttccattctcatacctcctggacacaggtggcagtgttcccactgtcaggagtatatttcatatataggacacacaattacaaaagcaccatataatgttttctttattgaaggaactagaatataattggattttcctgcaatccctgtgtttagaaggcacatatctgtaatcttactctcaacagcatgttctgcaatagatcatataaaaaagaaacctgtaagaagtcttcccaaattcttcaataattctaaaaatctgcacagtatttccaatgacaagttatgaattggaaataaacctttctttctttcagtaatgaaaggacaagttttgatcagccataccatgcgccactacacccagctaatttttgtgtttttttgtggaggcagggtttcaccatgttgcacangctggtcttgaactcttgggctcaagggatccacccacctcagactcccaaatactggggtaacagatataagccattatgcctagcctagagacccaacttttaaagaaccagctaggataccatctgaggtaagaaagtacaaggggtagagtgagcatttggattttattctgtccctaacgtaagggtatggttgaggcctcttactcctcagatcaagttggcaaactgttggatatctactcagtgccagccttgttcaggtcctgggaacccaatatcaatagatcagaacagaacactgtccttaaggaacactcaggttagtgtgggaaacac

SEQ ID NO: 181205 - DNA, 929 bp, Homo sapiens
gtaagatgtgacttgctcttccttgccttctgccatgattgtgaggcctccctagccatgtggaactgttattatatccgggaaaaatctaagcaagtcatcacattgctgatggatgaaccattgctgtgtaaagagagggaagtggcatgtcggactagacagcgtacctcccactctatattgttttctaaaagacaacttggttcaagtaactcactgacagcgtgcacttctgcccccacaccggatatttctgcttcagagaagaagtataagcttcctaagtttggaaggttacataataaaacccatggatcaaggagtgatttcaactttcaagtcttattactgaagaaatacatttcataaagctatatcttccatagatagtgattcctctgatggatctgagcaaagtaaattaaaaaccttctggaaaagattcaccactctagatgccattaagaacatttgtgattcatgggaggaagccaaaatttcaacattaacaggagtttgaaagaagtggattccaacccttatggatgactttgaggggttcaagacttcagtggaggaaggaactgcagatgtggcggaaatagcaagagaactagaattagaagtggagcctgaagatgtgactggattgctgcaatctcatgatcaaacttgaacagatgaggagatacttcttatggatgagcaaagaaaatggtttcttgagttgaaatctactcctgtgaagaagctgtgaacattgttgcaatgccaacaaagaattcagaatattacataaacttagtaaataaaccagtggcaggattagagaggattgactccaattttgaaagaagttctactgtgggtaaaatgctatcaaacagcatcacatgctacagataaatcttttgtgaaaggaagag

SEQ ID NO: 181206 - DNA, 930 bp, Homo sapiens
atttctaggaatttttacatattttggatatgagttctttgtcagatagacatattatagatattttctgccatcctacaagctacaaaaattctgtagcttgtcttttccatttctaatgttgtcttatgatgagtagaagtttgtcattttggatgtgagggcaatctggctggctaggcaggagtccttttccttcctcaccgctgtatgtgtgtctctcctaaagttggattcttggtcaaagaggatgacctttgctgatagaagaggatttttctttggtcaagggtataggagtagctgcactccctttttaggacctccaaacaagctctcaagatctatttgtaggagaacatggggtaaaaatagttttaagttggtaattttcatgaagttcaatctgtttttcttttatggtgatatagtttagctgtgtccccacccatatctcatcgtgaattccatgtcttgtgggagggactctgtgggaggaattgaatcatgggggcaggtcttttgtgtgctgttctcatgatagtgaataagtctcataagatctggtggttttataagggggagtttccctgcacaagctctctttctttgcctgccaccatccacgtaagatgtgacttgctcttccttgccttctgccatgattgtgaggcctccctagccatgtggaactgtaagtccattaaacctctttcttttgtaaattgccgagtctttgatatgtctttatcagcagtgtgaaagtggactaatacatatggttaatgccttttttaccttgtcagagaaacttgcctatcccaaggaatatgttctatgttttcttccagatatttatagttttaactaggtctgtgatccatctagaattagcttttgtgtatattgtgagatagagttcattcttat

SEQ ID NO: 181207 - DNA, 1466 bp, Homo sapiens
aagtggggaccggcctgggcccttgagcctggctggagtaggtggaatatcctggggagaggaagtttggtcgttgggcagcggccgactttcctctcaggaaattgatactttatcaacatagagattaattatttgtatttgggagcagcagaactggggaccaattacctgtcaagagttttataaacccgtgacataaactgttattccattgctttcatcctccatctcaccttggaacttgtattacttatggcgttcaggagacaagtgaaaaactttgtgaaaaattactcagatgctgaaataaaagtcagggaagcaacttctaacgacccttggggtccctctagttctctgatgttagatatcagtgacttgactttcaacacaatttctctctcagagattatgaatatgctgtggcacagactcaatgaccatgggaagaactggcgccacgtgtataaatcccttaccctaatggattatctcatcaagaatggatcaaagaaagttattcagcattgcagagaggggttctgtaaccttcaaacactaaaagattttcagcacatagatgaagctggaaaagaccaaggttattatatccgggaaaaatctaagcaagtcatcacattgctgatggatgaaccattgctgtgtaaagagagggaagtggcatgtcggactagacagcgtacctcccactctatattgttttctaaaagacaacttggttcaagtaactcactgacagcgtgcacttctgcccccacaccggatatttctgcttcagagaagaagtataagcttcctaagtttggaaggttacataataaaacccatggatcaaggagtgatttcaactttcaagtcttattactgaagaaatacatttcataaagctatatcttccatagatagtgattcctctgatggatctgagcaaagtaaattaaaaaccttctggaaaagattcaccactctagatgccattaagaacatttgtgattcatgggaggaagccaaaatttcaacattaacaggagtttgaaagaagtggattccaacccttatggatgactttgaggggttcaagacttcagtggaggaaggaactgcagatgtggcggaaatagcaagagaactagaattagaagtggagcctgaagatgtgactggattgctgcaatctcatgatcaaacttgaacagatgaggagatacttcttatggatgagcaaagaaaatggtttcttgagttgaaatctactcctgtgaagaagctgtgaacattgttgcaatgccaacaaagaattcagaatattacataaacttagtaaataaaccagtggcaggattagagaggattgactccaattttgaaagaagttctactgtgggtaaaatgctatcaaacagcatcacatgctacagataaatcttttgtgaaaggaagag

SEQ ID NO: 181208 - DNA, 281 bp, Homo sapiens
ccaacaccaattcctaaactttcttaaaacattatgagattttttaaaatttatttttattttttagcttatcagctatcagtagtgttagtgtattttatgtgtggcccaagacaattcttccacgtggcccagggaagccaaaagattggacatcccctgatctagaacaaaggctaatgagcaagaagtttacttggtagtgatcccattgtgctaaagtgagggatcaggggaattgaacaggaaatggcggtggtggtgggtggggtatactgtga

SEQ ID NO: 181209 - DNA, 210 bp, Homo sapiens
ctgtcgggcagagcgaggtgtgcagtggcggtgccaccggtggcctcccacttggcttggacagctggtcgcccacatcttcaggcaggcctgggcgttgcagcagctctgggcctctgtcctccactttccactgatgcagccatgagcacgtgcatggcacacctgcctgatctgagcacacctgtgcagcgccttccatgagatccc

SEQ ID NO: 181210 - DNA, 557 bp, Homo sapiens
tgttggcttttgggtcgaatccacacttcttatgatatggcagaggcaatgatacccagtgtttcacgtgttcccttatacttctcagctgacttgacatcacatcaggctatgtgactggttcaggctaatgggctgtgagtgggagtgacaagtgtcacttctgaaacgaggcatttagttggtgatacaactcactctttttcatgcgtccctactgtggaaactaggaagcccacatgttccagatgatgcagctaccagatggcccagccctattagtttgggttcctgagtgactatgtgagcagagcccctcatcactctgcactgaacatggaatttaggtgaggaataacattttctttgttaagccactgagactttggtgccgtttattgccacggcataacctagcctatcctgactatacaggatggtttatgaagtcctctgtgatctgtcttccatttacttccctggcttcattttttgttcctctttcactctctaagctccagctctggtacttcctttttcccctggctacaccacat

SEQ ID NO: 181211 - DNA, 137 bp, Homo sapiens
caagaaattaaaacaaaggtttaaaaaatcacagaagagtaggggtcagtttgtttacctagcacagacagatggttgtatttctgtagttagaggagcaatgcagaaagacttccaaagttccagatgaggcacat

SEQ ID NO: 181212 - DNA, 122 bp, Homo sapiens
tctgtggctttaatactagccatcctgatgggtgtgaggtggtaccccactgtggttttgtgtttcctgtctttcgttaatacaattaatactgcaatgaggctgggtgcggtggcttgcat

SEQ ID NO: 181213 - DNA, 248 bp, Homo sapiens
cccctttttaaactggagttaaataactaataactttttctatatacataattttaaacttatactctgttattgtttgttttctttaagatagggtctcactctgtcactcaggctggagtgcagtagcataatcatagctcactgcaacctccgcccctaggctcaagctgtcctcacacctcaacttccctagtagctgggactacaggcatgtgccaccatgcccagcttatattttgtacttt

SEQ ID NO: 181214 - DNA, 408 bp, Homo sapiens
aggcagaagaatcacttgaacctgggaggcagaggttgcagtgagccaagattgcaccactgcattccagcctgggtgacagagctagctagactccatctcaaaaaaaagatgaaggaaatatatgcaaaatgattggactggatttaacaaaaaagcatgagacaagtaccaatctacatttaagtgcatatatgtacgtatgcactataaagatccagatggtaaatatgagcatggagaaagacagaagacgacacacaacaagattatgcactctgatcatttgaggctgacaaggggttttcctaaagaaaatgagagagacgggctgagtgcggtagctcacgcctgtaatcccagaactttgggaggaccaggcgggtggatcacctgagttgaggagtt

SEQ ID NO: 181215 - DNA, 294 bp, Homo sapiens
attttccctgagaacacagggattttgccctgctgtctactaagtgtccagtgccttgttgagaagtctggtgttggtctgattctcaaccatttgtggatgcctatcttactctttctggaagcatctaggattttctgtttatgcctgctatagtgaaatttcataaacatatatctgagggtagagtttttttgtgtgtttgtttgttttttaactgtttttagtgaggtccctttattggaccttttcagctgaagacagctgctacctttgaaagcttctggtaaattt

SEQ ID NO: 181216 - DNA, 585 bp, Homo sapiens
gtcctaattaggagcccccacctccccttaactgtgaggtctgtagggctcatatagctgcacgtgctgcagaagaggaactgcgacaaatgggactgagcttactggagagtgatgaggctctgcgagccatggggtgtcaacagagaaggagctggggattttctccagaagagaagctgggggagacgtggttgatctcctttagcagcagaagaaacacagtctgaggctgagggaccagacggatcagtgggtcccttgaaggcagagttggggcaggggcatcaaagatgacaggatttggctttagcaaggtcagcgcttcccccaggtgggatgatccatttactgattgattaattcagcaaacattcatctgtgaggtatgcactctatgtgaggccctgtgtctggaggaacaaacatcaaataggacagggttcctgttctcaagctgcttatagtctggaggttgcctgggaagtaatgagtggccctgcactcattacctgtgtagggccgctcattacctgggtgtaatgagtgtgaaagcagaggctggacaagcacgtgggagcgggg

SEQ ID NO: 181217 - DNA, 411 bp, Homo sapiens
gcatgtaccaccttgcccagctagtttctttgatttttgtagagacaaggtttccctatgttgcccgagctggtcccaactcctgggctcaagcgatcctcccgcctcagcctttcataagcgctgggattacaggcgtgagccaccatgcccagccaagcatatggttaagccatctacagtatttttcaagaccaagacttaaaaacaatttgcactgttcattttacatattaagtgttgaagattttttttgttaaatatcactacttctataaatcatgctttgtggattattctgcatcatacactgggatgtattggtgttcaccgtttatccagcaacattattccaacactgcttgagccctcaagagtgagccacttggccaggcacagtggctcatgcct

SEQ ID NO: 181218 - DNA, 333 bp, Homo sapiens
ctttgaatttgtttaccaactctcagattactggaatgagaggatcctcctcaaggccttacaatggaagttttagaactaaagcctggaagccctgtcttccacagtaggaaacaaacagatgaaatacagtggaccctcgaacagcatgtttgagctgcgtgtgtccacttatatgtgaatttttttcagtaaatttacactgagtggcctgcctttcctcccgcctcctccgcatcttccacctctgccaccctgagacagcaagaccatcccagctaatttttaagtttataaattagatagagttggggtgtgcgtctgctgtgccgg

SEQ ID NO: 181219 - DNA, 193 bp, Homo sapiens
acacccagccgggagatgtcacttctgggtaaagatgcgagatggaacacatacatctaccttagatctctatcattttaactccattaaaatgatatttaaggggattaagtaaaaaagacgcaaatccacaaagtcaagatcaggaggactcaacagcaatgaaattgtggatgctgggaagcacaagata

SEQ ID NO: 181220 - DNA, 336 bp, Homo sapiens
  misc_feature (38)..(38): n is a, c, g, or t
gaggtcgctctggattatcccgctgatccgcttagctnagtctcatgcaggttaatttctcaaattactaatgtttaataagtactaccatttcaaaagcacagtcattacaaaccactcgtaattgacatcttactacatacataaaacaacttccatacacagaaaattctgggagggatggaactggcaaccaaaatgagtgactgaggccacagtctcaaccaatcaaggtttattaagccagctttagggcccatccaggaaaaaccaacacatatgtaactgtttttccaaagagattttcaggaggtttcctatttatgtgtttcctta

SEQ ID NO: 181221 - DNA, 153 bp, Homo sapiens
ggagagttgagttttggatattccgatgggttgcaaaaaggtactgtgctttcctgggttctttcaaattgtaatcagccttttatgtgcctgtctgacccttgatgttaggattgtttgaactgatactttttgaacattttctcaagttta

SEQ ID NO: 181222 - DNA, 110 bp, Homo sapiens
gaacggaccgctagcactcttttcttcagacaaacaataactgcatttacagaacacttcctaggagccagtctcagcacaaatgcctgccatgtcccagcttgattcct

SEQ ID NO: 181223 - DNA, 813 bp, Homo sapiens
actgtcccacccagtctggaatcctgagacagactatagaatttcattaaaaatcttttaaagcagagttttgtgggggtttttttttttttctgttctcaggtatcatatcagtgtagcactattcacagatcggcacaaaggacaaggcgacttcttattattttcctcaaccatgtgaacactaaggttttcattctgctacctcttgggtttgtacttcatggatctcatctattcaataagcaatcaagcactttgcaatgggtccagggaaggttagtgtcactttgaccctggcccacttcccactggcaccatctagaacccctgctaaacttgtcaagaactgatactcacatagtaaaactagtgacttctgccctacatctctaagagcttttacatactccagcatggtttgagaatttgactttaaactcaccttttatccagcaggaactattactgaacctgcccctagctttaaaaaaaaaaagatcagctggccgcggtggctcacgcctgtaatcccagcactttgggaggctgaggtgggcggatcatgaggtcaggatttttgagaccagcctggccaacatggtgaaaccccatctctactaaaaatacaaaaaaataataataataactaggagtagtggcaggcacctatagtcccagctactcgggagactgaggcaggcaaatcacttgaacccaggaggcagaagttgcagtgagccaagattgtgccactgcactccagcctaagtgacagagtgagactccatctcaaaaaaaaaaaaaaaaaaa

SEQ ID NO: 181224 - DNA, 308 bp, Homo sapiens
gtttgggtaccctatcctgaaaggtgtagtatatagtttttcagaattggaatactaattatttttgtataaaataatcaataaataatggtttttctaaggtggttatttgtagattatatcttttatctgtctgtgtacttgggtcaaaagctagttgtgagtctcctcatcttaattcaagtaggcttaatatacgtgaccttgaatcttcacatcctgatggtttggatgtatccagttgaactacagctgctttatgccagtgttttgtaaataattttcctgattgtattgggtttcttttt

SEQ ID NO: 181225 - DNA, 272 bp, Homo sapiens
gatgtcactctgattcgtatggtaaggctaaccttgacacgtactcaagattggggctttgaaagtcagacctgtataaacaggcaatttttaatagcctatgcagatcaattattatccagaaatcttattcatataactaaactacttttgagagaatattctcatgagaacaaaacctctcaaatttgaaaacttcaagttattaatactgtgtttgcattattgatttatttttattatcttaatcacactaaatagtatttctcagt

SEQ ID NO: 181226 - DNA, 177 bp, Homo sapiens
ctgaaacattacactaaaaggttttttggcaacgggttgtaaattccttcaatgtaaattattgatattgcaataatgctgcataatgatgtagtcaaataagtcatgagtttggggaaagttaagctgaggtatgactatctttacaactgccccaatcctttactaaaaattatg

SEQ ID NO: 181227 - DNA, 1648 bp, Homo sapiens
ggatagacccttcagtggagcgggcctccactcccctgaactgcccagtcctcctagaagactaccagtccccaaagatgtatattccaagcaaagaaatttgtatgaattaaaccgtttatataaacacatccatcctgagttaagaaaaaacttagaaaaagattatatcagtgaagtttctgagattgtttctagtcaaatgaactcagggagttcagtctcagcagatgtgcaacaagcccggtatgttttgaaaacacaaatgacagttctcaaaaagatctgaactcagaaagagaatacttggaatgggatgaaattctgaagggagaggtgcagtccattagatggatcttgagaatcaacattggattccatcaacaatggtctcctgatgaaggtgatatttccaggggcattgctgatcaagaaatcattgctggtggtgatgtgaaatataccacatggatgtttgaaacccaacccatcgacacacttggggcttattcttctgacactgtagaaaatgcagagaaaattcctgagctagccagaggagatgtctgcacagctcggtggatgtttgaaacaaggccattggactcaatgaataaaatgcatcaaagtcaagaagaatcagcggtaactatcagtaaggacataactgggggggatgtcaagactgtgagatacatgtttgaaactcaacatctagatcaacttggacagcttcattcagtggatgaggttcatttactgcagcttaggtctgagctcaaagaaattaagggaaatgttaaaagaagtataaaatgtttcgaaactcaaccattatatgttattagagatggttcgggccaaatgctggaaattaaaactgttcacagagaagacgttgaaaagggagatgtaagaacagcacggtggatgtttgaaacacagccgttggacacaattaacaaagatatcacagaaattaaagttgtccgaggaatatccatggaagaaaatgtcaaaggtggggtgagtaaggcaaagtggttatttgaaacccaacctttggagaaaatcaaagagtcagaagaggtcatcattgaaaaggaaaaaataataggtacagatgtctccagaaagtgtggatgtttgaaacccagccattagacattctaaaagaagttcctgatgcagattctctacaacgtgaggagataataggtggtgatgtacaaactactaagcatctatttgaaacacttccaattgaagcattaaaagacagtcctgatataggaaagcttcaaaaaatcactgcctctgaagaagaaaaaggggatgttaggcatcaaaaatggatttttgaaacccaacctctggaagacattagaaaagataaaaaggagtacacacgaacagtgaaacttgaagaagttgacagaggagatgtgaagaattacacacatatctttgaatcaaacaatttaattaaatttgatgcatcacataaaatagaggtggaaggagttacaagaggtgctgtagagttaaataaatctctcttcgagacaacaccactgtatgccattcaagatccccttggaaaatatcatcaagtaaagacagtccagcaagaagaaatcgtaagagg

SEQ ID NO: 181228 - DNA, 2170 bp, Homo sapiens
ggcaattcatagcagccaggttggcacttcaagaagcagccaggaaatggcaagaaatgaacaagaagggtccaaagtacagaaaattgatgttcatggaacagaaatggtctctcatcttgaaaagcacaccgaggaagtaaaccaagcatctcagtttcatcaatatgttcaagaaactgtcattgatacacctgaggatgaagagattccaaaggtttcgactaagttgttaaaagagcagtttgaaaagtctgcccaggaaaagatcctttattctgacaaagagatgacaaccccagccaagcagattaagactgaaagtgaatatgaagagactttcaagccatcatcagttgtgagtacctcttccacttcttgcgtttcaaccagccagaggaaggaaacatcaactacaagatatagtgatcacagtgtcacttcctcaactctggcacaaattaatgctacttcttcaggaatgacagaagaatttcctcctcccccacctgacgtacttcaaacttcagtagatgtgacagcattttcccagtcccctgaactgcccagtcctcctagaagactaccagtccccaaagatgtatattccaagcaaagaaatttgtatgaattaaaccgtttatataaacacatccatcctgagttaagaaaaaacttagaaaaagattatatcagtgaagtttctgagattgtttctagtcaaatgaactcagggagttcagtctcagcagatgtgcaacaagcccggtatgttttgaaaacacaaatgacagttctcaaaaagatctgaactcagaaagagaatacttggaatgggatgaaattctgaagggagaggtgcagtccattagatggatcttgagaatcaacattggattccatcaacaatggtctcctgatgaaggtgatatttccaggggcattgctgatcaagaaatcattgctggtggtgatgtgaaatataccacatggatgtttgaaacccaacccatcgacacacttggggcttattcttctgacactgtagaaaatgcagagaaaattcctgagctagccagaggagatgtctgcacagctcggtggatgtttgaaacaaggccattggactcaatgaataaaatgcatcaaagtcaagaagaatcagcggtaactatcagtaaggacataactgggggggatgtcaagactgtgagatacatgtttgaaactcaacatctagatcaacttggacagcttcattcagtggatgaggttcatttactgcagcttaggtctgagctcaaagaaattaagggaaatgttaaaagaagtataaaatgtttcgaaactcaaccattatatgttattagagatggttcgggccaaatgctggaaattaaaactgttcacagagaagacgttgaaaagggagatgtaagaacagcacggtggatgtttgaaacacagccgttggacacaattaacaaagatatcacagaaattaaagttgtccgaggaatatccatggaagaaaatgtcaaaggtggggtgagtaaggcaaagtggttatttgaaacccaacctttggagaaaatcaaagagtcagaagaggtcatcattgaaaaggaaaaaataataggtacagatgtctccagaaagtgtggatgtttgaaacccagccattagacattctaaaagaagttcctgatgcagattctctacaacgtgaggagataataggtggtgatgtacaaactactaagcatctatttgaaacacttccaattgaagcattaaaagacagtcctgatataggaaagcttcaaaaaatcactgcctctgaagaagaaaaaggggatgttaggcatcaaaaatggatttttgaaacccaacctctggaagacattagaaaagataaaaaggagtacacacgaacagtgaaacttgaagaagttgacagaggagatgtgaagaattacacacatatctttgaatcaaacaatttaattaaatttgatgcatcacataaaatagaggtggaaggagttacaagaggtgctgtagagttaaataaatctctcttcgagacaacaccactgtatgccattcaagatccccttggaaaatatcatcaagtaaagacagtccagcaagaagaaatcgtaagagg

SEQ ID NO: 181229 - DNA, 1181 bp, Homo sapiens
ggacatacaagatggtggctgggtcatgttaattgggaaaaagaacagtccacaggaagaggttgagctaaagaagttgagacacagtttggaagatgtctgcacagctcggtggatgtttgaaacaaggccattggactcaatgaataaaatgcatcaaagtcaagaagaatcagcggtaactatcagtaaggacataactgggggggatgtcaagactgtgagatacatgtttgaaactcaacatctagatcaacttggacagcttcattcagtggatgaggttcatttactgcagcttaggtctgagctcaaagaaattaagggaaatgttaaaagaagtataaaatgtttcgaaactcaaccattatatgttattagagatggttcgggccaaatgctggaaattaaaactgttcacagagaagacgttgaaaagggagatgtaagaacagcacggtggatgtttgaaacacagccgttggacacaattaacaaagatatcacagaaattaaagttgtccgaggaatatccatggaagaaaatgtcaaaggtggggtgagtaaggcaaagtggttatttgaaacccaacctttggagaaaatcaaagagtcagaagaggtcatcattgaaaaggaaaaaataataggtacagatgtctccagaaagtgtggatgtttgaaacccagccattagacattctaaaagaagttcctgatgcagattctctacaacgtgaggagataataggtggtgatgtacaaactactaagcatctatttgaaacacttccaattgaagcattaaaagacagtcctgatataggaaagcttcaaaaaatcactgcctctgaagaagaaaaaggggatgttaggcatcaaaaatggatttttgaaacccaacctctggaagacattagaaaagataaaaaggagtacacacgaacagtgaaacttgaagaagttgacagaggagatgtgaagaattacacacatatctttgaatcaaacaatttaattaaatttgatgcatcacataaaatagaggtggaaggagttacaagaggtgctgtagagttaaataaatctctcttcgagacaacaccactgtatgccattcaagatccccttggaaaatatcatcaagtaaagacagtccagcaagaagaaatcgtaagagg

SEQ ID NO: 181230 - DNA, 344 bp, Homo sapiens
agatctttctatcagcacctaaggatatgactctgaaggctgtgtaatatgccatgtatagatgtggagtaattatttactcaaccttttctctaatttctggctgctttggtcctagacaggagctgttactgtctcccatgtgatctgctttttatccctatgctgacagtaatcaaccactttttaaataccccttataacgaacataacaactcatatttatggaacactttacagtttatgaggtggccacaatgttcaatccaacagtcctgtaaacttgcactgatgtccccattttgcaagtgagaaaaataagactctaagtgacttgttcaaga

SEQ ID NO: 181231 - DNA, 779 bp, Homo sapiens
caatccctcatgtcacttctatcaacatctccaacggcaagtaccatatctacacttagggttttccagtctctaaatctgactaaaatctccaaatactggctgagtaattctgcctgaatatgctatttccctttaaaaaccagcatattgaaaaccacattcattagcctctcccatcccttacacgtttatacctcataacttttctttaatggtactacccagtcaaagcaagaccaaaaaatcaggctgcctctgacaccaatgctttctacacggagccatatctaagctttgtggattctaatttttcctttgcaaatagtttcttcatttggtattcatagacaccaaaatccactggtgctcaagtccttgatataaaatggtgtagtatttgcatataacctatacacatcctcccaaacactttaagtcatctctagattatagtacctaatacaggatcaatgcaatgtaaatggttgttatactgcgggtcggggttgtattttttttgttgttgtattgttattttttattgtttttctttctttttctggaggcagggtctcactatgttgcccaggctggtcttcaactcctgaccttgtgatccatctgcctcggcctcccaaagtgctgggtttacaggcgtgaaccactgcacccggcctgaatcatggttttttgaaaccattggcatctgaacctgtagctctctctggtagtgtcgtgtggttttaaatgtcatgtgagctgagttactgacctca

SEQ ID NO: 181232 - DNA, 714 bp, Homo sapiens
ttggaaaactcaaatagtaggcgtggctttgtttgaaaaacattaagggcaggaaataatgtttttgctcatagatattcaaaagtcatagtcataaaaccagcaaagagaaaaagaagaatgtttaacatattatgatgtcattggagaaggttcattatactttatgcttctgcataaagtatagttttccttccttttcaaactttgagaaaatacactattctcttacaaaacataatacatacccaatagttcctccagttaaataataataaaataaaatactatgttcattctttcatactcatggatatgctgacttaactttgtaaaaagatgccaaagcttcgtaaattaatctaaatcaaattataatctcaatcttaatcaaaattacaacaggacattttggggagggaggaaactagataaactaaatctaaatatttaaaaaaaagatccacagatagttatatcaattttgaaaaaaaaaagcaaagacagggaatccatcctgccatatcttaagaaatactagaaaggaacagtaataaacatgatatggtacaggatctcatctagggtgtgtctggaaatgcatgggccatcatggatgtcacaatgacagggcaacactactgacattgagtggacaggcccagcagtgctaaacatacctactctactaactgtgccccctttaagaaactt

SEQ ID NO: 181233 - DNA, 359 bp, Homo sapiens
caccatgcccagctaatttttgtatttttagtagagatggggttccaccacgttggtcaggctggtcttgaactcctgacatcatgatccgcctgcctcagcagcctcccaaagtgctgagattacaggtctgaaccactgcacctggcccaaagtctttatagttaactgcaaggtcctatgtggttataatctccttctcctcatctttacctctcttattctatgtactccaaccacaccatttcccctggattcctcaaacatatgccatgctcctgtctttatattaactggtctttcttcttggaacacctctcccccagatagccatatggttaactccattacctcctttg

SEQ ID NO: 181234 - DNA, 636 bp, Homo sapiens
aatttttgtatttttagtagagacagggtttcaccatggtggccaggctggtctcgaactcctggcctcaagtgatctgcctgcctctacctcccaaagtgctgggattacaggcgtgagccacctcgcccagcctcagtaaacatttttaattggatgacaagggatggggccatgtcttccacatcactcattcactcatttattcatcccctgcatacgctgtgggtggcctgccctgacactggacactacttctccactctctgctacacataatgtctctgtactcttccctcaggatgtggcacatgggctctgcctgaaagtcctccctctctgctacttccctccctatcactagctacctccaattccaccaggagcctaagactgtcatttctttaatcctgcaagaagaccccctttctcggtgccctacacatccccctgccacatggctacaccatcaggcatttcccagcatctgctgcctgctctgctgctcaaggggctgggcgagaagacagcccagttctgttgggatcacagttttgtcctcagtgcgtagcacaggttctagaacacagctacaacaccatactttgtgtgatttttttggagacagggtctcac

SEQ ID NO: 181235 - DNA, 162 bp, Homo sapiens
ctgcacttggcctaaaatttttcattttcaaattcagttccttggccacactgaccatattcaatgctcaatagccacatgtggctgggagctatggtactggacagtgcagatatacagcacgtccaccatcacagaaagacaacgctgttctaaacatgt

SEQ ID NO: 181236 - DNA, 314 bp, Homo sapiens
ataggattcagacctgaatgtgtactaagccaagtaagcttagtgacagtcatccatgttcagtcccttaacaaggctgtgtattgtccatgtggataattttggtggtgggtttctgtctaatctacagtgactttgagtttgtgcctagggagactctagtgaaatgtgccaaggcctagttcagagagtcctgaagtagtgcgctgtgcgtggcacacaagatgattctgtgagacactgatgaatactttttatttgaaaatttatatgctttgctttttgtgtatatagggagacatttgaaattcact

SEQ ID NO: 181237 - DNA, 133 bp, Homo sapiens
gagaaatccgcaagtagcctaatatatgttggaattgtagtgaccaaagaagtgtgggaacagaaaaaaaatatttgaagaaatagtggttgaagagtgtccaaactggatgaacactttaaactctagtgca

SEQ ID NO: 181238 - DNA, 336 bp, Homo sapiens
ggtagctcctgataggacaccatgagaagggcacatcacctctgcggtattcttcccaaaaatccataactgcagcctaatcatcagacaaatctagggacacaaaatatctaaacaagtactcttagaaagcatcaggccaggcacagtggctcacacctgtaatcccagcactttggtagggcaaggtgggaggatcacttgagcccagcattctgagaccagcctaggtaacactgcaatatcccatctccacaaaaaataagaaaaaaattagccaggcatggtgtcaggtgcctgtaatcccagctactcaggaagctggggtaccgagct

SEQ ID NO: 181239 - DNA, 531 bp, Homo sapiens
aaagtaactggcccccactccaccaaaaaggggcaacattttaaaacacctctatatttactgctttaaccattaaaatagctaaattcatatcctaaagacatctgtgttacatcaccaagaaaaatttctgaaaacattaatagaccttttaaagtttcagccgaaccttttaaaataaaaataaaaaccagttataattttggactgctgtaggtgattttttttttattttttaattttttttattcaaagcgactctttggatcaacaattagaatttattttttattggctcttacaatttgcttcacatgtaacatccatttggtatatgcctccctgggaggttattggtcatctaatttgaaatgagaaagaacaaagggcgaaagaaaaggagcaacattcctctcctcagctcactaatacgaatgtgtgtcaccttttaaataccacccagtatgacagattaatcggaatgaattaataggcagaagagagagaggaggatctttaaaaagactaaat

SEQ ID NO: 181240 - DNA, 394 bp, Homo sapiens
gtacagccattttggaaaacagtatggagatttatcaaaaacaaaaaattgaattaccgtatgatccagcaatcccattagcagatatttatacaaagaaaaggaaaccaatagtgcttcatgtttgccaggttgtggtggctgtggcaatttctatttttttttaatttttaactttttacagatacataatatttaaacaaatttatggggtacatgtggtactttgttacatgcagagaatatataattatcaagttgaggtatttaggatatccgttaccatgagcatttatcatttctatgtgttgggaacttttcaagtcctcacttctagctattttgaagtgaagcactattcacaatattcacaaatatagagaatcaacctaag

SEQ ID NO: 181241 - DNA, 334 bp, Homo sapiens
agagctaggcattgaacatcgatggctgataacatcacacacacttaaagaaatatctatatcacaaattatcaaaaaatgaacctgattctgataaagtctcaagatctaactaccaatttacaggaaacacaggggacagagaaccatattaaaccataccacagggacacagtcagtaaaattcagactgtggcaaactttaagatagaaaatgctggtatctccaacaacaatacagagaaaagaaggtgagggacaaaaagagagaaaaacagggagaaactatagatcaaaagagacttaagggacatatcaaccgttaggttgtata

SEQ ID NO: 181242 - DNA, 551 bp, Homo sapiens
tgcatcgtgtactacgatatagcgtacatacaactatacaggtcaggatgtagcgatgttatgcctgtaatctgaacactttgggagggcaaggcgggcagtatcacgaggtcaggagttcaagagcagcctgatcaacatggtgaaaaccccatctctactaataatacacatataagtagccggcgcgtggtggcgggcgcctgtaatcccagctactcaagaggctgaggcacaatgttagaacatttggtgaaaaataattaaacggtagtactgctttcaaggtgttcacaatcctgaggaaagggatgaacacaaataatttaaatatatggcagaatgtgatcaaacaatacaacaggtcagattagtgatcaaacaatacaacaggtcagaaagtggctggtgaggagagcttttatttgatctgtgttttgaataatgtaagatttggagaagcaaattctctaggcaatttgcctaaagcattagcactaaagtggtatagctagctcactgtatttaaaaggtaaacaactttaacaaat

SEQ ID NO: 181243 - DNA, 377 bp, Homo sapiens
tgctgggattacaggcgagagccaccttatctggctgcctcctctttaaaaagaaatgaaagtttgattaggaagacttttagtaaccaagaatcaaagaaacatcaaaagagaattatcatgaattacatttaaaatggaggcactgaaattcatctctctcttttaagacattgtagaatgtataaggggagttccttagaagtattaatattataccatttcttattaaataatgcaccttatagcattggaatttaatagtaccaattattatgtcttaaagtcctcttagaatgctttgggtcattttaaggttattataacgattggagagttcttaacgttagtaaaagcatggatttgcctacacagaa

SEQ ID NO: 181244 - DNA, 409 bp, Homo sapiens
agccagccccacccaacaaagtccccattgagaactgaaaccaagaggtacaacccagggccttttggacaagaggtatctagcaggaaggtagggaagacaggacctacagcagataaaagcatctgaagctcaaaagaggaactgagaagcatcacatgcacactcagccatttcctctccccagttctctgtgttctttgagtagaacaactgatccaaacgaaaggaatccatgtcctgtgaccacgccaaagtgttggctgagaagtggaagggttcttggaactagcccacggcacccaactccacccaggccctcaggtctcctgctctccaaacttctcatctccccatctaatcttccaagaataagaggtactgggtaaggaatgagactggaaggaat

SEQ ID NO: 181245 - DNA, 446 bp, Homo sapiens
aagtgttgttctcattttcctcccaccagtagtgtaagagaggtgcattgctccacatcctcaccaacttgtattattattttctatcttttttgttttagcttttctggtgggtgtgtattgacattgcactgtggcttgtatttgcatttccctgttggctaatgaagctgagcctcttgtcatatggggtatttttcggttcatttgggaaccctgttggcctctctgcctatccaggcccatttatctcctgggatgtctgtctttttcttactggtttgtaggcacgttataagtatgaatccttatattgcattaattacactgtacagatgaccttttcactctcttagtaggttcttctgatgaataaacattcttactatagtccaatttattttttttatggttagttttgtgtcctatttaacacatctttgcca

SEQ ID NO: 181246 - DNA, 331 bp, Homo sapiens
cagccactgatcccgtatcttagctggagattgtctccaagctcagtcaaagcccagaattcacaagtaaaaaaggacagtgagctgacccagcttcaatcttgcctcagtggatgccaagggccctgctgcaggagccaggggtcagggctggggtcagggctacggccaggagggacaggatctctgaaaccacaaacctgacccttccctcataattctgtaagcccatcttcaatgattcctaaccttttttgacaccttcatgcccctcaaacactttaaagcctgctttgacacaagatgagttagcttcaatttggagccacca

SEQ ID NO: 181247 - DNA, 818 bp, Homo sapiens
agcggagcctgtagaacttccggcagcaactgcaattaggggtagtccagtgctaaattgtcgcagccttgaaaatattctgcttcgttatttcgggcactccacagattctgtgcgaaggcagccatctttagttcgtctttcctagagagcgttgagaagattctgctccattttttctgattatggattctgttcagaaggaagccgaattttaagtcatcgttctaggatagtattttagtatgaaaatttccagacctatagaaaatttgaaatacttgcaccatgaatatccagattcagctccattttctctggtggtagatctccatggatgctattgagaaggtacttctcaaagtccacgaggacaaggacatctttccaccgaatgccacctggtttataacaaaagcatgaaaaacaaacaggaatttctcaatgcagaaaggactgaagctgtcaaaggtgtgctttttttctgcacaaacaagtttccattgaatgatagaataaagagatactgacttccccggagcctccaaacttgagtagtcaggtaaggatccttgagtaacaagacagcaaagtaagtattatccctcctgggattttggttggttacaacattgtgttgagtatttgcattccatttttcccttggggaattacactttctgagacctcaatttaggaggcttaagtgaagataatccatccccagttacacttggcctgcataaaccaagcagatcaaaaagagtgctatgttcattactcaatgaattggtcgatattggcttccttgatatata

SEQ ID NO: 181248 - DNA, 1175 bp, Homo sapiens
agcggagcctgtagaacttccggcagcaactgcaattaggggtagtccagtgctaaattgtcgcagccttgaaaatattctgcttcgttatttcgggcactccacagattctgtgcgaaggcagccatctttagttcgtctttcctagagagcgttgagaagattctgctccattttttctgattatggattctgttcagaaggaagccgaattttaagtcatcgttctaggatagtattttagtatgaaaatttccagacctatagaaaatttgaaatacttgcaccatgaatatccagattcagctccattttctctggtggtagatctccatggatgctattgagaaggtacttctcaaagtccacgaggacaaggacatctttccaccgaatgccacctggtttataacaaaagcatgaaaaacaaacaggaatttctcaatgcagaaaggactgaagctgtcaaaggtgtgctttttttctgcacaaacaagtttccattgaatgatagaataaagagatactgacttccccggagcctccaaacttgagtagtcaggcattgggatccgtggaaggcttgttaaatccaaatagattggtcctactccatccgcagagttgctgacgaggtgcgtccaggccttctcctcacctctcagggagatataccatgcagtgccttcagttatggtgttgtgactgaggatgcttcggtcagacatgtccctgaaaacctgcatagagctgcacttcaagggaagttattgaatatgtcctatccaactaaaacaaggaaatgatgaaaaaaataaaatcactttccagaggcctcagggctaactggagacagagctcagactgcaactgagaaaagttggactccaaaacctgtactctgagctttactgcatgagaaagttattgaaatgtgccttgtgacattcagaataagtgacttttcagaggtctcagagtcagtaagagacagaactcagattgtaaccaagaagagctgaactccaaacttctgtgtccggaattggtgggttcttggtctcactgacttcaagaatgaagcggcagaccctcgcgggccaggtctgctcagcaactcagtatgttgactttatttcctgagagagaacagagagaagaaagaaagtggagga

SEQ ID NO: 181249 - DNA, 336 bp, Homo sapiens
tattttatgaatacaacagaaattcatctcaatcttaattgcctttaagaaagggcaaaaattggctgggcacggtggctcagacctgtaatcccagcactttggagggccgaggcgggtggatcacgaggtcaggagatcgagaccatcctggctaacacggtgaaacccagtctctactgaaaatacaaaaaaattaaccgggcgtggtggcaggcgcctgtagtcccagctactccggaggctgaggcaggagaactgcgtgaacccgggaggcagagcttgcagtgagccgagatcatgccactgcactccagcctgggcaacagagtgaga

SEQ ID NO: 181250 - DNA, 364 bp, Homo sapiens
aggattacacggtagattcaaatatacaacgtcataagaccactcatttgtttaaccattcttattaaattataatttaatttttgagaaggagtcttgacctgttgcccaggttggagtgcagtggaaccatctcagctcactgcagcctccatcttccaggctcaataagtcctcctacctcaccctcccaatagctgggaccacaggtgcatgtcaccacccccagctactttttttttgttgttttctgtagagacggggttttgccatgctgcctggactggtcttgaatacctaggctcaagtgatccttcctccttggcctcccaaagtgcaaggattacaggtgtgacccaccatg

SEQ ID NO: 181251 - DNA, 491 bp, Homo sapiens
ccttttaatatgctgatagctttttaagaattgtggcactgtagtgttttttcatgaattgaggtctggctgacagataggaaacatgggatagtcattttctttgtaactgttattgtcaactggaattaactcaaggtccatagcatttaaaataatatagaatcagaaaatgcctagggacatctccatattctcaggtaacagtgggctcttttcagtattctgagtagctagggtgatctcaagtaattttttaaaaatttcgaaaagagtcactatagcaaatagttactaggctccaagttaaaactccagtggttcctacttgggagtctttgcagatagacctagcaacagaactcaagcattttactcatatctttaaaaagcagcagcatcaggatggtaattggaagtgacctaaatatttccatattagaaatcacagggcatgggaacttgtgatttataatggttgatgttttttt

SEQ ID NO: 181252 - DNA, 281 bp, Homo sapiens
cttactgtgactcaccataacagctattattaaaatataaaacaagcttacaacttgctatgaagaaaaagtaaactttttttaaagggcaaaagatattcattcttcaacaaatatttattactagacaatacagagaaagccagtctaaatgttaaacttattaaaagctgctcaaattctacaggagttgagaacatacaaattaaagttaaggctgtgatattttacatccatcagactgggaaatattaagaagagctataatatatactaatgga

SEQ ID NO: 181253 - DNA, 425 bp, Homo sapiens
gaataatctctgcttgggaggttgagtgtggcgctaaaaacaaacggataaagcttccaccgctataagctccaaaagccctgtgtgttgctcaccctcatatccccagttcgctttaggtactagaaactcaaaaactcagtttgctagagatacaaatcagcctttcattatgtggtttaaaatgtgcctgtatcagctttctaatttccacccacataatatgcagaagaaacacagcagaccctttttacaaagcttacaaaagttaggtaagagacacacaagaaatacatttacgtgttctaatggatccatttttacagtgtcaatatttacagcatgaatttgcatgtctctcagatggttataactcacaaggaaatccactgtttcatcttatattttcttttcttttttttttt

SEQ ID NO: 181254 - DNA, 344 bp, Homo sapiens
actctccctactgtatcctagcgcctaatggacagatattagttcagaaacactttataactaagtggccatagaggcaggcctgaagcctattttcattttctgtttcagtttctgaatctgttcttatttagtcttcccttaaaggctatctggcgcctccgtgatgcttaatcaggacaagcttgcagatgggtacaggttgcaggcccttgcctctcttcccttaaccccacagcagccagtaaaccacctggacacagaaagagacccacatattctctaaaatgcctgaatggaacaatctagaatctaagcattccttataggatacagtagggaga

SEQ ID NO: 181255 - DNA, 210 bp, Homo sapiens
  misc_feature (190)..(190): n is a, c, g, or t
ctttctttctttctttccttttctttcttctttctctctttttctttcttcctttccttccttcctttttcttttctttctttctctctttctttcttcctctctctctttttctcttccttctttctttctttatcctgtagttaagtttcccttgggatctctttgggaaaatggagtactgcatttnacaaggcaggacttgaattt

SEQ ID NO: 181256 - DNA, 339 bp, Homo sapiens
gatttcttaataacaactttaacacattattccttatctgagcattagaaacaaaatatggatatgcagagacatggaactatccaacctattgcatttactaaggatgggaaagcactggagggagctaattgagtccatgctgagtaattatcaatggaaatgagtttggccattttcttttgcactgggaaatttaaacaaaattgttgagtagacattgatactgtatttgtgcattcattaaagtacaaaagcttctcattttaattcataggacatgaattagaagaaagaaaggattacacagaaataccatgcagcataaatgcattcatg

SEQ ID NO: 181257 - DNA, 634 bp, Homo sapiens
ctaaggcaggatctcattggccaggactgggtcatatgtacatgcctgaaccaatcactgtgaatggggtcgggtagaattgtttggatggggttctgggtcatgtctccatctccaaaaccaggagacagtgtctgctctggattgtgtatcagtcaggggagaagagttactgtgagtgtctaggataagagatttactacagggactagacctcccataattgtgagaggagtgagaaagtgaagcccagaaaaggacttaaaggataaaagtcaccaaattgagaaaccaagcacatccaactacagacgtgactgcaaaaaagtgatggaggggtctatgggaagcagttatctttgagtctacagccaagaatctggccatgagcctaagctcacatttggtaatcagggccagaagttaggaaagggagctggaagcagcatagtgcagagcaattatgaaaacaatcacaatccagttcagtaagtgtttaataagagaaatcacaagacacaatgggagccccaaggggttacagaatccagcctagacaccaaggaaggcctcttggaggagacaacatttgagatgaggcctgaaggatgagaagagagccagaggaaatggg

SEQ ID NO: 181258 - DNA, 407 bp, Homo sapiens
ctagacaacggcttctcacactgcagtgtgcacacggtcacctgagaatcctgccaaatgcagatgctgatgtgtcggtctgccacgggccctgggattgagcaggtcccaggctctcaggtggtggcagatacctctggtccaaggacctcactttgagaagcagggatgtggtgcaaaggccaggttgtatagatggcccatccaagtgtggagaagggcaatgactaggccacgcctgtagcccctcgggggcttcctgctttatttagtggtagaggcctgtctcccttcctttccaagggtgtgcctgcttctcttccctctacccacccagttcaggtctgagcaaaaaaatccctggacatacagagacagcaggctctggattagattaagagtccagg

SEQ ID NO: 181259 - DNA, 128 bp, Homo sapiens
gtgagaggggaaagaatgtgaaaattgggtgttcattaatagaaagaatgtgaaaacagaacttcttacttttgatattctatggcagtaaactgtgagatgattactggagtacagggagtttatct

SEQ ID NO: 181260 - DNA, 527 bp, Homo sapiens
tggttataccgcccttaacccgttttcccaaaaaaaaaaaaaaaaaagaaaaaagaaaaaattctgagagtcaactgggtgattctgggttgcacagctgatctctctatgctctttcacatgtctgtggttagctggtgggtgacctggcatctgatctacaatggcctcatgcacatgtctggcattcacaggctgttggccgagtgcttcatttctacatgtagccttctatcctccagcagactatctcactgtcatgcacatagtagtccatggttccaagtgctgcaagagagattaagcctcaatacacacatgtttttctaggtctctgcttggatcccatttgctgctatacaagcctatattcaaggatagagaaatagactgagttctaatgggaggagccacaaaattgcatcacaaagagacaggaagaatttgtggccattgttggagtgcatcacattgtctttccccagtttatcctaaaacagccactaatttaattttgttttacaact

SEQ ID NO: 181261 - DNA, 329 bp, Homo sapiens
ctgtggctcctgctgctgacactgcctcctttctgcgcttccctgcctagggatgtctgtgttccttgggctcagcctgggccctcttctccttctgcactctcaaaggaggtgtcatccctcccagtggcctgacttccatccaggtctccagcccagatctcacattttcatttctgactttccaccccactgtgactcagagatggaagactcgtgcccctgccccagactcctcttccccagggtctccagtgcagggagaggaagcgttgtctgccctcttgtccacaaaagaaaaggaagttgtgttattgacagctcctcct

SEQ ID NO: 181262 - DNA, 449 bp, Homo sapiens
gtgaagtttaggtgaaagaatttggatatctaattgctctagcaccatttttggaaagtgctatcctttctgcaccacccccccactccttttttttgtaacagactctcactctgttgctgaggctgaagggcagtggtacgatctcagctcaccacagcctcgacttcctgggctcaagtgatcctcccatctcagcctcccaaattgcagaaaagtacttaaacatgacaccaaaagtacaatcgataaaataaaattaataaatttgacttcattaaagataaaaaattctgccctctgactcagttaagaggatgaaaatacaagctacagatgggagaatatattatttgcaaacctaggtatgacagatgactcatacctaggatatattaagaactctcaaaactcaacagttaaaaaaaaatcaatttagaacatgggcg

SEQ ID NO: 181263 - DNA, 259 bp, Homo sapiens
ttgggggagagggagcatttctctactgtcggggcccctcctccccctagcaaggatttggttggaggaggcctggctgagggctgttccctcaaggcctcttctccctgcaactagcctttctcgggaaactatttaagcccaacattcattcaacaagcagcgcctcctaccagggcgctgggtgtgggagaagctggtgactcacctctcccctcctctgtgaaagtgcttctagggcccgcttaggagcccagcc

SEQ ID NO: 181264 - DNA, 392 bp, Homo sapiens
gcagttgagggaattctcagccatctgtcaacaaacgatgcgatttaatagccatgaatatcatacatgcaacgaggtacaccatgacatcgtgcacttggaaaagttcctcaaatccccaacctcttggtggaagcttcaagcacgtggatgtctgcacacgcattccctctcccacaaacactgtacacaaacatgtaagatactggattacaaaaaccatctttgaaagagtaataccctatttgttaacaggtaatttcagctcaaagtagcttatgcttgtggtccttgatggaaagaaaagcctggacttggaaatgcaggggaaaaccatggtttccctcttacaagaggtgccctggatggggttcccaggtttaaagatacaa

SEQ ID NO: 181265 - DNA, 621 bp, Homo sapiens
tggtctaaatcagctgcatcccatttggtacccaggcaaggatttttccatacctatctttttgctggtggtaatgatgagttttgtcacttgctataacattctctgtccgtcttttgtcttttatgtaaatacttttgtgacttcattgtaaccagcattttgtaatactcttaacagcagaggggattaaatcatgattcacttctgaacagtacaatcagcagtaggaaaacgaggagggagggagagggaaattgtccaccacttcccaatgataatgcctggctcggaccccagattcacatcatacttgaagttcataaattctgggcactgctcagcttgaggaggcaggcattgctccttcatatttcagggtgagacaaatgctctgttgaagccatgccactacaggatacgttcacctctgcttgctttcctccctaagccagagtgtagttaaacatttatatgtcccaggccaggagcatcaaattaagaggaggttagctactttccctggctcttaaaaacatttgagtccaagtatggttctctggcttgagggtggccatttgttgcctcactgtttttattaggacatctggagattagagg

SEQ ID NO: 181266 - DNA, 319 bp, Homo sapiens
ctaacctcctgttgttctctcacactccatatcctagcaaatcacgtgggccctattttccaaacatattcagaatctggcttttcctcagtgccgccaccaccaggctgatacaggccaccaggactgctcggctggacttttacaagcaccttgtgacggtgtcctgttcccacccttcctgtgtctacactgtattgcctacccaacaaccgcagtgagcatgtctctctctggctcagaaccatccaagggcttctgtgtcacttataataaaatctgcatccttagaaggatttacctgactggatccctccct

SEQ ID NO: 181267 - DNA, 510 bp, Homo sapiens
ttatcctccacaaatgcctgcctatatgtctatcccaggtgaaaaactatcactagcttcacgatgtggctctcacttacccgtgcaggtttgactggccatatgctcccaatcccccgccatattactctgttccaacctttggcacctttgctcacaccattctttctttccagagctctcttctctttccatttctgcccacactccaacccttctggttaaacctgtcctcatgttttaagataccctgcaaatatcatccctttgtccagctaacaactcttgccctcactactgctgcacatacctgttgaattcaaattccccctctgtgtgctcccctaaatcctgtgttcactgcagactggtctcgccgttcctcaaagggccaagcacagtcctgactcagggcctttgcacgtgttgttccctctgcctgggatgctcatttcctaaatattcactaaatatctggcttccttacttcattcaggtctctgttcaaat

SEQ ID NO: 181268 - DNA, 346 bp, Homo sapiens
ttgggggtctgggccacgggagggaggatttgggggcatgaaagagaagcaggctgagtttccagggacaactttgctgcagactggggatatgttctgtacccctcattttgttcggcaagctggcgagaccagctggtggtgtggttttagttcacctagtggcacatcgggccttctgagatacgaaccgtgtaatgctaagcgtgtgggcgtttttagtcacgtggagcgtggttccgagcagaaaaggagatctgtgagccgagcctctatattcttcaggggctgaccgcattctgagggtttccatccaagtcagcgtgacaagattccctagcactta

SEQ ID NO: 181269 - DNA, 285 bp, Homo sapiens
gaaccacagtgggaagaagtcggcccaggctccatctggtgcacggggcagaggcatccctcagtcacaggaggcatccctcccgagctcctcgaccccaaagactattttcaggaaccctttgtaacatggctcttatttttatacatcaatgttttcctaaaatggaagccaaaggcacagcatcagatctaaccaaaccactgacctttttagggtcatcacatgtgccaatttcacctacttctcatatcttcctattttcaaagctcccctcaccctcaa

SEQ ID NO: 181270 - DNA, 682 bp, Homo sapiens
ctatacagaaaagccaatatgagaagcaatttgatcaacaatcactccctactgtttggagtaaccaccctcatgactttccatatgggagctgacatttgaagtaaattcttatctctattcaaagcatctaaatacaaatggtatgtccctcctagctggcaaacatgtaggcctcgcctggattttcagtttcaactattttggaagatgtctgtttctttgaagtatccctaaactatattttgtgtcaccacatagcctacattctaaagtttaaattaaactaacccaaatacatcttccaaatatggtgaaatataccccaaaatgttctagccacttttgcatgatgtggtaatacaaaattaaatttacaaaaatatgcagctctttataaatatatcaatataagtatgatatattaagctataaaacaaaaatactaaagttaaagctgccaaaaaatttgtagtgaggtcaggaatggtggctcatgcctaaaatcagtcatatttatatgcactagcaagaagtctaaaaggaaaattaagaaaacagttcgatttacaatgacatcaaaacaataaaatgcttaggaataaatttaaccaaggcagcacaagacttgtgcactaaaagctacaaaacattgctgaaaggaattaaagatgacctaaat

SEQ ID NO: 181271 - DNA, 190 bp, Homo sapiens
tcactcagtctcaagcaaaacagacaatctaaagttgctgctctgacaggctctcttcaaatgatttccatttccttgggcaagaactcagaacaagcttgtccaggatgcatgcggcccaggatggctttgaatgcggcccaacacaaatttgtgaactttcttttttttttttttttttttttttttt

SEQ ID NO: 181272 - DNA, 572 bp, Homo sapiens
ccctctaattattattgaattattgctttaatttcatacatccactctttccagaatctactttttctttgacattagaatttggagttttgcaactacgcgtaagtttagtcttgatttcatgtttgcctgtgtgaaccaatgtctgcctttctttacaacatttcattattaagatcttaattgtgattcagtctttggtcaactggcaaacgagttccccccaaaagtaaactccaagaatgacttttgttgccctttggttgcctcattcaaatgacagggtggatccaaatttaaaatactgtggaactgttctaatgactctgaatttagggttcctgagggagagtcagctctgggatgcctgtgtgcctctaggattgtttcaccttatgattcaataaattttccagaaaaagaatgtattggggtatgtctaggggtggctcctcctgtcccccacattctaactggaaaagaggaatccgtttcgatctgcctactctgatctaccatccccacacacaacatccccttacctaggccaattctgaaaatgtttactgtgc

SEQ ID NO: 181273 - DNA, 401 bp, Homo sapiens
tttgttactcaggaggaaagggctatcttttaatattccagacccactgaattgttttgattaccttgtgcttactgaggaagagtactagttgattctaccgcatacatatcctatttcctgtcattaatatatcttagtgtgacatgaaagggttataaaataaattttattgtagtaaaaaatatataacaaaatttatcattttaacagttgcaagtgtacagttttgtggcatgaagtatattcacattgttgtgtcaccatcaccacccatccatctgtagaacttagtctttcccaacagaaacttcttacacattaaacactaacttcctattctccccttctcctagtacctggcaaacaccattctactttgtgtctctatgaatttgact

SEQ ID NO: 181274 - DNA, 344 bp, Homo sapiens
tcaccatgttggccaggctggcctcgaatgcctgatctcaagtgatcctcccacctcggcctcctaaagtgctgggattacaggcatgagccaccgtacctggcctgtccttcgtttttaaggctgaaggatattccactgtacctataaaccatattttatttatccattcatccagtgacagacacacgggttgcttacaccttttggtgactgagaataatgttggtatgaaccttggatgtacagccctgtaacatttttttggataccttgatacaaaatgatctcgtcctttttctttgcacattattgacttccattttcctgttaaccatatacca

SEQ ID NO: 181275 - DNA, 125 bp, Homo sapiens
tcctttacctcctcagaaactactcttcctaaaatataagttgaaatccatgggaaaatttctgctttgatttttttcttagacattttgtagctttcagttatcattctgtgtggatcatcatt

SEQ ID NO: 181276 - DNA, 253 bp, Homo sapiens
gagtatgaaatacctacacacacacacacacacacacacctttatatacgtatgcagctgttagaaagctaaaatttgaacaaaaatatttctattttccacttaatgaataattattgccataacacaaacctactctcttttaaagtttgaataaaattgaagaaaccaaaggtgtttatgtaattaaaaatagcaccaaagaactaaaataattagcttttggtgttagagaaatcttaaatgattcaag

SEQ ID NO: 181277 - DNA, 314 bp, Homo sapiens
ggaccttctcactctgttgattttaccccctaaatctgtctctaaatattcatatttcttcatccccaggccacttttatttgacacctggattaccacagctgcctacgccgagctctcaatctttgctatactccagctagagtgggccttcaattccaaacctgaatatgtcatcattctgcttcaaatatgcccaatgaaacaaaacaatagtctattgctccttacgaagacatgacagggaaagatttattgaactggaatgtacctgaaatgtcatgtagtctatagaccgtcctccagatgaacac

SEQ ID NO: 181278 - DNA, 681 bp, Homo sapiens
tcctcaataaaacagataaataataaagccataactcacaaggacaaatagggaagatgaaaagtcaacagtacttggtgtcaaaaaaggaggcagacaagtgaaaactcccaaaacacacttgagaaaacagatgctttaaactgtcagtgggaaaatcagagacgcagctgcacttacgtcacatcaagaacctccaaaggcataagaattgatggaattcaatcttcctatggaaaggaagtagacaaagagctgaaaaaagaggactggttgaaagcctatttacaaattagcaccctcagatctttcctacaccaagcaatcaggacgctgtttctctacagccctgaaagactgagtgctttgatctagaagagtgtaaaataaagtgaggataagaaactatcaggcatgattaagggtaaaaaccaaaagcagggggattaagtgaaatgttacacattgattattgagacccacagccttcttccccacaacttggtaattagagttttggctgccaggtacccctcaagaaaggagattggaagttatcttcttgaggaatctgatcatcaccaagaagaaagacacaaagaatagtgacagtgagagttccctaaggaaaactgtccaagcaattcaccgttcagaagccatagttgataggttccaccc

SEQ ID NO: 181279 - DNA, 370 bp, Homo sapiens
ttacagaccatctctaaaccaagtgtatttaagtcagaaatcagtaataagacgaaacttttctgaaatcatcattttaaagtttaaaaatacagttcaaaataactgatcgtctaagaagatacactcaatatcaatgtaatcagtacatgtaagaatttattggattaagaaatggtaactaaagtggaaattagggtctccagtgctcatattacaaaagaataaagtccaaaattccatgcattaagcattgaaataaagacattataaaaataacaatagagtaaagcccaagagaaaaaatctttaaaaagcagaaatcaatacattcaatgccatcccaattgaaatcacaacaggatttttg

SEQ ID NO: 181280 - DNA, 918 bp, Homo sapiens
ttatatatatatatatatatatatatatatatatatatctcctcatgattatatatatcctcatgattttatatatatatatatataatttttttttttgagacatgtgtgcctttattagctgagccactgcttgagggggatgaagcaggaggagtgggtggccctgaagccggctgtgcttcacgggcttgtaggtgatggagaactcgcccaggtagtggctgatcatctccggcttgacctccacctggttgaaggtcttgccgttgtagacgcccaccatgctgcccaccatctcgggcacgatgatcatgtcccgcaggtgagtcttcaccacttccggcttctccatgggcggcaccgccgtcttggccttgcgcaggcgcttcagcagagagtgctgcttccgccgcaggccccagttcagccggcaccactggtgcgcactgtacagctgtatcagctgctcgtaggacatgtccagcagctagctgctcgaggtccacgccgcagcaggtgaacttgcggaaggtgatacatcctcttcgcagacagcagaaaaacatcagatttgtgatttaattgggagttttctgggatcgaacagtggcttcgtttacagtcgtgacagcttgagccagagggtgccagccagtgccatgatgtgaccaaggccatcaacagcagagccgcaagggagcaggagccttggtccctgaggacatgctggagctaacttgggaatcctgaggtggccacctccaaaatgttacatgaaagagaaaagtaaacatctaacttgcttaagctgctattgttttggggtttgtcatttacagccaaacctaatcctcattaaaatagtggtggaactggaatttgaaccagtttactcccaagaccaaaaaaaaaaaa

SEQ ID NO: 181281 - DNA, 322 bp, Homo sapiens
tactggttgtcaaaggttaaaccaggactgactacacaaattctcagcagaagcttgttagaaaaacagattctggcactccagcctggtgacagagtgagaccctataaaaaacacacacacacacacacacaaaacccccacaaaaaacagattctgaagcccatgtaattttgattttaaaaccaggtttaggggctgggcgcggtggctcatgcctgtaaccccagcactttgggaggccgaggtgggcggatcacgaggtcaggagatcgagaccatcctggctaacatgttgaaaccccgtctctactaaaaatac

SEQ ID NO: 181282 - DNA, 344 bp, Homo sapiens
cctaagcaaattaatgcaggaacagaaaaccaaataccacgattttacttaaaagtagaagctaaacaagggtactcacgtacacaaagatggcaacaacagacaacggggagtactagaggggagagggaggaagagggcaagggttgaaaaactattggttactacgctcaatacctgggtgacaagatcaattgtaccccaaacatcagcattaggaaacacaccctagtaacaaacctgcacatatagcccctgattctaaaataaaagttaaaattatttttttaaagtaaacactttggattgtaactcaagtataaatgagcccacacacaatctca

SEQ ID NO: 181283 - DNA, 398 bp, Homo sapiens
aggcgggatctgcccgtgcagcaggagtgggccttggagactgatgggcccaggttcaaacctggcatcctcactttttgcattgtcaccttggacagcgtgtcacctctctaagctttattctcctgtctctaatatggagctcctggggcagtattttgcccagtagttagaaacgctcaatcagatcctgtttcagagtagcccagctgagggctggcacatacagaggactcagtcggtgtcacctgctgttattgtcatgactgttacgatgatgacacaggatgccagactggacctcatgagggcagagattgtacgtttctaaaaattgtggtatagtataatttacttaagtaatgtatgcatatcttgtacagctcacgttttacaaa

SEQ ID NO: 181284 - DNA, 183 bp, Homo sapiens
tttctgatatccagagagaatttctaggccacagcaagaggaggcagaactgaggtagagcccagtggactacttgagctgaggaaatggagctgagagtccaaggagactaaggcagcactgcttcagatccacctaccaaaaaataaaagcaagacccaaaatgatcacactgtttcctga

SEQ ID NO: 181285 - DNA, 331 bp, Homo sapiens
gggattacaggcatgagccaccgtgcccggccaagtatttatcttctgtggaactaaccactacgctcagcattttggagatctaggactgggaagattgcggtcagttcttgctcttaaagcactctatccagctggagaaacatgatggccattcatgaaggagtttgagtcctgtccattgtttgtaatggaatccagattaaacatctactgtccaaataacagtcctaacaatgcaagggtcagaaaaaaggtcagcattattggctcgaggtaatagaacagacctcatggagatactgaaattggtggtgggcactgaaggttg

SEQ ID NO: 181286 - DNA, 632 bp, Homo sapiens
cagaacatggttctgagaaggtatttttgcaggagacctgggctttggtccttgagagctgggattccctagattatccctagtttgctgtaagtcgaaatgcaagttatttttgtgtttcaaatgagataccatatatgtccatttcataagtcggatttcttatatcatttttttcatttttaaaatttatttttggctgggcacggtggattatgcttgtaatcccagcactttgggaggccgaggcaggcggatcacgaggtcagaagttcgagaccagcctaacaaacatggtgaaaccccatctctactaaaaatagaaaaaactagccaggcgtggtggcgcacgcctgtaatcccagcaactcgggaggctgaggcaggagaatcgcttgaacccgggaggcggaggttgcagtgagccgagattgcaccattgcactccagcctgggtgacagagcgagacgccgtctcaaaaaaaataaataataaataaataaaaataaaatttatttttatttattttttgagatagggtctcactctgttcccaggctggagtgcagtgtcatgatcatagctcactgcagcctcgatctcccaggctcaagtgatccttctgcctcag

SEQ ID NO: 181287 - DNA, 420 bp, Homo sapiens
ctctaagggttagcgtgatgtgggcagacaaggaaactgaggcaggggcagggaagactttgcttctaggagggaagctgggattcctataagacctccacctccccaccatggcttcctgttgctttggagcccttcttgtggagacattccctggcactctcttccatggcagcacctaaatgggaagaggaaacagcaaaaaccctgcaggagaacttcttgaaccaaacgcaacagaatagaaaaggaatgcaggataacccagttaatggagaacatccggggtcaagcatgaactgcactgtgttgtctttatgaaagagaaacaaaaactcaggaccccaattcactgtgacagaaggaaaaaaaaaaactggaagctgagtcatgcaagaaactgcctttccttttgttcct

SEQ ID NO: 181288 - DNA, 240 bp, Homo sapiens
aaactatatcctcttcctctctgaaaccccaaacatcccaaagtctccttcaagccagacatcctcttggtctactgtgcatggtgtctgcacggtcctcaagtttgcctcagggaaagtgcctgttgccatcagaaagaaagaatgcagcaggtactgatttatctcaggcaaaggagctcttgtggtgggtttcaacaagatatgaaaattgtaggttcttgaacactccttttcttc

SEQ ID NO: 181289 - DNA, 524 bp, Homo sapiens
ctaccaagtgtgcctgaaagggattttgtatccccatatcaagagatcgtcaggttaaggaaggaactgccaaggaggacttttggctacacatctggtcctcctatgctttggtttcttccaattctgcaatattgggctaagtgttgagagtgggtggtatagaagcagatttaattgaaccacaggctgtgggatgcgcctgcctcaaggcttgctgtttagatcactcaaagagctttcagacaaaatacctgagacactgaatatgaaaatgggctctgctagtttcttagaagccttgcctatcctggcagcctggcaggaaaagctagcctagaaggagtgcctgctaaggttagtataagtgaggtacatcagcagaccatgtggtaggtattactgaatcttttctgtatttcctttaatgtcattgtcttatgcagcttttatgaattaattaatcagttttcaaaaggccatgttagtgagactgtcagagcttttaacccctccttagtata

SEQ ID NO: 181290 - DNA, 727 bp, Homo sapiens
aaacacaaataaagaactccgagactaatagaatacatttaacaaagttgcaatagtaagccattccctatcagtacttaaagtgtagatggattaaactccccagtcaaaacacatagcatggctgagtggataaaaacaaaaccaaaaccaagcctaactatatgctgtctatttaaggatgtacataaatggacagtgaaaggatggaaggagatagctcataccaatgagaccccaaatagagcaaagatggctgtgcttgtatcagaaaaaagggactttaagtcaaaaactgccagaagagacaagaagtctttattatgataaaagggtcagctcccaggaagataaaataattgtaaatatatatgtattcagcataaaagcacctaagtatataaaacaagcattgacagaactgtaaaaagaaatagaccacaaaacaataataataggcgacttcagtagtctatttttgataacagacagagcatccagacaagatcaaaaagaaagcagaggattttaataacactatagactaaatagacctaacagacatatagcggacattacaaaactcaaaaagcagaatacacattcttctcaagtgcacatggatctttctctaggaaaggtcatatgttaagtcacagaacaagtccttacaatttcaagaattatatcaggtatcttttctgatcacagagggatgaaattagaa

SEQ ID NO: 181291 - DNA, 284 bp, Homo sapiens
agtagacagctcttccaattttacaaagacatttctgtaccatgcataacgtcaagcataaaatatggaagaaatttataaaagcaataactagtccttttgaagactgaagaaaagcacaaatacattacacatttagtctcccaaatgttaatctcattggaggcaagaactaaaacttcagagcttactatgtattccccggtattcagctaaggaactagtggagtctccggagccaggtttcacagcttttacccaactaaagaatctgcttggctcca

SEQ ID NO: 181292 - DNA, 872 bp, Homo sapiens
ttttagtagagatggggtttcaccatattggtcaggctggtctcaaactcctgacctcatgattcacccgcctcggcctcccaaagttctagaattacaggtgtgagccactgtgcctggccaggactcttaaatttttaaaatgaccgttttctttttttggacacaactacagcaagaaataatacagatcttcaagttggcaactcattcaatatctcctacagaaggtcaggaacctagaaactgtgttccttcagggtgcaaacccatgtgttccttaacagcagaaaaaggtcagtgggcaagaccagaacaaattagatatgatttgttttttaagttgaggcttagccagaagggtttgtatggacctcttagattaaggtttgtttcacagtggggataatgtttgctatgtcaataaacaggtacttttctttcatcattctccaaatttggttcttaatgagatctgacatcccctcttccattagaaggtattgaaatccagtggaccagtttctccaagatgtctcttgaaagtaaaactctgcttaaaatctgttttttccagggctctaatcactactctgttaaattcctcaaacttgtaatgccccaaggcttgattttttccagataatggctctatcgttgcacataccctgattctgtcagcatgtgtcattggcaaaatagctttctctgccaaagctttctgacctttggctccatcttagctttgttagcaggaaaggcctgctacccagagtcagagtcaatcagagaattgttcatgtggtccttagaactttactccttacccttttatcttttctttaaactttcgcctctaaatctgccaggga

SEQ ID NO: 181293 - DNA, 171 bp, Homo sapiens
cactgattctgtgccattggatttaggaaactttacactaggcagtgaggaaccataagttagaaagatcatactgacttagtgaggagcgtggcttggaaggggtaaagactgaaggcctgatgatcttaagaagttacatgagataataagaaaaatcatatatgctaa

SEQ ID NO: 181294 - DNA, 378 bp, Homo sapiens
gaagtgaggagcgtctctgcctggctgcccatcgtctgggatgtgaggagcccctctgcctggctgcccagtctggaaagtgaggacagtctctgcccggccgccatcccatctaggaagtgaggagcgtctctgcccggcagcccatcgtctgagatgtggggagcgcctctgccccgccgccccatctgggatgtgaggagcgcctcgtcccggccgcgaccccgtctgggagcctcccagcgcccaggacccctgcctgagcagtgagaggccctgattgatgcccaggacagcaagctttcccaccagcaccaacctcaccattttctttcagtatttgaggactgaaaagaaggcttcataatgatgggtacc

SEQ ID NO: 181295 - DNA, 360 bp, Homo sapiens
attgcaagggtggatttgaattctggaaatttggttccagagacaataattacataacactttctccatagggtacagcctgtctaataggctatagtaaatcacctcagcttgttataggtcgggcatgcaaacatttctccattttactccctttggtaatgaatctagtaatagatggaaattttccctagattcactgtgttagtcagttggggaagtttggaggcaaagatacaggagtttatggggaggtagtgtacataaatataatcatatgctatataaggaagttttggtcagcagcagaccatatataggatatgattatatttatgtacactacctccccataaactc

SEQ ID NO: 181296 - DNA, 219 bp, Homo sapiens
taaagagtgatacagactgcaatacaataatagtaggagatttcaacaccctactttcagcaatagatagatcatccaaactgaaaatcagcaaaaaaaaaaataaaaaatttctgaggtactaattgggattatcccgtattcgaaggccttttggaacaggtggtgtctggttggatatagggggggtaccgagtctcgaatacagaaatctagggc

SEQ ID NO: 181297 - DNA, 410 bp, Homo sapiens
tatccacactattttgtgggcttttatgtttcaaaaaccataaagtacataagcctcacttttgaacctagaaagaaaatggataaacttcattgtctgagacagtcatttcttcagtgaatctcatagattctcacaaatgcaccatccaagggagactgtacaaacatgttcactgaagcattatttataatagggaaatgtggagaaacttaaatattccttaatagggaatgaattaaataagatatatccctatgacagaatattacacagtagtgaaaggaataaatgacatttaaacataatgggagagactaacctcaaaaacctgatgttgaatttttatttatttatgtatttgtattttattttttgagacagggtctcactctgtcacccaggctgga

SEQ ID NO: 181298 - DNA, 188 bp, Homo sapiens
agccatagtgtcctcattctattagtgtacaaactgagggtcccagctgtgaagatgagttagtaagcagttatcattcccccagtcagggtcccacctcactgctgcaagggataagtccatgttttcagatgaaggtatgatatggattaaatattgaagaacagcctctcctgtagttatgctaa

SEQ ID NO: 181299 - DNA, 529 bp, Homo sapiens
tgacgcacacacacgcacagccgacaagacttgatactaactcaagtagtcatatgatcgattaagatttgggcgtgcttagggaagaaagagctaattaaaaagaaatcaaggttattacagtccatgtatcttcctgtgtatgcttttaaagtccttgtaaccattgagttacagggctttaactcctgtgtctgaaaaatcacaaacactgatgacaatcaaagcctcatcttaaggccccgtctaaatgcaatcatgatcgcatttagattcacatgcatttataggaaataatacaaagaaattgtatatgccattcacccagtttcctacgatggtaacatcttgcctaattatagtatactgtcacaaccagcagttgacattaacagaatccatctactgtattgagatttcatcagtttcacatgcagtccatttcatgtgtctgtgagtgtttacttctattcaggtttatcaaatgtgtagatttgtatggccgccaccacagtcaagatgcagaaca

SEQ ID NO: 181300 - DNA, 770 bp, Homo sapiens
gtcctgcaaggctgtttgttgtgattggtcaatatcctaagggcaaaaatggctttttgttcctttacctcactgggttcccattttcccttttattttggccagataattccttcctatttttgtgttgcttttaagaaaattgtgaaaatattttgtccagaatttttggctgcgttcagtagaagaattgttgtggggcaccataactggaaactgaattctcttattttactttcaaaatctgacaaataagaatggccctactaatttttgggggagaaataatgttgacagacagcacttctttatcaagagatgtgcctatttagtcctgaactttatttcaaatctacttttctttgaatggtaaagggagacctacagtttttctccaaaatcttgataactgaagcagagtttaaaacaaacaaaaccctttgctatgcagtcaatgaaaggtgtttgaaagttcagataatctggatagagtcccctttgcccacctgctatctccttgatgtcagctatacttttgatttgctaatgtgtgtagcatccaggtttcaattctgggccattagaaataaaattgtccttggatctttggcgtttcttgcctcggtggccaatctgacaaaacaatctgttgaccatcataattggacagttgaaagtatgggcctcagagtcagacatctctatcactttcattttacaatttttctaggcctcatttttgtaaatgtgggtgataatatccctactaa

SEQ ID NO: 181301 - DNA, 346 bp, Homo sapiens
ataatcttagaaccattttgcatattctgtggtttaaagaaagacacaagaaacagcaagagtgagaggtgggggaggggaaaattcctcttcacagaaaaatgctgccagctaataaaatggagaaggaatagcaaaattagaaagtcatcactttgcaaccaccagtgtgataatcaactcaagtgaggattatcaacggatgctaaaatcaccggatggaaggtagctgaggaacaggatagccatggagtctcaaagtgtcaccccacagattactcactaatggcaaaggaaaacagataagcttacaatggagagatcggataaacacctactcggccgc

SEQ ID NO: 181302 - DNA, 970 bp, Homo sapiens
cacagcagatgggaccgttggccttgagtgtatggttaccttgcctgtgatcagaggaaggtcagcccagcatgttcaaggggagtttctaaaggctgtggtcagtagtggccagtgatgatgtctgccttttggccaggtcggaggagtggagcacacacgttaaacttggcttcctcgctgggcgcgggggctcacacttgtcatcccagaactttgggaggctgaggcaggtggatcacctgaggtcgggagttcgagaccagcctgaccaacatggagaaactccgtctctattaaaaatacaaaattagccaggcatggtggtgcatgcctgtaaacccagctccttgggagcctgaggcaggagaatcgcttgaacccgggaggctcaccgcaacttggcggtgagccaagatcgcaccattgcactccagcctgggagacaagagcgaaactccatctcaaaaaaaacaaaaacacttgtcttcctgtactttcctcctcccttccaggggaaaaggggcacgccttgaaagggtgttaattagcagaaccagtgtggccagttcaaggaacttgaactgacttgggataaagctaaactcagtttcttaaatgacttgtgtcatttgtaacttggaagtgggctgggtagcacgatggggcccagccaggatggaaggcagagccccatgcattcttgcccttcctcttgtggccctcacatgccagtgtgctctggtgctccagcatgccccgtcttcactccatggccccttctgtcctgtcagggaccagcagcgctcaggctctgctgagcccaggagaggaatttgactcaggaagaaccttctgtgagtctggtttttggaaagcgatgagcagagatgaatgattgcgacttgggtgtgtggatgggtttgggatttctatttgagccgggcagcgttcttccttccttcctgtc

SEQ ID NO: 181303 - DNA, 570 bp, Homo sapiens
ctgttaatctccttatgcagggacattttttaaaataatgtatgtggttgggaactgtaaaaattcagaaatacatattattcaaaaataatacaaaaaaaataggagattcagtaacgcagaaagctacaaaataaccaaaagccttcttatttaaaggcagattatcttaacaatctgctgtgatttcttctaggagaaaaaaattatacctatatacagtatatgtttctatctttatgtacattactgtttgaaactttgattcctgaagagcaaggattcagatagacagggattcatcaaaaaataaaacaacctattgactccagagtttaattaatgagagttaataggcaagattaccttagttctttttttttaatcttttttaacaaaagcatggccttgctatcacagtttaaaactgtacaatttaaaactttcttaacaaatctcatcttagagttctttgaaaaggcagtcacatctgcattctttctatggacatgccgtattttatttaacttacattcatttgatagacatttaggtttacaatcttttgct

SEQ ID NO: 181304 - DNA, 231 bp, Homo sapiens
gtccagaaaacttgtatttacactctggccctttattgataaagttttctgatccctggtttagattattaacgtctcaagtaagtatcagtatggttagatttagttccactgcgcccagcctctttttctttttgagacagggtcttgctctgccacccgggctggaatgcagtggtgcaatcacagctcactgcagccttgaactcctggactcaagcaatcctcctg

SEQ ID NO: 181305 - DNA, 368 bp, Homo sapiens
taataaaggaagtgaagagagagagagaaagaagaaggattgttaaacagttgtccttaaatctagacaaggtcaaatgttcaaaaacaaacttctcaccacttttctaagagcaagtacaaatactgaagtgcacacatcttaacaatggagaggctaaagtcattaactaagtgactcaagtactgcatcttttctccaagtaaagtaagaatttaaaatgcaatgttattctttccaaacattttctcttcccatttggtggcctgctataagctgagtatcattattcttctgttatattttttagatcattttagcctggtgtgcatacacacatacatgtgtgaaatatatatatatatata

SEQ ID NO: 181306 - DNA, 2556 bp, Homo sapiens
atacaaaaaaattagccgggcatggtggtgggtgcctgtaatcccagctactcgggaggctgaggcatgagaatcacgtgaaaggcgggggttgcagtgagccaagatcgcaccactacactccaactgtgcaccacagcgagaccccatctcaaaaaaaaaaataataataataataaaatcatctctgccccaaagctatttcctcagatgcaaacattttccttgaccatagccaattaacctctcaacatctaatccacctccctttggaactggctgataccttgagaaacctttcttctccacagagggtctgccagttcagatgctgaaaagtttttctatctggagaaacccataagccatactattagacctatgccccaaagagctaagctaagttaaacacacagtgtttacaaatgagcagctgaaaaggcacacaagcttaagttgcagaagacacacacttgattttccttgctatggagggccctttagaacattccctacaaagttattttagaatgtgaagagacagctgggagcggtggcttgagtctctaatcccagtactttgggaggccaaggcgggcagattgcttgagcccaggagtttgagactagcctgggcaacatagtgaagccctggtctctacaaaaaatagaaaaaaaattagccgggtttggtggcatgcgcctagacccagctactgggaggctaaggtgggagggatggcttgagcctgggaggcaggggttgcattgagctatgatcgtgtcaccactgcactccagcctgggctacagagccagaccctgtctcaaaaaaaaaagaatgtgaagagacagagaactgaatgcaaagaccctaactcaataaaactttgttttcttcacatgcaaaacaatcagaaatgctctttgttttgtaatctggccaccagccactaggcccatataggggtggaggagcctagacctgctaatctcggcgcatgtgagtggggttattgctgtcctctcaacaagaacccagttttgagagacaggacttgctggatttcctaggctgactaagaattcctaagcctagctggggaaggtgactacacctacctttaaatacagggcttataactcagctcacacccaaccaatcaggtagtaaagagggctcactgaaatacaaattaggctaaaagcaggaggtaaagaaatagtcaaatcatatatcgcccgagagcacagggggagggaaaatgatcgggatataaatccaggcattcgagccgggaggggcaacctcgtctgggtccctcccattgtatgggagctctgttttcactctattaaatcttgcaactgcacactcttctggtctgtgtttgttacggctcgagctgagctttcgctcaccgtccaccactgctgtttgccaccgttgcagacccatcgctgacttccacccctccagatatggcagggtgtccgctgcgtttctgatatagcaaggcgcccattgccgctcccaatcgggctaaaggctcgccattgttcctgcatggctaagtgcccgggttcgtcctaatccagctgaacactagttgctgggttccacggttctcttccatgacccacggcttctaatagagctataacactcaccatgtggcccaaggttccattccttggaatccgtgaggccaagaaccccaggtcagagaacaaaaggcttgctgccatcttgggagcggcccaccactatcttgggagctctgagaacaaagacctgtccgttaacagtttccctatactgatccagctcctggagtatctgctccctgacatgtctctatgtccagtccccttgtcaagatgcatgtagatgcattagacacaacagatgtcttttgattctccatcaaaatcaataaaacataaaacatttggataacataaaaattgcaggtgacctgaatgccagtattgaaaacaggtccatttaaagcccaagtcatggcagagtaggctaggaggattccttccttttggcttcactttcagggatggtcattttaattaaggtggggatcattttaaaatcacatataaacacaaacaatattattaaatagtgatttctgacataaattagggaaaaatgtggttcacatttcagtcaaacaatatttaataattagcttttccctgcttagcgccatttataagacaggcatttaagagtcaaaaaaacaaacaatgttgctttactcttaatagccaaaaactggaaacaaccccagcactttgggaggccgaggcggttggatcacctgaagtcaggagtttgagaccagcctggccaacatggtgaaacccatctctactaaaaatacaaaaattagccaggcatggtggcaggcacctgtaatcccatctactctggaggcaaaggcaggagaatcatgtgaaccagggaggcggaagttgcagtgagccgagatcatgccacagcactccagcctggatgacagagtgagactccatctc

SEQ ID NO: 181307 - DNA, 599 bp, Homo sapiens
agatggtcaacagggagacggatgtgcagtcgggagtactgggtcgagtggtgcgtctctggacaggggccccagggtggctgctttcctcttccttcacaaacaggaatacactaacctccaaaatgaggctgacttaggtctccccagcatcgacagacagttttacagagttagtatctcaagttctagatgcaaattgcccggatttgaatattggctccatcatttacaagctgagtgaccttgggcaagggacttaacctctctaatcttcagagtcctcatccataaaatagacacagaaagtgcacctatcttgcggagttataagtgtataaagagataatccacataaagtgcttagcgcagtggctagcatgtagtaagtgcttaacaaatgacagctattagtattattagcattatgcttctgaaagcgtaagctgtacatcctctggaaggagaagaaatgaacccaggacacttcccctaccagtctcaggatgaacatactaagaaaaagttgaagattctatcagatttcttggacaccaatgaaagaacgtcactaaccatgaagaatgtttccatcataa

SEQ ID NO: 181308 - DNA, 118 bp, Homo sapiens
tgcctcagcctcctgaatagctagggctacaggcctgcatcacgtgacacccagctgattatttattttttgtacagatgggggcctcattatgttgcccaggctgttctcaaactcc

SEQ ID NO: 181309 - DNA, 229 bp, Homo sapiens
gcacacttagatttcacagatttagtaaggaaaaaaatgttacacgtttatatgtcgaaatggtattttgggtaagcatacctgctttctctgttaatgtggctcctagaaattttaaaatggcatgagtagccacattgtatttctgttggacatgcgcagatgtgcaagtatggagtttcacttcctccgtgcagcagccaccttcctctcccatgccctccacctg

SEQ ID NO: 181310 - DNA, 152 bp, Homo sapiens
aataaaaaacttctttgtattatataaaggtttagatcagaactagtaaaacagaatgctgtttctttttttttcttttctattttactttaggttctgtgggtagatgtgcgggtttgttacatgggtaaattgcatgttgctgaggcttg

SEQ ID NO: 181311 - DNA, 323 bp, Homo sapiens
taaccaacaaagagctgcagtggttctattggcaggcagaacagactttaagacaaaaatttttgctagaggtaaagaaggacattttataatgataaaaggtcaagaagaagatagaagatgtaacaactaaaaatatatgtgcacctaataacagagccccaaaacacatgaagcaaaaactgacagaattgaaagaagaaataattctttgacaagaatagctgcagactacagtaccccacttttaataatgaatggaacaagtagacatgagatcaataaggaaatataaaacttaaacaatagaacaactacaaccg

SEQ ID NO: 181312 - DNA, 247 bp, Homo sapiens
atagcggatcccccaaacgcagagaggaggcatatggaataaaggtctttattccagtgacctctgctcattggaaaactttgggctggtagatttcatgattctgacgctgtatgtcctcttgagttacagtgagtgatgaggccaaatcgcagggtggatgatgtgctttttttgggctaataggtgttaaggaggcatgctgtcctttggcgttaagacagatcatttcctcagttgggtaatg

SEQ ID NO: 181313 - DNA, 613 bp, Homo sapiens
attgtgacatatgagatacagtaatttggcatatgtattaagtttaattgatgttattgcctttgctctgtaaaggggatttgtttgatgtcccagtcaaaaaattttaaatacatcttgttcccttttaagatttccctagtggcacagtttccttacagttaaataattttgcattttttccctctcataatttaccatttacttcactcaccttaaaaaaaatcactaaagtaacaaaatcattcaaaacaaaatgaatgaaaaataaaatagtgtctgttaattttttcagatctcatttccactattgagatatattcctgttttactttagaagtattttctaaaatacacatagcaactcctttttttttttttaattttatgcatttagtggtgattttgcttcgtttttggtctgttttgccaaatatgcatagtacaacttgctaaaatttttgtaattaatgtacatttaaagtgcaggttttgcaatttaaggcaaagccacgttagcaatgtggacccttttaaatgtttcaaaccaatgacttaacggaaaaagccagtcaaggcacactctacacaaaaaccaacttagaactctcta

SEQ ID NO: 181314 - DNA, 1237 bp, Homo sapiens
aggggtagcgattcccgtaacgcggctcttcgcgtcccggattccggtggctgcgtccgcgtcgcctctcccagactagatcgaagggttccccccacctcccctctgtgggcggaaagagcggaatgttccatttttctgtggaataacggggtcatgaactggagcccgggtgctgcccgccgcccgctgcccccgccctcccttctcgccagggcgcctgcggcctctcttcgcggccttccccgagggactcagagccgcgagggaccgcctagctcccttggggatggggaaggcgtgggagcctcttggggaaagtgaagagctcggtggccgtgactccgcacgagactgcggcagattgtggcggcggcttctctccaagacttacgatttacggaatggccatcttccataattaacaaataaataaatgaaatttaatgtcagggtcaaatgaaactggaaacaaagcttatctggtgatatatcaaattatgagagtcattatttggatgtaaggatatatgacagatagactcttaggagaaatgctatgacctcctgcttcttggtattccttgtgtgatttcctcctcttgagtgtgaaggcatgtatgtcattgagttatataagatagtgcccatcttgctagtgtctctctctctcttgtggctctgaaaaatcaagctgcctgccatgtttgagctttgatatggaaagacccacatgttaaggaactgagggcagactctgccaacagctagctttgaaactgaatctcccggccaggcacagtggctcatgcctttaatcccagcactttgggaggccaaggtgggtggatcacaaggtcaggagttcaagaccagcctggccaagatggtgaaaccccatctctactaaaaatacaaaaattagctgggtgtggtggcaggcacctgtaatcccagctacccaggaggctgagggagagaatttcttgaacccaggaggcagaggttgcagtgagctgagatcacgccactgcactccagcctgggtggcagagcgagactccatctcaaaaaaaaaaaaaaaagagagaaagaaaccaaatctctcagtcctacaacctcaaggaactgaattttgccaacaaaagcagatccttccccagtcaagcctcagatgagacagcatcctcagctaacaacttgtttgcagcctcatgagaactgaagcagagaaccc

SEQ ID NO: 181315 - DNA, 1993 bp, Homo sapiens
  misc_feature (1831)..(1831): n is a, c, g, or t
  misc_feature (1878)..(1878): n is a, c, g, or t
  misc_feature (1894)..(1894): n is a, c, g, or t
  misc_feature (1945)..(1945): n is a, c, g, or t
  misc_feature (1949)..(1949): n is a, c, g, or t
gcaccggctcgcggcgcgtggaggctgctcccagccgcgcgcgagtcagactcgggtgggggtcccggcggcggtagcggcggcggcggtgcgagcatgtcgtggctcttcggcatcaagggccccaagggtgaaggcgcggggccgccgccgcctttgccgcccgcgcagcccggggccgagggcggcggggaccgcgggttgggagaccggccggcgcccaaggacaaatggagcaacttcgaccccaccggcctggagcgcgccgccaaggcggcgcgcgagctggagcactcgcgttatgccaaggacgccctgaatctggcacagatgcaggagcagacgctgcagttggagcaacagtccaagctcaaagagtatgaggccgccgtggagcagctcaagagcgagcagatccgggcgcaggctgaggagaggaggaagaccctgagcgaggagacccggcagcaccaggccagggcccagtatcaagacaagctggcccggcagcgctacgaggaccaactgaagcagcagcaacttctcaatgaggagaatttacggaagcaggaggagtccgtgcagaagcaggaagccatgcggcgagccaccgtggagcgggagatggagctgcggcacaagaatgagatgctgcgagtggaggccgaggcccgggcgcgcgccaaggccgagcgggagaatgcagacatcatccgcgagcagatccgcctgaaggcggccgagcaccgtcagaccgtcttggagtccatcaggacggctggcaccttgtttggggaaggattccgtgcctttgtgacagactgggacaaagtgacagccacggtggctgggctgacgctgctggctgttggggtctactcagccaagaatgccacgcttgtcgccggccgcttcatcgaggctcggctggggaagccgtccctagtgagggagacgtcccgcatcacggtgcttgaggcgctgcggcaccccatccaggtcagccggcggctcctcagtcgaccccaggacgcgctggagggtgttgtgctcagtcccagcctggaagcacgggtgcgcgacatcgccatagcaacaaggaacaccaagaagaaccgcagcctgtacaggaacatcctgatgtacgggccaccaggcaccgggaagacgctgtttgccaagaaactcgccctgcactcaggcatggactacgccatcatgacaggcggggacgtggcccccatggggcgggaaggcgtgaccgccatgcacaagctctttgactgggccaataccagccggcgcggctcctgctctttgtggatgaagcggacgccttccttcggaagcgagccaccgagaagataagcgaggacctcagggccacactgaacgccttcctgtaccgcacgggccagcacagcaacaagttcatgctggtcctggccagcaacaaccagagcagttcgactgggccatcaatgaccgcatcgatgagatggtccacttcgacctgccgggcaggaggagcgggagccctgggtgagactgcattttgacaactgtgttcttaagccggccacagaaggaaagcagcgcctgaagctggcccagtttgactacgggaggaagtgctcggaggtcgctcggctgacggagggcatgtcgggccgggagatcgctcagctggccgtgtcctggcaggccacggcgtatgcgtccgaggacggggtcctgaccgaggccatgatggacacccgcgtgcaagatgctgtccagcagcaccagcagaagatgtgctggctgaaggcggaaggatcgctcggctganagagggcatgtaatgccggaagatcgcacagctggccgtgtcctggnaggccacggcgtatgntccaaggacggggtcctgaccgaggccatgatggacgcctgcttgcaagantttntccagcagcaccagcagatgatgcgctggctgaagggggagagg

SEQ ID NO: 181316 - DNA, 1989 bp, Homo sapiens
  misc_feature (1827)..(1827): n is a, c, g, or t
  misc_feature (1874)..(1874): n is a, c, g, or t
  misc_feature (1890)..(1890): n is a, c, g, or t
  misc_feature (1941)..(1941): n is a, c, g, or t
  misc_feature (1945)..(1945): n is a, c, g, or t
gcaccggctcgcggcgcgtggaggctgctcccagccgcgcgcgagtcagactcgggtgggggtcccgccgcctttgccgcccgcgcagcccggggccgagggcggcggggaccgcgggttgggagaccggccggcgcccaaggacaaatggagcaacttcgaccccaccggcctggagcgcgccgccaaggcggcgcgcgagctggagcactcgcgttatgccaaggacgccctgaatctggcacagatgcaggagcagacgctgcagttggagcaacagtccaagctcaaagagtatgaggccgccgtggagcagctcaagagcgagcagatccgggcgcaggctgaggagaggaggaagaccctgagcgaggagacccggcagcaccaggccagggcccagtatcaagacaagctggcccggcagcgctacgaggaccaactgaagcagcagcaacttctcaatgaggagaatttacggaagcaggaggagtccgtgcagaagcaggaagccatgcggcgagccaccgtggagcgggagatggagctgcggcacaagaatgagatgctgcgagtggaggccgaggcccgggcgcgcgccaaggccgagcgggagaatgcagacatcatccgcgagcagatccgcctgaaggcggccgagcaccgtcagaccgtcttggagtccatcaggacggctggcaccttgtttggggaaggattccgtgcctttgtgacagactgggacaaagtgacagccacggtggctgggctgacgctgctggctgttggggtctactcagccaagaatgccacgcttgtcgccggccgcttcatcgaggctcggctggggaagccgtccctagtgagggagacgtcccgcatcacggtgcttgaggcgctgcggcaccccatccaggtcagccggcggctcctcagtcgaccccaggacgcgctggagggtgttgtgctcagtcccagcctggaagcacgggtgcgcgacatcgccatagcaacaaggaacaccaagaagaaccgcagcctgtacaggaacatcctgatgtacgggccaccaggcaccgggaagacgctgtttgccaagaaactcgccctgcactcaggcatggactacgccatcatgacaggcggggacgtggcccccatggggcgggaaggcgtgaccgccatgcacaagctctttgactgggccaataccagccggcgcggctcctgctctttgtggatgaagcggacgccttccttcggaagcgagccaccgagaagataagcgaggacctcagggccacactgaacgccttcctgtaccgcacgggccagcacagcaacaaccccagtcacgtgtcacacggaggatcaagtcctgctggtcggacgtgggtgactcctcaggcacgttggggtcccaaggttcatgctggtcctggccagcaacaaccagagcagttcgactgggccatcaatgaccgcatcgatgagatggtccacttcgacctgccgggcaggaggagcgggagccctgggtgagactgcattttgacaactgtgttcttaagccggccacagaaggaaagcagcgcctgaagctggcccagtttgactacgggaggaagtgctcggaggtcgctcggctgacggagggcatgtcgggccgggagatcgctcagctggccgtgtcctggcaggccacggcgtatgcgtccgaggacggggtcctgaccgaggccatgatggacacccgcgtgcaagatgctgtccagcagcaccagcagaagatgtgctggctgaaggcggaaggatcgctcggctganagagggcatgtaatgccggaagatcgcacagctggccgtgtcctggnaggccacggcgtatgntccaaggacggggtcctgaccgaggccatgatggacgcctgcttgcaagantttntccagcagcaccagcagatgatgcgctggctgaagggggagagg

SEQ ID NO: 181317 - DNA, 1910 bp, Homo sapiens
  misc_feature (1748)..(1748): n is a, c, g, or t
  misc_feature (1795)..(1795): n is a, c, g, or t
  misc_feature (1811)..(1811): n is a, c, g, or t
  misc_feature (1862)..(1862): n is a, c, g, or t
  misc_feature (1866)..(1866): n is a, c, g, or t
gcaccggctcgcggcgcgtggaggctgctcccagccgcgcgcgagtcagactcgggtgggggtcccgccgcctttgccgcccgcgcagcccggggccgagggcggcggggaccgcgggttgggagaccggccggcgcccaaggacaaatggagcaacttcgaccccaccggcctggagcgcgccgccaaggcggcgcgcgagctggagcactcgcgttatgccaaggacgccctgaatctggcacagatgcaggagcagacgctgcagttggagcaacagtccaagctcaaagagtatgaggccgccgtggagcagctcaagagcgagcagatccgggcgcaggctgaggagaggaggaagaccctgagcgaggagacccggcagcaccaggccagggcccagtatcaagacaagctggcccggcagcgctacgaggaccaactgaagcagcagcaacttctcaatgaggagaatttacggaagcaggaggagtccgtgcagaagcaggaagccatgcggcgagccaccgtggagcgggagatggagctgcggcacaagaatgagatgctgcgagtggaggccgaggcccgggcgcgcgccaaggccgagcgggagaatgcagacatcatccgcgagcagatccgcctgaaggcggccgagcaccgtcagaccgtcttggagtccatcaggacggctggcaccttgtttggggaaggattccgtgcctttgtgacagactgggacaaagtgacagccacggtggctgggctgacgctgctggctgttggggtctactcagccaagaatgccacgcttgtcgccggccgcttcatcgaggctcggctggggaagccgtccctagtgagggagacgtcccgcatcacggtgcttgaggcgctgcggcaccccatccaggtcagccggcggctcctcagtcgaccccaggacgcgctggagggtgttgtgctcagtcccagcctggaagcacgggtgcgcgacatcgccatagcaacaaggaacaccaagaagaaccgcagcctgtacaggaacatcctgatgtacgggccaccaggcaccgggaagacgctgtttgccaagaaactcgccctgcactcaggcatggactacgccatcatgacaggcggggacgtggcccccatggggcgggaaggcgtgaccgccatgcacaagctctttgactgggccaataccagccggcgcggctcctgctctttgtggatgaagcggacgccttccttcggaagcgagccaccgagaagataagcgaggacctcagggccacactgaacgccttcctgtaccgcacgggccagcacagcaacaagttcatgctggtcctggccagcaacaaccagagcagttcgactgggccatcaatgaccgcatcgatgagatggtccacttcgacctgccgggcaggaggagcgggagccctgggtgagactgcattttgacaactgtgttcttaagccggccacagaaggaaagcagcgcctgaagctggcccagtttgactacgggaggaagtgctcggaggtcgctcggctgacggagggcatgtcgggccgggagatcgctcagctggccgtgtcctggcaggccacggcgtatgcgtccgaggacggggtcctgaccgaggccatgatggacacccgcgtgcaagatgctgtccagcagcaccagcagaagatgtgctggctgaaggcggaaggatcgctcggctganagagggcatgtaatgccggaagatcgcacagctggccgtgtcctggnaggccacggcgtatgntccaaggacggggtcctgaccgaggccatgatggacgcctgcttgcaagantttntccagcagcaccagcagatgatgcgctggctgaagggggagagg

SEQ ID NO: 181318 - DNA, 154 bp, Homo sapiens
ctggctgaaagagaaacaagaggttgtgacagtgccaggaacggggcagactcttaagcagtagcgctgcttctctccccacttcacacaaactactgtggggcagcataagagcctgtgccaagccgagaggcatgggcaagccgaagctcag

SEQ ID NO: 181319 - DNA, 106 bp, Homo sapiens
gttcagctattcagaagctcccaaaccctgccctcttgggcttttcatggagactgcactggataggcatgattgacaaccatgaagaaatgtgactggacctaaa

SEQ ID NO: 181320 - DNA, 940 bp, Homo sapiens
gcggaatattcctggtttgctggttctctgtgacaatttggttactctggaaacattggtttatgaagccaggtgtgatgtaactctaaccctgaaagaactccagcagatgaaagacattgaaaaactaagattactgatgaatagttgttctgaggataaatatgtgacaagtgcctaccagtggatggttccctttcttcatcgttgtgagaaacagtcgcctggtgtggctaatgagctattaaaagaatatttagtaactttagctaaaggggacttaaaatttcccctgaagatatttcagcattccaaaccagatctgcagcgaaacaattattcctgatcaggaccaactgatggcaaatagcactagagtgcatctatacctgtgaacgaggatgatcaactctgtctttgctatgagcctactagaatgtctgccagaaagaggatatggtgatacagacagaggcaagacacataagcttcatgacaactggtagaccaactggaacaaatttctcagtgtgtcagagcctttaggaaaaaacgtggactcgagaaaccaataccatgttgttaaggaacactcaatctaagctcagaagaggcacgcaagctgaatgggttagaatgggacgaggcacactggccggaagcagctcctgtcaggagtctccatggagaaagtgctgcagaacttgtgaactatgccgcagaagtgtcccatgtctagatctgatggctggtagagatattacagaagcctcgggagccaatcgctgaaactccccgggtgacgagcagacggcgggcgggcaaaacacacggatgccaagggaaccctacggagacacaaaaggaggggcgccaagataggtccaacgcgagggacccgggtaaaagccgaaggataaagggagaggaaacgaggaca

SEQ ID NO: 181321 - DNA, 425 bp, Homo sapiens
tagatcgcgccactacactccagcctggtgacagagcaagacttcctctcaaaaaaataaataatattaaccagtaccataagcactgtgctaagcatgttacgtgtattgtcatgtgagcaagatgtaagatacacaagggtagggttttgtctgtttggtttactattgagtccttggaacttagaacagtggctagcacattgtagccactcaacaaaaatttgataaatgaatgaaagttctcccataaaggccacgggatttatcctggtactggcaaagtgacacgcagagatttgaaaccaggtggtttcagtcaacacctcactgcctctgttatcacatggttcagccagcacaccctcatccagcccatcttgttttcaattaaataaacaccctttggcaatggaataactaaa

SEQ ID NO: 181322 - DNA, 845 bp, Homo sapiens
tactctaatacttgaagggggcctgcctctccacacctgtgggtatttcttgcaaggtggagacgagacactgagaaaagaaataagacacagagacagtatagaggaagaaaagtgggccaaggggactggtgctcagcaagtgaggacctgcaccagcattggtctctgagttccctcagtatttattgatcactatctctactatcttggcgagggggatgtggcaggactatagggtaatggtggccagagggtcagcaggaaaacatgtgagcaaaggactctgtgtcataaataagtttaaggaaaggtgctgtgcctggatgtgcacataggccagatttatgtttgactttacacagacatctcagtgcagtaaagagcagtattgccgccagcaggtctcacttccagccataaggcagttttctcctatctcagtaaatagaatatatgatcaggttttacactgagacattccattcccagggacaagcaggagacagatgccttcctcttgtctcagctgcaaagaggccttcctctttcactaatcctcctcagcacggaccctttatgggtgtcgggctgggggatggaggtctttcctttcctacaaggccatatctcaggctatctcagtggcgggaaaccttagacaatacccaggctttcttgggcagaggtccctgtggccttccacagtgcattgtgtccctgggtacttgagattggagaatggtgatgacttttaccaagcatactgcctgcaaacatttttaccaaggcacatcctgcacagccctaaatccattaaatcttgagtcaatatagcacatgtt

SEQ ID NO: 181323 - DNA, 532 bp, Homo sapiens
attataagccctttaatagtcagtcctttgacaagattggtatcattgggtccctatgcttgaattactgtgtttaatctgtcatttgaaattatttgtatctatcaggtctgctttacacgaaacacctttttctggtatgagaacttcatttgattaaagggaagggggatggtttggagattgagtctggagataaggctgcatctctgactgttgtccttttactgatactccttcctatgctgggcaacttaatctatctccttgctttgtaaatcttgcttgtgcgagaggcagtgtccggctgtgacaagactaataattggggtcaggtaaactccaatttggaacatctccacttagcagctttttttactttgggcaaagcatatcttcttctgaaaatgagcatggcaatgcctgccatgtagggttgtaaagcttaaatgaggtaatctattcaggataaatatatacagtgtagttccacagtgtttggaacttggttggcattgttgggccaggaaca

SEQ ID NO: 181324 - DNA, 649 bp, Homo sapiens
gggacccagagaacagagagaagagaagctgggcaccagcctatctgtgttcagcgtggtgccaggagaacctcttcaacacaggaaatggtgagttagtgagagcctcctgggggaatttgtgctgtccacaggaacctgtacaagactggaaatgggagaatacccctgcccctcaacccccacgactccactctgcttctagactgagacagagagctacctggatattttgcaggaacaagtcctgagtccaggaagacccctataagcctttggcccttgagcaggccagcaccaatgccacagccccagcagaggctgcagtcatagtgcctgggggcagtaagactgcttcatcctcttgccggatggggctcagtgccagcttctggctcagtggtcctgcttctttctgaactcagctagtaggtgcagccccctgttttaccaggaaacacccaggcagcagggcaggtggccctgctcacccccactgctggaagccaggtgggcaatgcctgctagagtttccagctcagcaatctctcctctgtctaaactcagccagtgggcacagcctccttttgtcctgggaagcacctggatggcagggcaggtgaccccacccatacctgctgctggtagc

SEQ ID NO: 181325 - DNA, 435 bp, Homo sapiens
ggttaattcaaagaagacaagaaagaagagaaatgaataatagataaaatatgagactaataggaagaaaagtattgaaggaagtcaaaggaaatacatgtggataggcaggttgaagccagattgcatgtgtccttcaaagccaaacggaggaatctgatatgatttgctcggcaatgggatatcactttagattcttagacagtgatgctgcctaacaattatacttgacagggattagtcagtaattaaatacataactgaagagaaaaaaaatttacacatcactttttaacatcagctagtataaaaactcagaccagtcgtttacctattagataaactaagatcctaatctgataaatagcccttctacttgaatacattcattacaattcctggtcatcagtggtcaatctttaaccagacaaaaag

SEQ ID NO: 181326 - DNA, 744 bp, Homo sapiens
agtgtaagggggatatgttaaaagattttcttctaataacaggccagccataaggttttttcccccaatttggcacatgaagattataatagaagaactattattatattaaattaactaatcttacaaaatagatttttgtgctttttatattatgtttaatttcagattttgcagcaccattatattcagagcaattatgtgggtgactgctctatgagtcaccagctgaaatagaaaggttgggctctggtgtcctatttgattgggaagctggaaggacaggctgtattgagcacagacatttttcataattatgttgcctgcagggttgccacctgtcctaatttgatctgattaaggtgaaatgcaaaaacggttctcatttctttcagagtggagtgatgccaagcttcatctcaggaaggaagaagagatgaatacacatacaaccaaggaggggagggttgtgtctctaatactctgggaaactgggggacattggcctcactgtgattggtggtgttaagtttgtagacaaattctgaagagtgttttggcaggaatgatggaaatgttaaatggaacgatactttaacccggtggtagtcgcactttggggagtgtgtccaatttaatgcctctgaatggtttgcaaatatgcatgtctaggtgactcactgacaccaatatgatcattagggtttgcctcaaggatattgcaaaggtgcgtagccattaaaa

SEQ ID NO: 181327 - DNA, 828 bp, Homo sapiens
ggaagtctgtttgagaacagaggcaggctcagatgggagcagctcctaccccgggccgcctatccccctttaccctggggtttcttttagctccaagcatccattccagtctaacaaatctggtggcagagtctctttttttttttttttttggagacacaagaaggtcctccccctcttgttgcgcccccgaggtttgggagttgctagtggggccaccaaaaaatctctcggggctctcaacgggcggaagccctcacggccttctctgggggcctccaagggcgggattcctctttgtgccctttcaaaggccctccctgtgggaggtatctcgggggcgatctggcagggccgttgtgccaccccacggtgtctgggcctaacttttccgtggtatctctaatttaggtaaagacagacggggccgggggtctccatacctaaataatgtccacaacagaacgggtttggggtcttgggaaacttcctggaagccttcaaatttggtatccacgttggcgcctcagggccccccccacaaatgggtggctgggggactcccaggcggcggtagaagccctcttggaaccacgagcccctttggtgtttctaactggagaaccacctaagaatcttccatttttctgtgcgaccaaggggggggtgggcgactaaaaatggcttcggctcctcaaagccctaccagtttccatggtaggaactcacctagggggactttggccaaatttgtcattggccccaggccccaccttggaggggaaaccttgccaacatgtgggcgggcagacctcacgggttttccaa

SEQ ID NO: 181328 - DNA, 139 bp, Homo sapiens
atgccctcccaggactgctggtagtaagtgtggatttcaaatgtcactcctagcagccctgaggctgacatcggatagagcagttcctcaaggatttcagagtccaggacatgggaaattggggtggtttgttttttag

SEQ ID NO: 181329 - DNA, 141 bp, Homo sapiens
atcttgtcttcgtgtcttcgtgtcttcgtgctctgacttctgtctttctgtctcaaaaataaataaataaataaaaataaaatcctgtaaactaaaatggaactcatccaaatagaatggtaccttccttaaaatgttgga

SEQ ID NO: 181330 - DNA, 519 bp, Homo sapiens
gggtaagagacaagagccaactatttcagggtgaaaaagatcagttagaaacctattaatatataaaagttaaaggaattacagtatgaaaaatgtaaagaatgactggcagtcccactgccttcacgaatgactatgccaaaaagggaaaagagtttaacttgaaaataaattatactaaatgttcaaggactaacatttaataagggagaagagtgatatggtagggaaagctttgtgccaactttcaactgcagctgtagtgaaatacactaaaagccttgtcttaagacaaaagcagtaaaataaaaacaatggttttaaacatatccccagtgtcaactgctcatgaccataaatttgcctttttctaatgaacaactaatgggataaaaggccatataagggaaaaagtagtcgaaaatacaatcgaacaaacttctcacacaagactaaaccataaaacctgtttacaaattttcatacatgtcagaattaaaggtaaaaacactcaaagct

SEQ ID NO: 181331 - DNA, 521 bp, Homo sapiens
gaccctctccctcgttccgcccaggaagggacccggggaaccccctgtgtcccacgggccatagtgaaagcacttttcctttctttccccacctggccatccccgcttacggagaaaccagtttgtactcttcgtgcaagagccctggaggagactttagggtgtctaccatttgctttaatctcccctgattattaagtattcggcctctttagagaaatgtattcaagacttgggggtttccttcctaattctccgagtcccaaggaacgcatcttaataattaggaggactttttccttcttcattcccttcagtgagtctctgtggaaggaggatttgatgtatatattcatgtgttcctccatcctttaggaagggctttgaggacttcttggctctgcgttgtaggaagataagaagggggaaacactgactttggagatgtgacaaaactctttgtttcactcacatatctgtagagtacttccctccttatatcggttgccttccttctgtcc

SEQ ID NO: 181332 - DNA, 285 bp, Homo sapiens
ttttatatatggaatacatagatatatttatctcacagtaacacacatgtgcacacacgcacacacacacacactcacagcccctgcatgctggtagtgtgagattgtataccccatactctatatgattctgctttgtattcctttgtatatactgttccccatagcgtggaatgtccttttctccccttgtctgctgagagcactctagttgctctaaaacccattttagctttgcctcctctgaaatcttttgtgctgcctgctgacggttactttctggcg

SEQ ID NO: 181333 - DNA, 452 bp, Homo sapiens
ctggttcctcaaattcaagtatttaaaactgaactcaccaactcctgtcaaacttactccctaaatatttctcaaatgtgccttctgtctatcatgctatcattgcccttgtttaagctctcatatcctgcttttattttaaaaaccattcttagataaaacatccctctccttgacgcctttttctatctcctctggtagcctcctaagtgatttatacagatctaaaatcttaccattctcattcccttgcatttcatggcttcttaacaccaagggaataaaaactccaagtatgttagcatgacacacaaactttccatcatgtggcacctgcttattactttccagggtcgcctgtattcactctgctttttaaactttccatgacgtggcacctgcttattactttccagggtcgcctgtatttactcttcttttcatacttcaca

SEQ ID NO: 181334 - DNA, 243 bp, Homo sapiens
attgtctctgaaaaaaaaagaaaacaatacatacatatataggcgatcataataataggtatcacaaattatttgaaaagttataatgggagtttactggtatattcagacacaaattactaaaacagaattattgaataaatgtacaaagtttagatgcttatattttctttttcaaatttttcaggaacatattttattgatttttcatgcctttctatctactaaatataactatacttc

SEQ ID NO: 181335 - DNA, 619 bp, Homo sapiens
ggtgggaacagcctatatgtagcaaagcttttatgtaccaaaaagtactgtaatacccccttactcactgtccacctattgaatcatcatttgtgacctcccctgcaatctaatgccaaaagcctggtgattcaagacaaaactacaaaaaaaaaaacagcagaggacatcagggaaaacaaaatagcatttcaacatgtattttcaaaacctacacaaaagcagacttcatgaaagataaaattcgttgtttaaaataagtacttaattttgagactaagcattagctatttgtagtaagagtcctaaggttttgcagataaaaagtgtactctggccaggcacggtggctcacgcctgtaatcccagcactttgggaggccgaggcagatggatcacctgaggacaggagttcgagaccagcctggccaacatggtgaaacccgtctctactaaaaatacaaaaaattagccgggtgttgtggcaggcgcctgtaatcccagctacttgggaggctgaggcaggagaatcacttgaacccaggaggcagaggttgcagtgagccaagattacgccattgcactccagcctgggcaacaagagtgaaactccatctca

SEQ ID NO: 181336 - DNA, 346 bp, Homo sapiens
atcaattaaatccgggcaatgccacatactctgttctctctcttggggatttagcatacatttacagaattgttaaaaaattgccttgtgtctctagtttttaaatttaacggaaatggatttttgtcatcgtatgagagtggggatccctcagagcctgttaattctcaaccttgccttctgctgcctcccttgttgaaaggccctggattttcctttacaccactgctgtaggcaaaagtcatggggctaagtcagtcccaggagggacactgactcttctttcatggataatccttttcccctggcactcaggtgggatcaaaaccgagtcatccactattcc

SEQ ID NO: 181337 - DNA, 523 bp, Homo sapiens
ccaacgttttaacttctagaaactgaccaagggggatggtacctacgaagtactcaaaacatatttattagataagttagtagacactgtccaaagtattgtgttaagaagaattgtgagtctggacccaggttctggagagaagatgagaacactggtgtgtgtcctgaggtttcaggatgggaaagtgttggcacataggccatgtatttgccatcccagagaaagaaactcagtctccccaaaattaagaggaagatgacacagaaagtcagtaggagagccaggtaaaatgcaatcacttctttccaagacctttatctcttacttggaagtcaaaatgaacacatttgtaatggagaagaaatccatggtcaacagtgaggtgctgatcaaaactgcaatcagattggattagggagagatcagagtggatggacatcagcatggaaggctttctggaggaagcagaaaatcgagttgccccttgatgagcgattatctggaaacttcctttgttgtc

SEQ ID NO: 181338 - DNA, 106 bp, Homo sapiens
gcacccggccgttgctcattctcgtaacagtctggagatgaggaaccttgttccttccattttctctcttcaccatcccctgggctcaaggtgttggcctctgtat

SEQ ID NO: 181339 - DNA, 719 bp, Homo sapiens
ctcctccagcaggaagtcagtcccagaatagttgttctgctccctcccttctaataagtgctgcgctgagtgtgcttgctttgccagatggttaaaacagagcaggggatagaaggacagatgtcttcaccctcatggagttcaccttccagtaggaggaggcgataggccggggtctgcacatgtgcgtgctacagcctgttccacgtagagacaggatttcaccatgttggctaggatggtctcgatctcctgaccttgtgatccgcccctccctcagcctcccaaagtgctgggattacaggcgtgagccactgcaccctgccagaaaactcattcttctactccatcctacagttttccctaagagagaaacaataaaacgccaccacgaccaatggcaaaaagctggcacccactccacgacttttcatatctacacgtttgtacagctttatttttaagcattctgaaattctatgcaggagagaccccagctaggtttagggagtcctagggtttgtggagtaaatgaagtttctccctagaattagggagggtagagacaggcagagaactgacaatcctaacagctgctgtcctcagagccactgtttctgagagctgctcgctgagtgcttctagcgagttaaatggtgttcgcccaaaagacctgttcacgtcctgatcctgggaacctgtggctgtgatcttatttg

SEQ ID NO: 181340 - DNA, 876 bp, Homo sapiens
aatggacctttctccaaggaaaatatacagctggctaataagcacatgaaaaggtgctcagcatcactaattattaggaaaatgcagttcagaacttttgtgtgataccactttgcactcattaggatggttactttaaaaaagtaataataataattattggtgtgtatgtggagaaattggaacctctgtgcagatagtgggaatgtaaaatggtatagacgctgtggaaaacagtgtggcagttcctcaaaaaattaaacacagaattaccatgtgattaagaaattccattttgcatatgtaccccaaagaaatgaaagcagggtctcaaagaggtatttgtaaacctgtgttcacagcagcagcattcacaatagctaaaacatggaagctcaagtatgcatcaagagatgaggggatacgcaaaatggtgtgtacatacaatggaatattattcaatctttaaaagaaattttgaaacgctctaacatggatgaagcttgaggacattatgctaagtgaaataacccagtcacaaaatacaaatactgaatgattctattgatatgagtatttgtgcaatcagaagtcatagagacatagacgctgatccagaacattaaaaaaaaaaaaacagtaactcaacagtggagaatctgggcagacttccctttaaccaggttaagatctccggtaatgagtcaaatctacatcatctgcctctgatatgatgcactgaaaggacacatcgtccctttctgtggtgtccccgacactaccagaaaataaccagaatccaaacaggagacagcattcagacaaacccaatttgagggacattctacaaaaggggtagtcacaagacgggtaccg

SEQ ID NO: 181341 - DNA, 253 bp, Homo sapiens
aggaacaggaggaggaggaggaggaggcacaggaggaggaggaggaggcacaggaggaggaggaggaggaacaggaggaggaggaggaacaggaggaggaggaggaggaggcagcggcggcactgtgggtcttccacagggtgtgcccggaggaggtcaagactccactgccctgaagcaaacaaggcgtccagcccgagccagggtcacacgcccaacaggtaggatccagcaacccctgcgcagcagcccc

SEQ ID NO: 181342 - DNA, 602 bp, Homo sapiens
gtacacgagaagcaaagttataagagtggttgaattttcccaagagaaagttaaatgtttctaggacagaaacctgatgggtgttccggtaatggtgagagaacccaggagagagtggtattccacaataagggtagaaaatgcttttagaaagaactgctaatcatgtgaaacaccgctgtggggtgagtggaggtaaagacaggaacacatccaacgacttaacaacaaaggggtcaccagagaactgggttcagtgataaggtggcaagcccagggtaaatgggaaggaaagatatagacagcaaggtgctcgcctggttgtctgaaggaagacggagaaaagacagcacaggggctttgaagtttgggtgacttaagtattctaggaaaggagaaatgaatggagatagatataagatgcttgtagaggggtgtttggaagtgggtgctccagtgagacttggcatggtggaactctcacactcaacaccattcatttcactagcttatgaagatgctcctcccctctcctcacccactcatctccttcattctctcaggaggctgagggaacaggattgaaactacaatctaatacg

SEQ ID NO: 181343 - DNA, 152 bp, Homo sapiens
accctgagtctgtgggggcttgtggagacctcagatgcctggcacccacagtgtcacttcagctgggggcctaggtgtggctcagactggggcgcaggtatgaatgtaggggtggcaacaagagtgaaggtaccaggtctaggggcaggagg

SEQ ID NO: 181344 - DNA, 420 bp, Homo sapiens
ccctcaacctacgaggactccacttgacttcatcctgaaaacacacttaggtacaggtaagtatgctttcagtgtcccagaacagcgtattcgaaaccagatcacgccaccgctcagctggacctgccacccttataataaaatcaaaactcggccgggcgcggtggttcatgcctgtaatcccagcactttgggaggccaaggcaggtggatcacctgaggccacaagttcaccaccaacccggccaacatagtgaaacctcgtctccaccaaaaatacaaaaatgagctgggcatggtgggaggccagggtaggaactagggtgaggcaggtgagccacttaccttgggtgcaaaatttaagaggcaccaaaaccctcaagaattaagaattaatgcaatactttcacttcttccttc

SEQ ID NO: 181345 - DNA, 175 bp, Homo sapiens
ggagaatcggttgaacctggaaggcgaaggttgtagtgagccgagatcacaccactgtactccagcctggcgacagagcgagactctgtctcaaaaaaaaaagagtggtggtggtcagagatggggcagtggcagtggaggtagatatggatggactagagaaagatttaggaat

SEQ ID NO: 181346 - DNA, 287 bp, Homo sapiens
cactgcactcacgccagcccaggcaacaagagaaaaactctgtctcaaaaaaaagggaaataagacttgtcaagacaggcggcataagttcaagacctctattgtgcaggctggggactacagttcccagcaatatattatatacttgaaaattgccaagagagtacattttaagtgttcttaccttaaaaaacaaagtatgtgaggtcatgcatataactagcttgatttagccattctacaatgtgtacctatattaaaatgtcatgttttacatcatctttatc

SEQ ID NO: 181347 - DNA, 345 bp, Homo sapiens
tctaggggctttttagtctggcaaagtccaaactcaaaattcatttactcaaactattttcagtgggggtttctttgcctggtactgtgtaagtgttggagatacatgaacgagttggacaacttgttgtagaagagagccccaaggagaaatgggtgtgtaccaggagcatgaagcaaaggcattttgagggcacttgaggtccattcattcactctccagccttcctcccttaatgtaatcagtacccattctgaagcccctggctccctcctccacttctggggtgcagcaaaaatacttcttcagggaagatttttttgactcattgatggggagagattc

SEQ ID NO: 181348 - DNA, 829 bp, Homo sapiens
agccaaagggggaataactgcagaggaggaagggtcactgggctgcctgcagcagccctgggctgaggaagttccctgcaaggtgactactatgactccagaagaaaagataccaacaggagtgtctcctggacttttagcaagggattatgacctctgcccatgcccagccattgctctgtggttctgccagcaatgcgtactccagatcatcagtttttttcgggaaccatattctgtccttaagttggattcttcaagctttgagagtgcctgggagaaaacacctttgggtttacagatttatattgtagcccaaggccccactaaccagatagcattgtccttcccaatggtcactcttctacgacatcccccaccttcccaatggtcactcttctacgacatcccccacatgcagaagcaagaagaaactggtcttctcctctcaagcacttgtaaagaaacacaaggggtggggtgacttgcattcatttcttcccattgcaaaggtggcacccagcactgaggaaagcaagccaggatacccaggctatggaagtattcatatagagaggatgaaagggtagggctcctaaggaatgactcagctggcatgtgagagccaggccaggaaaaggtcatagtcagtcacacctgctgcaaggaaggggctgcctcaggtgggatgtacatattctctagagcagatgggtgtctgcttgagggttttagacttgggtgcatgaaaactctctgctatggggagtttgtgtgggctaggccagaaggtggctagcagaccctctacattatgtgcgctgagcca

SEQ ID NO: 181349 - DNA, 410 bp, Homo sapiens
agtgcaatggcatgatctcgcctcactgcaacctctgccttgtgggttcaagcgattctcctgcctcagcctccagagtagctgggattacaggtatgtgccaccacacctggctaatttttgtatttttagtagagacggggtttcaccatgttggtcaggctgttctcaaactcttgatctcaggtgatccacctgctgaggcctcccaaagtgctgagattacaggctagagccaccgtgcccggcttgtgtgtccagattatcatcatcaggaatctttcaggttgaagcaggaaagacaggtgtgcaggcgtcccaacaaggtggttggtcattgcaaatcctctccccttcagcaattgtttccaaggtggaggtagttaaaatgaatatctagacagcccttg

SEQ ID NO: 181350 - DNA, 311 bp, Homo sapiens
tacaattaatcgcatctgaatcctctccaatgacatcttctcagttcttcctcctcacacttcctaaatgccagtaactcccccaggctgtatctccacactgccccttagtgagctgaccctgccattcagcctctcttctgtggaccagctcccataacacgagttatgtcctctcctccaagctccagtgcaaactttcaacctgccaacaagatacctccaactcagtgggttcaaaaacaaccaccatctttcccacccacactagttcatccttctgctttccttcaagaccctaatctccctga

SEQ ID NO: 181351 - DNA, 146 bp, Homo sapiens
cctggatctcagaatcaagtttcatgctttataccactgagttgattaagcccctgaaggctgggcagtgtttttaatggattgtttctagttttgataaagtgatgggggaaaataagcttagaatctttagtttgaaaaggaat

SEQ ID NO: 181352 - DNA, 543 bp, Homo sapiens
gatcaaaaatcactttcctgaagtagtttacagtcaagagatgtccatgaattgtcattatcagaatgggtacagagtttacagagttgaaccttggagaattaaagaatgtttaatggttaacccatttatgcctgaaattgtaattttttgaatttgaaaaatcagaccttggtgatgaccttgagcagtaggatattaataactcccacatgcttagtgttcaaataatggaacactaggcataaatggattaaataatgcaggaatggaaagtgtgaacagatgtacaactgctgtagagcttgtatcagttgtcagaaaccttccaacaaagaaaagcgtaggaccagatgggttcattgattaattcaatgaaatgttaaaagaaattaatgccagtccttctcatagccttccaaaaaaactgaagaggaaggaatatttccaaattcattagtaggccagcattaccccagtaccaaagcaagacaggccacaaaaaagaaaactatagcccaatatccttgatgaatatagatg

SEQ ID NO: 181353 - DNA, 390 bp, Homo sapiens
atcttaaacattcagtgataaaattgacaattagctggtgtagctttagcaaaatttgaaagtcagccttctattttcataacaacattggattttctgttttcattcttgtctctttgcaatccattgtatacatggaacccaagggattgtgtaaaaaatcaaacaaatcagccatcatgttgttctcttggctaatgggttcatatgacttctcaatgctttctgaacatatccctactccttactatggcctaaagaccccatgtgatctgaccccagatgaactctcttttcttatcaaatatacctagccaggtaaatcttgtctcattctttgccacatcaagctgtttcctgcctgagggccatcgtcttgctatgtcctca

SEQ ID NO: 181354 - DNA, 291 bp, Homo sapiens
gccagtgacattaattctggcaatgtgctgacccccctctcagcagggccatgggcacagagaagacaaggagagtcccggttaaggggctgttcccgaaggacagttttgtctccagcgtcatcggccggccattgctcacttgtgctgtggacgcatgtgtgggtgacgggccttccgccacgtgctaagggcaaagtgagcctgctccctaccacatctggaattcattttgcagtgggttatgggaaggtacagttctggtttagtgtgatcaaagtcagttaggct

SEQ ID NO: 181355 - DNA, 108 bp, Homo sapiens
ccttctggaatagatttaattccactgtaaagaatcatcaaatattttcttttggcatgacaaaagtcaggcacctgtgtcatagcttgaacttgaaaacatgacagt

SEQ ID NO: 181356 - DNA, 550 bp, Homo sapiens
accggagtgcatgtcttttgcagaaaggaaattcttgaatgttaaaagaaagagaaatgaacaaaacttttcccactttggggtctttttcttatccacaagacactggactaatgagtgtctgtaacttgcacagatgtcctcatctagaaggtctgatgggacattcagcatgcattgctgtctgctgggaggaggactgagaattttcatggctgcatggctgtgttcctttatttatttgcccctcgtggaaactcgtgggtcactcggatgtagcaacaatggatgacgagcaaatgctgagtcaacccaaagtgaacatggcatgtaggagatgcgcaagaggaaattaaaaaaggcctgatgcagcttctctctggttccctctgtagaggggctggagagaaggttggttttaatgatgaagatggatggaaggatggaaactgcacactcattcagaccacagaggccagaagacaccggatgccgagctccttcccacacatggatccaggagctcaagccattccccttcatgtgggag

SEQ ID NO: 181357 - DNA, 388 bp, Homo sapiens
gggatatagaatttaaaggtcagaaaggccaaagtggctgaagtttgtaggccaaattattggagggggaggagttgaaccaacagggagctgggaagatgtgaagagagtacctccttaactgaatactgatcagcacactcctgtgaggaaaccatcaaggtgagagaaaggacctctagaaaaaagtagacagaaccaccaccagagctcacacatagccagaaatagttcctgatcccactagccaaagttgaaagatgttttcaaacacaagacatgaagtagagtcctcagaagaatattgcctcaagaatggggacaaaccagccctggacaaaaacctgttacggacctgcttaataacatttaaaaggagcccctgaga

SEQ ID NO: 181358 - DNA, 223 bp, Homo sapiens
ggtggggctatttgtgcatattaattagatctctgaatccaactacacatataagttcattatatatcttcactggagtcttgactgtttttgtttattattagttgatttttttaaagcttctgtgcttcaatgaaccttttacattaataacttatttttgagaatcgagttttaaaaaattgtttttgacacataattgtacgtatttgtggggtacagt

SEQ ID NO: 181359 - DNA, 216 bp, Homo sapiens
tctttttacatctgtatagtgtgttaaaataaaaaaaaagtctttcatcaaatttgggtagttttggccatttcttaaaaatagtccctcttcctccttgtttctctctttcctctggaactcccaccttttcttctattagctgcatgttggtttttgtctgttacaaattgagctactgtaatcattagtgtgtaggtctttgtgtgggaatat

SEQ ID NO: 181360 - DNA, 3125 bp, Homo sapiens
  misc_feature (4)..(4): n is a, c, g, or t
  misc_feature (8)..(8): n is a, c, g, or t
ggcngagngtgagggtgtgagggtcgcgctcctgctgtctggactttttctgtcctactgagacacggccgacatgagatgatgaacctcaagtaccaccccagacaacaaggctgcttcatcaggacacaaacctgcctgtaccaggacctctgacctgtgtgcagcagagacactgaggataccattggcatcaatgtcaaaagtgacttcaatctgaggaacaccttggggttcaggaggtatgcccgtgaattcaaacttgccaagcaggttgttatccttggacatggcacgctcaccttcataaacctgaataagcacaccaggctggttgtcagaataggtaatgaaggtctgtgtctgcttggtaggaatggtggtattacagttgatgaggatggtcatgactccactagcagtttcaataccaagggaaagaggagtgacgtccaagagcagcaaatcttgaacattttcagacttgtctccagacaggatggctgcctggacagccataagcaacagcttcatcatggctgatgctcttattcagttcttttccattgaagaagtcttggagaagcttctgaatcttggggatactaatagaaccaccaaccaggacaatatcatgaatttgtgacttgtctggtttggcatctcgaagggctttctctactgggtccagggtgccacagaacaggtcagcattcaattcttcaaactgggcacaggtaatggaggtatagaagtcaattcctacatagagagaatcgatctcaatactgacttgggtgctggaagagagagtacgcttagcatgttcacaagcagtacggaggcatcttacagctctcttgctctcactgatgtccttcttatgcttgcgcttgagctcagcaataaaatggttgaccattcggttgtcaaaatcttctccacccaagtggttgtctctggctgtagacttgacctcaaagattccatcctcaatagtgaggattgacacaccgaaagtgccaccccccaggtcaaagataagcacgtttctttgtgctccaacctttttgtctgaacttttgtaaacaatagcagcaacagttggctcattaataattctaagtacattgagaccagcaatagttccagcatctttggtaacctgaaactgagagtcattaaagtaagctggcactgtgaccacagcactggtaacagtcttcccaaggtaggcttctgcaatttccttcatctttgtcagaacaatagaggatacctcctctggatagaagcttttggtctctcccttgtattctacttggacctggggcctgtcagcatcattcactaccatgaagggccaatgcttcatatcagactggacaacagcatcatcaaatctgcgtccaatcagacgtttggcatcaaaaactgtgttggtggggttcattgcaacttgatgctttgcggcatcaccaatcaactgtttagtgtccataaaggcgacatagcttggagtggttcagtttccctgatcattggcaattatctctacttttccgtgctggaaaacacccacgtaagagtaggtggtgctaagatcaataccaactgcaggtcccttggacatggttgctggcatgtagccctggctccgataaagaagaaagccacaggaacccgagagctgcaggcgagttcaatgagctaggatttcttaatatatatgtgataatgttttaactttgataattgacttttataatgacttgagtagtcttaaattgtctttcatttaaaacttttgttcttttaaaaaagcaccaagtctatgctactaacaaaaatttccttttaccatgtagactacttgggatgaaaataacttttcataattactatcatgaagggaggagagtggaaagttgccagatactgcagcaagatataaagatgaattcttcaaatgaggaagcaaactttatcaagtggttgaatttcttagatcaccttgttggacataatttcttgtaaacaaattatgcagtcagtgtcacgttcatgcagagtcttttaacttaaaattcattacaggtaacactttcaaaaagaagttctgtagtcttgcatactatttaccacaccatatttactgcacttagcttcattatggaggaaagaacaatagtaaactatcaataactgagacaataatcatattcattagtgatgagtcaaacaggttatacttattttttaaaataaaaacatttgtaaatttttctctacgtttttaaaacaacagtttaacaatagcagttctgttattttagctttaattttttgtaccaacagttaatttgctcatgcccaaagatttacatttataaaaaatgttctgccatgcaagttttaagagatttttgaattgttgacaatactcagcacagtcacatgtctctcataaatccacccagacttaagaaccaattttcagtgcaactcatgaagacaaagaatagccattataaacacattgttgaaaatcatttaaaaaatcattaaatttttttgcatttaatattttttcagctttcttaagatataattaacaaaaattgtatatattcaagttgtgttatgtgaggttttgatacatgtatacatagtaaaataattaccacagttaagctaattatactatacatagtaaaataattaccacaatcaagctaattaatatatttattatcacacataattctttttcttgttgtggtgagaatacttaagatctactctcttagaaaatttcaggtatataatacattattattaaccatagttgccatgctatacattagggctccagaacttattcatttcataacttcaagttataaaagtcacgataaaagtttgtgccttttgcaagtttgtaccttttgatgaacatcttcccatatcttcccattttcctcagtcccctgcacctggaaaccacccttctaaactgtttatatgagttcaccttttttcagattccacatataagtgagatcatgcagtgcttgtgtttctgtgtctggcttatttcacttagcataaagtcttccaagttc

SEQ ID NO: 181361 - DNA, 299 bp, Homo sapiens
cagtttctatttatacttcctgcaattataggcttcttggcctacgtacgtcttttctctcccaccagacagtgagccccttaagaagcagggtgaggtcttacatttcctagtggccagtattgagcctatcaaataactgatactttataaacatctgctgataatgatttgatggaggacctgaggttggagctgaggaaggtaaaaatgagtgagtgggccttctgggtctcagacagggaaggaggagtagaaagcacacagctaagaagtggaggtaagccccttcctcacag

SEQ ID NO: 181362 - DNA, 297 bp, Homo sapiens
tgtgtttgaggtaaagttaatcagataatataaccagacagttgtatgaatatggttttttgtgttttttgtttgtttccattctggaagatccacttataaatgaaagttttctcaaatgggacgtccttaaattggatctcagtgaattatagttgttattgttgtttaagaaatatatttgaaaacatacttactctgtgtgaagtacacagtttatatgggaagctagttccgtggtataccttagctggagacctgtgtaaggactttttctgtctaatattgagtgcaggt

SEQ ID NO: 181363 - DNA, 317 bp, Homo sapiens
ctggaccctcattatgctgctattctcaatatcccaacacttgatttctattgacaactcctaggctcaactgttccgcccacctcagcctcccaagtagctgggaatacagccaccacacctggctaatttttaattttttttggtagagacagggtcttgctatgttgcccaggctggtctcaaactcctggcctcaagaaatcctcccacctgggcctccccaagtgctaggatttacaggcatgagccaccatgcccagctcccttcctcccctttgctctcctaactccatctcagcatccgcccctgagga

SEQ ID NO: 181364 - DNA, 178 bp, Homo sapiens
cacaaaccacaatttttaaagagaaagaagcgcaagatgacttatacccaacaacccttttttggggcaaatattagttggatttttatggcatttttccctctaaagagcttagctaaacgtgctcaaatcaaggaaaaatttcctgacactttgtttttcacctagttttagcctc

SEQ ID NO: 181365 - DNA, 644 bp, Homo sapiens
cccaaattaaggagagcccattaaatgaacatctcgggttccttgcgtgaaaatctcaacaggttgcccttatgaatcaagaagcaatcctcctgagttttgtcccccgaaagaaaaagcagcgactactatacataccttaaatttaaccaagagaactggctagatttatagagaacagcaatgaattttgagccaagtgttcacctaagttccagtacacctaagttccagtcctgatgggaggatccaaaatggaatctgagctgtttaagaatatatattgtcagtcaggcgtggtggtgcacacctgtaatcccagctactcgggaggccgaggcaggagaattgcttgaacccaggaggcagaggttgcagtgagccgagatcaaaccactgcactccagcctgggtgacggagcaagaccctatctcgaaaaaaaagaaaaaagaaaagcaatagctccctgggtgtcaggtatcagtgagaatgggaagtcaggtcttctctgactcctaggacattcctctctctgtctttgggggttgaattccttgttagaactccatcttgttaaaggggcctcgcacctgccccttgccttctgcagcagccctccttaatcctctccaacaggactgaa

SEQ ID NO: 181366 - DNA, 331 bp, Homo sapiens
tgatagcttcgggatgagggctggtttccagaaagaccaaaccatgtgattagagggttgaaactttcagctccatcctctccttagggagaggagagaggggcgagagattgaattaatcatcagtggccaatgatttactcactcatgctgtaagatctctaaacaacagaattcagagagcttctgggttggtgaacacatgttggtgctgtgaggtggcgtttccagagagggtgtgggagctgggtgctctccccaacacattgccctgtgcatctctaacatttggctgtttctgagttgtgtccttgatcataaaacagtagta

SEQ ID NO: 181367 - DNA, 385 bp, Homo sapiens
aggcagctgctggctgtcctccggctgctgtgagacccccaccttggacaggatgagggtggctccatcccggacattgtagtgtgtaagggtgtgtatgtaggtgtatgagtgtaggtgtgtgtgtaggtgtatgagtgtaggtttgtatgtgtaggtgtaggttgtgtaggtatagatgtatgtggtgtgtgtaggtggtgtgtgtagatgtgtgtggtgtgtgtaggggtgtgtgtgcaggtgtgtaggtgtatgagtgtgtaggggtggtatatgcaggggtgtgtatgtaggtgtatgaatgtaggtgtgtatgtgtaggtgtaggtgtgggtaggtgtaggtgtgtggtgtgtgtaggtgtgtatgtgtaggtgtaggg

SEQ ID NO: 181368 - DNA, 452 bp, Homo sapiens
ccatctgggtgagagagagtcacgctgatggcggagggacggcagcgccagggccactggagggcgcggcttctaacaggggtgcgcctttcgggtcaggaggcctgctgccactttgggaggcgtgtgtgtgtaggggtgtgtgtaggtgtgtaagggtgtgtatgtaggtgtatgagtgtaggtgtgtgtgtaggtgtatgagtgtaggtttgtatgtgtaggtgtaggttgtgtaggtatagatgtatgtggtgtgtgtaggtggtgtgtgtagatgtgtgtggtgtgtgtaggggtgtgtgtgcaggtgtgtaggtgtatgagtgtgtaggggtggtatatgcaggggtgtgtatgtaggtgtatgaatgtaggtgtgtatgtgtaggtgtaggtgtgggtaggtgtaggtgtgtggtgtgtgtaggtgtgtatgtgtaggtgtaggg

SEQ ID NO: 181369 - DNA, 901 bp, Homo sapiens
gatgtcctgccccccgcccgccacacaccatccccaaaaggaaatttctaatccaattaacagtcttaggttgggctgctgaaacaaaataccacagcctgagtgacttaaacaacgacaatttatctctcactgttctgaggtctgagttgattctttgtgaaggccctttcctagcttgcagatggctaccttcctgctatgtcttcacatggcaaagagagagctagctttctggtcttttcttataagggaccagtcccatcatgcccatcatgaagactcgatctgctaggatctcaactaaacctaactatcacccaaagagcccacctccaaagaccatcacattgaatgtgagagtttctacatatgcattgtgggaaacacaaacatttacttcaactgtaactattgaagcaaaaatgtccccccaccatagacatccagcaccacagtagtacatttattacaattgaacttacattgacacgtcattatcaacgaaagtctgtaatttacattagggtttattcttggtgttgtgctttctatgggttttgacaaatgtataatgtcatgtattcaccattatagtatcacagaagtttcactgccctaaaaatcctgtgttctgccttttcaacacttcctgtcacccaatttctatcaactaatcttttgactgtgtccatagttactgtcttttctagagtgtcatacagttgtgaagcaggaagcaggagtgaactccggaggcagggactttactccggaccagattgaagactagccgaaacagggacgaggttaaagcacctctccataagacacgcccaccagcgccatgtcagtttttcgttgccatggcaacaacaggacattatcgacttctttcctc

SEQ ID NO: 181370 - DNA, 632 bp, Homo sapiens
aatcaggaggccatgaaatcccagtgagccaagcctccgtcacccaccatgtaaagcacggagcagcttgaaaagacattgagagaagtaaacccacaggttcagtggccagtggcaaaggacaagagccacagaggcactgggacctgaaagctaagagagcagggatgcgggtcacagagggagggatgtttggggctacaggtggatagaaaggaagatggagttgagtttttgacctgttgacttaccgtagtggtaggatacctggtgaggcttgtggcctgcattgggcattctgggtcacaactctgaatgaggttggagcagaggtccagctgtggtgaggattggcacagtcgtgcttgtgggactcctccttggtccaactctaatgctcaacctacaccatcacccctgtgcttgctcctctaatgcctaagcactgtcattcctttatcactagtagttgcctgttgggtttgctccatttgtcctcacaggttagctgccctggaaggaaactccaccctgctcagagacgcactgaggctgagacccaagggaggcccctctctgattggacagcctcttgatagactgggggaagctccctcacagcccatcagggt

SEQ ID NO: 181371 - DNA, 360 bp, Homo sapiens
aaaaaatgaagagtaaaacattttacattaagtagcaaaaccactcatacatctgaaagtgagctaacagtattttggtggtgtgtgtgttgggggaagtatacataaggagtggtgaaagaggaaaggaacacccacctaaccaactagatccataaaatcaaccctggcaccagtaatgtaacatgtcatagccagattgctgtcttaaactacaggtttggaagatgagatccagagagtaattggaattttaaaattcttattcaatgacattaaatatcttaacttataaaaaaattattggacatttagaagtttgaatggataccttttattttttaatttgagctactgtgg

SEQ ID NO: 181372 - DNA, 586 bp, Homo sapiens
agctatttcagaggctgaggtggaaagattgatcaagcccaggagtttgaggctgcagtgagctaagactgcacactgaactccagcttgggagacagtgtgagaacccgtctcttaagaacaacaacaaaataagctggggcgatgggtaagttaaaaatatgctgccattggccaacaaatcgagctgtttaaaacatgctcttactcccaagccagacaatttgataatcgctggacagaaagatggagccatttctggctgtccaatgacctaacccctttcaatacatataagatcaacctggggatagtcaatgtttggcaatagtcaagatttaggaattaaaaaacctctaaatatcaaaaatatgaaaaagaacaaataagtatgtgtttattatataccttacatatagagagatttactgggttttgtgtatatgtaaacaaaaatacatttaaaataggaaaggggctagaattacacacacaagaatataaccatgattttatatttttctgatggaattaggcagatgtttattttctgccatggctttcttgatctttacagtttctaaaa

SEQ ID NO: 181373 - DNA, 591 bp, Homo sapiens
aggccctaagttatctcttattcatttttgtagtactctcccttttccagcgtgaaggcagtcttccaagctggagaaaatagaactcaaataacagctgggtggctgagccttccccaagttacacatctctctcttccctcttcctctatctctcaacattgctataaagacctttcttatttagatttaactttattgtcagggcccagcaccttctggagtatagccttggtaatagtacaaattgtaattaacaaatgtgttaatcaattacaattagtcatacctctggatacccacacccttggccatgtaactttacagggtcctctctatctgggcagagcaatctgcctgacctcttaattctgagctcagccatgtgatgtgctttggcgaatgggataatgcaagttattgtacctgcaagtaccacatgtacatttcccagctatcccccaggaggatgaagggcatcccaataaacttggccaacctggccaagactatcttagatcaaccaacagccattcaacccccagacaggtgaacaaacccagccaagatcagcagagccgattaaccaac

SEQ ID NO: 181374 - DNA, 514 bp, Homo sapiens
agaatacaaatttgttgcccacatgaaaaatgagtattagtgttaataactgtttagactaatgaaaaattgtaaagtctatgtaaatatttatcacctcttagaattgaaaagaaccctagaaacatttgatctaaccatcttgtacagctaagcggaatgaggccagagatataattggcttgcccaaagtcacaacatttgttagtggtaatagtgctagaattggcctcaggtttcctttatactactaagggttgcaagggcatgggctgtcaggcactttcatacatagtttgtggaattataaatggccacaaatattctggctagcaacctagtatcatagaacagaaattttagtgtgcatacctttttattatttttttttatttttaatttttgtgggtacatggtaggtgtatatatttatcgggtacctgagatgttttcgtacaggcatgcaatgcataataatcacatcgtggagaatcgggtctccatcccctgaagc

SEQ ID NO: 181375 - DNA, 386 bp, Homo sapiens
cttgcttttcccccaaaagcacaccaaaagcacaatggttgaagaaactggggggtcacatgcaaaggactgaaataaacccttcccttacacaagacacaaaaagcgacacaaaatccactgaacactaaagggcaattgtgaaaccaaaacctccaaggaaaacacatagggtgcatgtctagtgtgggaaaacttgaacctgtgcacctaagccacaaacagaaaacacataggaatcaaatacccatagaccatacaatggcttcgccatcttgcttttcttctcaaagggacacagaaatcaccgctaacaaaagctaatgtgaccatgtgagactaaggacaacttcagagcttcacatagcttcaacactggagagaaa

SEQ ID NO: 181376 - DNA, 240 bp, Homo sapiens
acaggtgtatcccaacacacgcctagctaatttttatatttttactagagatggggtttcaccatgttgtccaggctggtctcaaactcctgacctcaggtgatcctcccatctcagcctcccaaagtgctgggattacaggcatgagccaccatgcccggcctgcatttttctttttcaagaggactctttatagattatgcgtgctcattctggtgactatgtgttgggcgataacat

SEQ ID NO: 181377 - DNA, 582 bp, Homo sapiens
tggcctgtatgtctctcttttgataattactttttgctttcaaacaagatggctggatattagcatctgtggttttgcaaatacagcctgggtgatgctccctaaatcatgattgaagaaaacaaaaaaacccttaaaaacacccttaaaaacattatttaagtacaaatgtatcggagtctggagtgctgtacagtcaggtaaaacatgaattcttaaaagaacttccatctagataatgaaaataattggaaaatttggtacaagaaatacgtttctcgcaaatgcacagccctctgagcatgcatgggtaaaggaggcatagaaacagggctggatactctcactctctgccttattgttgcatagggcttcacaactaatcaagttcctgggctggaagtcaggaaaatagaacactaattttccagcttagcatggaccaggcttgcttgtttgtccagcaatcgacggtcacccactgttgtagaagtattcactaagtacaaatgtgctaggcatggctgaagcaaggaaagatgtacaagaaacctaaacattaaattgagaggtaagatctac

SEQ ID NO: 181378 - DNA, 651 bp, Homo sapiens
ggcttttttactttttgtagagacgaggtctcactgtttcccagattggtctcgaactcctgagctcaagcagtcctcctctcttggcttcccaaagtgttgggattacaagtgtgagccactgcacccagccaaggtgttccttcttaatcataatctttaaaagaaatttttttttcagctgctgtataaataagatgtcattatttggatgcaccatggttgattcagttaatcccgttgttgagcatttggattgtttccagtcttctgctgttgctaacaatgcagtaatgaataatttttttatgtgcgccattttatactgacacaggagtagctctaaactagactgctattaatacaaatggcgctgcccagtgggtaagtacttacactcccacaagccatgtgcgagagcgtcttccccttaaactcaccatgagtgtagtgtcgaatatttggtatttcgctagggacataagagacaatctgaacttcagtgtaggtttcatttacatcccttcttatgaatgagaatttttttttatatgtttaaaggcctgtatgtattaatctaggaactgtctattcatatccttttcaccatttttctatggggtgtcttttccttagaggagctgtttataa

SEQ ID NO: 181379 - DNA, 692 bp, Homo sapiens
  misc_feature (208)..(208): n is a, c, g, or t
  misc_feature (250)..(250): n is a, c, g, or t
  misc_feature (257)..(257): n is a, c, g, or t
  misc_feature (263)..(263): n is a, c, g, or t
  misc_feature (276)..(276): n is a, c, g, or t
  misc_feature (314)..(314): n is a, c, g, or t
  misc_feature (338)..(338): n is a, c, g, or t
  misc_feature (340)..(340): n is a, c, g, or t
  misc_feature (348)..(348): n is a, c, g, or t
  misc_feature (352)..(352): n is a, c, g, or t
  misc_feature (355)..(356): n is a, c, g, or t
  misc_feature (365)..(366): n is a, c, g, or t
  misc_feature (371)..(371): n is a, c, g, or t
  misc_feature (373)..(373): n is a, c, g, or t
  misc_feature (390)..(390): n is a, c, g, or t
  misc_feature (403)..(403): n is a, c, g, or t
  misc_feature (425)..(425): n is a, c, g, or t
  misc_feature (432)..(432): n is a, c, g, or t
  misc_feature (456)..(456): n is a, c, g, or t
  misc_feature (692)..(692): n is a, c, g, or t
ggcctttccaggtcttctcccggtgaaccggatgctctgtcagtctcctcctctgcgtcctcggccgcggcccgggtccctcgcaaagccgctgccatcccggaggccccagccagcgggctcccggaggctggccgggcaggcgttgtggcgcggtaggagctgggcgcgcacgggtaccgcgcgtggaggagacactgccctgccngcgatgggggcccggggcgctctttcacgccgtaggcaagcnggggggnggttgnggtacctgcccancgggagcttcccttccttctccttgctgctgctgctcntgatccagctcgggggaggcacangnagacaaangganganntcttttagnntgaananagtagagcagctgatgnatgggagttccanacgctcaatcttccgaattgantggggtnaaattccgaaaatttttaagggcncccaccttcggaaaactattccccatgatgtggtatggtccactggctcttacagccctcaagccggcaggggtcctggtgtgccagggcaccgctaattgaagaattctccaatttagtggccagaactcctggggcttatcccatcgtgctttggtaccaagggctctccttcaagtatgggtggactatgatgcggcgggccacgacgtttcagcagccactatgactctgtn

SEQ ID NO: 181380 - DNA, 492 bp, Homo sapiens
agtctacaccagcggatttttcatgatgttatcttgcctagaggtagcaaaggcatcacatccctgcgagacagaaaatgtctcaaataggcatctgtaaatgagaacagcatgggaaataaagcctctatctggtgatacaggcgcaatgctatgctgcactgtgaatgacatggcactaagcaaatcaaacttctaatgttgaagatgggctctcaccagaagagacagatgccatccacattgatgagtactaattcaacaccccagtgtggaataccacctggccctcctcacacattccagagaggtggtcaaagttaataactttagaggctcttctcaatctagcctctgggtagcaaagagaacagtgggaggaataaagagaaaagttccccaaacgaaaaatgctgccaagacatgcatctgctccccaccccatataggaggggatatatacgtaagcctgaaggttcctgattaactaca

SEQ ID NO: 181381 - DNA, 435 bp, Homo sapiens
cccaatcttctttgtcctacaagggctttctattcttcaagctaaagagacaccagtgattccgttcgttcattcagttaacatttaggggccacagcttgtgctatgtcctgagatttgccaatgagcagagctcagagtattgaaaagacaaacacacacgccaggcattttactatgctatgttgtgtgcatgacaggagtacacagggcatccaggcaccagtgagaagggcctttcaccagacttgagaggtcagcaagggtgctctaaggaaacaccttctaaaccgagagcttgaaagagtgagacaggaaagcagtaagagggagcgttctgaggaggaaatctccgaggtgggacagggatgcgtgtggagagaatgcccttcccatctccactcttcatgaggtctctattctgtcagggtctgt

SEQ ID NO: 181382 - DNA, 268 bp, Homo sapiens
ccagtctgcgttatgtagcaagaccccatctccaaaataagtgcctgtaagatttgagatccagggagggagttgtgaaatgctgttaaagcttaagattgagaagtgttctattcagaaggcaggccctcattcaggtgggaaactacaagacccctggttcttggctacagaccaggatagggttcacccaacttggtcccactgagaattctgaacttactctctaactatccgaaactcctcccggccacagtctggcagaggt

SEQ ID NO: 181383 - DNA, 536 bp, Homo sapiens
tgacctcatgatctgcccacctcgacctcccaaagtgctgggattgcaggcatgagccaccgcgcccggcccaactttccttgactttctaattgagcttcataccttgctttcaagggcctcctcttccagcaagcctgctcatgtcttctcagttaacctctcccatggagaaactctctgtcactcagagtttgcttgaatcttagctttgatgcaaaacaggtctgggagcctttggattttaagaccaaaggcactactaaactgccagaggaaaaagaagacagaatgctggacataagactgactctgattctcactgaatgtcaaggctattttgtgaacagccatgttggttatccaagatagaaagccaaaacatttcaacatgtttctgactctagtttctgttgggtaactaggggagagggaaaaatttgggatatgttttatcagtcctttaatcgtcctctatttagacatttacaaggccaaatataactgtcagctgcaagtgttttgaattgcatagt

SEQ ID NO: 181384 - DNA, 597 bp, Homo sapiens
atagggtagccttacactttacaatttaacattagttactacgctctcatacaagaatatgtcacttcttcaaccaccccttaacaacaaaaaacccaagcaataccaaaaaataactaagagaaatacctgtattaaattttatcaggacttataacaatgaatcaacaagatctcacaaatgaaattttatcctatgtcatgaataagaaactgtttagatctgcatcaagcttccattagtacaaaatgcttcgaatttcatttagttttggtttgaagttgaagttactgtctgactgaggaataaccgtacttttcattaaagagaaaggtgttttgatggagttaccttgttgggcctaggtacttaggtattacggccataaatcaatgggatgtcgctaactttatattgcagagagctctttttattgctccaatgaaattcacgattccccttttttttaaattgatacagggtctcactttgtcactcagggtgaagtatggtggtgtgatcacggctcactggagccttgaactcctggctcaagtgatcctctcacctctttctcacaagtacctgggattaca

SEQ ID NO: 181385 - DNA, 327 bp, Homo sapiens
actccaacccacaattcattgaaagatttataacaggccaataatgcgcagaaggattattcacatactcaaacaaaaattataaatttactatgatagatttttattaaagtatgtataactaaatgttgaaaggtctagtctcagaaatttttattaagaaataaatttctcacccattatgttcttgtatttattctattattaatgatacatatattaaactacatcttcaatcttcctgtttcttttttaattctatttaatcatatcactagattaaatagaattaaaaaagaaacaggaagattgaagatgtagtttaat

SEQ ID NO: 181386 - DNA, 343 bp, Homo sapiens
cctccgccttctgagttcaagtgattctcgtgtctcatcctcccaagtagctgggattacaggcaaatgccaccacgcctagctacttttttgtatttttagtagaggtggggtttcgccatgttggccaggctggttttgaactcctgatctcaagtgatctgcctgtgttggcctcccagagtgctaggattacaagtgtgagtcaccgcccccagccaaattgttttctttaaaaatctctctctctaggccaggtgcagtggtgcatgtctgggagcccaaggcgggcagatcacttgagcttaccagttcaagaccaagcccagccaatgagccgaaa

SEQ ID NO: 181387 - DNA, 643 bp, Homo sapiens
gcctgtgctcctcccttgccttctgccttgattgtgaggcctcgccagccatgtggaactgtgagttcacgaaacctttttttctttataaattacccagtcttgggtatttcttcatagcagtatgaaaatggactaatacaggggccaaacgtgactgtgacaaacacctccagttttaacctgtttcctagagaaggaataccatcggagctcctctggaacatgtccttgtcttctcagagtgtgaagtgtgtgtgtgacagtgcttttctgaggactcaggtgacctggaggctggagaacagcatggagcaaggaaaacaaagacgatgtgctggagtgtatgttgctttcataattatgtgaaagaaaatgtagagaaatttgaaaggagaactggttatcagtagtgccatcctgctcaaatatcttcaaatacacaccaccatccatgtgtgggttgattaaggagctgacgttcattagatctgcagtctcctgacctgatgtgcatcagaatcactgggagaacaaacaaacaaaaatgaatccaaaacaagcaacgaacagacagattctcaagtcttgccaagtccaaagattgatttggtggagaaattgtactttgaaagctgcccag

SEQ ID NO: 181388 - DNA, 486 bp, Homo sapiens
gctctcgaggattactcgaatcgacggtttcctgtattgttttccctcatacaatttccttcttgctgtctccctccatcctcttcattgaggccttcagaattcctattataagatttgtttaatctatcccacaaaccctacacacaatctctttttttgttgttttcttggcagagtctcgcatcgtcgccggggctggagtgcagtggtgtgatctcggctcactgcaacctctgccccccaggttcaagcaattctcctgcctcagcctcctgagtagctgggattacaggtgcgtgagccaccacgcccagccgattttgtagctctttaggttgttccaacaaatattattagccatttcagttgttgactatttatattgcatttatatacatttgttttctggtttttccctgtcgcaaatatagaaaagtaaggaaacatagtctgaaaattaggagaaaaaagtatatatggagg

SEQ ID NO: 181389 - DNA, 400 bp, Homo sapiens
atctttgctaatctccaagatggggatatctaatgcaacatttctcaaccatatttgtctgtggaacccccccttttttttgagtgttctgtaggattgatgttttgcagaacccatcttgagaaataccatcttgttggaattaagtcctagaagcactcacaggcttgactcatcttcctttacatgcataccttctcttttgagtggcaagactgtgggtctgccttatcagaacttgggaattccatctttaaaataaactgtgggggctttctgatcctagctgttctccctatatatgagtgtgagtgtgctagacagctcactgagctgaaatcaaagaaattttccaggccatcttcagggatctgagtataattcattgaacatgagacct

SEQ ID NO: 181390 - DNA, 714 bp, Homo sapiens
gcagaggaccctactcagacaagtgactgaaatttggcatcattaagcgcaagtcatcaatatctcatgaagctgtagtgaaagcttctctgggtgctttatggaagtaacaaaatatatttgctcatacataataaaaactacatttcaacaatataaaaatggagagcatcagttttcattttactgcattaagctctcttattcagtctagtgtactaatattatgcatacaaatgttatattggttattagaaggtcagtgtatttggaagatatgtttaaggctttttttctctatagttacatcatcaataatttcattacatcatatatgttatcttgtcatttttttcaattaattatcttattctagcaaatttgtattttacaaagactaatgatatatgagatatgtctcaggccaacttccaccacagtataaacatgttgaaaaataggagaaaggatttgggatatttacatttaataccaattttattttttgagacagggttctcactctgtcttccaggccggagtgcagtggcataatcaaagctcactgcagccttgacctcctgagctcaggtaatcctcccacctcagccaccagagtagctgggattataagtgcccaccaccatgcctggctaattttttgtattttctgtagacatggggtttgccatgttctccaggctggtctaagtc

SEQ ID NO: 181391 - DNA, 588 bp, Homo sapiens
ttgagatagggtctggctctgtcacccaggcaggagtgcagtagcatgaacatggcttactgcagcctctgcctcctgggctcaggtgatcctcccacctcagcctctctagtagctgggactacaggtgtgtaccaccacgccccgctaatttttttgtgtgtgtggtttttttgtagagatgggattttaccgtgttgcccaggctgctctcaaactcctgggctcaagtgactctcccaccttggcctcccaaagtgctaggattacaggcgtgagccgccacacctggcctactgctcaattttttaaaatagctgctgtaatgcattcaacactatctcatttagtattttcatatatgcttctgagtttaatgctttagttagactcctttgtggagcacaaccaaaccagaatcttaggtgtgatattgtaggatcaggactatgggaatgagatgctcatggttagactttttttgaaggccaaaatttaacactgatctctggggaagagcctagctgtgaataaagcccctgattgtcatagaaagaaaagtccaaaggtagtggctcttgcctgagg

SEQ ID NO: 181392 - DNA, 139 bp, Homo sapiens
gccggaccgcaaacgtgattcactggggaggactgtgtggtttgagatggtggctggatccatgcacttgcatctggcttttcttcctaaggagacagtgtgttttctgaaagccgctcctgtcttggcaactgggtac

SEQ ID NO: 181393 - DNA, 284 bp, Homo sapiens
ctcaaaaccggaatttctagctgtgactcaaattggcacttcacattggcatctcaaacgcattatcttcccctacaaatatggaacatgacaggatagatgcaagaaatattggcaagaaaaatctgatagaacctactaagggactgaatatagatagggaaaagaatcacaaataggactaaggtgtcaagcctgtaagactaagggagtcatggtaccaacaacaaaattaagggaatcacaagaaattattgtggaggaaatacgttgtagatgttgaa

SEQ ID NO: 181394 - DNA, 313 bp, Homo sapiens
caaaacttgagaattagtcaaataaaattgtgagctattaaagtccattttgacatccttttaatgcacaattttttcttctaattgaaatataatccacatataaaacttacccttttaaagtatacagttcagtggtttttaatctgttcagaaccatcactgctgtttgcagaacattttcatcaccccagaaagaaactccttatccattagcagtcactccctatttccccctttccccagtgtctggaaaccactcatctattttttgtctctggattggtctattctgggtattttgtgagagtgg

SEQ ID NO: 181395 - DNA, 436 bp, Homo sapiens
tacctcaggctatgttctattggccacgagtgacagtgagaaacagtcatattcaagggtttggtggcttggggttaaaatcctctccacgtacatattaacacagcttttctgtatcaaataaatgttatttatctctcttaaaatcaactgattttcagtagagaaataaccttagaaattatcatgtttgatgcctctatttcaaaatgaaaaccacccatccaataatccaacctcacagaatccctgaccccttgcctagacaccaaagttcctacttcctgttttctgtctctttgaaactgacactcttttctttttctttctggctcaaaaatgtccaaaagaaaaccactgtggtcattatgggagccatgctccatgaatttcctgtgtcaagttcaaagtttaccttggatagattaagtaaaca

SEQ ID NO: 181396 - DNA, 370 bp, Homo sapiens
acaggagttaaatataagtcctgaagaaaaacaaatgtttcatatcacacttactttagagtaaagcttagttgtagctgtgtacaataatcagttgtaaaaaggtgtttccattcttccattgtccttttggcttatttctcttgtcttattcaatttgctgtggatttgtttttgtagtgggaaaattaatttgagctgaagtgtgtcaggattacttagcaaaaaattactgtttgttgtcccacaaaaaaagtagatactacttaaccttttttactccatgtcatggatgtacttatgttttcaccttgtggaatactgaatcaagtttacactcttaggatcttagaatagtggttttcgctct

SEQ ID NO: 181397 - DNA, 516 bp, Homo sapiens
tagatcacctgaggtcaggagttcgagaccagccggaccaacatggagaaaccccatctctactaaaaatacaaaaattagctgggtgtggtgttgtgcacctgtaatcccagctacttgggaggctgaggtaagagaatcacttgaaccctggaggcagaggttgcagtgaactgagactgcgccattgccctccagcctgggcaacaagagcaaaactccgttcccccaaaaaaataataagtactgtcttgactgtggtcatcaaaaatatttgattaagggttagctagaaagcctgaccctttcacagacagacggaagggccaaaagaaaatagattgtttgcagtggggcaagaaggataagaatcctatggaaaaaaaaataacagagggatttgtttagtgagcgctggggagaggcatttgttttcttgcttgaaaaagaaacacacgttgggtgcggtggctaaagccttaatcccagcactctgggaggccaaggtgggtggat

SEQ ID NO: 181398 - DNA, 528 bp, Homo sapiens
tgaacacactgtttttggcattattctgatgaagtttgtgaggacatgcaataaaagaaaaaaaccagcaaagaggaagtgatcaggaaaagaccgagtcagaaactagcctttggtaaggagagatttttaatcacagctgcagccatattgtaaccatcatcagttacatatacataagggatagttcttggaaaacacacaaaggcagtatcataggatgtgtcatcagcgatggctagcaatcgctgatgaggcatcgatgtggtgaacgaagaacacttctacactgctggtgggaatgtaagctagtacaaccactatggaaaacagtgtggagattccttaaagaactaaaagtagatctaccatttgatccagcagtcccactacttggtatccatccagaggagaagtcattatacgaaaaagatactggcacacacatgtttatagcagcacaattcacaatggtaaaaatatagaaccaacccaaatgcctcatcagcgatggctgggtaccgagct

SEQ ID NO: 181399 - DNA, 132 bp, Homo sapiens
gtgaaagagtgagtgactgagtgaatgagtgattgctccaggccagagtgaagatctctccctggtgggggtcatgagactcggactcccagacgtgaggtttggggttggtgaggaatgggtccagcttct

SEQ ID NO: 181400 - DNA, 254 bp, Homo sapiens
cacataaaactattacactgggcaaacaaacctaaatgttttatttatttattttttggaaacccagacagtgggcaaaattttgtatgtaagtgtagttttctatagagttaattaatacatttcatcagttttttaaaagggcatgtgaccataaaaattaagaaccactgaactaaagataagcaaaaattaagccagtttaaaaatgaaataaactaagttagaaaacaaaagaaaataacattcactgt

SEQ ID NO: 181401 - DNA, 467 bp, Homo sapiens
gcacgtccccctcaacctgaaatcaaagtgaaaaaagtaggctgggggcggtgattcataatcccagccctttgggaggccaaggcgggtggatcacctgaggcaaggagttccagactaccctgatcaacatgctgaaaccccgtcactactaaaaatacaaaagtagcagggcatggcagcgcacacctataatcccagctacctgacaggctgaggtgggagaatcccttgaatgcgggagacagagattgcagtgagccgagatcgcgccattgcactccagcctgggagacaagagcaaaagtccatctcaaaaaaaaaaaaaaaaacgctacatgactacatgtaacagctactgggaacattttattgaaattttttaagccctttaaaatgttagggtagtgtcttaggaaatcagggatttccaaaggcaggacttcacgacgccaacttgagtgtga

SEQ ID NO: 181402 - DNA, 503 bp, Homo sapiens
ctaaatacaatccttagtatctcactatacaacagcctacaaaatagctcccagagcacaactacagaagagtctcctttgggcgtacagggatccccgatacgcccaaagactttggtttcccggaagctgcccggcgggtcatgggaataacgccgccgcatcgccggtcggcatcgtttatggtcggaactacgacggtatctgatcgtcttcgaacctccgactttcgttcttgattaatgaaaacattcttggcaaatgctttcgctctggtccgtcttgcgccggtccaagaatttcacctctagcggcgcaatacgaatgcccccggccgtccctcttaatcatggcctcagttccgaaaaccaacaaaatagaaccgcggtcctattccattattcctagctgcggtatccaggcggctcgggcctgctttgaacactctaattttttcaaagtaaacgcttcgggccccgcgggacactcagctaagagcatcg

SEQ ID NO: 181403 - DNA, 390 bp, Homo sapiens
gtttgagcctgctgccacgcatgttttatcctggtaaatgcgaatgattagatggccttgtggtgcgaagtgatctcaacctattctcaaactttaaatggtgtaatgaatgccctggctcgctggcgtggagccgggggcggctcgtggctcggcggcccgtcacgcaccgcacgttcggggggggggcccctggctcgggggggggctgttgtgccccgccgtccctcttaatcatggcctcagttccgaaaaccaacaaaatagaaccgcggtcctattccattattcctagctgcggtatccaggcggctcgggcctgctttgaacactctaattttttcaaagtaaacgcttcgggccccgcgggacactcagctaagagcatcg

SEQ ID NO: 181404 - DNA, 428 bp, Homo sapiens
cagcagacggtaagaccctatggagctttaatttattaatgcaaacaatacctaacaaacccacaggtcctaaactaccaaacctgcattaaaaatttcggttggggcgacctcggagcagaacccaacctccgagcagtacatgctaagacttcaccagtcaaagcgaactaccatactcaattgatccaataacttgaccaacggaacaagttaccctagggataacagcgcaatcctattctagaggtcatcaaagccgtccctcttaatcatggcctcagttccgaaaaccaacaaaatagaaccgcggtcctattccattattcctagctgcggtatccaggcggctcgggcctgctttgaacactctaattttttcaaagtaaacgcttcgggccccgcgggacactcagctaagagcatcg

SEQ ID NO: 181405 - DNA, 438 bp, Homo sapiens
accccattcgcccggtgcaatagccacaccagccaccactttcagatactgcagtctgctctgggctggtgaatgctttgcgggagtgatgggccaggacacagacttgtcgttgtcatggtcgtagctgttctcaggatccacgtgcttcgaacctccgactttcgttcttgattaatgaaaacattcttggcaaatgctttcgctctggtccgtcttgcgccggtccaagaatttcacctctagcggcgcaatacgaatgcccccggccgtccctcttaatcatggcctcagttccgaaaaccaacaaaatagaaccgcggtcctattccattattcctagctgcggtatccaggcggctcgggcctgctttgaacactctaattttttcaaagtaaacgcttcgggccccgcgggacactcagctaagagcatcg

SEQ ID NO: 181406 - DNA, 899 bp, Homo sapiens
taagggtccaacttcattctttgcatgtggacattgtttttccttgtaccatttgtttaaaagactatattaccccctccctcccacatcccagtagatcatcttggcactcttgttaaaaatcagttgaccgtaaatgtaagagtttatttctgaactctcaattcaattgattattttgatctatatggctatctttatgtctttattactgtcttcgttacttgattactgcagctttgtagaaagttttgaaattgggaagtgtgagttttccaactgttcttctgtttcaggattgttttggctactctgggtcccttgcatttccatatgaattttaagatcagcttgttaatttctgaaagaaaaaaaaaacagttggggttttcatagtgattgctttcaatctgtagatcaatttggggatgagcaatacatttgattgtattattgtcagaaatatgttgactttggaagtaacaaattagctaattagaaacaagtcttttggagtaatgagaaaggaatttgttgagctagtgcatcatttaatggaggcctttgaaactcagactaaggcattcaaattttattagaaagatatttttatagtttttttccctgaaattggtttgcatatgtagatgattttattatgattccagtactattatattttccataccactaaagagggctttttccatacacaagtggatgttttaaatcagtcaaaaagaatgcctttcaaacagagtggccactgctaagcactgtaggagaataaaagaactgtaacacacacacacacgggaggctgatatgatctcggctcactgcaacctctgctcccgggttcaagtgaccctcccacctcagtcgacgcggccgcgaat

SEQ ID NO: 181407 - DNA, 545 bp, Homo sapiens
taagggtccaacttcattctttgcatgtggacattgtttttccttgtaccatttgtttaaaagactatattaccccctccctcccacatcccagtagatcatcttggcactcttgttaaaaatcagttgaccgtaaatgtaagagtttatttctgaactctcaattcaattgattattttgatctatatggctatctttatgtctttattactgaactcagactaaggcattcaaattttattagaaagatatttttatagtttttttccctgaaattggtttgcatatgtagatgattttattatgattccagtactattatattttccataccactaaagagggctttttccatacacaagtggatgttttaaatcagtcaaaaagaatgcctttcaaacagagtggccactgctaagcactgtaggagaataaaagaactgtaacacacacacacacgggaggctgatatgatctcggctcactgcaacctctgctcccgggttcaagtgaccctcccacctcagtcgacgcggccgcgaat

SEQ ID NO: 181408 - DNA, 912 bp, Homo sapiens
taagggtccaacttcattctttgcatgtggacattgtttttccttgtaccatttgtttaaaagactatattaccccctccctcccacatcccagtagatcatcttggcactcttgttaaaaatcagttgaccgtaaatgtaagagtttatttctgaactctcaattcaattgattattttgatctatatggctatctttatgtctttattactgtcttcgttacttgattactgcagctttgtagaaagttttgaaattgggaagtgtgagttttccaactgttcttctgtttcaggattgttttggctactctgggtcccttgcatttccatatgaattttaagatcagcttgttaatttctgaaagaaaaaaaaaacagttggggttttcatagtgattgctttcaatctgtagatcaatttggggatgagcaatacatttgattgtattattgtcagaaatatgttgactttggaagtaacaaattagctaattagaaacaagtcttttggagtaatgagaaaggaatttgttgagctagtgcatcatttaatggaggcctttgaaactcagactaaggcattcaaattttattagaaagatatttttatagtttttttccctgaaattggtttgcatatgtagatgattttattatgattccagtactattatattttccataccactaaagagggctttttccatacacaagtggatgttttaaatcagcctcccgagtagtggggattacaggtgtccgccagtcagcacgcctggctaatttttgtatttttagtggagacgggtttttgccatgttggccaggttggtcttgaactcctgacctcaggtgatctgcccgcctcagcttcccaaagtgctgggattacaggcctgagccaccatg

SEQ ID NO: 181409 - DNA, 269 bp, Homo sapiens
tgccctgaaatttatgacaaactcttagctgttatttatttatttttccattgggcagattggagaatacttagttcatacacattttggtggccatattttcttgaagaaaacatggaacacataccgcctttcatttatatctttattcattaattcagcaaacatttagtgagtgtctcctttgttccaagtactattctagtcattatgatacaaatatgaataagttgcttgtactttaaggatctaataatcagtgattgggg

SEQ ID NO: 181410 - DNA, 458 bp, Homo sapiens
tgtcggaaggttgctttttgtttggggttttttgttttgttttggtcaattccaaagaacacactggcaatgttccctgctctatataaccaacagactcctcaggcaacttgcacgaaggagaatacagtctggagtctgaggtggtccttaaatatttcctcaagcttgcttcctcgtctgtgttgttaatagccaagtgattcgttttgtggggtagcttccccaggctcccttgggctggactatttatcatggcagcagctggagataagctggacacaaagaggatttgtgtctcaggagagctggtccctagatacagaaagtggaggaattttctcattaggaggaagtcagtggtggggactctgggctttcctcctgtgcccccagtgcaaacagtagcagggagggggcgtcctggaggggagatgtacttgaagatgctttcactg

SEQ ID NO: 181411 - DNA, 327 bp, Homo sapiens
tgcccgcctcggcctccccaagtgctgggattataggcatgagccactgcgcctggccctcttttatttttagttgatatgtaatacttgtatatacgtaggggatacagagtgatgtttttatacatgtataaaatgtggaatgttcaaatcagggtaattaggatagccatcaccccaaaattatttttttatgttgggaacattcgaaattctctcttttagccttttgaatctatccaataataattgttaactgtattcattctatagtgctatggaacaatagaacttactcctcctatatagctataattttgtatccct

SEQ ID NO: 181412 - DNA, 160 bp, Homo sapiens
gtagtgtaggttggtcctccccttgtttttcgagggctctcatctcctgcttattagtgaggacttggattagcaggtggctttcacatcataggtccctcctctctccaggaagcctcagaattaatagtagaagcagcaccacccacagctctatttg

SEQ ID NO: 181413 - DNA, 229 bp, Homo sapiens
gctgggtgatctagaggatcccaggagatcatctggaaataagagggtcttctcttttgcctggctccctatgcagccctatcttaccccctgcaaaggtcccagggatgtggctcagtcactgctcctctcttcatctgtcaccacttgcttgatatcctacagctgctttaattccgagaccatctgcagaacatgacaaaatttgtccacctacccacgatgatct

SEQ ID NO: 181414 - DNA, 225 bp, Homo sapiens
aggacaacagaggaaggcacccagctcctggtgcctggggttgttggaaccctcctctctccccttctccttctgctcaggctccaggttcccagggggtaggaggagacaccagaatccacaagagggagactgaagtttgcatgaaaagagccgatggctgggagtcaggagacttggatctggccctgactgtgccctgcaggctgctgtctttgcatctgt

SEQ ID NO: 181415 - DNA, 725 bp, Homo sapiens
actgcaagctccgcctcctgggttcacaccattctcctgcctcagcctcccgagtagctgggactacaggcgcccaccaccacgcccagctaattttttgtatttttagtagagactgggtttcaccgtgttagccaggatggtctcgatttcctgaccttgtgatccgcctgccttggcctcccaaagtactgggattacaggcgtgaaccaccgtggctggccttttcaactggggtaggcaggaactcttcctctgatcctcattgccttagcggcaccagggttagaatggctgctgttggagcccacgtgtttggaggtttgggatcagatgagatgacctttcttaccttgaaattcaagggtttttttcttacacctcttgactgccctgtagactcccagtatgacattgatagagcatccttttggagaccaagatgcattcccaaagctataaacacgaacatgtgtgttcaggcttcctccttaaatacatgttgtcaccaaaagctgattcctgcttttgtgcaaaatggctcttggtgggtctgccactctgagtgatcagtcatgtcagatgccactggacccccactacccaagtgactttccctgactccccagccttggagcttatgtgggtcaagctgcagtctttggtgaggggtgggagatagaagaagccagtgcagaaggtcctctttattccctattccctt

SEQ ID NO: 181416 - DNA, 552 bp, Homo sapiens
tgcatcccccagggtcttttcccctcaaaccaattgtggcacttgcttccttcggccctgttgcctatctacagctgtgcttactgaagtgagactataatttgctacagcatgccagagtattaatagacaattatttattgcaaatctgaaccatttatactgtttactggctgacacaatgtaaaattttgatccaaatgttaatgtgtccatgacattgcataattctgttccacgccatggtttttctcttctaaatgaatcgaatttgcagtacaaggaaatggcatttttaatggatgaatgatttacagcctcaaacttacttataaggctattatttgtgtaactgagggagaattgactaattgcaataacacagcaaattagacaaatttaggattatactgggaacaaattcatagggagaaaatcatagggagaaaaatgaaaataacttgcaaagttcttaaagggtaagtgaataaatctcactttagctttacagggcaattgtattttgagggggaaagaccctgaggtaccttt

SEQ ID NO: 181417 - DNA, 386 bp, Homo sapiens
agtctggtgagagcaaaataaaatattgtttgcatatgtgggcagtttaatgtccacccaaatttatgttaggagtatgcatgtttggtaaaggttacatttagaaaagactggtgtcaaaataaattaatcttcagaaaatcttgcatatttttctaaaatcatcagcttgagataatgttgggggcaactaccaaatgtttttctacaagggtaaccatgaaaaatgacaaaaatcaaggtttaatatcctaaatcacctgcaagtaagtaaaaacaaggtcagtattaacatagaaagagatgtcaaaagaagcaattgtttttccttcttttttctttttggtctcctcttcccagactcaagtgatcctcctgcctcagcc

SEQ ID NO: 181418 - DNA, 495 bp, Homo sapiens
cccagcccagcttattttctgttctgctcctaagctagccaatactctaatcttaattgctatagctttataaaaggtcttgatatcttacaatgttaagtcttccagatttgtttttttcttcatgactgccttgactattcctggctctgcatttccatataaattttagaatcagtgtgtcaatttccacaaacgtatctgttgggattttagttaggactgcattgaatctgacaatgttaactttacctaaagccctgtgctcctagaaaatagcaaaggtcaagaaatctcctccatcccttgagttccaggaaattgcttagtgcaaagaacaagcctctcgcatatgatttagagaagactcccagatgccttccttgtttacatatgacatgctcagtcacagatcctccaaattcccattctttgcctcataaatgattagctaaactcttagtacttagtgattaatctggatgaaatatctgc

SEQ ID NO: 181419 - DNA, 293 bp, Homo sapiens
gagaggagaaagggaagattgtggagatagagctgagagaatgacaagaggagaaagagaaaagagaaaacgtagagaaaaggaagggagatgagaaagcaaaggaagatgggatggagaaaaattcagaaggggcttttatcttagtcagcatatttcttgagctgtggccaacggcaccccctttcagttctgattagttttctcagcatttaaaagctcattggttgttttatctaaaagaatagttcctataaaagaatagtctcacctagggagtgggagattgttct

SEQ ID NO: 181420 - DNA, 461 bp, Homo sapiens
ttaagttgaaccagaagaaaagtgaaaagtagagaggtgaggagagctctttaggacaacacgaggtcagcagcagagagatctgatgagacggagcagtgatcgcgaggtagagggagcaaggtgggagcaggagaggagcagttttgggagaggacaggacccagcgtgggatgcttagaaagagtaggctgggcagccttcaagggtcggccattgtgatgagaggtccaggagctgtctgtctgcaccggcactgaagtaacccaggctgatggcaggaagtagcaaaggccactgaggagtacactaagctggaaacagaggcccagccattagctttggcaaaatggaggggaagagtcattatatcaagagcaacatcaggccaggcgtggtggctcacgcctgtaatcccagcatgttgggaggccgaggcaggcagattacttgaggtcagg

SEQ ID NO: 181421 - DNA, 109 bp, Homo sapiens
ctacattgcctcatgtccatcctgatttgggagtgcgctgctgccttatgtaagccgcatgacctccccggggtgactacctttctccagctctgacctccaggtgtgc

SEQ ID NO: 181422 - DNA, 334 bp, Homo sapiens
aaagttacactatactatttcagagtaactgtgaagaatctaagagggagctttgccaaatggcacttagagcccaactaaaactaaaacttcttaaaaacatataataccaatctacatggttgcacagcagggctcaagggcctagacaaaatataggactacagagattgcaagataatacagatgggatttttggatcagctgggacctatgagtaagaagtgaagaactggagggtgctatcaaattatactcagacatgactgagatttgatagtaaaaaataatagtatgattaaactgcaattacataaatgaaaccttataaaat

SEQ ID NO: 181423 - DNA, 816 bp, Homo sapiens
ctcctgaagtaatagcatagtctaccttcaagtgatattaaaaagtttaaagatgtttaccagaagccctaaggcaaacatgaatgaaataataaaagagagaagcagaacaaagtgttacaccaaatcagcaccccccccaaaaaaaattcactccattaacacacaaggaggcagaaaaagaggataaaaggaaagctggaatggttgtattcatatcagacaaagcagatttctgaagaatactacccaagataaaaagaggctttacaaagataaagggtctattcatcaagtggacctaacaagccaaagcatttgtgtacctaatatagtatcacttcaaaatacgtaacagaaaaaagactaaaatgcaaagaaaaatagacattcagaattatagttggagatttcaatttaccttccttaataattgataaaacaattagatagaatcagtaaagatacagaagaattgaatattatcaaccaacttgacttaatgagatttatagacattccacctgaccagagaaaaatacacattcttctcaaatgcacacaaaacatttaccaagacagagcatattctgggatatataacaattcttaataaatatgaaaggactcacagcatataaagtattattcagaatagccaagacacagcatcaatctaggtgtctatcaatggatgaataggaaaatatgggggggatatacatatacatttatttaaacagactacaattcctattattcagccttaaaaaagaaaattctgttatttgcaacatgacacaacagatgaacctg

SEQ ID NO: 181424 - DNA, 176 bp, Homo sapiens
aagtcttcaatagatatggctgcttaacttcgtctcaattggtgcctctgaaatgtttctcatcatacaaaacccctttctgtcctatcacccagcccccagaacacattctgataaatccttctgataaagcccaaattcctaaacaaagcatctaaagtatctaaagttctaca

SEQ ID NO: 181425 - DNA, 411 bp, Homo sapiens
tcttattcactttcctctcctaggaagaatggggccacctagagcagtgggcatctctgggacatcagaggatcttgaaaggggaggtgaaggcatgaaaacagattccaagcatggtctagagctcggccctcgcttggtagtaacacagtcagaattctcagtcagacatttccgttcccaccgcagttcacaagaacggaatgctgaggcttcctggtacagctgccaagaaactatgcccacagccttcccactgagagccagatggagctacattttacaggcctaagcggtggtttcctttctttgcttatgggacaggaagtttcagatccattctgtggagtaatgaaggacagctaggaggaggaattctcactctccacggctggaaagcaaggctttgct

SEQ ID NO: 181426 - DNA, 354 bp, Homo sapiens
gtgcaggtgtggacccggcctctgggtttgaatcctagatctgcttctcattgagtgtatggtctagggcaagccatttcaactctctaggtcctagttttctttcttttttttttggaaatggggtctcactctgttgcccaggctggtgtgcaggggcgccatctcgggtcactgtaacctctgccctccaggttcaattgatcctcctgcctcagccttgccagtagcagggactacaggcatggaccactacacctggctaatttttttttcctgcctgccttcctgcctgccttcttgccttcctgcctgcctgcctgcctgcctgcctgccttcttgcctgcctgcct

SEQ ID NO: 181427 - DNA, 584 bp, Homo sapiens
ttctggaggatattgactatcccccttagacgtggtatgtcatctcaggaaattcattgtcccttaatatattttcctgtcttggaaaagcattttgttaatagtgattctggtgatgatttaaacaaaaatgtatttgattagacgtactatgttgcaggtacttcatggttacttacctgatctgatttgcggtcctgaattacttgactggtttcttgtttgatagagattttctataaaattttggttgtgctgtttcctatagtagttgaatatgtgaccagtttcatagtagtattttcctcccttaattgaatatgagatcaacattttccaagaacaggtctggtttggaacatctcagccatgttacatgtacattgagaactttgagatcctgcttcttagtggtggcagctacagaggagtgggctgaggacaggtgaaggaggagatgatgtaataagagtgtgcttgcctttgtttagttaagaaaaatatgctggatttgtattttggtttgtaaaaagaccacttctgtgtgtaagaaattagccattgagacaatccatgttgccttt

SEQ ID NO: 181428 - DNA, 285 bp, Homo sapiens
aggtaccaaaagtatggcacagagatatgtggcagttccacatatctcaatcaacaaagctctaactctattagaaactagacatttaaaaagtactttttttgtaacttcatctgagtcaggtttctcattgaataataatctgtcagttttgtctatagtatgttccaattggaaaatgtttaaggtagtacatgcctcttttctccataaaataccccacatttgtttaactatttgacatagtcctattttttccatctttaataattgataaaattttcc

SEQ ID NO: 181429 - DNA, 610 bp, Homo sapiens
ataaatcttgtctgggaagtctgcctagcctcctattaatttctgttacactgacagccaagaaccgtgcactagtaagagtaacattttctgtccctaataactaacggatgtaaggcaatgatcatcagtgagtaatacaaaaaacactagacattttgtgccttctgatggaagaacttacatcccaagatgatcaattctctatcagtgatgaaatactcataccctcgccccagacgttttgaaatcagaaactttgggagtagtgcctaacaatgttttaatcaagccctccaggtgattctcatgcacattaaagagaaccactgctctacatccaataaccaacttaacagaaatacagaggaacatattaaactactccaacaggatacaatgggcaacatccaaactgtggggaaactatagataacctaggtccttcaacgaagaaactgcaagcgaattttttttaaactgcatagataggtgaaatttatattttaagtttcttttattctacagcaaccaattgtaacatgcaggcttcgttttgctcctgattcaaacaacctaaataaaataccattatgagacaactggaaac

SEQ ID NO: 181430 - DNA, 140 bp, Homo sapiens
ttcttttaacgttttattataggaaattcaaacatgcagaaggaattgtaccatcaacaacacacacccatcactctgctccaacaatgatcaactcaggcctatcttgcttcatcctataccctccctcgcttgcttcc

SEQ ID NO: 181431 - DNA, 367 bp, Homo sapiens
ataaaaaaaatacaagtttcaagctttaataacagaagggtccatttcaatgtttatccaaaaacaactgtttctgggactcttggactggtttcagtaccacaggtgcatactgaagaatgatcctgaaacccttgacaaggagaatcacacacccttcccacatggacactatctcctgttttctgctcagtgccaactttggtaatggtctatgtggaaagttgagcttccccaggtagtcaggagtatcataatgctatgtagccaggtttaatgtggttgacatataggagttgttttttaaaaaaaacaaaacccttcagttgatatattttttccattaagaacaatgcttttgtccagg

SEQ ID NO: 181432 - DNA, 674 bp, Homo sapiens
agacaggcatgattttagccctagtgctcaacacccataatggagaaaaatgtatttctccctcctgccttttggcctcctgtgtccattactgggaataattaggaaaactgtcagaacttttgtagcctatttaaggtctagagtatcatcttactgctttttcacacctttacttcacattttgcgtatttaatctgatcattcttggcacagatgttacatgtgacaagcccttctcttccgtagtcatctgcttcagtttaattagcagaatgttctttctgatctgtgtgctttgccctcctgcaaacccaggagaagcagtgttagagtcttgtgctcatttgctgacatgcttagatttggtaatgagatggaggactcttaatatgcacacctcgagtaactttattttgcagtcagaagatttttcacattagaaagtaattcttatgtatattcagaattaaaaaaaattcttgttgttacaacaacaaaaatcacttgcaaatgaagtgttttagtaagtaattttagtaagaatatggaaagcaaatttgagttgacctgttctttctttctgtttctctgccctgggagtgattaatagccacaggccccagcacttttgagtcagggttgaggtgacctacctactctttcagcctacc

SEQ ID NO: 181433 - DNA, 589 bp, Homo sapiens
tttcattttaaatggctttatattggtggattttttttctctcatgcacatgtattactattgaaacttcaatataaaaataaataatttatacccattgaaatacagaaaaataagtaaataaataagaagaatggactgtgttccctaagtataactctgaaatttcacacagaaggtttgtgaattactctgcctggcaaattatgtcctcttggccacttcctcaggccctcagctcttttagaactcaggcaggacctggtgaaattcttttattactgaagagctaaaatgcaaaatctgaatggtaatgcagacttaagtttcaaagattcctccatcagggaaaggagaagtgaggcagaggcaacagtaccggggcaggtgttagatgggtccaacccctggttccaggcttagggagatcccttccccttttagaatctcaacattttcatctgcacatggaggtggtaaaaccctccaacagggtgactacctttttacagaggaagtttaagaaagcagtggcaagccttggattactaagtattccactgcctttccatgtgttttaaagcagttc

SEQ ID NO: 181434 - DNA, 269 bp, Homo sapiens
ctctgggaagccgtgctgttgtgtgagctcaacacaatgtgttgggaagaaatggttaaaccggggtcctgcagggcactccacagctgagaccagccgctgtgaacatctgcacaggacagagtttggaagacaagtttgtgccaatagttagaaatgcagagagaggccgggcacagtggctcatgcctgtaatcctagcactttgggaggccgaggcgggcagatcacaaggtcaggagattgaggccatcctggctaacacggtg

SEQ ID NO: 181435 - DNA, 542 bp, Homo sapiens
agtaatatcagtcatgatgcaagacaccaagcagggatggcagataaaggaaaggaattaagatgtgaattcctcctaagggctcagaagcacgctagatattttacatacagtatatcatataaccattacaaacttgtaagataagaaacagtaccctctttttacctctgaagaactgaggattggagagaaacatacctaagattagaagtaagatgtgccaggcctagcattacagctaggtctgtcagggatcaaatttgcctttttcattccaccaggcttcatgcccctcaaaaaagtaccaaaacacaggatggagtaaataacattcagaagtcagataagcaggtggcattggtaagcagcagggctctaagctcaagccaggactctactgtcccactggagagatggtaagagcaagcaaggacacaagtgctatatctagtaatgatgtcatacttggtaccaataaccttcacaaagtcagctcccaaggcccactgctatcaaagtgaagctagaagtcagggcac

SEQ ID NO: 181436 - DNA, 247 bp, Homo sapiens
acggtcctgcaagcgtagtacccaaagcaatttaaataaatatcaatttttaaaagatacgtatttacctttcaaatcaacagattacattggatgtcttgagcgggtccataagtgcttagcctaaaccaattcattttaaatccctgtaactttttgtaccctagcgttctcttcacaccttttggttacagtttttcttcccccccaaaaatgctgcaagtgagttgggtactacgctttggca

SEQ ID NO: 181437 - DNA, 194 bp, Homo sapiens
cttcccagaaaatcactgtaaacaatttagttcgcatcttttctgaactttacctgtgtatttataaatatttacataaacacacacacacacagcagttttgattttatttttcaaactgcgataaaacggcacacataaagttctacagcctatatttcttgcctttttttttgttatttgttactgtctgt

SEQ ID NO: 181438 - DNA, 208 bp, Homo sapiens
ctagaagctgcttggtggagccctggtccggcattgtctgtagagtgtgtgtatacgtgtgtgttttgttgctggaggtttaattttgttattgtttttaaatacatgggtaggactgggtcagctggatgagtcggagaggaaaaaccattgatctgtttctgaaatcagatctgcaaatggtggccttcttcgtacgtggagaaag

SEQ ID NO: 181439 - DNA, 193 bp, Homo sapiens
gccagtatcactacataaagtatatcgtaagagtttaaaatttctttgcgagtttccctcaccacccaactttagacaagatggagcatatctcatagaatactgtgttcgtagctccctggattatttctttttctcccctcttcactgtggttatggaattcatttgaaatacaactgggtttcttcattt

SEQ ID NO: 181440 - DNA, 153 bp, Homo sapiens
aatttacactcacattaagatcatatttttgcctagtgaaaaaaaagagaatgatgcccttggcccaaagtaaaggcttctccgggtggatgtgacaattggatgagaccacgcatggcgacagcttcatctagtgcctggcacacagcacgt

SEQ ID NO: 181441 - DNA, 690 bp, Homo sapiens
tcactcattccttacgtccaagtgttagccaaagccacctccagaacaacaaacttctccctggtcacgtcaggagcctgcccctttcccgcctggcccctcaggcacgaactcccaggcctcctagaatgctcctccttcactcccacctcgggtctccctgggccccagagaagcctccaacagccacacgacccaagcaggccccaagtgacctgtgaccacccacaacccctcggaaacagatctgccagcctccttgtggatttcatgcctctgtcttccccgagagacagttccctccttgagggcggggactatcttccttacttcctgccatatcacagtggctggaacctgccacctgtgacctgccacccaggacatacttctatttgggattacccaattgcacgagtgttgtttctttttttagagacagggtctcactctgttcaattcacccaggctgcagtgcagtggctcgatcatagctcgctgcagcctccaactcctgagctcaatcaatcctccagcctcagcctcttgggtagctgggaccacaggcacacatcatcaggcccagcaaaaaaaaatttttttttttttgagatgggagtttcgctcttgttgcccagggtggagtgcaatggcgcgatctcggctcaccgcaccttccgccacccgggt

SEQ ID NO: 181442 - DNA, 328 bp, Homo sapiens
tcagctgagctgaggagacaggccagggtcatagatagggatgcctgggtggcctggtcatggctgatccttcttgtgtatgacagactgaaagtcaggtgtgtttaaagaacgtgaagctatagaacttagttgcagccaggcacagtagctagcaactgtgattccagcacttcagaaggccaaagcgggaggatcatttgggcccaggagttggagactagctggggcaacatggcaaaaccccacgtctacaaaaaatttttaaaaattagctgggcatggtggtgtgtgccagtggttccagctactcaggaggctgaggtgg

SEQ ID NO: 181443 - DNA, 971 bp, Homo sapiens
tgtgtggctatgtgttacacacatctcttcacccagcttggcctccaacataattcctccactattgtctgtgtcgtaagctgaattaacttacctctgtggaacattaggccacaaagttgggacattaaaggcctctgttaatgtgtggacatattaacactgaaagccattattggccattaacaccttaacctgattttttatgggcatgagtcagattagtcatggatgaagaaagcacggaggaaaagatctagaacgcagggcattgctaaggagggtggatgtacatgctgatatagggacagcttagagcattagggagctgctaagagagaagagggctggaatagcaagccaagagttacgtgggctcagagggaggaggaagccctcccaggtggcagtctgcgaaatgaggaaaggtcccatagagaagatgtcatttgagcagatctgttttgatagacagtatttagatgcagcctaaacgaagagaactgcatgggcagagactctgaggcaggaaagtactgtctagggcaagcttgggagagcagtgcagacattcatagtgtaacaagaacatataagggaagaaggagaggtcagggaaggtttattggaaagatgacagagaggaacctgagtgttaggctgagctacttatcagctatcttgttggcatatagcttctgctgactgctaatccaaggtgagttcacttcgtgggtggtagatgaatgccatttagtacacgtggaagttaccccagtgcctcccactttagactacaggtcataactcggtgtgggagtagagccattccacccatggccaggaaagctgtgcccagttacaagtcctgtgacgccttaacataggaatagttctgtttttcaaacaagttgtcgagaagttaccaagaaaataaagaaccttcttcccacagaagaaggcagccagaa

SEQ ID NO: 181444 - DNA, 529 bp, Homo sapiens
gtgaccacactgaccagccagaattgtctactgagttagcttgggaaattgacaggaaagcgctgcatcagcacaggctacagcgtactccgatcaaactccgatgttgtgccttggatcctgtaacttcagccaaggaaaccataggtgacatcggtctggatttaagaaccgctcaagaaacgaagcaggcaccaaaatggtaccagttgctgagtaataaatacaccaaattcaagtctgagatacagataagtattgctttggaaaccgatacaaagccaccagtggatagctttaaagcaaagggggctccccctcgagatggaaaagtgctggaggctgggaagttcaagatcaaggcactggcatctggtgagggacttcgtcctacatcctcacatattggaaggctgaagagcaagagaggaactctctccaccaagcctttttataagggcacctgatctcattcattagggaggagctctcatgacctaatcacctgtttaagaccatatctcctaat

SEQ ID NO: 181445 - DNA, 821 bp, Homo sapiens
gtgaccacactgaccagccagaattgtctactgagttagcttgggaaattgacaggaaagcgctgcatcagcacaggctacagcgtactccgatcaaactccgatgttgtgccttggatcctgtaacttcagccaaggaaaccataggtgacatcggtctggatttaagaaccgctcaagaaacgaagcaggcaccaaaatggtaccagttgctgagtaataaatacaccaaattcaagtctgagatacagataagtattgctttggaaaccgatacaaagccaccagtggatagctttaaagcaaagggggctccccctcgagatggaaaagtacctgccatcctggctggacttgaccccagggacattgtggctgtgctgaatgaagagggaggctaccatcagattggaccagcagaatactgtactgactcctttattatgtcagtgaccatagcatttgctacccagttggaacagttaattccatgtaccatgaaacttccagaaagacagcctgagtttttcttttactactctttactgggaaatgatgttacaaatgaacccttcaatgatttaatcaacccaaactttgagccagagagagcatcagttcgcatccgtagcagtgtagaaattcttcgtgtttacctggctcttcagtctaaactgcagattcacctctgctgtggagaccagtcacttggaagtacagaaatacctttaactggattacttaaaaagggcagtacagaaatcaaccagcacccagtcacagtcgaaggtgcttttacccttgaccctccaaacagagcc

SEQ ID NO: 181446 - DNA, 358 bp, Homo sapiens
agagatggggtttcacccgttgtccaggctggtcacaaactcctgagctcaggcaatccgcccacctcggcctcccaaagtgctgggattacaggcgtgagccaccatgcctgaccacattaaagcttttaacatgctaatctgagtggttattgatgatggtaagatcaagttcggttgttttgtagtcattagatttaatggaaataaccattagcagagcaatgccttgtgttggattattcactatcccgttagtatcctttgttttcactttgataatacgattgccttttattgagtagaaaggaccagtatgctcaaggagttattgattcatagttgagaccaaaaaaag

SEQ ID NO: 181447 - DNA, 459 bp, Homo sapiens
ctcactccttcttcagttcactgtaactcagtgtcttcccctcatccaaacctattgtggaaaaaatatcagttaccttaaggtgaatttaatctattatattttattacctccataagtatctgcatttttcagttaattgtgggaaataatattttcagttttaagaattggagagtgttgctgggattacaggcgtgagccaccatgcctgaccacattaaagcttttaacatgctaatctgagtggttattgatgatggtaagatcaagttcggttgttttgtagtcattagatttaatggaaataaccattagcagagcaatgccttgtgttggattattcactatcccgttagtatcctttgttttcactttgataatacgattgccttttattgagtagaaaggaccagtatgctcaaggagttattgattcatagttgagaccaaaaaaag

SEQ ID NO: 181448 - DNA, 705 bp, Homo sapiens
  misc_feature (56)..(56): n is a, c, g, or t
tcgcccttaagcagtggtaacaacgcagagtacgcgggaagcagtggtaacaacgnagagtacgcgggaagcagtggtaacaacgcagagtacgcgggaagcagtggtaacaacgcagagtacgcgggaagcagtggtaacaacgcagagtacgcgggaagcagtggtaacaacgcagagtacgcgggaagcagtggtaacaacgcagagtacgcgggaagcagtggtaacaacgcagagtacgcgggaagcagtggtaacaacgcagagtacgcgggaagcagtggtaacaacgcagagtacgcgggtaagcagtggtaacaacgcagagtacgcgggaagcagtggtaacaacgcagagtacgcgggaagcagtggtaacaacgcagagtacgcgggtcctaaaagttagaactgagcctctctctttcatactcctttattgttttgctaaggtttgtgttatagtaactacaaatttgtttccctttttgtttacatctatgtttccttcattaaatatcaatttttaagccttagaaatacttcttattcagccgggcgcagtggctcacgcctgtaatcccaaccctttgggaggccaaggcaggaggatcacgaggtcaggagatcaagaccatcctggctaacaaggtgaaaccccgtctctactaaaaatacaaaaaaattagccaggcatggtgg

SEQ ID NO: 181449 - DNA, 508 bp, Homo sapiens
tcactggggaagatgaaaggaagtgcagacatttcctctgcctaatggatgaaaaagaactaatggacagggaaaacatctccaagtgcaaggaaacaattttgtctgagagggaaacactgttatattacttctgaagtgttcagaaagtataaattaaatcaattgcaagaaagcattatatcacagtaagttcttattgagtgaaaaacaagataaatatagcactattggaaaatgctagacttactgagcttgttgtaataattgatctaattaagtttcaaaataaatagaatattaacttacaaagaaaatttcacaaggaggaaagcaaaagaaggaatatgaacatatagaaatattcttaatacagaagaccccaaaaatgtaaaaaaaaaaaatgaatgatcagaaatcccactgatatcaggagaggaagatcttgctgtaaactttcctcttcattaaataattttcaaaaatgaccaataatattatctacttc

SEQ ID NO: 181450 - DNA, 360 bp, Homo sapiens
ggatctgcactgggagtcacttttaattttctttattaggagatccaaattcaaataagggcttgtttcagtggttctcaaattcatctgcatattaggaatcacctgggatctaaaaaatgttccaaagcctatgccatacctattacggactgagtgtgtccctcaaaatccatatgctgaagttctaagccccaaagtgactgtgtttggaggcagggccctcaggaggttattaagattaaatgaggtcacaagggtagggcactgaccccaggtcttaataggactggtgtccttataaaaagatacaccagagccaggtgccagtagttcccacctgtagtcccagctaccagc

SEQ ID NO: 181451 - DNA, 658 bp, Homo sapiens
agcagcctccctggctgaggccttcttgctatgcagtagtgcaccgtgcccattccaattgtgtaaactcctgcctagattctgccaagctcttttgaagatctggttcaggatgagcctgaactgggtcctccatctgtcactgcccctttttcacagacgggtggggcgctttggggcctgatgctttctgggaggagcttgagggtaggctggtacctggcaggtgaggagtggagtctacagctccaaatgtgaaaatgaaataagatcaaactcaaagaggggttgaggacaagtgagcaagtttgttgatgattaacttgcagatccttcccgtgtcccttaccctctggactggcctttgctgggtgagccttgcagtcaaagccggcagctaggatttggggtgcacatgtctctctgctagggctctgagggcatggggactctgttcttggagctgagaaaccttgcttctctttccttccagccttgcgggccttgcccgtgtgggactgcatcagagcgtactgaaatcactggccctcatctggtttcagagctgccagttaagctgttagattctcccacccctggtgacagtgatgcacctaggagttaagggagtagatttggagacccctttaaaaaaaaa

SEQ ID NO: 181452 - DNA, 280 bp, Homo sapiens
gtcacgtttcctgcactctgactcactcttcatatcctgactgctagatgttgggtctatatctcactcgggactgcattttattcacctctacattctgtggaaagtaatttacaaagactggtagcaatctttgttgagccaaggaaagagttctcagtgtgagcacatttatttattcccataggagacttctgtctttactgttcactggaatcatttgggattacttatgtatttcagaatatttcagctattccttccttgtgagatctccttg

SEQ ID NO: 181453 - DNA, 388 bp, Homo sapiens
tgaggatccagatggatgacaaggacacaggactgccattgagaaatgaagatgaactgtgtcacagatgcagtggattactgactgcccttgtaatagtccattttgcatctgttggtaattcattgaggctctcaagtcctgcatcctgaggatccagatggatgacaaggacacaggactgccattgagaaatgaagatgaactgtgtcacagatgcagtggattactgactgcccttgtaatagtccattttgcatctgttggtaattcattgaggcactcttggttttctatgagtttgtattttttgaattcaagaattgtaacatcactgttagatccctccttatttaatgagagaaataaaatatttgacacgagaaaa

SEQ ID NO: 181454 - DNA, 1231 bp, Homo sapiens
agctgctctagaatgtagcaatggtgggctcctttgggggccatctagaagcaccctgcccctgggcacctgcctcctcactggaggagaccagaggccacgtcccagccctgtgcttccagctctggaactgcccttgacttcactggacaggcctgagcaagtcgtgtaaccttcagggactcagctatgcccactccaggctctgtgaaaccaagacaacctcacgtgctcagttcctcagctctgcaggagccaggctgctctgggttgcaagtggatggcaagcttccttgtgacttctcatcctggcaattttctggagtgtttgtgactggactttaacatttccaaaatgtggcgacagtgactgttaagtcttcccaaagacgagggttcctgggagccccagggtaagtggcagactaaggctgcaagcatcaggacagcagagaccaaattcatcattgaatcctcaacatctagcacaatatgcctggcataaggtgaagagaagaagagtatgaactaccacgaaactcatttccctccgtccttcaatcaaatacaatgaccttcagctactctcaccattctctactgaaaacatcccaactatctggaaagaactcacctaaagttccccaacatcaaataaaccacgttccaaaagattcagagccagagagaaacaaaacgccctttgttgatgaagcatttactcatacatacatacaagtgtgtatatatatatacacatatatatgtgtgtgtgtgtgtgtgtgtgtgtgtgtgtgtgtgtgtgcgtgacaatacaaaccatccccccccactaatccccaatccttcctccttcgctcttccttgtttccctccgcgccttcctggcgcgtctcccttccaggcggggttctctcatcacctttttcaacatccccccctgccttgttcggtcttgtggggtgggcggattcttcccgcttaaacgcggcatatccctcttctcttataatccgcggatacccgtttgatcaaccacgtgtcacacgccccccatatccgtccgattctgtgctagggttgccgccctgcttgcagacctctcgattctccctcgattccaggttcgagatacccccttttcttcttcccttccgtcaccccccgcctcctttccttcgtttcgcgtctttttattcctactggttcttttttcccgcccctcaccccc

SEQ ID NO: 181455 - DNA, 488 bp, Homo sapiens
ggcctctcgcggtagtggatccttcccgcgggaccttgctggggaatgtacgttacagaaataggtttgtaggtatgtagctgcagaggacgtttacttctgtgcaatcactggactcagtctgtaggatatgcccttagataaactggccaaaaagtttttggaagagtcgaacgcggtggctcacgcctgtgattacagcagctctgaaggccgtgaggggcggatcgcttgaggccaggagttcgagaccggcctgggcatcatggcgaaaccccgtctctacaaaaaatacagaacataagccaggcatggtgccgcgcacctccagtcccagctactcgggaggctgaagcatgagaatcgtttgaacctgggaggcggtggttgcagtgagccgagatcgcgccgatgcactccatcctggtcgacagagcgaaactctctctccaaataaataagtaaaacgttggaataataagaatgca

SEQ ID NO: 181456 - DNA, 185 bp, Homo sapiens
  misc_feature (13)..(13): n is a, c, g, or t
  misc_feature (20)..(20): n is a, c, g, or t
ctagaggatcccnctgagancacgccactgcactccagcctgggcgacagagggagcctcacatacatacatacatacatacatacatacatacatacatacatacatacggcatgcagacctgtaccctgctgcaccactcccgtatgttttttataccaagtttttcttcttaaaccccttca

SEQ ID NO: 181457 - DNA, 405 bp, Homo sapiens
tatgctagatatacatgtaagtcactcgcatgagataaaggcaaaggtccacatcacttacacttctctcttcctttaccttttcttcagaggatacctaccaggtacctcttactcatgacagacatgaatacaactatatcaatgaaaacattaaatgtgaatggattacagaatccaatcaaaagggaaagattgttagactgcataataacataattcaactatatgctatctactagagacacactttagacttaaaggtattaataaattgaaagcaaaaggatagaaatggttatatcatgcaaactacgatcaaaagaacactggagtgctataccactatcatacaaaatatgccttaaaacaaaaaagctagaaataaaaggaacaatttataaa

SEQ ID NO: 181458 - DNA, 153 bp, Homo sapiens
caacctcatcctagaaatttctgcacgagccaccccttaatttgcatataattaaaagtgggtacaaatattactgtactagtagtacggaactgcctctaagctgttattctggacacactgcctatgggatacccctgacccacaaggaat

SEQ ID NO: 181459 - DNA, 435 bp, Homo sapiens
gagagtagaattgtggttaccaggaatgtgaggtttgggtggagcggggtgggttgggaaggtgttggggagcaaaaaagacataggacatgtttaagaaacaatatgcttggctagcatgcatagaacgtgagggtgaacagtggggaattaagttttaaaaagtttctgaagtctagtaatagcacttgggatgtcaggataagaggtttttttgaggagtttttgtttgtttgtttgtttgctttttgagatggaatctcactctgtcacccagactcaagtgcagtggggtgatctcagctcactgcaacatctgtctcctgtgttcaagagattctcctgcctcatcctcccaagtagctgggattacaggcgcccgctgcaacacccagctaatttttatatcttttagtagagacggggtttcaccat

SEQ ID NO: 181460 - DNA, 631 bp, Homo sapiens
agacattggcccaacacaatgctctctcattggatagctattttcatagcaaacccaaatttcaaaatgtcagcctgataaataggggagatttgaaaggatacagtcaaggtgtttcgttttaatacttaaagaagaaaaagaagcctactcttgtttctaacaatcttttagagctttaaggaaagaggatgttgtattttgaaaagagacctggttgtatcttgtctagaagctattttaatatatacaaccattaagtaggttcagatcatattatgaggctcatttttttctctataatagggtgaatattagttagaactcagtaaccacaaagagctataaaagtttaaaacataatgtcttacttttatttccattttcttctgagtataggtgccgtcttggtatggtaaaataagatagcatctactagattctggtataatatatagcctggtagggtggctatgcacatagactttagagttgccttatagctctgaaaactatctttactggttttcaaaaccattggctgttagattttggacaatatttagtatctccaaggtttccctttctcatttctaaaattaggataaatagcaccagctacatagggtta

SEQ ID NO: 181461 - DNA, 368 bp, Homo sapiens
ctctctctcaaaaaagaaaaaaaaaatatgtatatatatatgtatatatatatatttatatatgtagaagcagtgagtagaatggtggttacagagactcggggaggaggaatggggaaatgatggtcatagggtgcaaagtctcaggaggaatatattgtgttttgagatctattgcatagcatggtagattgctaagagtaaatttcaaatgttctcaacccaaaaaatgttaagcatttgaggtgatggatatgttaactggcttcatttaattattccatattgtatttataagtcacaataggactttgtggcccataattataaacaagtataaattgtccatttacaattaaaaatcaatt

SEQ ID NO: 181462 - DNA, 429 bp, Homo sapiens
gaaacctcatcagcaattctaattttgccctggactttgatctcgctctgcccccatttgccttgtgatattttattgcctttgaagcatgtgatctctgtgacccacaacctattcgtacactccctcccctttgaaaattgctaataaaagcttgctggttttgcggctcgggagcaacacagaacctgctgacgtgatgtcacccccagagacccagctgtaaaatttctctcttttgtactctttctcagaccggccgatgcttagggaaaagagaaaagaacctacattgaaatattgggggctggttcctccgatactgtgggaaattgaatagatgctattttggagaatttcaacatcttttcaattttctcctcccagctccctccttggtggaaagcagcttgggtcctggaggtggac

SEQ ID NO: 181463 - DNA, 435 bp, Homo sapiens
gaaagagctttgctctcatttttttatttaaaaaagtgtttatttcaaatagattgaatcactaggtgatgggctgattctttcaaaaaaatttaatgacctccccattatacaaacaataaatgtttattgcagtaactttaaaaaagttagaaagccacaaagggaaaaataaaaatcacctataattcacccacccagatataattgctattgacatgttgatacgtattcctccaatctttttcatacacatgtaaatgtagtttaacagattggaagaaatgtgctataaaatggttgataacttacttttttatttaatgatacttccatgaccattttctaacattgttaaattttttccaaaatatgtttgatcagagcatactgtctaacctatgaatgatacacctactgcacataacctattgg

SEQ ID NO: 181464 - DNA, 113 bp, Homo sapiens
atcactgactaatgaaaatgctctttctggaaatgaggaactaacagtcaaaattaagtgtgataaggtgaagaacctactgcatgtcacagacactggtgtaggaatgacca

SEQ ID NO: 181465 - DNA, 502 bp, Homo sapiens
attccccagttttgatcaaagccagcagtgactaaacatggtgtgcgggcagtacttaaagctccctgagggaagaaaagcctcatcactcagcaacccctttggcaaaataaagggtaacattcattgggtttgaacaagtgaataaaaaaaacagctccccaatttttggaggaaaacatgatagaataaaaaaaaaaaaaaaaaaaaaaaaaaaactactgacttaaaaaagcccttctaatccaatcttaaaattttcacaaatccatgtaataactacaaatctatttgcagttggaaatccagacactttaaggagggtctcaacaaagtcatgtttcaaaacataccagttattttattcattcatttattcaatatttactaagtccctattatgtgtcagatacagttctaggccccaaggatacagcctgaacaaaaagtccctgatctcaaggagaaagagagataaatagataacatatcaggtggtgat

SEQ ID NO: 181466 - DNA, 172 bp, Homo sapiens
tcttagctttttttctgttagtataaatacagtataaatctctatttatatcactcttctttattatttggtttctcttcacagtccaatgacaactttggtctttaatttttttaaagtgcctggagccaggtgaggaagctcaagtcagggagctatggttttgctttgg

SEQ ID NO: 181467 - DNA, 308 bp, Homo sapiens
caccgtgttgcccagtctggaactcctgaggtcaggcaatctgcccaacttggcctgtcaaaatgctaggattacaggcgtgagccaccgcgcccggctgtgtatgatgtttttagtttcaatgttgacatgttttcaattctcttagttatacacttaggaagttttatatatttttacctattaaatactccttggaaacatctatttctctctatctctaagctaccaacattccctcatctggactaaagcaaaagcctcctcccttcttttttccaggcctcttctctacctggcccagtaat

SEQ ID NO: 181468 - DNA, 654 bp, Homo sapiens
ctggtccttaaatgctggtttcccttgggtgctagctaatattggaaatatcagccattctcaactaataattcctaattatatccccaatttagactttttattctaagttcccaatttgaatttcaagttaccaactagacatagccacctggatgtattcacttattaaacaactgagtgccctcaatgtatcaagcactgtcctacatgttagggagacagcagtgaagagacacaatcctcagccttacagatcttacattctagtttggtgggggcaggttagatgcctcacaggcactttaaatccaacatacgtggaaccagacttatgacctaacctctaaccctgttcttccttcctacattctatgttttctccttctcccttgcccagcccatgtattacttattcagtcactatgtcctgtctattctatctcctaaacatctctttactacatcccttccttcatccctcttccactgccttagttctacctttgtcatttctcatctggactgctgcattagcctgttaactggtttctttgttttctgaaaggaagcatcaatctatcctcaatattagaataatctacaatgttttttcacctgggcatgtctttcctttttttttttttttttttt

SEQ ID NO: 181469 - DNA, 303 bp, Homo sapiens
tcattttgagacaatctaagatggtaccatcttaccaaatacatgaaagtaatattgaataaaggcagcattttcacaagaagataatattatttaattagaacgttacatgaagttacattttatcttggccatttgtatgcaaactttacaagtcttacattgataattaatgcatgcaaaacattgatcttgattcatatttttcttttgagatgggtcccattctgtcactcaggctgaagtgcagtggaatgatctaggatcaccgcaaccttcacctcccaggctcaagccatcctc

SEQ ID NO: 181470 - DNA, 313 bp, Homo sapiens
ttcctcccattttacacataccatcctatacttgctttttccctctgaattgtacatcatcttggtgattattccttgtcagtccacagaaagcatcttcactgttttcctcagccgtaatggtagacggagtgactttaagcaaatgtagatataaaggctcatcatggagaagtttccacagctagggtgatgggtcaagctgaactgatgaacaagaatggagtgggatagaagattctgcatccactggggctcccaaaccatttgcacagcctattccctctgcttaacatgccctcttaccacattc

SEQ ID NO: 181471 - DNA, 335 bp, Homo sapiens
ttcctcccattttacacataccatcctatacttgctttttccctctgaattgtacatcatcttggtgattattccttgtcagtccacagaaagcatcttcactgttttcctcagccgtaatggtagacggagtgactttaagcaaatgtagatataaaggctcatcatggagaagtttccacagctagggtgatgggtcaagctgaactgatgaacaagaatggagtgggatagaagattctgcatccactggggctcccaaaccatttgcacagatcattttgcccgtggctgggtctggacttcataagaagcttcttctggggtaggtgaga

SEQ ID NO: 181472 - DNA, 241 bp, Homo sapiens
gtctctagatctgagcaaaggttctgaatgaagcctttatagattttggtttaaaaacctgctgaatgcataaaagttctcagtaatataaaattactgctcattgactcagcaatccaccttcgtatgacactgctattgtgactatctaccaataatttacaattttactttacttaatctaatttcaaacaataatactaccacaaccacttcttctcctttctctcctcttccttat

SEQ ID NO: 181473 - DNA, 486 bp, Homo sapiens
cagtctcatgcacactcacagcttcagttaccgtcttgatgccagtggctgctggatttactctctagcccagaactctccaagctcacggccttgtgcctgactccgacttggcatttcttcctgcttgtttcatgattatttcaaattctaaatgtctgccctagcctaatcagtctaaggtcgccaggaacagacccacagtctgacagagtgaggtttatggctctttgcagtgaggaagaccataccagaacaccgagaaactgtggggcatgtcaacaaaaaagaggatagagttgttgtaggacttggagacagagtggtattaggtgaagcataaatgaagcaaaatagaactgtgtctaaagggaccaatattaagtctgactgcgaagcggacccaggtcccgtttccttgaaaactacaacgttcaaatagacgtggaacattgttctagaaatcccttacttgaagctctgcag

SEQ ID NO: 181474 - DNA, 276 bp, Homo sapiens
tagcaaggtgtttttggtgttggaacttcgggatgtgatccagtaggtggtgcttaggcatactggttagttggtaggctcttgcttggtcatgtggctcccctatattttctgacagttgcagtcatgctccctctcaatgttctgaaagtgtgggcttctctcccacttgaatgctggctataaattgtggcttggcactcttgggctgcccaccacagctctggggcactctcagggcttatgttcctcccctggcttggaggcagcagagga

SEQ ID NO: 181475 - DNA, 264 bp, Homo sapiens
caaccgagctcgtaccctttgccagctagacgggaggtcaatacgatggggaaaagcctgtgaagagattgggcagcagccacacctgctgtcacctccactcccctctgatcttggaaacatatttgccctttacaactcaactcagctcacccaccttcagagacttcttggcccatcttagctggaagggatctgttccagcgctgagcttttattttgcttagcatctactcagatgccttgactgtgtgtgtctcacag

SEQ ID NO: 181476 - DNA, 401 bp, Homo sapiens
tcaaggaggctttggaatttcatagtgaccacacacagtctgatgatgaagagctttggatgggcccctggaacaacctccatataccaatgacaaaactgtgaccaattttttaaaagatattttaattaatttttacttacatttttaataaactgtgctttttattgtcactgagaaaacaatgtatggaatttatatcatgcacacaagctaaaactttgaacaatatgctttaaaattttaagagacagatttgcactcacattgttatcaattaatcgtttttcccagaaaatccttttggacatactttcactaaataacctatcgtttaaacatttagctgttttgttgggtcttgaatttttgttcattttaataaacaagaaataattact

SEQ ID NO: 181477 - DNA, 331 bp, Homo sapiens
aggccatttcaggctaatgcgtctttcccaaatagcattctattggtcaaaatgaagtaattgggaatgtgtcccatgatatagcatactctctaagcggtcaaatctaaggaataatttttggggaaaagccctgctttatattctggctaggcctaacaacgataacaataacagcagtagaaataaccaccatatgttgggtatcactctagcctggcgctgagctcagtgcttcacacatactctcacactgaatccacaaaacagcctgatcggaagattctcattgatatggtttggctgtctgtcccctcccaaatctcatctc

SEQ ID NO: 181478 - DNA, 258 bp, Homo sapiens
ccatgcttcagctcaccccacaatgcaggtgttagtcacgtccccacgtctggctgctcgccaccctcctggccatatctcactgtgctgtgacttttcactatctgaccacactgagctccttaggagaagcaagtgcatttcttcaacccttgttctcatgtgtctattcacagcgcatgccacacaggggcagcaacccactcgatgatgggtgaattactaaaaacaaggccggctcagccaccattgtgttac

SEQ ID NO: 181479 - DNA, 618 bp, Homo sapiens
aggtggctgagactctttcaacaccaactccgctttcattgccttctctccctcaacccatacctatggtatcctgggggttgttctcacaaccaattgaccaagaaagaaaaaaaatcaagtctggtttacacattggtctgcatatgttggtttcatgcaaaagtggatagctaaaacactatagccccacccaagggccaccctgaaggacagtggtcaaaaagaaaaaaaaaatcctcccagggaacagaacttcaaggagtacctttggccacttgtctgaactgagacatggccagaagtacagacttacactaattaatgggtagctgctaatggcttggctagatagggacttagaagaaacaggtctggaaggctggtgacaaggaagtctgggaattatctgtggatggacctctgggaatgggcgcagactgaagatatctgtgccctaggttaatgcccactgatatggtttggctctgtgtccccacccaaatatcatcttgtagctcccataattctcacatgttgtagaaggcacccagtgggagatgactgaatcatgggggagggtctttcccatgctgttcttgtgatagtaagtctcat

SEQ ID NO: 181480 - DNA, 364 bp, Homo sapiens
tcatggtgcccattatttcacagaccaggaaactttaacacagaaaggataacttacctaagatcatataattagatagacccaaatttctaaccgaagggctggagaatgcaggggtataatccacagagcatcattaggtagactgtggcagaattaggtactttcacttctctttgccaatcaaggacagcaataacgtcagtcctctcctcttcatgctgttacaagcaggctgcagtcaccagaacagaccagggtttttcaccttaggaatgtccttccctttccgtataaagacgctctttactgacagtattaagatagacttgggttattcttttttctagtaatggtgagggac

SEQ ID NO: 181481 - DNA, 911 bp, Homo sapiens
tggctttcttctgtgaatcgagctattagatccctaccactcccaccactcctaccatcattactagaacgcatgttagtcaaaatactctacatcccactgtggcaaaccaagctgagtctatcagaatccttgtcaggcaatgttctatctgcagttggacaaagagttaaacctattttttatttctgactgccaagctgttgactttaaggatgtccttagtcaataatatcctatacctcatgtggaagatggttttgaggtaataatgctgacaagcagcggcaaaagagaagtgggaagtcaagatgacatcaatctctgattctaggcatccctaagatcagtttcacctgtgcaccagacgtttggttttgtaaggcaacatatctccctctttagcctgaagttatgatgaagtgggtttatatcacttgcagactactacaatagtcaagttaagatgtccaatagacagtttgatatataaatctgaagccaaggagaagttttgcaatcatcagattatgactaaagcaatgaatgatctctaggcaaaacggtatcatgacaagcaaagtgtgctcaacagagtcctctgagtaagaacagcatttaaatcataggtagaaaaagagaagtctactaaggaggtttgggtgttaccagaattagaagaggaaaatccgttaaatgtggtgtcactggagcctgtttcaaggagaaagtgggtggcagtattaactgccactgagataggaaagactgaggactattccttagactgtgcagcaaacacagtgtggcgctggcaacagcagtttcagtaaagtagtgtgggtagacatcagattacaggaggttaagtgagtgaaaggaaagcagcagagtcaacaagtgtagacaat

SEQ ID NO: 181482 - DNA, 323 bp, Homo sapiens
atgaaacacgtagaaccgagagtagagcactagtggaaatgggaatgcagcaggagagacatctcacagacacttgagagaatttggatttagagacatcttaaaagcacttaggggatagtagagaatgaatcaaagacaaaatgagggtttgagcgccagcaagtggaagaatgatgctgactttaataaaaacagaaaagttagaagaggatgcagtttgacgagtgagatgaactgggttttagtcataaaattatagaattttagaaaattacattaggaaggacctggactcagatttttttttttttttttttttt

SEQ ID NO: 181483 - DNA, 264 bp, Homo sapiens
aacaggaagtttacttaaactaatgaccacagatgcctaaaaatggttaaatgtaagaggtaggcattatagaggatacctgtggaaaatgtttgctcatatgtcaaagtttacccaggaagcttcctttatttatttccaagcatctatataaagaaaggctgcacttgattgcgtaagcatgagccttttgttaggcagcgtggatgttgcaagtttaaaccccaactaggaaatgaaaagtgagtttcctcctaaatagtt

SEQ ID NO: 181484 - DNA, 281 bp, Homo sapiens
tcaaaggagagaaattcacttcggtgtgccaccaaaactgatagttcagtgaaaagccaattcaagctcttggctgaaataaagagctcttcatcctttttaaaggatataaacaaaccaaacaaaaacagtttgagtaaaatcactataatcagaaaactagtactaatactagcagcagtacatttaacttttaggacaatagaacaacctaaaaccttacatcttgtctagttataactctaaaccagtaccacccacccctgtccaatctggctaca

SEQ ID NO: 181485 - DNA, 613 bp, Homo sapiens
tgtgcccccacaggcccctgctctgcccggctcgtgtccttttcattgggaggtgccatctgattgagtgtttagtaccctccaggcactgtgctgcgggctttgtaggaatcacttcacttaatccccaaaaggtgagtattcatacaaacccagactacagatgagaaaaccagggcctcaagaggtatcgctctccacacatggccacgcagccagtgaaactcaaggatgcagagtccagggcccacactgggagccattgcctctcgctttgtctgcttcgggccacacgtctcccgttgaagcagaaatcaggtccctttcagttctggctcccacatgccaggcacagagctggccttgaaggggcctcagcaaacatttccttgattagtacatgaggcaggtgtcatcccctgcaacttctgtaactatctgcttctatgttgcagcttaactatatgctcttcaagggcacagatctacattctgaggcctaacaggctgtgcgttcagcaactatttgcaactaagtaaatactggctacaatgagagctctttcaagtagttcctatttcccaggtactgtgctcagttcttcatgtgtat

SEQ ID NO: 181486 - DNA, 263 bp, Homo sapiens
ctgtgggaggataaggcagaattattttagaaggtcaaggaaaaccttagtaagtcctcaagtagagcagctgtgcagggcaggacggcttctgaacagccacaccaagcacagtgtaatgacacccttgcattcactggtccaaaaattatattatacctcgaggtagtggtgcccctcctgcaggccccaagtcatgcctaatggcttggctagtaaccttttatgtaatctatttctctgagttcttgacctactccctt

SEQ ID NO: 181487 - DNA, 432 bp, Homo sapiens
acgaagggcgactccagtatctcccagcctctcattcctttccagacctaagtcattagcggacccagagctccttgattgaaggagataaccagtaccctggaggaaggtccttgcagcataaatcttccttcaagcctttccgaagtgacctatggccactcaccagggtgtctgtgccttggggagagggaatatccaggctccttagggattactagacatgggctctaagtttatgcttattcctagggacccaaaacgccagtgtgctccaccagtcaaaataagggcttaagggggtcaggggacagatggaatcttaattccaggcctcctcagtgggccccagtggttcacagacccatcctgtggttacttcctcaatgccaggaaaaacctagaatagacatatttggtagttggcacagt

SEQ ID NO: 181488 - DNA, 350 bp, Homo sapiens
tcccctatcaattctcaggagtgcaaagagagacaaaaaataaacatggttggccaatgtttgtttttagggtgagttctatactatttttctattattattttgctttatttactgtggttggtaactgaatctctaacatcaaaacatgagatgttctgccagaaagagattacagaagaaaagcctatgaaaagaaactgggtttgtcagtgaagattttatttacaggagttttgcaatcggtatctttaatctccataacaattgggctattctactgctttgaaggcaattgttcaataatgagaaggtccctgtgaggctaagcttggaaggaagaatgtaac

SEQ ID NO: 181489 - DNA, 160 bp, Homo sapiens
atgcctttaagttactgtccaggttcctctcatttcagcctgaagatctcccattagggcatttcttataggcaggtttactagcaacaaattccctatctaaaatatgctcaaagagcaaaaggaaacccatagacaaaagaatgaaaggaaaccagga

SEQ ID NO: 181490 - DNA, 676 bp, Homo sapiens
catttcagcctcacaatgttatgaggaagggattattattatgcacattttaccaatgaggaaactaaggcccagaaagaaatgttaagcaacttgcccaaggtcacacagctaggaattggcaaaactgggattagaacccagggagcctaaccaaggagtccagaatcaggcattctcgctccccctgccacccacttggacctgtgtagcggatggaggcttcacactgcacagagcagtcccacagcctccatccagagagcagggcagaagctaagggcctgggtccctgggcctttgagccaggcacagggcctgaactcctcagctgactttcttaagtccagcagaggcctcagcacaggaatcgtcagtcacattcacaccgttaatctcggcccatccttctgcccagttaccttcaattagaatcttgattttatactgtgcacttgtcattcctcacagctctggatgactacacggagtcagctgacttcctttttaagtctccatccaagtcactgatcttaaatgttcacttggagtagatctaggagcaagccttgtagccccaccactagggccccaagccaggccgacgacagcccccaaatccatcagcacccagtgggcataactgttgtgaacctaccaacctctgcccagcctg

SEQ ID NO: 181491 - DNA, 701 bp, Homo sapiens
aacaaactgcaaaatcagacccagcaaagactacagatcccagaattaccagatacaaaaaagaattatattcaaagatgagacaaagtacagcaaaggaatcagactatcaaagtggaccatgtagatgtgggttgatttcttgtcctggactgagagctgctctgggaccccagctctatgcagggcttctaactgacagacactgcatgtgccttctgtcccctgcaccttcgatggccaaagtggaagctgcaagaatccagaacagaaatctctgaagctaaagccagctttgtgcttgatttcttcccagggctctagtttccattttggtctctgcagattcatttttttttctggttcagcaatactgtgttttaaatgatgtcttatatttcatgcagtgtcttatttttatcggtcagaagggttgaaggatccttagactgccacactcaatcagtggattctgtcgttcagtttttttttttgagacggagtctcgctctgtcgcccaggctggagtacagtggtgtgatcttggctcactgcaagctctgccccccgggttcatgccattctcctgcctcagccttctgagtagctgggaccacaggcgcccgccactatgcctggctaattttttttgtatttttagtagagatggggtttcaccgtgttagccaggatggtctcca

SEQ ID NO: 181492 - DNA, 339 bp, Homo sapiens
gaggataagaagtggacagattctgaatatatttcaaagatgcagaggatgatatctgctaatgggttggctgtgactataaaagaaggggaaactaagggcttcaaggttttgggcttgacaaccacctaaaggatgaagctgccgttaactgagatgggaaagaccatgggtggagctagttgatagcaaaattttaaaactcaggatttcagttttggatgtacaggtctaagatgctatgcatctaagtggaaatgctgagtaggaagttattgaggctggagttcggaaagaggtctgcactggaaatagaaatgtggagatcatcaatatggc

SEQ ID NO: 181493 - DNA, 833 bp, Homo sapiens
tcataaatatgcaacatgtggccaaggggatttctaggtaggatgctgaagggccaatgaacttattttaactgggtatgattgatcaggtataggaagagaaaaatgagctaaggagagaactgtttagtttgcaggtagaatttagagaaaatatagaagaaccaggacttgctaaggtagaaaataaaattacttcatgtctccagtttcttgtggtggcacaagattctcagatggtggcaggttagggaacaattcaaaggtgtggctgtaacaccttttgtaaacatctcacaaagatttaaggtcatacctagcagaccttctctcccaggtagcgaagtgggcttctaagacacttcaaggctctgttccatagcagcctacacacctagtgggaaggggtctgtcctgaaaagaattatggatgcagctgttgagacatgtgggaaagcccaacaagatttagagaaaaccctccaagtttttaggggagttgtgctgactgttgctagtttggattaaagggacagatatagtccaaaatgaaaaaagccctctatgccccaaatgtctcagggcagaacacaggctgagaaagttaatcagctgcaaacacaggctatttctttccttttttttttattttttactttaggttaaaaacaaacatgggatacatgtgcagaatgtgcaggtttgttacataggtatacacgtcccatggtggtttgctggacctatcaacctgtcatctaggttttaagccctgtatgcattaggtattggtcctaatgctctcccttcccttgccttccactccccgacag

SEQ ID NO: 181494 - DNA, 333 bp, Homo sapiens
gtttggctccagaacctgtgctcactttaactttcatgtcactgtatcgcttcttatgaatgtattcatgttgtgaatttattcatgtgatagatggcaagcacagagaccgtatttgtaggcattttagtgaacagttaaaaatgagctcgtgaagagagacagacaagtcagtaggagtaataaacatttactaagcccctactatatactaatgtagctaagcttgggagacattttctttctgtcttctcggatatgttcctattttctttctagatgaaaagtatcaggaaaattgatgatcgaataactctggattgggagccattt

SEQ ID NO: 181495 - DNA, 161 bp, Homo sapiens
acctaagtgtatgagttgtcctctcttctttattcctagagaatcctcagcatgtcattaccaaagcactataatctatgacattgatttctaattattgctttatttctctgtctctcccactaaagttccttgaggttatggaacatgtctattccaaa

SEQ ID NO: 181496 - DNA, 137 bp, Homo sapiens
cagcaacagcaggtgcttggagaatgtttgttgaatgactaagtgaaggctgattgctcagccatgtctttcctgcaggaagaggagacctggcctcccttgggaagcgtcaggttgcagagggcctcagggcccca

SEQ ID NO: 181497 - DNA, 434 bp, Homo sapiens
aaggaaggcagagtcaaaatgtgcctgtttgatctgtttcttagtcattgttcggagttccactcttcttgagtaggatttctcaacagtggcactattgacattttggacctgataattctttgttgggcaggggtggggggagctgtctgcattgtaggatgtttggcagcatccctggctctacccagtagatgccagtagcaccccaagcccagttgtgactaccaaaaatatctccagacattgccaagtgtctccctgggagcaaaatcattcccagttgagaaccactagtctagggggaaatgagcctactctggctttacttatatagaaccaggactttatgcttaatctaaaacccatattttcccctttatgctacctcttccctaagagcattctatagagtaatagtcctgtaagattct

SEQ ID NO: 181498 - DNA, 776 bp, Homo sapiens
cggatccatctggaattgatttggtataaggtacaaagttagttttatattttccagatgacagcccatttgtcccagtgccatctgttaaatagcctctgctctccctcccagatctgagctgtctctcgtttactcccacatctatttgggttcacttctggaccctgcgttctgcttcatggatgtctccatccagatgacctcatgttggccagcatttttgaaacattggggttgttggagtggttggattttccctggaattgagtgagaaattcagaagactgaagcccaggcttactgtctacctttcacggaggcctagccgtgagaggacagaagaaggcatgtggcgaatcatgacagcagacaaagacaaagagaaggaccgggactgagactgggactgagagagagagaaaagagacaaagcaagagagagtgagaattcaaggccacgccggagctgtaccttggaaggaggagccaaaaattatgctgagagtgatcacagtgaagacgaggacaatgacaacaatagtgcacacgcacagaggagtccacgaagaagaacaagaagaaaccaccgaagaaaacgtctcgttatgaaaggacagataccggcgagataacatcctacatcactgaagatgatgttgtctacagaccaggagactgtgtgtatatcgagagttggaggccaaacacactgtatttcatctgtagcattcaagacttcaaactgccatctcagcctcagtccagttctgagc

SEQ ID NO: 181499 - DNA, 789 bp, Homo sapiens
  misc_feature (760)..(760): n is a, c, g, or t
cggatccatctggaattgatttggtataaggtacaaagttagttttatattttccagatgacagcccatttgtcccagtgccatctgttaaatagcctctgctctccctcccagatctgagctgtctctcgtttactcccacatctatttgggttcacttctggaccctgcgttctgcttcatggatgtctccatccagatgacctcatgttggccagcatttttgaaacattggggttgttggagtggttggattttccctggaattgagtgagaaattcagaagactgaagcccaggcttactgtctacctttcacggaggcctagccgtgagaggacagaagaaggcatgtggcgaatcatgacagcagacaaagacaaagagaaggaccgggactgagactgggactgagagagagagaaaagagacaaagcaagagagagtgagaattcaaggccacgccggagctgtaccttggaaggaggagccaaaaattatgctgagagtgatcacagtgaagacgaggacaatgacaacaatagtgcacacgcacagaggagtccacgaagaagaacaagaagaaaccaccgaagaaaacgtctcgttatgaaaggacagataccggcgagataacatcctacatcactgaagatgatgttgtctacagaccaggagactgtgtgtatatcgagagttggaggccaaacacactgtatttcatctgtagcattcaagacttcaaactgccctttagatanttctccaagtcctctctgcgtttggagga

SEQ ID NO: 181500 - DNA, 1056 bp, Homo sapiens
cggatccatctggaattgatttggtataaggtacaaagttagttttatattttccagatgacagcccatttgtcccagtgccatctgttaaatagcctctgctctccctcccagatctgagctgtctctcgtttactcccacatctatttgggttcacttctggaccctgcgttctgcttcatggatgtctccatccagatgacctcatgttggccagcatttttgaaacattggggttgttggagtggttggattttccctggaattgagtgagaaattcagaagactgaagcccaggcttactgtctacctttcacggaggcctagccgtgagaggacagaagaaggcatgtggcgaatcatgacagcagacaaagacaaagagaaggaccgggactgagactgggactgagagagagagaaaagagacaaagcaagagagagtgagaattcaaggccacgccggagctgtaccttggaaggaggagccaaaaattatgctgagagtgatcacagtgaagacgaggacaatgacaacaatagtgcacacgcacagaggagtccacgaagaagaacaagaagaaaccaccgaagaaaacgtctcgttatgaaaggacagataccggcgagataacatcctacatcactgaagatgatgttgtctacagaccaggagactgtgtgtatatcgagagttggaggccaaacacactgtatttcatctgtagcattcaagacttcaaactggtaagcatttttaatgtgctgttcgctctgctctgtattctctctttttccagttccattggctatctcttattgttactccatcgctgttgacgtggttaccagttcaccttttgagtgctaactgcctcgtggcagtagcactgaaatgagggttactagttccatcttttcagctttgtaacacttactctcataatgcttatattgtaaacaatatttctgaagtttttatccctttagtaactgttttgacaatttcgggtagtcccttgaatttctgaagtaggttgtttcttctcagccat

SEQ ID NO: 181501 - DNA, 967 bp, Homo sapiens
  misc_feature (2)..(3): n is a, c, g, or t
  misc_feature (308)..(308): n is a, c, g, or t
  misc_feature (413)..(414): n is a, c, g, or t
  misc_feature (416)..(416): n is a, c, g, or t
  misc_feature (418)..(418): n is a, c, g, or t
  misc_feature (421)..(421): n is a, c, g, or t
  misc_feature (425)..(425): n is a, c, g, or t
  misc_feature (435)..(435): n is a, c, g, or t
  misc_feature (442)..(442): n is a, c, g, or t
  misc_feature (452)..(452): n is a, c, g, or t
  misc_feature (465)..(465): n is a, c, g, or t
  misc_feature (478)..(478): n is a, c, g, or t
gnnatgctcttaaccttgtaaatctgatcaagcttcagatgccttctaacttagtttatcagtaaaatgttagaacttaacaaacatttccgaagacagtgttaaatgaggtacagatataacaggaaagtttattatgtgaaaatttagtcctttagaaatacgttttagggctgggcccagtggatcatgcctgtaatcccagcacttggggatgctgaggtggacagatcaattgaggccaggagttcgagaccaagcctgggcaacatgccaaaaacccatctctaccaaaaatacaaaaattngccaggtgtagtggcatgcgcctataatcccagctactagggaggcagaggttacagtgaagattgcgccactgcacttcagcctgggcaataaagtgcgactcnnananggnttantccagatgcngtggctnacacctatantcccaacactttnggaggctgaggcnggaggatcttttgagcccaggagtttgagaccaccctggacaacatagcaggaccctgtctatgcaaaaaaattagctgggtatagtggcaggcatctgtagtcctagctactcagtaggctaaggtgggaggactgcttgagccagggagatcgagattgcagtgagtcatgatctcgccactgcactccagcctgggcaacagagcaagaccctgtctcaaaaaaaaaaaaaaaaaaaagtgaagtggcatgatctcgactcactgcaacctccacctcccaggttcaagtgattctcctgcctcggcctcccaagtagctgggactacgggtgcctgccaccatgcccggctaatttttgtatttttaatagaggtggggtttcaccatgttggccagactggtcttgaactcctgatctgaaatgatccacccactttggcctcccgaagtgctgggattacaggcatgagccactgcctggccg

SEQ ID NO: 181502 - DNA, 308 bp, Homo sapiens
gcaggagaatcacttgaacccgggaagtggaggtcgcagtgagctgaggtcatgccactgcactccagcctgggcgacagagagactctgtctcaaaaaaatataataaaaatttcccccttctacctccttgaccagagacctcactgcagggactctctgggattttcctcttgagcccaaatcagctgagctgtggtagtgagtcctgggcccattcctccctccctgcagagttgggagattttgaaattatcaggcatgggcaggggccagggcagggcggattaattcctctgcagcctgct

SEQ ID NO: 181503 - DNA, 998 bp, Homo sapiens
ggaagaacagaattgcagggcaagaaagaaacaggaattctgttttagatacataataccatatatacacaagtgaacatgtcaagtaaatagttaaatataagattctgaaactcagaaggtcttggttatgttcaaatcagtagattcttaacactccactttatctcatttccgtatcccatgattcatctggattaataatcaaatagtttcaacttcctacatataaatattcatagttacatatcacaaatgagttcctctgttcattgatggtttttattttacccctgacatctaaggtaagagagagagaaagatgggaatggaggggaatgagggagggagagaaaacaaacacacttgtgtgcacggacacacacacacgctactgtccatacctcggacaaattgcttaatctttctccagttcctactttcctcatctgtaagaggaaaagctgaggttttttctcaagctatactatttaatgattctaagctttatgtctgttctaaatttgaatgccacattttggaggttcttactgagacttttaaataagaatgattaccagagactaaactagaactgacctgctcaaattctctgctatatatttaagtataatcagagacagctcagactattttaggaaacaaacttcttgcttaatttctaaacttaagtggcaataatttatactcacatggcaataacttatattcaagcttaatggtttggtttggtatagattgcatacttgcactcttaaaaggtttggttccattctcaggattctgaaaaaaacaaacaaacaaacaaaaaaaaaaacaaagctggacacctggcatatttagtagtagctctaggatgttctgctgttctaaaagttcagatacaaaggtcacctgtccttccttgttatctatgagttcaagaagctaatgcaaaaataaaaaaaaataaaaattcaagagcatttctctaggtt

SEQ ID NO: 181504 - DNA, 451 bp, Homo sapiens
gcgtgagccactgcacctggccaaaagtcactttctgtagtgtgggacatctttatgctgcgtcctcagctgtgcctgtggcctctcctcccacagctgcggccccagagcagcacgtgatggggactgtctgcaggtctggcaacagtcccacccacaccatccagcatgagagccgcccagccacccgcccgaaagtgcagtgatgaagcaggaggatgattttatatatcatcttaacacatttaaatgtaaaaggccccacaaggctactgccctcatactggacagggcagctcccaccagacagagcctgtcacctcctctggggacatcacagtggctacacagtcctacttggccgcactgtaggccgccttctctcctagcatcattctgatgtaaataaggaagtaacactatgtgtattggaatcaatgagaaaattgag

SEQ ID NO: 181505 - DNA, 623 bp, Homo sapiens
tcagaaggtcacctatgcccaaacacaaagccaaatctcagctagaagggtccctggagatcatctaggcacttaatgagcatttatcaagcactcctgtaggcccaccactggagacacagacgtgaaactgaaaaggtccccacccttattttataagggaaacaagatttaaaggagtaaacaactctttttgaaatctcatttgctcaggaaggaaagtccatattctgccccactttccacagagagcagcttagctgggggcagcagtcacatcaaggtaaggctggctggtgcatcactggcacacctgcttccctccatcttcctaactgtaacttgggcagcatggtttagtgcttaagagtgtgggctttggagttagacactgagaatcaaatcctggtgtccctactcactactgtgtgaccctaagttacttgacctctggactcagtttctccaactgtaaagtggcatcaggtacagcattaaatgctggctcatggtagaggcttactcccctcctggtccccttaacagtgaaacttccccagaggaccccgcactgccagtccaactccttcaccccctgctctcacttcagcccatctccactg

SEQ ID NO: 181506 - DNA, 464 bp, Homo sapiens
gggcttcagaggcccaaattgaggcgcaatgatgagaggatgtggtggtctactctgatgtcaatcttgagggctaggtatgtcccaagatctcttattactgctgttaatgatgattctaatagctaccatttgtcgagtacttattgcatgccagacattgcacaaagcaggttacacatacggtctcatttaaaacttgtgaggtaggcacctgttgttatccctattttccaggtgaagaaatctaggcactgacataaataacttgggatcacactgctaggaagtactggggaagggaattcaaaccatggtttatctgaactatataactgttacatctatttagaagtctgcctttgataaatttgcccaacctttttttagaattcacttacagtttatacctgtgtgaaccctttcattcttttttggtatatgcataatacaagttcattcca

SEQ ID NO: 181507 - DNA, 610 bp, Homo sapiens
aaggctagaggagaaccaggcacccagataaacagcataaagggactggcagtgttccagttctgaagttggccagagagtttcttgggtatacattttattattttaaattcatgtgaactgggccacgatcttacagtctatgttattctcatgtgcagaggttcaactgatgtaccaagttctttattagtgacacactaaaaatttattgcttatgcattttataatctaatgtgctttgtccagagcatagaaagtgttctattccatttagtcattcggagactgaggatccctctgttttgtgccaccatcacagtcagcctgtaacctctaagtcagcgtggatatggaaaaaagaggaagattatgcatgagagattttcgagccagtcctggaagtagcataagtgacttcaaattccagtggccagggctcattcaggtggttccaatatagttgaactgtatgcccaagaagaagaagtggttcttataattctttcccctaaataattgtgttagacaaaaaccttgataacaaaaccagataagggttatataagaaaggaaagtgacaggccaaccacattcacatagaggaaaa

SEQ ID NO: 181508 - DNA, 300 bp, Homo sapiens
ctattctacacaataaggtattaaattaggaaaatcccaagttgagagactggagttaggacaaggaacaggacaaggaggaacagtcagtgggtttcaaacacaggtaccactggtaaaactgcatatctgcaggtgaaagaacatggccttttacttataaatacagccaaccaaagtccaaattgagggcagatgtggataggaagagaatgagctaagtctgaggtggctatcaactcagtcttcaaacaagtcagggagataaacagccctgttttggtgtacagttgggtttca

SEQ ID NO: 181509 - DNA, 269 bp, Homo sapiens
tctgtatggccgagccccaagctggataaatatagatcttcaaaaataaaaggatatacagggggtgacctgcccacttgggctgaattaactgtgaggtcatggccccatgctccaggccacatgccagcaggcccatcctcacgcagctctccttgagcccagccaggctgggcaggaatgacagctccctggcttccaggcctggtgattcatgaatgcgagtttgggaggaattttcatttccacacagctctacctctcgtctc

SEQ ID NO: 181510 - DNA, 505 bp, Homo sapiens
atccttgcaaggtttgaaattgcctcaaagagtagtctgttttggtctggctgctctcccagattgaagggatgtgagattaggagctattggccaaggcctttttggtcacacagtctgggactcagagagagcccctcagaagctagagagaagtagaagtaggaactcagcagagaagaggcttcagggtcatgcctggccatctttgactattggaaggttagtgtgtttacctgggtatggtgttttggggggcataactgtgttgggagcagttcctaagggcagagttgttcacagttcacatagcaggtgtcacactggggagcaggtggcatattagatgattgttcaggcacttccaatcctgagatcccatggttctctaaaggcatgtcaatgaaaagagtcaaactctgtgaagtatttgaagagacttattctgagccaaatatgagtgaccaatggctcatgacacagccccaggagatcctgagaacat

SEQ ID NO: 181511 - DNA, 500 bp, Homo sapiens
cctcacgatacctcaatgaaaaggttaacaaacaaattagatataattgaagaagaaattaataaactagaagaactaccaaaattattcagaatataacacagagaaacaaagagatatcaggaaacatgcataatagagtgagaagatctaacatttggctaactggggttctagaagaaaataatagagaaaatggacaggtaacactcaaagggaaaatgcctgagaaattttccagaattgctgaaaaatatatatcctgtttcttttttttctttttctttttccagtaagccttttgcactcctaaaatcctgtttcagaaatcacaatgaatctcaagaatgataaaaataacccacacttagactcctcacagagaaactgcagatcaaagacaggaagattacattaaaagcatccagaaagcaatcaagatgtatttcaagcctggcacggcagctcacgcctgtaatctgctgaggcgggcagatcac

SEQ ID NO: 181512 - DNA, 610 bp, Homo sapiens
gctaatgtataagggcacggggtgggggagtctgaagcaggtagccaccccaggagcttcctaagccctttccaaatgaacaaaatggacggatgaacacacgctgctccctgggttggctctccacaagcctcagcatgtaacccagctctggggaacaggcaacttcagatgccacttttaaaaagggctgagagcagaaccttggaaagtatacatctggagcagaaagaaagcaacacaggagaaccaagatgaagagatgtcactaaggtccagggagagtttcaagaaggaaggaatggcagaagtaccaaagcggcagtggttagagaggaaaagcagaggaaagaccacccaacttggcaatgaggaagccacttgtcaggctgaggatcggaaacaaagtcacatttacaagggattatggatgaagcacaactgacaatctactcactttacaaaaattacctaactcctttacatgacaggcccggagcaaataacggaatggaatagttaatacaacccacgcagtgcatgacctcaggatgcctcagctgggtggggatacagacattaaatacataactacataatgatttaatga

SEQ ID NO: 181513 - DNA, 703 bp, Homo sapiens
aaatgttataactcctttccttcttagaagagatctgaaaggaataaaaaggttaggattacattctgctattatgttcataatacaaagatgatctcctctatattctgtttttgtgcaaacgactctaacaaatttccagtatcttacatgtgcaaattacaactgtcttcaaggtaaaagttaattgagagaaaaaattaataggttagaatcttattttttcttttcttgcttcctgactgttatacctactaaagggatgtggggtgggagggggagtcttttttctttctaaatcattctgctagtgttatgttgactttctctcaagtacaccctgtggtctcagatgatcacatattttcttacgttactcatattgatacagcaccttggcttatgggttgacatatattacctgagctttgatgacacctcccaccattgacatttcctggtggtggggtgtactgagcctcttatgcatgaaacataagggaacaggctgtttcacaacagcattttcattctttgaaaatcaattactgttcaccccaaatggtatctgaagcccccatcagtgttgcttcacattgtttcttacccctacagcaatgtcttgagtgcttttgtgtctttgctgagacggaaaaaaagttcctcacatgggcttcaaaatattccagttatactgtttgta

SEQ ID NO: 181514 - DNA, 404 bp, Homo sapiens
actcatatattaactcaacaccaacaaaattttatctgacctgactagattccctatgttctacattccactgaactattgttgttgtctctattttactacttacttaggtatatgactcatctgtagtagtaattcattattccaacaataactcagcagtaagtggtgagaagaacgtgattttatttttaaaatttatttttactgaggtaaaatatacacatgtaatgcaccctctttaccacttgtaagtgtgcagttcagtggtaatatttatattcttgtatttatattcttttatttccccttcatcccccgcttccccttctggcctctggtaaccatcactatagtcaccatcttcatgagaaccacttttttagctcccatatatgagtgaa

SEQ ID NO: 181515 - DNA, 722 bp, Homo sapiens
caaaaacaatattgttaatgttgtttcctttctgaatttttatctttgttgtccaattcactcttctaattatcagtttttataaaatttcatgtgggcttatcactgggagacaagcaaggaacataaactacacactttgctctctgtgagcatactggatgacagatgtgcaactaataatcattgacagactttgaaataagtgaaatgactggtcactgatcatgatgtatatctgttacatacataatgatttgtagactgaagagctagcagtatagtttgtactccatgccattattcacagatactatattgaagtttgaactgtgttgctggcagactggcattatttagctaacctgtggtaattgaaattcctgcatgtcagaattctgcaaagtaaggactacctgtatctatatatttttttctctaagcactgctttagttttatctcacaaattttgacattttgtgttctcatattaattaaattcaagttactttctaattcctcttttgactttctcattgacacataggttattttataagtgtgtttaattttctaatatttggggggacttctgagatgtctttttattatttatttctaattaattccattatggttggttaatatactctgaatgatttccattcttataaaatcattgcaatgtgttttcaggtcaagaatacagtctattctgatg

SEQ ID NO: 181516 - DNA, 543 bp, Homo sapiens
aaagattatgtatccaaaaaaaaaaaaaaaaaaaaaaagaaaaggagcagggaaggacagttctagttaaagccaaatggatgtgagtctgacaagggtgtctttgatttatatttcctaactgcaaattacacagaaagtgagaatggggaataacttttattaagtatttatgtgccaggcggttagtgtggccttcatgttattacatttaatcctcaaatttctacaaaggaataattttgcatgattttatgattgacggagcattttcaaatctcctctaattctcataacatctctgtgaggaaggaatttttatccttattttacagatgaggaagctgtttggagataatttaagtgacttgcctggggaatctagccagtagtagagtactgattaatcaggtgctgacatctgctctgctttgtgtatgtaattcagcagtgcttcaaagatccaagaagctgtagcagatctcaatacactctcctataaaattagtgaataatcaccatgacaaaattggtatggcggaa

SEQ ID NO: 181517 - DNA, 868 bp, Homo sapiens
ccttgatgtcctgcttgttcatatctgtggcctttactctgtttggaatgactttttctctcctctctgtcgcagactcctattagtccctcaaacttctgttcagatgtcacctcctccaggcagccagtctagacctccagtgctgggctgtgttccctcttcctctattagagtgctcatcagagtgcacatggtttttacgatcctctccatcacagtcagcaagggctgactacagaaccccctcgtaattgagtatctcaaatactcctcctggcacgccagaaagctcttgagaccctttgctgaatgaaagctgaatggtggctactagaagaagaaacagtgggcgtgtttctccaattgaacaagaggcttagaatctaacaatggatgactgaggtgactctcagagaatggtccctggtgcagcaccccgaacctaccaggtcagaaatttggggctcaggcccaataatctgtattttaacaagtcctcctctgggtgattccaatgcctgctaaagattgagaaccactggtttggtggcctgatccctggtcttaaggcaggtggtttcattttaacaaacccactcactccatcctttcatccaatatataccaaagatcagccatgtgtcggactgtgtactatgtgatgggaggtcttgaagagcacgcttaccctctctgtctctctctcgctctcttacaggtgcacatacatgcacgtgcgcaagcacacacactcttagctggctaataaggatgaagagtgctcaaggccacagtcaggaaatacacaggaattggggggcagtgccttgcctcaagagggagctccagagaagggttctggaga

SEQ ID NO: 181518 - DNA, 445 bp, Homo sapiens
tgctgggattacgggtgtgagccaccacacctggacgtgttttgtttttaaattctcttttttcatctttcctgcctttttctattattctgtgacctaatgagtaatggagggagccccatgaagagtggagtctgccttcaggagcagactctgcctggcatcccagaggagtctgtgtcttgaagcagtcagtgctcccagggctgagccgctggccctgaacaaccattccttgaataaagaaataaagagtgaggctaactcaagacccatcctggctccataactctatttccaaagtcttttttttttttttttttttttttgcttaacattgcagggcacctgctctatgctcactgctgggatcacacaggggaatgagtagagctctccctggcctcagacacccccacttagtgagaaggttacctgtggggac

SEQ ID NO: 181519 - DNA, 671 bp, Homo sapiens
  misc_feature (11)..(11): n is a, c, g, or t
  misc_feature (18)..(18): n is a, c, g, or t
gggggggggantgtttgnagaactacctctggggatataaaaggaatgacagccgaatcttcctctacctagctggcctggattcaacaaagcagcaacaaaaactattccataaaggtgtttcctcccttgggggattaaaatccaagggaaactccaaggtggtaaggtggcaacagcaaaggagcaaagcagcaaaggagaaacctacctgagagccacgctcttgaaacccacagggagcccaggcctgcgtatccaccgggacaggcagcccaggactcggttgttatgaaaaccatcttagtgttgatgtggcactgcgaatttggaaagtgctttaaaatcattcatattcctagacctgtaattaatcaaaagattgcaccaatctatagccacagccattatggtcactgcagtcattttccagtgctcttgaccaaagagtgctgtcaccatggtgatggtggcaggggttgggtgggaagtgaacacagcagttagggggattggccaagctttctggagtttggaggcagggctaactcataacatgtagaacaccagatctctgctaggagagactccaataggggactcagcctcttaaaaattgctaccattagccgggcgtggtggctcacacctgtaatctcagcactttggga

SEQ ID NO: 181520 - DNA, 400 bp, Homo sapiens
agaaacacatagacctaaatgaaatcctaattttagtgaaacatttttgtacacaaatgtgacacaatttctatttgtccaataaaacctgttaaatgtttcaaaatcttttaccacatcttttaacttaaaatatgattaaaaggtctaccttgccagaccagtgcaagaaacacaatgaccataggagaagtagcaaagaaagagaaaaaaacacctccaaatattttatgcctggaaaacttggatcatgaagaagatgagaaaaaaaaagtaggtcattgtaacttgacattcagaaataagcagcaacattttattctcactgacctgtaagtcaccctccagctccgaatttcatcactaccttacaaacggttcctgaactacctcagcatgg

SEQ ID NO: 181521 - DNA, 734 bp, Homo sapiens
ttgttcttaagacttttctcttcccttggggacttcatgtccttaagacctttcccctcccctgcactgcacttccccctgtagggtagaggttaattggtcacctgactgaagtcaatattcaacagcagaaatgttaaacgataacccatcccacattcttgccttggacccagaggcagccaggccccaatctctgcacctctacttgcgcccccatacagcctgtttgctgtgggaggatgagaagccaggtggttttgcaggcagacagactctgagagtccgtttatcttatacaggatctcttgactttttcttcttgtaaccttattaaccttcattccagagatgaaaaagacagacccagtaggggaataatcagggtgaacacgtatatgaaattctttcaaaaacctaaaaagcatttaagaaaagaaaaatagtttgtgggttgccacctctatttttttgtttataaaatgggaagggtctggattgccctgtgacttagggtgtgaggaggctttctcagttcagaacttgttgagagataggaagagtagtcagacaggtggagattactaataaaagctaggttggggctgcgtgtgggggctcacacctgtaatcccagcactttggaaggccaaggtgggaggatcacttgggcccaggagtttgagaccagcctgggcaacaaagtgagaccccatctctacaaaaaaaaaaaa

SEQ ID NO: 181522 - DNA, 828 bp, Homo sapiens
cagaatatcggtgaaagtattctttacctgtgggtggacgaaaataagagatgttcttatacaaaaatctcagatgacagaaccaggcccagaagtaaagaagaaaactgaagaggaagatgttgaatgtgaagatgatctcattttagcatgtcagccggaaagttcggttaaagcattggattttgatatcagtgaaactcggacagaagtagaagtagaagaattacctccgattgatcatggcattcctattacagaccgaagaagtacttttcaggcacacttggctccagtggtttgtcccaaacaggtgaaaatggttctttccaaattgtatgagaataagaaaatagctagtgccacccacaacatctatgcctacagaatatattgtgaggataaacagaccttcttacaggattgtgaggatgatggggaaacagcagctggtgggcgtcttcttcatctcatggagattttgaatgtgaagaatgtcatggtggtagtatcacgctggtatggagggattctgctaggaccagatcgctttaaacatatcaacaactgtgccagaaacatactagtggaaaagaactacacaaattcacctgaggagtcatctaaggctttgggaaagaacaaaaaagtaagaaaagacaagaagaggaatgaacattaatacctgaaactataggaaaggttaatttgcctataattatatatacattccatagtcatcaaggaatatattgtgcagagagagtatccttgactgcttaagtcagccagttcagcatggataccaacattagcttttcttcttgg

SEQ ID NO: 181523 - DNA, 212 bp, Homo sapiens
tataatgttctctctccccacaactcctttatctctttgctgaaatcctaccatactgccctttcaaagtttctctcaaatatctcctctcctacatctcttctccctttcttttctgagacacagtctcgctctgtcgccccgactggagtgcagcagcacgatctcggctcactgcagcctccgcctgccaggttccagtgattctcctg

SEQ ID NO: 181524 - DNA, 257 bp, Homo sapiens
atgaagtctttgggcctgagcttttctgctgatacatcaacaaaacatcactgctttttgcataaaacttcctgggcttttgagtcctttccaccacccttgttattcctcagagcatactgctttcagggagatggtatcaatccccctatgttcagaatgagaatccagcagggaatgggtcagggaacttctgggtgatcactcactcccatatcccattagagtttgggagtgggggtctggcttagcctgca

SEQ ID NO: 181525 - DNA, 456 bp, Homo sapiens
atcaaaaacgtagtgtagcttatatagcttagagaaattgtggatctatgaggacatgtgaaggtactgggctataatgtggtcaatgtgtctgaaaaaataacagttctgggccaaccaagtgtggctcaagggatcactactaagaatggttcctctttgggtagagcagagggaagagacactaaagggaactgtaatcaccagcaaaggaacacagtgaccatcaatgtctgaggactggcacaatgaaggataagaaagaacctctctgtacgaggcctactccctttcagttccctttcttccccattgtgtcccagtggaggacctgataatacacctgacccatatctaagacatgcagttggcagggctgatagtaggtaaggttcacagtatgttaaaaagtcacacgaggccgggtgcagtggctcaatgcctgtaatctcagca

SEQ ID NO: 181526 - DNA, 582 bp, Homo sapiens
ttgattagccctactatacaaggttcacatttctacctatttccaactttcaagtactactctgagggggactactgcaagcaaacaataagggaggaatgtgaggtaacatacttattgctttcagcaggcagaaaactgaataaggaaataaggaataccaatttcttctcttttcaactatattcagtactcgttcccaaatcaagcatatctaccacggagaagagcgactaccaacttgtttctttttctccccagcaaccaacacagagaacactcagataacaacaacaaatactataattgttcccagaattatgtaagtatagatcagctacgaccttctcattaaacaacttttttttttgaaatggggtctcaaaacaaacacacaaaaagagttaagattaggatcatggtatgtaacaaacatagcagtttaaaaaatgtctaggcctgggcgtggtggctcacgcctgtaatcccagcactttgagaagccgaggtgggcagatcgtgaggtcaggagatcgagaccattctggctaacacggtgaaaccccgtctctactaaaaata

SEQ ID NO: 181527 - DNA, 1874 bp, Homo sapiens
  misc_feature (852)..(852): n is a, c, g, or t
  misc_feature (1533)..(1533): n is a, c, g, or t
  misc_feature (1723)..(1723): n is a, c, g, or t
gtccctctgagtcttgctccctcatctgtcaagtgtagaaatagttgtatgataaaatcattactacttataaggttgctgggtgaatgacaaatttgaaagtatttgaatgtaataggcaatgcttagtatgatatttttattttatattccctaacactcagtataaaagcaaatctgaatgcaattaagctcttcaaatcaaatgcctggatttatttctttgattgttgtttttgccctgaaagttctatgtcctagataaatgtgtgccttagataactgaatgactttctcatatgcaaagaaggcaccagctttctctctctcagatctttctacatctccaggatgactgtagccctgcagaaaataacacttgttctctagttgtgcctaagtaccatttggaaagaggtggcctagatgagtgcaatgaccacccataaagccatacagaccagcaagaagaataagcaaaactataccaaacccacaacctcggtctagctagaagatagagaatcctacaatcttcagatcacgtgtagataaaaaacgttgacaccaaatcccagcagagctgaatgtcacactgtggccacaagctctgggaaaacagtatggaagagagaagagggaagtgtcagtggagtcaaagattgattggaggctgttggtggaaagaacgtcaatcttttgcataaaatactgtaaagattcctggtgagccacagcactgacaatgaggatgggacccctaagtcccagccttgtgcctgtgcacgattgaaggcagcagtctgggaggcattgcttagggcagaaaaggacacaaaggaagagagaagngagaaacagccattggaaactgggtggtaaaacaaagaggaagcaaaagatgggaaatttcagatcctgcaagaaaaaagagatacgaaaagttggaagacacacaacctctctcactttcactcccaaataataataaaataaaaaggtaaagaggaagtatacttagttacactcacagaaaagaattctcttaaaccaggagggttgtaaatagtataaatccatgaaataaaagaacctaaatctatatcaaattaccataaaagaaagtagaacaatgagataccatctcatgccagtcagaatggtgattattaaaatgtcaagaaacaacagatgctggcaaggttgcagagaagtaggaacgctttcacactgctggtgggagtataaattagttcaaccattgtggaagacagtgtggtgattcctcaaagatttagaaccagaaataccatttgacccagcaatcccattactggatatgtactcaaaggaatataaatcattctattataaagacatatgcacgtgtatgttcactgcagcactattcacaatagcaaagacatggaatcaaaccaaatgcccatcaatgatagactggataaagaaaatgtggtacatatataccgtggaatactatgcagccataaaaaggaatgagatcatttcctnttcagggacatggatgaagctggaagccattatcttcagcaaactaacacaagaacagaaaaccaaacactgcatgttctcacttacaagtgggagccgaacattgagaacacatggacacaggaaggggaactatctaacactggggcttgttgtggggttgttgggagaaagagagcatcagggaaantagctaatgcatgctgggcttaatacctaggtgatgggttgataggtgcagcaaaccaccatagcacacatttacctatgtaacaaacctgcgcatcctgcacatgtatcccagaacttaaaaaaataaaataaacaacaacgacaacaac

SEQ ID NO: 181528 - DNA, 240 bp, Homo sapiens
ccaaaatcctacacagaatacaaaacacaactatctgaggtaaataatagaaggctgatggagggagaaatcaaaattcgaagaatgacaaagttatgagtttcatggggctttcctcccatgttcccagcttaagagtcaagagcagtcctaattctggaactgtgcagcagatgtgaacagaaaaaggtccaaaagaaaggctgactttctgaccaaagagctaggataggatggagg

SEQ ID NO: 181529 - DNA, 380 bp, Homo sapiens
acttgaagctaaaggctcatagcatactgaactacagtctttggtaaaaagtgaaatagtagaagagatcaatttatccaggtattgaatcactggacacatccaaacaatattaaaataatccttttttctatctacttcaaaaaataacactactgttttttgtttgtttgtttgttttgagacggagtcttgctctgtcgcccaggctggagtgcagtggcacaatttcggctcactgcaacctccgcctcccgggctcaagtgattcttctgcctcagcctcccgagtagctgggattacaggcacgcaccatcacgactagctaatttttgtatttttttagtagagatggagtttcaccatattggccaggctg

SEQ ID NO: 181530 - DNA, 307 bp, Homo sapiens
taatttttgtattttttgtagagacggggtttccccatgctgctcagactggtctcaagagatctgactgcctcagcctcccaaagtgctgggattacaggcatgagccaccgcacctggccagaatagttatttgagagtaattcatcagttcaacaaatacttatcaaggagatatagcagttaacgaaatagacacaaatattttcccttaaggagtttactttctagcggggagacactaacagtaaacaaaagaagttaaataccatatctactttgacagatggtggtaagtgccatggag

SEQ ID NO: 181531 - DNA, 578 bp, Homo sapiens
ggaaaaggaagaagacaaagcagcagcagcagcagccgccaccaccaccaccaccactgctgtcatcctctaattttacacaataataaatgaagactggcggggggaaaccctcagagttggtggcatttccttctcaggtaagccaagctagttacagggatcagtgttcctagctgtgagataatgatagttactctgtccttttcatattctaggcatttgagcaccttgtctcttgggccctccctgcccacttggcctacccaaccttattattcatcctttaaaagacttagctcaaatttctgttcataaccacaggaggaattactccctccctcctctgtggccttacagaacttctcattctgctagtgtagcacttctcaaactgccgtggctaactggagtgaaaaatcaatgcaggtaagcaaatagaagcatatgtggcatgcattaagaatttaataatggttagagttaatattacagaatcaccttcatatgtccttgtcttttaagttatttcattagtaggacattccagaagatgagaaaatacttctcctgagcca

SEQ ID NO: 181532 - DNA, 246 bp, Homo sapiens
tcagcaggcacctagcttctagaggaagagggaactacgagttctcttcaagataagctgtatcacatctacttcttaaaattttactttcaaatttattttacaacactgtcttgacaaatagtttcttatacaaattactccagtatacaaatatacacatttaagaatactactttgaggtgttaaattttcttttttttttccttttatttatttattattattatactttaagttttaggg

SEQ ID NO: 181533 - DNA, 323 bp, Homo sapiens
gggacgtgaagtggcctccctaggtaaggctgcttagctggctagacacaggctagggaatcaaagtcgatcctcctaacctcaagctcaatgtctctgggttagacaagaaggacctgacattttgcatatagagggaatccaacagaatatgacagatcatttcagcttggccttgcaggcaggggaaggagtgtaattaaagatcatcttcttggtaatcccagtagggagtcaacagctaattcaaagtggatcaatgccagcatccgaggagggaaaacagctctttcaaaccggaaaaaaaaccaggaacaaccaaa

SEQ ID NO: 181534 - DNA, 182 bp, Homo sapiens
tcaccactgtatctttagtgtcgggaagaagggggcagaaagaaccaggaactggagccaggaacctgggctcacagtgatattagctgtgtggtcttgggcaagtcacttcccctctctgcgccttggtttcaacatctctaaagtaaacggtttgcattagatgaccctcaatgaccctt

SEQ ID NO: 181535 - DNA, 404 bp, Homo sapiens
ggagcccccaggccttttcccctcaaatatgttactactgtgacatttagcccttagttttaaagttattattattattattactattattttagggaaaccagagaatagtcttaaactcacatcatagactgagaagaattaactgccaaataacactcacgcagggaatgaattgctggaggagaccaagacctgccctgcagctccccttatctccagcagagggcagacgcatcaagatagtgacagggccctcaaaaatggaaaggataagattggtgaatttgacttttactattttacgtactggcggcggaagagaaacaaaaaaacttgtgcctcatttggaagcggtataaaaattgggacagttgaaaacattttggggagaaaaaaccctg

SEQ ID NO: 181536 - DNA, 359 bp, Homo sapiens
ctgccttgaagaaaggagaactacctaactaaagctctgttctacaagctcctccctattttttaacttgcgggagctcaagaattccatcctggggaattctctcacttgtatactccacccactcccatgtccatgcggttcttctgtgggattttagatttctgaactgtagagtactcaggagcccatcgtctcggctgctctcctgctccaggaggcgcagggggtgtgtgtgagttcctcagggctatcattaacaaagtaccacaaactgggggttggggtggagggacgcggcagacaacagacatgcattctcagtccaggtgcaggggctgacacctgcaatcccagca

SEQ ID NO: 181537 - DNA, 455 bp, Homo sapiens
tggtccttcgaactgcctggggtctcctcactgcctctggaagaaggcatatttcacatggaaatcagcacttttaaggaggcaattactcctttaaaaaaggtttgttttccattagtttctgcaaacatcctgccttaagaaaattcacctcttgatagaaaaatctatttaataaaaaataagaggtaagacaatattctataagaaaaaatatatttatgtatatatgtgtatatatattcacatattctcataagaatacacaatacatattcttacatagaatacatattctctctctcattctctctctctctctctctctctctctctcggatctaagtttctacatgttttcctgcattcatcacaatttcaaccttgtaataaaggcacaaataatgctggctctttgtaatgcctgctgtttgtaagatccctaaataaagact

SEQ ID NO: 181538 - DNA, 257 bp, Homo sapiens
ttatacagagagacagtattgattagtgagagaaactgttttgccagaagtgcaaatatgaattagtattaaggatataagtcagtgtgaacctacaccagtctttcaaaatgtttgatatttaaaggagaactcataaacatctatttaattgagtgcctagctgtgcactcacattgttaattacctgagttatctaattttatcctaacagtaggttattttattctcatttgacagctgagaaaactgaggta

SEQ ID NO: 181539 - DNA, 438 bp, Homo sapiens
ttgtgagtttgagatgcggcaggcatattaagtagtagcatcaaggatgtaatttgaattctcaacctgtggtgcaaagaggccagagatagaaatttatggggtctttttctttgaagagatggttgctggaagtgattgagattgctgagtgaaagactgtagagatagaagaaagggcaaatgaggctagatctttggagaagatctgcatcaaggtgtgtggaatgaggaagcggagtcaggaaggaggctggagagggggaacctgagagcaggcgccgcagataggagagcgcatgcacaccggagtggaggggagcacagaggagggttgtagcattcatgttttgtaagtaactacttattacagtgaatttctttgtaaggttggagttttaaggagccttagaagcctgtaggttttcaggtccttag

SEQ ID NO: 181540 - DNA, 490 bp, Homo sapiens
ctcaaatacactgtttaaaaaatgtttcctattgataattatattacttttctttgaaaacctcccaacctagatcattcacttaattttaatttttctattcttgattatgtgtttcttcccctgttgtattctgctgagtaatggcatgattggaaagagtgcccacttaagttaaagcctggctacacaggtgtagccttgaagaagttgtgagccttatcgagcctcaagtttctaatgtctaaatggggccactgattcttcactctgggttgttttgaaataaaggagatgtttatgtatgtccacatacagaaacaaatggatatgaagtacctcagtggagagttagtgccttccccttacccaactccatgaactctgaataatcattttgtttgaactgggaggcaggacaggcctctgctctctggggaggacaggcactgacccctctgcagtctatccaggcaagtagctctgaaga

SEQ ID NO: 181541 - DNA, 457 bp, Homo sapiens
agtatcttggttttaccatggtgtgatcaagtcagatttctgtcttacagaactgtaacataataaatctgtattgtttaagctactaagtttgaagtaattttactaaaacttgaaaggaatttacattttgcttttaaagttcttatttttgaaactttagacagagatcaacaaatcctcaacaagagatagctcaatttttacctttgcaaaaggaattatgttacatatctatgagaatgaataactacagcacagaaaaatactcataagtaatatattatttgaaatcaggagtctaataagagaaaatgcaaatgtacccttttctataagatttagataaattacatgaaaaaatatgtgtgataagaggtatgtgttctgagttaatacatataaaatctgaaaaaattgcaacaggaacaataaatatggaaattgaaatcacaaa

SEQ ID NO: 181542 - DNA, 159 bp, Homo sapiens
ctgatgaaatttaagggtcgaaggtggatttagcagtaaactgagagtagagtgcttagttgaacagggccctgaagcgcgtacacaccgcccgtcaccctcctcaagtatacttcaaaggacacttaactaaaacccctacgcatttatatagaggag

SEQ ID NO: 181543 - DNA, 438 bp, Homo sapiens
tcagagaatgtgataggttagatgtgttgaggaacttcaggcattcaaggagcaacacagtatggagaaatacaataacatttagctaggccaatctcacaattgagcgggtgagagaaaacagtgggtgaaagtgtgtgtgtgtgtgtgtctactaaggagacagttgtgtgtgtgtatgtgtgtgtctctactgaggagggggttggcatgtaagccatgaattttatctgaaaaatcacagtgagaggtaataagaaataagcagagcaatgtaaatcaagtatggctagattatagatggatcgctaatgattgactgagaaccttagattcaatcttacaaattctatgaagaagagtgacaagataaaagtgatataagtgaatttttttaaaaaagatagatacgccagccaagtatggattgaattacaa

SEQ ID NO: 181544 - DNA, 799 bp, Homo sapiens
aaataatctttcagggaccttaacgttctctaaacatatatttaatctagttactcttttaaaaactttagtgcataaaacctgtttttttcacattgttttaattttcacttagaaaagtgtcttttatctcattaactttggcatccacatgaaggcatgcactatcagcagggctccttcagctagaaatgttgatgggataggctgagtgctgtgatcccagctgcccttctgcttatagttggaagctcgatgctaaaggtggtagtacagatagaaaatagaagtgcatctgagccttttccattttgtggagttgatatcggaacctggacagccaactttcatacctcttttatgtaagagaatgaatccttatgaaggataaacctctgaagtcaggtttttgttattgggagctgaaagtaagtgctcactgctagagaaaggtcagaccactatatacataaattcttataaaatgtgattatgactgagatagattaaagatattttttcaatttgaaaagaaaagggagagaaaaattggaagctaaccaaataggactttgtaaatcactggcataatgcggccataagtcactgaaatcatcaaactaaaatattgccttgctgaacaaagaacgtcatgacaagaaaaccttgaataagtattcctaaaaatcactgtcttctgaatttacagagtatagtgcatttggcagttagtttccctatattatattgggagactatatcttttcgaagaagtctaacacattattagtagtaagtc

SEQ ID NO: 181545 - DNA, 412 bp, Homo sapiens
tgttctgttcaataaccaattttagggtagagatagagatggtaacttatagttatgaaattctgataagctaacaaaataaaaatggatccaaccaatcagaatatattagtccttaagttgaaggcatactagtgggacatcataacagagtgaaaacttgggggtcatcctttttgtctcttcgcccccaggaaaagcagggcaggcagggaacagcagtgggtgaacctcttctctgctcagggatttcaggccttcacacttgctctttcctttgcctctaagatgctgccattggcctccaaatggctccttccttcatcttgagatttcagtgctaatattttctcctttgagggatttcttctctgacctagctaatccaaagcaacctctatgcctcacctgg

SEQ ID NO: 181546 - DNA, 210 bp, Homo sapiens
gcacccggtcaagatttttctcttgattattggttttaagcaatttgttcatgcactgtcttggagcaaaataatgtttcttgtatttgggatttgttgatatttttgaatctgtgggtttatagatttaatcaaatttggaaaatatgcattatttaaatagttttgtctttttcttcatttttctcctcttcttgatggaccccaatt

SEQ ID NO: 181547 - DNA, 796 bp, Homo sapiens
gattttggtttatattttgtctcttatttctttacacatgacacgttgtgttctggtctggaaatgacagcgtctgaggtgttgtgggtctgattctgaccttagccgtggtagttgtcttcttgtgtgtgtgtgtgtgtgtgtgtatatatatatatatagagagagagagaggagagagttttcattcaactttataatgttgtgaatggtgcctgttattaagattgcatcattcactgagtagagttttaatttttttcaatatgaaaaatggaccaggtcatacatagatccagccctaacaagtgagaaaaaaaaatgaaaaaaagaaaattggaaattatgttacagcctgaatatttgctttgaaatctagaggctaattagaatatatatgtaacatctactaaagcgatgaataaacttagataattaaatgttaccatttaaaatacatatctctacttactggactctattctttctcatttctctgcctgttactttttatatatcaggcttatcaaaagtagctgtgctcaaacatcctgaagatgtttcaaaagtcacatgctcaaatcaatgctaataacctcttgggaactaaggggtagtagaatactgtccaatatggttatttcattagcaaggtcttcctatacaatgagtcagaagagaaaagctgtaaacttcccagctcaacctctaaagctcatgttttttctttctctctgtaagcactgttgctgtggcctgtgtatgaactggatgtgccaatgctgttattaagatt

SEQ ID NO: 181548 - DNA, 232 bp, Homo sapiens
tagaagttgctagtatccatttgatcagcagggaaaagagaagcaggactttgaagaaagagaaggcaaacataatgaaaacttgttatactgttcataatttacattaaattacattaacgtgggtatatgatatgtatgtacatgttaattagttcttacctaagccccaatgtgatcaattattatgattagatagagccctctaaaggtgtttagatagtagttaatc

SEQ ID NO: 181549 - DNA, 362 bp, Homo sapiens
tcaggaagccaccctgaacaaacctttaccctacaatttttctttcaaaaaaaacaacatcttctgtgccaaccttccaaaaaaatcattgtagcgccatattttttggtggggagttggggagaacctaagtgcaaattagcaaatacagtgcactaggattcttatcactgaaatgcttactgtcagcaaatcacttaaactctgcatgagataagggactgaaataagtgaggtttttaagctaaattatcactgagggttctaggttcctgttttggcattctaaataaatgttccacacagctaagaggaggatctcagccctctctaacagttttctagaaaacaaatctgagcca

SEQ ID NO: 181550 - DNA, 483 bp, Homo sapiens
tcctcagcctcctgagtagctgggactacaggtgcatgccaccatactattttttatttttttgagacggagtcttgctctgtcacccaggctagagtgcagtggcgcaatctcggcttactgcaacctctgcctcccaggttcaagcgattctcctgcctcagcctcctgagtagttggagactacaggcgcgtgcaactatgcctaatttttgtatttttagtaaagatggggttttgccatattggccaggctggtcttgaactctgaactcctgacctcaggtgaaccacccacctcggcctcccaaagtgctgggatgaggcatgcgccactgcacccggccaatttttgtactttttttttatttttttagggatggggtctcactatgttgtccaggatggtctttaacttgaactggcctcaagctattcccctgcctctgcctctcaaggcactgggattataggcataagcca

SEQ ID NO: 181551 - DNA, 469 bp, Homo sapiens
acccagtcttcagggacaaaattctgagagtcatctctgactccatctcacaccctctcggcactcagctcctcattaagccctacgattacgtccgtctttcccgcgacagtccctcctctgcccgatttccacggctcccatttcttgattgaatcatggtggccgcctccccactcagcacccaggtctttcttcttgcctgcaaatcagacccgcagctttgaatcctgcaagtgctcccactggcctggcacggtgctccccagcaaatggaccttggcacatgccattccctaccagtaatgccctcccttcagcctgccaaattcctcccagctcttcacgactctgttcaacagacacttcctctaggagggccgaccaatcgccgctgggctgggttaggggacactcccctcctgggttctcctacctcatctttctcagaacttttggggcaacaatt

SEQ ID NO: 181552 - DNA, 127 bp, Homo sapiens
ttaacaatttccaaacacaaaacaaaactacatcaatcaaagcactttggtactggtataaatgtagaacaccaaagtaatgaaacacaatgcagcacagatataaactcttgaatatatggtcaag

SEQ ID NO: 181553 - DNA, 287 bp, Homo sapiens
ttttagttttcatagagatggggtctcactatgttgctcaggctggtctcaaactactgggttcaagtgatcctccctccttacctcccaaagtgctgagattatgggcatgagccactgtgatcagctgaaagatttttaattattaatttagtttatttaaatagaaattacatagatagaaataacccaattagattggtatggagctgtttaaatttttaatttttctttaagtcaatttgttaatttatgtctttctagggatttgtccattacatctaagt

SEQ ID NO: 181554 - DNA, 284 bp, Homo sapiens
gtttgtgctgccaggttcaaatacccatctcacggataaggctctcattggctctgcttgggtcatgtgcttgcctcacggaccaatcactgtcatcagaggtattggatgctgtgattggtcagccctggaccacgtaactaaccactttctgcagccaaggtgagcccggtctatttctaggagaatggcaatgggaatgctctctaggcagatgaaagccaacagtccacgtcaggaggtgaatgtgtgttggaaagattaaagtgacaagcaggaaggat

SEQ ID NO: 181555 - DNA, 184 bp, Homo sapiens
caaggtgcctgcttgtacagagcaagtataaacaagtgtgctgtgagagggacacctggtcatgggtataacatctaggcatcaggccctccaacagaatgaagaaatatcccttgaaaggcacattttaaatatcctccaagaaatcccccagagccacaccaggacagggataaagttttag

SEQ ID NO: 181556 - DNA, 837 bp, Homo sapiens
ttgtagaggtagttgctattaatataaattatggaaaaatatagcttgagaaagtcagtagtgtgtattcagtcattaatttcttgggttttaataaaacgttttaacaaatgttaacagaaaatgtagcaatgcatggtagtaggaatattcacttttattctgaagcagaggaaggaaatctgtattttggtaaatatagttactattctagtgagcatatatttatggtgtaagtagactatcacaacttagtatctgcttcccattgttaattcacccttagtagtaaagtcctcaggcactacccttgatcttagccagaaggcagagaacaattcctcgggtaaagtttgattaaaaacaacaaaaattcatagaagacaaggatataataatagaatttgggctcactggagaccaaggaattttatcttctacgctttacccaacttcccactccaaaaaccagaacaaaaacccatctaaatgtatctttggccataaaaaagcctccccatttctgagcatctaagaaacgtacatatgggctgggtgcagtggctcacacctgtaatcccagcactttgggaggccgaagcaggtggatcacctaaggtcaggagttcaagaccagcctggccaacatggtgaaacctcatctgtactaaaacacataaattagccgggtgtggtggcgggtgcctgtaattccagctactcaggaggctgagacagggagaattgcttgaaccagggaggcagaagttgcagtgagccatgatcgcgccacagcactccagcctgggcgacagagtgagactccatctcaagtgt

SEQ ID NO: 181557 - DNA, 757 bp, Homo sapiens
agttactaacaatggttccatcactgtgccaacatattttcttttttcaatatattgggaaataattctcccagtctgaaaatctgaacacatttcatgtgacttggtatcctcatatgtcttgggcttccaattctccattcctagtttcaagttcatgaactgtaaaacaaaggattagactaaatctctaaagttctatccagatgccaaattcttttctctttccatgatacctaagatagatgccaaatattgtcttttacctggtgtttgtgaacatgacatcacattacaggagtagcagatactaaactctcactctgtaaaacactgactgagttccatgagccagatactgaagtgagcttgttcacatatgttctcatttaatgctcataaccctgtgaagctgggaattgctgggacattttatttatttatttattgagacggagtctggctctgtcacctaggctggtgtgcaatggcatgatcttggctcaccgcaacctccgcctcccgggttcaagcgattctcttgcctcagcctccgcagtagctgggattacgggcacacaccaccacatccagctaattttgtatttttagcagagatggagtttctccatgttggccaggttggtcacgaacacttgacctcaagtgatctgcctgcctcagcctcccaaagtgctgggattacaggcatgagccaccatgcctgcccgggacccttgttttagaaggatgactg

SEQ ID NO: 181558 - DNA, 176 bp, Homo sapiens
cccttctggctaagcacacacctctttttcctttcactgataaactctgcaagtagctgattcccactcaccaccccaaatccctcctctgaacacctcttctaatcctgtgctcctggagtgcacagggtctttctttcatcatgccccagcactcctcctgctcaacctgtctg

SEQ ID NO: 181559 - DNA, 338 bp, Homo sapiens
actggtaaaatctactagtgagttctctactgaaatactgggtacatttttcaactaaagtcatggaaacatttagtttcccatgcataaattcagcaagcagaatattctagtgttccccctagggtagatagacattgtggtttattttgccattaatatttgtcagaggattagaaactccttattcaaaatatttatcttaattctatcacatgtaaaatgtttaaaatttatgttcaaattgtctcataagaatgttaaaaaataagacaaagaacagtcaagggttttggacttactgaaaggtagataacgattcaaatttaattaattag

SEQ ID NO: 181560 - DNA, 435 bp, Homo sapiens
ggattcccaaagtagtgccgagcgaaatgggaagagcctgcatgatttagcatctttgataatagaacggaatggaaagtccggccatagagggtgatagccccgtatataaaatcatcggtgtggaactaagtatgcgacaagtagggcgggacacgaatgttctgaacattcgtgtccatttcttcccaccttctactcccaggttcacattggatggaaaacatattaatcagaaatgatttggaaaatcattaatcatataatgagaaaaatgaaaagaatgaagtgtgtttctgataagaaaataagaattggaaaatggaaccaagatatcttaaataagaaaagtgacccagacacctccattcagcacaaagcacatcagagacgaagaccccagccatgttccccgacagcctcggaccaaggtgg

SEQ ID NO: 181561 - DNA, 416 bp, Homo sapiens
aagacaaaaaccaagggctactgccatgaccagtgctctgatcctaaagcaaggtgtcactccaagagaaggggctgctgtccttgccaaggacccagagcagtggtgcagagattgtgcccaatggagaggcaggccagaagaacagagagctctgtagttctccctaaagaggagatgacttacttgaaccagaatgtggggaagttcagcctaagggtgctgtggaatacaatggaaattttagtgttaagcaattagagatgttagctacagacaagcaaatttggatcccagtggaaagtttaacagggagaactagggaaagagatgctagtaagagccctcttggcgtgcaaacaagctgctgttgagacgggaaaagttcccttacccacctttcagggcgtgtgatg

SEQ ID NO: 181562 - DNA, 270 bp, Homo sapiens
ggttcagccaaatcccacatgtcctgatttccatctgtatggtggttcccaagtgtgtttgtccacatgaaccaaatctgaagcagccaaaagaaaggtgggggatagagcagggatatcagatgtcagctcctcttggtcccatccagtgctatctgtgccctcaaacaagtgcccatcctacttcttgtaagaagaaagaaaactttttctaattgcccctttgaacgtcattgctactactgaagatgccagtaaaatatatatcca

SEQ ID NO: 181563 - DNA, 348 bp, Homo sapiens
acaagaccttttgaatgcttatacaacagcatcttttatctgaaccctgagtttttcaattcttttcatttattcagtgtcttctgtggtgtcttcccttttccagagcacttatccttctctgtcaagcttctttcaagtatctttattccttttgactgtaacaggttctctgaactcttcaggtctatgccatttgcccagtactaccagcatctcagtctggattattcatcatcttagatggtcatattttctattattcacctttttgtccttctatttcttctctgattggcattagcatattcattcactttttcagttattcatcagatatttactgag

SEQ ID NO: 181564 - DNA, 388 bp, Homo sapiens
ctcgggcattcatcgtttatatgccaggaattgctaacctaagctctgctatttgaaggcttaaagactgcagatcaaaagtagacacagagggcctttacaatgagatgataggccagtagctgtcattctttattcttagtgctcatctaagccatgaccatgtccttcagatgtagcttttagatacttttcatgtgaaagactggatacctctagtcgacatgtcagggccccaaaggaatcaagtccctttggcataccttcatgtcctcttttttttgtttttctgtacttcaatagatgcaaattcatttactctttggtctgcctgtgttgggtattctcagcttggggaaactcaatgagccagcacaccatcctatga

SEQ ID NO: 181565 - DNA, 177 bp, Homo sapiens
ccactcgcgaaaagacaaatactgtgtgatcctacacagatgatccatggaaaattgtcaaattcataaaatcagaaagtgaatgttagctgctagcaggtaaggaggagagggggaagtgaggagctgttattcagtgggtacagagtttcagttttgcaagatgaaaactttctg

SEQ ID NO: 181566 - DNA, 302 bp, Homo sapiens
gagaaacctgctgcctgcctttagatttagagatattaacaattcagaggaggaaagaatggagtttgtatctctttgccacttgtgagatatagatttgtacagatgtgtccctgaagccacatatccagatctgttttaaacttgccatcctgtttccatattccagagcaaacatttgagagagatgggagaaaacagtcaagaatttatttttgaatttaattattcattcatatgtttaacaaaagtttattaaatgcttactgagggcaagaaaccgtgtaggcaaaatagataag

SEQ ID NO: 181567 - DNA, 334 bp, Homo sapiens
tccccccagcagccaaccccagctccttctctcccaggaatacaccttgcacctcttacctgagcaggtaagaggcctgcgtgctttccagaaggcactggtgcatgtgacccatggaaaacatgccccactgtgccatcatccagggcggctccagctagcatcttgcttcctcatgcccacaggttaggtcttccagtggcagaaaggttgggcctgtgagtacccacagtccacaagaatccagctggggagtgagaggctggtccccgcccctgctgataagcaccccctagtggtgatcttgacgccctcatcacttggcttggatggg

SEQ ID NO: 181568 - DNA, 500 bp, Homo sapiens
gggctggtggatgcttactatagcacatgacgagacttccctggtgaggtcgtagacgagtgcactagttgactgactatcacagtggtctgaggttcacgatctcggaatacaggcatcatggtcttcgctgggtccatcgcagccctaggtacacagcttagagcctagagaaacttgtgcatgcgctgaatgagttgttctagagaaagttcaccaaggcattgtttgtcacttgaaacattagaaacacaaatgcctatcaaaagcagaatagatgaattaactagggagcttttatactctgtaagaaaccagagcagtttaatgaaacagttacgtagatcaacatttttaaaatctcaaaaatacaatgttgagctaaaagaaagtaaatggcggaaggatacatacagtatagcaccatttataagagtttaaaactggctgagtgtgggggctcaggcctataatcccagaactttggaaagaggcctagg

SEQ ID NO: 181569 - DNA, 596 bp, Homo sapiens
gggctaattttaaacacagctcgaatactgtgatgtgaatggaaacaactgaggaaggaaacagactaaaactcatctattacaaatttgcaaaggtttgaccataacaagggttggtgtggaacaaaggcaacctgcacatacttccgatgggagtgtgaactggcatgaccacggatggcaacttggcagaatctcgtatatgggaaaacgcacacatctctccgcctggtgatctcagccctaggtacacagcttagagcctagagaaacttgtgcatgcgctgaatgagttgttctagagaaagttcaccaaggcattgtttgtcacttgaaacattagaaacacaaatgcctatcaaaagcagaatagatgaattaactagggagcttttatactctgtaagaaaccagagcagtttaatgaaacagttacgtagatcaacatttttaaaatctcaaaaatacaatgttgagctaaaagaaagtaaatggcggaaggatacatacagtatagcaccatttataagagtttaaaactggctgagtgtgggggctcaggcctataatcccagaactttggaaagaggcctagg

SEQ ID NO: 181570 - DNA, 179 bp, Homo sapiens
gggctaattttaaacacagctcgaatactgtgatgtgaatggaaacaactgaggaaggaaacagactaaaactcatctattacaaatttgcaaaggtttgaccataacaagggttggtgtattatgggaagactcagttcaacctttggctgccatgcttcactcgggatactgcacat

SEQ ID NO: 181571 - DNA, 336 bp, Homo sapiens
acttagtgaaactgaagtttcctaaggaaatcatcaattatttttaatccaacaggtacccccatgtacacacacacagtatttgtaaaaacatcaattctgaaatacagctagctaccccctttaatatgcacataccacaaaattaaaatgcccaagcatttttttaagagatggggtctcagtatgttgccaaggctggttcaaacctccaggttcatgtgatcttcctgcctcagtctcccaaagtgctgggattacagatgtgagccgccatgccctgccccagtatccttgttttgctatacataaatttgagttattagataacagtca

SEQ ID NO: 181572 - DNA, 521 bp, Homo sapiens
taccctttggatgtgactttctctgatcgctcttcaccctatccccagctcacctctttttctgtcctcactctttcctcatcttatgagcacagattcctcagcagaaattagtgttgtgcatcagtaggttgctagtgtggtgaactggaacctgtgactctagctgtgaattctctgtcatgtgtgtgatcagtttctaattcttgggcactaaccaggaggcatgtgcctgcattactgtgaagcttgtaggaggcagaaaaatagttggaattaggaggaagatacatggtgggattgaatcattttgccacttatttttctctctttaaacagtcatctcactagacggttattttgatgacaaaagctgtatcatttgtcttgggagactggtgatttacctcttttacaaaagaatcgtgacagaggaggttaagacttcaggctagatagatggggccagaagattggactttaaccatcaagataatttactgagcgatcagagaaagcat

SEQ ID NO: 181573 - DNA, 412 bp, Homo sapiens
ggtgcgcgcctgtactcccagctactcgggaggctgaggcatgagaatcgcttgaacccaggagacagaggttgcagtgagccgagattgtgccactgcactccagcctggcaacagagcgagacttcatcaaaaaaaaaaaaaaaaaaggtgtcctttgcggccaaggggaagctgggctgggggtaaagctgcatggtgcagggtgacaaatagacaactgatgggctgcagtctggattgtgaggaactgaaaggtatacagttccagagctgaaactaaaaagcatgggatctcaattaacaaagaggaaagcaggaaatgaagaaaaacttaaaagactgcaaaagtaagaaaaaaggaaaatagtataaaatgtaataaatataatagaagtaatacaaaaagaat

SEQ ID NO: 181574 - DNA, 323 bp, Homo sapiens
ctggagaaaagatggaacgtagctacagagggcaagggaacgaagtcacagctgtgaccacagtaaatcttttctacctctctgggtggggcaactgaggtcagagaggttaagggactcacctggtgagtaagtggcagagcctgtatttgaactcaagttgggttggcttagcagcctctgctctttgcactatgctgctcttgttcaagggggactcagagaaaagtctggggagcagggaatgctgaaagctaactgcctgactttgcatggggccagggtgcagttctcgggatcacaaactcaccccacactatgaa

SEQ ID NO: 181575 - DNA, 523 bp, Homo sapiens
tcttattgggagaggaaaggaaacattccatcaactggacaagcccaggctttatccttgatcgaagaatttgctttaatgaagcacctgacatgtgagtgagaaaacactgaagaggactgttctcgtagcctcattcagaagaactgacgaatggataatgaatcgcacagtttaacccaagggtcatgtgtgcatttacaccttctccaattttggaaggaataacatatacagatccttgtctctcttcgttctaattttatctgtgctttagtcataaaacccttttctgaatacctctgtttcatgaatggaaaatggaggcatgagtctcatacacggagctcattttaaagtacaatactaggcagctctttccagttcatggttaatccttgtaattgccacataattaaattacccaacatgcatcatcagtttccaaaactatggatctagctcatttctgcctcttttgctctaacttgggaataattaggaggacaatgttctttcacta

SEQ ID NO: 181576 - DNA, 387 bp, Homo sapiens
gtcacagatcaactctctaataggtggttctaagtgtgcaggttagtaacaatatgcttgaggcaaaggctacctcctatccttccagaatggcccaggtcaagctagaattatcctgtgtcatgttgccagttacagcagtaatggtactgctcagaactggactaaatagaagacattttaaaaaggcaaatgcaaagatggaaatccccaaaacagccattgtccagttctggtgagtatatactccttgggatcttatgtaggccctagctacaaatgacctagtaaagtaaaaataaaattgggctcgtagaaagatgtgaccactctattttatgttggtagcacattgatatacacctattataacctattataacttat

SEQ ID NO: 181577 - DNA, 434 bp, Homo sapiens
ttgaatcttgtaatgaagttaataaaactatgttaatgtgtttggctgagagcttagaaataaaggctctggctggcgtggtggctcacgcctgttatccctgcactttgggaggccaaggcaggtggatcacttgaggttaggagttcgagaccagcctggccaacatggtgaaaccccgtctctagtaaaaatacaaaaattagccaggcgtggtagcaagcacctgtagtcccagctattcaggaggctgaggctggaggatccctggaacctaggaatcagaggttgcagtgagcccagatcgcgccactgcactccagcctgggcgacaaagcaagacttcatctcaaaaaataaaaattaagttaaaattaaaaaaataaaagttctgcttcccgtctcctgtgattgatgttgggtactgtttctca

SEQ ID NO: 181578 - DNA, 320 bp, Homo sapiens
ctgcacctcttgttccctggagtgtaggacactgtgtgtactagagtgctggggaattggccaccctgctggatccagctggcatcatgatgctacaggcccctgggtggatatgggggatgttaacagggctacagggatgtagagatgcaggggcactggactccggggaagattgtagttttgtgggggctgagctctcaaaatggagccttgctgcagctgcttgggtctcagggggatgggggggtggaacacagagaaaactccttctctggaacattgctgtcatgtgaactctaggcagctccctatacggg

SEQ ID NO: 181579 - DNA, 230 bp, Homo sapiens
accacttgcccacatatagattaataggctatttagaaatgacgatactttagggacaatgaaaggtacagatcctacaaagccttcccccaaaacaacatattatctggtctgtcatagaaactgaaatttgcatattattcttccagttggattagaagctatgcattaattaatatgcaaataatatttagaagactgtatcatcatctactaattatgaattagta

SEQ ID NO: 181580 - DNA, 478 bp, Homo sapiens
tctgtgtaagcttagatagcttaaagactgggtagggaaagaacctggcaagggagggcttccccgcatactgctctaaatcttccaggggaactttacagagaaaaccacagccagctagttgcaatgtcacacaaatgaaggattcaaagaaacaagaggtggaagtccaccttggtaaagtcatcctgtgctggacccctccagctgcagagcactcctaacaatgtgcaaactgcttgctctaagcctgggttctggcacagttgcctaatgactcaggcagcactgctaccaccacttccccttggaggctggctctacagtctagactgtgctggaggcgatcatttttgatactgggcccacattttccagcatgtattcacagaacctcattccaagtgctgatttcttgggccccaaacagctatcagcagggaatcttcattagaaaagagaaacacattttgcagga

SEQ ID NO: 181581 - DNA, 408 bp, Homo sapiens
agacagcaagacctacccccgttctcttccttctcctcctcagcctgcttagcttgaagatgacaaggatgaagacttgtatgatgatccactttcacttaatgaataataaatatattttctcaagtttttaaaaatgttttctctatgcttacgctattgtaagaatgtagtatataatacatgtaacgtacaaaatatgtgttaatacaggtgtccccaatttgaggaaccgggccacagaccaggaggtgagcagaggctgagctagcaaagctttatctgtatttccagccgctccttactgcttacgttaccacctgagctccacctcctgtcagatcagtggcggcattagattctcataggagtgcaaaccttattgttatgggatctttggggtgtcga

SEQ ID NO: 181582 - DNA, 383 bp, Homo sapiens
caggagttgtccatggtcacagagctcagtcaatgttgacatattaggcacctgcccaatcatcagaataaactgcttacaaagtacctgtgcacgtgtgcataatttgtttaatctggaagagggcactgtctccagtcctccctgttcctcttaaaccaggtcaaggtcagaatcaaaatgcctgagtcactagtgcaaaaggaaccatcagtaagaacaattacaaggttgaccccttgagttatgggcttcctcaggcacccatgtctgtcccaggtctttcctggatcccccagaggcagcacacacctctaagcagttttctaaccccctaacctaattcccatcttgttcctctgtcggtagaaatagattgatca

SEQ ID NO: 181583 - DNA, 628 bp, Homo sapiens
ttttgggagattaaattaaaaatggggataacaatacctattctgcaggatcattatgatgattgaatgtgtaaagatagaaaaggtgtttaagcaccacacttggcacataacaagcatccacaaaagttagtttttactccttgattctctccttcctcaagaggatcacttggatcacctctttccatatagtgtctagtctagtgtattacatgacattatctagtttagcctaaggttaggcttccttttcttatactacctgttccctaggagctttgagtctatatttatatacatttgaacatgtaatgtgtatgtgtttggaagtctatacaactgcctatagtgtacatctgtatacaagagccataggtttccagctattctcacatttagtttgagaaacttcagagggttacgttaaaattgctgaaaaggggccaggcgtggtggctcacacctgtgattccagcattttgggaggccgaggtgggaggatcgcttgaacccggtggtggaggttgcagtgagccgagatcgcaccactgcactccaacctgggcgactgagtgagactccgtctccagaaaaaaaaagaacaaaaaatttcgggagcacttaa

SEQ ID NO: 181584 - DNA, 471 bp, Homo sapiens
aagttgaatctttcctggattcacttccacacgaaacagacgaacgagaaagatatgagttcacttgcttttttgttttgtgttcactgcaggcttcttccaggagttatcccagggcagggctgagtgtaatgggaggatgaggcaggagagtaggtgagccccaaggtcctgagagaagcttcagagacttccaggctctcatctccaagtgggggattgggttgagtttataacctcctttccaatgcagtatcacagagtagttgagagtgctcacatactgaagccagtttggactcaaatcctgccctagccatgtgaccttgggcaaggtctctatgcctgtttcctttctatgcctcagttttctctccgtaaaatagacataactgtaatacccaccttacatcgcttgtagcattgtgagggataaatgagttatcacatgtgaggttctttaaacaatgc

SEQ ID NO: 181585 - DNA, 297 bp, Homo sapiens
ttttatctttctcatgaaatcctttttaagtaaatgtcttataaagtgatatgaacttagctttttaccagatgtctatctgtatggttgaaaatttcttttgagatctattcaggtggtttcctatctactgcctttgtctatttgtgtctgcttttcacttctctttcagataacatcagtactgaatgtatacttggtgtttaatatttattgtttaatatttgtatagttctccatataattgtataaagattaaaagtatacataaaacatgcatttgttttgaattgttta

SEQ ID NO: 181586 - DNA, 173 bp, Homo sapiens
acttttaggttctggtttgtacagtggagtggatagtataaattattgatttaaggaagaggtaagggaaagtgggagacactgtttcatttttgaactgttaggcttgggatgcctgtggttcatttttttgcatggagatattaaaaaagcagttggatacgtagctttga

SEQ ID NO: 181587 - DNA, 137 bp, Homo sapiens
tgtaaatgtccatagcagcactgctcataatagccataacgtgcagacaacctgccccacctgggttcctagccagccttctttctcaccactcttgagtgggtcttctcatacctgtcccactgggcacccaagca

SEQ ID NO: 181588 - DNA, 323 bp, Homo sapiens
acacacgaatccacagtgagatcttccatccaggagaggacccttgtaggtaagcgaacttaactgcaaaaaaatgcaagatagctacttatactaaccaatacaaaccaccattcaaatctctggacaaccaagggtcactgcgttatttgagaaaaagcaagtaccaggaaagagaaaaatacagattatatgactttagggaaaacaaacaggaacaacagatcaaaccagacatccacacaaacaccccaattactatgttaaaggttttaaggggtatattccttaaaaacaaaccaactacaaaacaggcttccttg

SEQ ID NO: 181589 - DNA, 658 bp, Homo sapiens
cctggcctgaaccatggaagtgaaacacgggctgtacacgggattgaggccctaagttttaggttaaatgaaggttgccaggtggaggtcattaggggaaggtgttaagtgaaaatgctatataaactgcatgctgtttgcaagtggttgcagtttcctgcttagcccaatgccactgggccatgtggttatgttgtccagcccaccaccactggactttctcttctgtgtgtaagcccttaataaaaccccttatcttctttgctgactcttggtctcttcttcagcctcttgaacctggtgctctccctattaaggttaatcagggttcagaacaacaaccagttagtaatttatagtttgccatcttcaaaatgccttttggttcggtgagataaagtggctaaccaggagtaagcaggtggtatgtgccagggcttggtctaaaacacctaattatttgagctcaactccttccactgttccacccccagctcctcaattgccaagcctgttttctgtaatcagactgagcctgtgagacatttacagccggctctccaccactggactgaagcagaacagcgaggtaattatctgaataattcaggtaatggcagtttattttccctaaattacctggataattacctcaagc

SEQ ID NO: 181590 - DNA, 248 bp, Homo sapiens
atactgtgccctggcactttttaggggtaggggcaggagagtaccagaaagagtgggcttttccctaaagtgtgatcctcgggattttaaaagctattacacagaagggttttttcattgattatatttgtgaaatgctgaattcaacacagttaaactagtgtctttacaacaaggcttccttcccaaactcttttgctgtgctcacgtgctccactgaggaaaatggtagcatatggtgttttttg

SEQ ID NO: 181591 - DNA, 237 bp, Homo sapiens
acgaaagagaaattctaatatagctcagatctgaactataatctgctgagtgagattagtctatctcagcaaaacccagaaggtggtggatagggtcagaagagagattagtgttccaaaggtttcatgtggagccaggggaaagaggagatattttgaattctaatccatctctgctagctttttctaagttgaaacagcccttctgtttaatagttctgctttctgtgctttgca

SEQ ID NO: 181592 - DNA, 195 bp, Homo sapiens
tttgccaaagcgtagtacccaacactatattcagtttgtaagaaattaccattatcacatttcctgtttgtcttggagaggttgtcctatctcgcaccacatagtagggaattgtgaacaacactggacagaaagttaaagccttggattctgtactcttcattcctgtaaaccttgggtactacgctttggaca

SEQ ID NO: 181593 - DNA, 169 bp, Homo sapiens
tgagagattgtaaacatgctaaatgtgagactcccagacctcctactcctctgttcccagaactttacgctccacacaagagtccagaagacttttctggggaatctggcccaaatgcaaacaacaaaagataccaatactgggaattcccaaacagcccacccagatc

SEQ ID NO: 181594 - DNA, 635 bp, Homo sapiens
actgcctgaatggaatgaagagaatcataccctgactcattagagtgatgaaaaatttctcaaacttaccaaaaatgcccctgacaagaagatacaagatcagccctgtcccttctctcacggagctacaatgaaaataacagcaatgactcgggggaatcaaccagtaatggtaaggaaaaggaagagagtgactctaggttatcattcattattcaccattccccttttgggctcatggaaatgtgatttgcacacaaatgtcctcaccagctcatggagactttattcttgctgatatcaattcattaatcaatacctgtaggatgtgggttgagcaacaggttttgaatcccaccaactgttcgggcatccacgccaaatccatctgggtcatgaggctttgtgagaaatctcagcaaattccctctactattcaaaaacacttgtgatatatctctaatatgtgggaattggactaaaaagtctagcccttccagctttaacaatttagaatcacatatgtatatctattctgcaatactgcggcacagatcttcatcgtgttccatgaattcattcattcatcatgttccatgaattcattcattcatcaaactagtatttagataccc

SEQ ID NO: 181595 - DNA, 688 bp, Homo sapiens
ctaccacggggagtggggagtgggaagtcacacagtcattttcacacatattgagaaaaggtcacgaaggtgaaaaaagccagttgcaaaacaatgcacgtagtatgatttcatgatgttcaaagaagaaacaattccgtatttctctgcgtacatataggtgtgcacatgggtaaaaatggatgggaagaatatatcccaaactgataattgtgggtttcctctggggcaaggggtaggggtgggaggtgatactaagggcacttatctccctctcttgttttattttgtaatgtgaatctcttctcttttttttggagaccgagtttcactcttctcacccaggctgaagtgaaattgcgtgatctcagctcactgcaaccttcacctcctgtgttcaagcgattctcctgcctcagctcatgagtagctgggattacaggcatgcaacaccacacccagctaattttttgtattttagtagagacagggttttgccatgttggcctggctggtctcgaactcctgacctcaggtgatcccccccacctcggcctcccaaagtgctgggattacaggcatgaactaccacgcccggccttcaaaacatttttgtaagtaaagaatcgaaaggaagaaagcactcagttcccagcagatgccaggtgctcagtaagctcagtaagca

SEQ ID NO: 181596 - DNA, 749 bp, Homo sapiens
tggggtggcttggcctcactttctctctgtgtagcctctctgtgatttttatttatgtggtccttccatatgatctctattatgatagccagacttcttacatggtagctaaggacttcaaatggtgcagaagtggaagccactaggcctcctgaaggttcaggcccagaactgtcacagcatcatctctgctaccttttattccttaaaacaagtcataggcttggtccagattcaagggcatgaataatgggaggctgggttcactggggggccacgctacacactcacctttcaagggcttttgtgtttttccatgccgcatgccatatgatcagatgactttcattatgagtcttgctagcattacatttaggcagtcctcaaacaatgaggaaaagtaaaacactgcctcagaattttcactccctgtgtcatgtcattttgatgatcaaagtagcttcactagtagaacacacttacggaaacaataatgtctgtaaagctttttacctctaatatttgagcatgaccagtcttggtcattttgttactaaaaagtgtggaaatatttatatttaacatactttttttgttcaattcagacatactgtcaaactagacaaggtaactagaggctgttaatgataagaaattttttttctgtactagcataaaagttaatttctgctggagaataaactttttattgttgacttttttccattttattattagatttctttacc

SEQ ID NO: 181597 - DNA, 576 bp, Homo sapiens
gtccccttccagttctaaaattccatgacatttgtgcaggacaaatactaaggagatcatagaatttatctgttttcactaattttttttagcattacagttggctttttcatttcagtgacattttaccatcaatttgcctttagattttcctcacagaatcattttcaacccccagaggttttcagcctccaaaaaaacagaacatctgtgtcactagcacgtactcttcatagctgcattaatggcaggtgccagaagaggtaacatgttaggtttgttggatgttaaaggaggcaaagagaaggaaattataaccctcttcttcctggctgaacccatggtggtggagagtcaagcgaaagcttcccctggccctctgaagattcactgaaaaatcaactcctaaaagtcagattaactggagaaaaggcacacaaatttatgtaatgtgtacactgggaaaaccacagagtgattacccactctacaacagggtgcagaagcttatacaccatcctagcaaaacaggttatagggttggggagaagaggaattctgttgagggaattacta

SEQ ID NO: 181598 - DNA, 127 bp, Homo sapiens
actgcagtggttcagagaagtcccctcttagagctttcatttcttttggagggatggtttgaacctagactggatctgccccatttttgccttagcaagtcttgatgagttcattggacagaggcaa

SEQ ID NO: 181599 - DNA, 536 bp, Homo sapiens
tttacgttgcatctttttcctttgtttagagttccagcccacaagcctcccctggtagacaacaatgttttcataactgcaagcaacaaggtagttcctagcccctctgctctctagttaaggcgttacgcactgcccagggagagggaaattctctctgtagctgtggcaacagctgtcaccaggaagctagggcatctctgcaacccctcctcagacggcactgaagaacatctgtaagtcaggcacttttaacttggggccttgtatttcaacattttttgtgggtacgtagtaggtatatacatttatggggcacatgagatgtgttgacacaggcatgcaatgtgaaataagcacaatatggagaatgcggaatctatccgctcaagcatttatccttagtgttaaaaacaatccaattacactctttaagttattttaaaatgtacaattaaattattgttgactacagtcatcctgttgtgctatcaaataggttttattcattcttgctattttttttttttgcaccc

SEQ ID NO: 181600 - DNA, 333 bp, Homo sapiens
catgagccactatgcccggcctaaagaatggtttttgaaatatggttcctcggaccagctcagcaggcagattctaagggttcacactacacttacaaaatcagaaactctggaggtaggggccaacaaactgggctttaacaggtcctctgggtaactctgatgcaatgctgaagtttaagagtcactggcataggacattagagatggaatcttcgtattttatagttgagcattccacagaggaagaacaaaaaccttgaaggagactggtatataaagcattgctactttaattaaatgaagttaaggaggtttgtttttgaagactga

SEQ ID NO: 181601 - DNA, 747 bp, Homo sapiens
atacacatgccttgtaacataggaaaacagatgggtttttaagacaggtatagaaagctctgtccaaaatggctaagtagtctttacattctgtattaagtataaaaagtgcatggcagagcaactcaaactttctgcacccctttctctcatttcttctttgaaaactgcataacaatgcataacaacaaaatttcaaagtcaaagcaatgcataacaacagaattgtgcattttaattttcaaattaaaatttaagaaacaattttgtaattacaaagaaaaaacacaaacaattgggcctaaacaaaatatatgttcagtaaactttatctctgagtgtatctgaaattttaactacacaagccaataaatttcaaagcagtaatattatcaaattgtgtaatgtcaaaaactccaaaaacaaagttacagatgttcatgacatcacattcactcaaaattatgctgctgttcagtctgaccatattaaaattaaagggatgcctatgtctgctaaagaataaaaatttattttggacctcaaacaatgaaaccgtcaccatttcttgtatggaacactcagctaatcaatttcctattaaaatagctttcaacaatacttggctttaaaattcatcagggccagtaaaaacgttttcccagtgcacaagaatgcagtcccaaccaccgatgataattactgttctaataattttattgccaaagtactttttcctgtgttcct

SEQ ID NO: 181602 - DNA, 555 bp, Homo sapiens
ggaagactgggtcctggcaaagatcagtacccagcatgaaatgcgcccacttacttgttaagtgcttaaaattttcacccctcctcctgccctgttctgccctgaagctgcagattcattagtatcaattggttttcagggtgtttctatctctgggccactggctcctggatatgattactgcctgatattttccatacagtgcttccattttcaatcatcttatccacagttggcctaatgtcactctttgaacattcacagaggaataatgtaaatgttagcttttgtcctgtgcataactggagaggaaaatgccttagactcatctgcactaaacatttctttgcagacacctcagagaggacagcctccatctctgcccacagcacacccattttctgaacaaaatcaaagagttgttcttggggatgtccttggggtgacgaaactttctgtaggcggtgcaacttgtgcctccaaggatttgaagagcatcctcgcctccccccactcacccatattttattgtcagttcttttgcaagggtgaagg

SEQ ID NO: 181603 - DNA, 507 bp, Homo sapiens
tggccaggctggtttcgaactcctggcctcaagtgatccgctggcctcagcctcctaaagtgctggattacaggcatgagccaccgtgccaggccttgttaatatttttaactctggcacttcaccctagaggctgctaggaatcaggtgtgccaagcaactggcaccactccatggaaagcgtctagggcagtgccttggttctgccaatcctgagaagccaggctgccccttgggctgggcagtggcctcagtaccgagccccaggccagcaagcccacaagcctcgagaaagactgcacttccggtggaggctgcagtttccttaaagggaaaatctgccccacccctgtcaagggcaggacacaagtcactggcattgaaggacccactccacacccagcagatcatcgacgcagactttttttttcccagatggagtctcactctgtcgtccaggctggactgcaatggtgtgatcttggctcactgtaacctccgcctccc

SEQ ID NO: 181604 - DNA, 1893 bp, Homo sapiens
gatcaagatgatggatatgccaattacccctatctgattactatacattatatgtattgaaacattattatgtaccccataaatatgtagagagcagtcaagggagctggcgagtacttttcccactggttattgtatatactgtgtctctaaaagctgactggtctctcccaccagctcactttctacttgagacataccatattgcagtgaggctagaatactgggaaggggaatgacagtcctttagaaaagagggtggaaccagtgtaaggaaatgtggaggaggcagaatttcactttggactcttcactcctccttttcttcattatttatcttcttccttagacaggtaattcttactcagctgtggtctaaggccctgtgtacactgagtttatagagcttctggactggtttgttattctccccatcccactccttgcttcaaatatcattccattaaaagcaggtcatctgattaaatcctgaattgtcttgttatttttttcttactcagtttagaaaagtagcaagcacaatctggtttgtcagaaaagagagggttgagagctaaagttaagtatcaggaaacgtgtgaaaaagtaagtttcatcctaggatttataaaggatgaagatcaagagctggttaggaagagttaacattgtaaacaatcatttgaagtcaattcaagcttctggtgcagaggagttattattaaatatagttgtgtaaaggaggcatggatattcacacctttagtgccatacggtataaatatacagtaggctttattaggggaaaatcctagctgagaaaaagctgatcctaactaactcttggaacttttattccacagagaggtatgcttaggtggggcatagctggattggatgcacgatggcctaccttccaatggacaggaatcctgctctgtaatagtctatatatagtatgggacaggagaacatctctaagactgtgtagtaatgggaggtctatgaatagggaataggccttgttagaaaaccgtgcctctagctcagtggctggtgtgtcagtctcttcttccattgagctaaatcacgtccatctgagctaccaaaaggagggaggaaaagaacctccagagtctgtgaatttgattctcatcaactattgagtgctaggagagcttggactaaaattaaagaacaactgtcaataatctttgaagaatcactgaagaaaaaggtcccagaaaaccaagaaaaggcagatattttttgagacataaaggtggaggaagcgtatatagtccataaatattagactggtaaacttgatgtaagtgttctgtcaatttctgcagtaggtgcttgaccacatggttgtgagcagttacaaagggaagggtaatgaccattggcaccatggatcacacagcacaagtcatacatggtcacctttagggaatgccagaagtccacgtctatcgtgatgtttgcaagagatttgatgaactgtatcataatgtctttcatagatagtaagacagggaagtgtttactgaaattgactatccaaaaaatgttgactaactggttttatttgactttgggggtaaattattcctagcaatctctgaattttgggttccaaagagccctggagacgagtggcagttgtgtgctcagtattataggttatttaaagtaaccgaaccaaaacttgcatatgcacagcacataacagtggttggcacgtagtgggttgtgtgtgcgtctgtagtcccagctacttgggaggctgaggcgggaggatcacttgagcctgggaggtggaggttgcaatgagccaggattgcaccactgcactctagcctgggcgacagattgacacccagtctc

SEQ ID NO: 181605 - DNA, 381 bp, Homo sapiens
tgggctgctcaattcagtccatcaggtcttagcaagttccatcaccacgcacagagtgtggcagatcacgtcttccaggatttctgatagacacaatccatttttaatgccttgtgtcaggcatccctgctgtcctctaaccattcttaataataagacaaaagtgatattttagggtaacagttaataaataatgtgacttatccaatcacacctttcactaaaatattattatcttttggcagattcattactgtagaggcatcaggatctgatgaaacattctctaattctaccactagtacattttccagagttgtctttcttttaatttaattctcccactctgaaagcatactgtccattgcaaactgaaatgag

SEQ ID NO: 181606 - DNA, 123 bp, Homo sapiens
tctttcaggggtgagtctgaggtatagtgagggtgggggaggctaattttcttttcttttaattttttttttttaagatggcatttcgttcatgttgcccaggctggagagcaatggcatgat

SEQ ID NO: 181607 - DNA, 852 bp, Homo sapiens
aggagccatgtggcattgctggcaagactcacatcacaccacctggcttctgggtgatgtgggtcatctatggctccacccagacagccatctgggtccctgaatgggaacaagatgcctctccagggctgagagtcttttgccacagcatgtccaggccagtgctccttgtttgcttttgagcttatgataccccaaatataagaagctccttctgttcaaactgggcaccccagcaggaggtgaaaagtatccccctcattccaacaatggacactgggatgtgtgcatgtgtttgttcatgtttgtgtttgagcctgtgctaacaaatcgaatacctgggcatcgagcagctcatacataaccagaggaccaaacagtctttctgtccatcactggtctgggttcagaatgcatagacctcccagcccacgttgcctcacatacaccacattgtggagttctctcggaggcagcattcagtgtgctttcaggcctttgacaaattaaacattcaaaagtaaaaattgctcactgctagggtagggggaaaattacaggggtagataaaacaggctagagcttatgaaaagaaaaccacagtctctctacgctaattactaatgcatctcagaaggagctcagaggttaaaggactaagtccttagctggattttcaccattcttagaaccaattgcagagaggcatagcatcttggaactgtgaaatgatacaattccaatgctggaggggggtcttcgaggctacacagttcaactatttctccaatatttgagtcttttttatggttagcatagtaagtttcacctatgattgaattcttccggtga

SEQ ID NO: 181608 - DNA, 551 bp, Homo sapiens
aatgactgcttgcctccccccaactgtctttctctttgcctctttctcccttctatttcccttccattttatatgcttttctaaaacataaatacattgaattcagaaggcagcgtgggatttggaaaccaggggtccaaagccctgcttgaccattttgcagctgtgaggtttcaggcaagtgactccagcaggctcgtcatcctccacactggtaattatggagagaataatccctactgtgcttggccattgaattacatcacctgttcagtggcacgcagtaggtgctcagtggttgcaactttcttctttcttctccttgatcacaaagcttcagaggctcaaaaaaatctaccagaactttttcagcctcttaagctcagaataggagcctcgccatattttccatctttcatctctggctttaacccactcaaccctcttccacattccaaacattccatgcactttccggccaccaggcctttgcacatgctgtgtgcccagcctgggttgccctttccccttttgcttgccttagcctgctt

SEQ ID NO: 181609 - DNA, 397 bp, Homo sapiens
tccaatattagcctttatttgttccaagaatcccacatgaatatatgtgacaaacagcataaactttgtcatgtagatccaaccatctctgtctacacagagatgtttctcacaaaagacagctacctttgtgttctgatttgcttagggacatccttggtaatttaggactgttatgaggtatgttggccaccctcaaatttaactccctcttccgttcattgtgtaccacaaataattgaatgagctaatatgtgaaacaattggattataaaggattaatgaagataattattgaaaaacccttagaatagcctgagtcattctgcatactcagtaaatgagagacatcattatttccattctattaggtacttttagtcacatccactgtttt

SEQ ID NO: 181610 - DNA, 267 bp, Homo sapiens
accttctgaaaggacagtgctggtctctgtcacagtgttgatctcctcagacgtcctggtgtcccttaatccaggaatcaaagaggatgttgattcagtctgaattctagtctcaaagaaggcaggagttgatgtagaaacacttgtatcccccatggcgaaggtgatacccattggagatgtggctttggatgtgtgtgaatcagctgggacagaagattgtgattcatgtccagaaatggaggtccccacgttggccactgcagt

SEQ ID NO: 181611 - DNA, 481 bp, Homo sapiens
acaacatcttgtgtgttctgagtataactctacttaagttcccaaagtacattactagtgcatgtgttctcatcattcttgtacttgtgaaagggagggtgatatagactttggttttaggatacccactacctttggtttcaggctacccactacctttggtttcaaaagccgctcctcttctgatgtctgttcttggtgtattaaggacaaatactggaaattatacacaaagaataagtatgtgctgatttatcatgagtcacatggatggtcttggcaggaagtgacagctttgtcattctttttcataattcaggaaacacaggaacaacatatgccttgggttgggcacagagtgagaactcaataaacacttcatccagtgaaatgatgacacagaaatctgtggcagtgctttagttgagtgataagggcttgaacccaatgtgtgaaagccagaatttatgaaacaaatgag

SEQ ID NO: 181612 - DNA, 430 bp, Homo sapiens
acacatgtttctctgattatttcctgaggtttaaatacctgctctgtcactgactagatgtgaaccttgagcaagctgtgcttccatgcctcagtttccttatctataaagtgggactaagaatagccccatctgattgaggtgttgtggggattaaatgagctaacacagacagagccctccaacagtgaccggaacactttaaagtctcaagtaacgttacaagtcagcttagtccatataggctgctataacaaaaataccttagagcaggtaatttacaaagaacagaaacgtattgctctattgggtgcaatggtgtgcatctctagtcccagctactcgggaaggtggggtggatcacttggagtccaggggtttgagaccagcctagggaatatagtgagacctcatggtgaatttttgaaaa

SEQ ID NO: 181613 - DNA, 434 bp, Homo sapiens
cgcttcagcctgggaaacagagcgagactctgtctcaaaacaacaaaacaaaacaaaacaaaagacacattattgaatgcctatatgagacagactaagaacaactgtcttagcccattttatggtgttgaaacaaaaacgttgagactaggtgacttataaaaaacagataatttctggaggcttggatgtccaatattaaggtgtcagcatctggtggggcccttttgctgcgtcagcccatagcagaaggcagaggtgcaaaagaaaaaggacagaaggggaccaaactcatccttttatcagcaacccactcctgtgataactaactcattctcacaatagccacattaatccatcaacgagggcagaacccttatgacctaatcacctcttaaggttccacctctctacaacattgcattgggaattaa

SEQ ID NO: 181614 - DNA, 342 bp, Homo sapiens
acgggttttcagtgtgttagccaggatggtctcgatctcctgacctcgtgatcctcccacctcggcctcccaaagtgctgggattaacaggcttgagccaccgcgcccggcctggaatcactgttgtagtcctccatgacccgatgtggtagagagcaggtgttctggttgaaaaggtctcccgagcgatgaagtatctctccatacaccatctatggatgacgaattcccagaggcttgtaatgaaatacattaagaaaaactgagagcagacctagtcgatgcttcctttgtttcagaggatgcttcgggatttctcagtgccttcatgtgatcacgtgt

SEQ ID NO: 181615 - DNA, 193 bp, Homo sapiens
cacaggtttcgtatgctgtgctgccattgccatttgcttcaagaaattgtttaatttcattcttaatttcttcactgacctgttggtcattcaggagcatattgtttaattcccatgtgttggtggagtttccaaaattcctcgttattgatttttagttatagtccattgtgatcagagaagatacttaaca

SEQ ID NO: 181616 - DNA, 134 bp, Homo sapiens
ggggagtagacggatgggcaaatgaatggatgaatgggggtgggctggtggtttggttggttgggaaggggatgcaaaagcaaacacaacattttaaaagtctattgagtagacttcctgaagtgtgaagtcat

SEQ ID NO: 181617 - DNA, 511 bp, Homo sapiens
gtatgagttcaaatgtaggaggagagggatataaaatttgagagttaagcattggacctgtgtaagtctattctcatgctgttaataaagacatatctgagactgggtaacttataaaggaaagaggtttaattgactcacagttcaggatggctagggaggcctcaggaaagttagaatcatggcagaaggggaagcaaccatgcccttcttcacatggtggcagcaaggagaagtgccaagcaaaaggagaaaaagccccttataaaaccatcagatttagtgagaactcattatcatgagaacagcatgagggtaactgacccccatgattaaattacctcccacagggtccctcctgagacatgggggttgtcagaactacagttcaagatgagatttgggtggggacacagccaaaccatatcagaccaaacatgaaagtctaagaagctttgacttttaagacaacattaggaagtgcttgaagggttgtaaacagtggcaccac

SEQ ID NO: 181618 - DNA, 515 bp, Homo sapiens
tttcctgcactgttctcatgatagtgaacgagtctcatgagatctgatggttttaaaaatgggaatttccctgcacaagctctctctttgcctgctaccatccacgtaagatgtgacttgctcctttttgccttctaccatgattgtgacacctccccagccacatggaactgtaagtctgttaaacctctttcttttgtaaattgcccaatcttaagtatgtctttatcagcaactgaaaacagactagtataaaatgtctttatgaccttgaggtaggaaacaatttcttagacaagatacaaaaagcacaactcatacgacaaaaagtttaataaatctaactaattcaaaacttacaacttctattctacaaaataattcataaacaaagtaaaacgacaagccacagactcaaaggaaatttagtaaggcacagactcaaaggaaatctagtatgtaacaaacaaaggtttggtatccagaatgtaaaaataactcatcacacttataag

SEQ ID NO: 181619 - DNA, 147 bp, Homo sapiens
accgtgaagccgtcacagactctggtatgaatttagccacagacttgatgttctgatgcctcgaggagcttctgggtccctcaagggcccaggtgacatgatctccagtgcagcctagagctttggaatccctcttcctcccccaga

SEQ ID NO: 181620 - DNA, 759 bp, Homo sapiens
cctctcaatgggttacatttttcaaattatgttccaaaacttaaccatgagatcgttggcatgagagctgtgcctgtgtcccacgccaggcttgaactcacagtgtagcagatgaatcaggaagaaggcatcatgggtttgcaccaaaaaaagaatcagataaagaagttcgtttgtatctttttaaaaagaacaaagaacccctcttcttccaaattaaaagtttagataacattgaagttatcaccctcttagaaatatcttgatttttgtatcatgcaatgtctaatagaaaggtgggaggaaaagagaactgtagagttcactgctgaagtccagtttgagtaactctcagaaatacgactagatccgctgcaatcattcacaggtagaatgcataaaaatgaatccgcagttcaagcttggtccatgtgtcatgtcctcaagatacatgggtcatggagagcaaagagacatcccagccatgggaggaacaaagtgggatacatcaggccagctgagccacagtccagctcctgagcctacgtccttttccttgggtacatcctcattctgggttcggatgaaaaatgttcctttctcccataatttcatttggaacaagtttttaaatggtgagtcagagaacttttgttcaccaggacatctaaatggacatttgacagggctccgatagatccagtagggggctcaatttctgacactttcccaaaagcttgactgcctaaaacagcaatg

SEQ ID NO: 181621 - DNA, 142 bp, Homo sapiens
gaaggacataaaagctaatctgaatctgctgctgccacagaaaaatacatgtacaacttacaactctaaggaaataagcttaaatattatagtgcgagtattgtctagtgttcagtttgctaatatgtttattcacagtcaa

SEQ ID NO: 181622 - DNA, 193 bp, Homo sapiens
aggatcccccaggtagacctaactgacacatactcaataaatgttgattggataaattgggaaagtcatcaatatttgtacatatctcagatataaaaatagaagcattttatttggtttcaggcaaactatatgactgcctccttgctcacttctccccactttggggacctatccctggttaggagtatga

SEQ ID NO: 181623 - DNA, 466 bp, Homo sapiens
ttttgagctcgcacccatagctacaccgtaccacccttcttattcttccacctcactgagggcctacatacccttactttcagaaatatacttctccaccatatgacaagttcccttcaagacaataacatcatcaagttttaaacacctgtaaacacatataaatacacacactttcttctgtcaggcaaaaaatgctataatcccttatatccataattactgtttgcttacagatcccttcaactaattccctcttttcctcagaagaaccctcccaactggtttctgtgtgcttagatttgggaaatcataaccccaagctaactgatttcatttgcattatctcaaccatcaaactggtgctgcctaaaacaaaataccattttagtactaacagactcactttctccactccctgacacttcacacctcctccgtacggtgtcgctatggggatcctcta

SEQ ID NO: 181624 - DNA, 596 bp, Homo sapiens
cacatatgatcatttcttcagagtatatatctagaatcagaactcctaggaggtaggatatgtgcatctttagttacactgcatattgctacatgcccacgaaactgattataccagtatatactcctaccagctgtacttgagaatttgtttccctatgtacttgccagttcttgatactgccagattctcattttccattcctcacaatggaatcttcttattttaatttgtactaatttatagtgagactgagctcatatattactggctggatgagtaggtcttctgtaattacttatacagatcttttgacgatttttctaatgaattgattttttatattgacctataggattttacatattctggagactgatcctttgtcaattatatgggttacatatatattctcctagtttgtgacttgtcttttaagtcttttgacacattttaagggagataagtttttcatttcaatgaggttaaatttagctatttttcctttatagtttctgcttgttgtatcatgcacaatccacccatattttatttttgcatagaatagacatggagactctatttattatgtaaaa

SEQ ID NO: 181625 - DNA, 418 bp, Homo sapiens
ccacctgaacttactgaaatttgaaataaaacactgctttatttttttctctgcttacattaaaaaaacttaccctgatttcagatgagaaagttttctatggtcaaattgctgtgaactttttaaatatgaagtatgttacttcagctcacctgtagagagtttcattttaataattagatgcacaaagtgcaaatcaccaatcagttgagagctatatgaatacatggcacctgaacacgtgtggtcttgtcttggatggaaacaggatgctggtgccatttcattcttaggacttccctttaaatggaagcccagtaaagagctatgggtttatattaatgttctcgagtattacataggctcaccagagctgaccccattttggtgaattcaacagaaccctggagattttttt

SEQ ID NO: 181626 - DNA, 448 bp, Homo sapiens
gtacacagctcccacgacagccactcacatgcgctttccgtgattccatcccagacaccacctgcccaaatttgtgtttgtcctcactcactccatctcattacctggctgaccctgctccaggctcatggaccaacctgctgttcctggagtgttccaagccactcctgcttcaggcttttgcactgtttgctccctctgcctgaaatactcttcctagtggtatgcgcatggctcattcccttgcttcctccctgtctctgctcaaatgccaccttagcaatggggctttcttcaactgctgtatataagtaacagtcccatcattccacctcagaaccccctactcccttatcctgctttacctttctccaaagcatgtattattgtcatatttaaaatatctatttgtggccgggcacagtggctcatgcctgtaatcccagca

SEQ ID NO: 181627 - DNA, 486 bp, Homo sapiens
atgtgatggtgatgttatccatgttgaataaactagaaatcagagttgagttgtgagggaaaaagagaaattgcaaatgtatgccttgggcatatggatcatatttggatactgaattgaaccactgaactataaaaacatgttatgaaacagggaaactgcactggctatgtgacggtattaaggaattactgctaacatttaaaaatgtgataagggtattgtggttatgtttagaaataaaaatagtccatatccattagagatacatactaaattgtttttgcatgaaatgatatgatgtctaggattttctataaaacaatccgaggcaggaatgagggacagtgggtgagaggacatatgaagtaagattggccatgtgtcgacacttgttgaagctggatgatggaggtccattattcaggcaaaccctgtgttattgtgctttgctttattgcacttcacagatattgcatgttttac

SEQ ID NO: 181628 - DNA, 391 bp, Homo sapiens
aaaatgtccttctgtcttcagccagtcctctctcccatgcatggatcctggcgaacaccaatctgctttctgtcactgtagttttgcctgtagaactatttcatataaatggaatcacacagtatgttaccttatgtagctaacatctttcacttagcgtagtattttgaaattcaccctgtgttgtattgtcagtaatgtgttctttgttactactgagtagtattccagagtatgggtatacttcagtgtgtcaatccattcccctgttgatgggcatttggattgtttccaaatttgggttattacgaataaagctgctatgaacattgaattatatgagtcctcgtgtgaatgcaagttttcatttccctcacgtaaatacttaagc

SEQ ID NO: 181629 - DNA, 912 bp, Homo sapiens
attaaagtaaacactcaaactatagcaaatgattcaaagaaacttcctataatcaaagtgcttccatctatctttttatagtacactaaaaattgaattcacagcactcaacctactccaattaagaaaaaaaaacttaaagcaacttacctaaacctaaaatatcttcaaagtactgcattaggaaacaaacacaagcacattttaaaacacaggcagttttttcaagcctccactatcttaagacctttcacatttcacacaaaacacatccatgagcgagaggggggttgggacagaggtgaaaagaacaaatgagaaagaaaataattttgaggtagagtaacatgactattactgccttataactggaattttacaaactaaaacaatgtgttgttctggttcaagtatttgacattctctccctggtatcatgagtgatcttgaactgcatatttggtgccaaccggtacctcctgcctacccttccagtttcactctttgcattaccaaatgactacagcagattggaatgtcacttagtaccaggcatgagaaaaacaaaaaggtaagctgtgtaaatcagcacacggacttctgaaaggaggtcaagctgtttaggaggattcttatcagtagtaacttacaaaaggaacctagaacctcgacaggaaaagtgacactaatgaaaccagctcactgttcaattaagttttcttaattaattctctttgcaaaacagaatcatggtgaaaagaaccaatcagtgaagtagattctcatttaattttatggaaacactctgttcactagaataatactcttaactcctgtttttgagaatcttctatactgttaaataaatatcctaggctaacacatacacatatagatttctaaaaagtacat

SEQ ID NO: 181630 - DNA, 570 bp, Homo sapiens
cctctttcaccttaaaacataaactggccatcaatcatttctaatggcatctacttaaaactggccttatgattggctcctaagtgtgtaaaatgtcaggtggaaatacataaacacatctttgagctggatagagtctcagtgatcctaaaaagtgaaatatagagctattttagagatgccatttaaaaatttatggagagagatttggtcttataatttctttcatgaatactaaaattttactacaaagaaaattcagaaatgagttatttgtgccatttaattattaaatcataaatccacagaccattagagctggaaggggccttctagattacctcctccaatgccaatattttgcagatgagaaagtaggaacagaaaatttattttctcagggttaggcatggtggctcacacctgtaatcccagcaatataggaggccaaagcgggcggatcacctgaggtcaggagtttgagaccagcctggccaacatggcgaaaccctgcctctactacaaatacaaaaattagccaggtgtggtggtgggtgcctgtaatcccag

SEQ ID NO: 181631 - DNA, 199 bp, Homo sapiens
ttgcctgggctggtcttaaactcctgggctcaagaaatcctcctgccttggcctcccgaagtgctgagattacagatgtgagctaccatctccagcctacattgggtttctatgaagacttcacttaaagaattaccttgctttgatctctgatctagttcaatcccatttgccacattttataaaggagacaactagg

SEQ ID NO: 181632 - DNA, 144 bp, Homo sapiens
caatacttaaagacttttctgatgagatcagtggattataacaaatgtgaattttgttatttattaaaaatgtgtaggactaggcaaggtggctcacacttgtaatcccagcactttgggatcactggaggccaggagttcaag

SEQ ID NO: 181633 - DNA, 296 bp, Homo sapiens
ccgtattgtttaagccacctgattcgaggttttctgataacataaattgaataccctcatacacatggcccataggtacttcagcagatcccaagtgaattcattatcatctctcaaaaatgcattcttctttttcaagtactctggtcaatgacaggaccagctccaaaaagctaaaacccccaaatgtccatgttctaatcccttgaatttgtgaatgatacctttatggctttgcagatgtgatgaaatatcttggaatggggagattatcccagattacccaggtgggccct

SEQ ID NO: 181634 - DNA, 359 bp, Homo sapiens
aggtagtctagaggtcccgatcatctgtggaaagatcacagcaggtgatacattaatgatgactattttcagagctcttatatgcaccacacaacacacacaaatatatctctatgtctcacctacacaagtgacccagttccctcagaacccctgttcaccttctgttttcatccaggacaaagccaggctcagcagctgcctgggcccctcgtgggctggatctttgtcacctcacttcagctgatcctattccaggctgactaattagtctggtcaagcaattccacccgagtgtaaaggatgccatttctacccaggccaggaagaggcagtggtgagaagatccacgatgatct

SEQ ID NO: 181635 - DNA, 514 bp, Homo sapiens
caggcgtgctattaggtgagaggctattattatatcctatatacagggaggacaaggaggtctcactaatactctgctagctgagtagacatgaagggaataaggcataacatattttgaggattagcattccaagcaaagtgtaaaactacaaaaatcctaaggtagaagcacagttgatatattcaaagagaaataaggaagacaacatggatagactagggagcatatttgatgctgaggtcagaaagttaaggggtagggatagggataggggctagagaaggtagggccttgcacatcattgaaagaacaggggatttcctttgaaagagatgcaaaaaatcagccgggcatggtggcgggcgcccgtagtcccagctacttgggaggctgaggcaggacaatcgcttgaacctgagaggcggaggttgcagtgagctgagatcgcgccattgcactccagcctgggcaacaagagcgaaactctgtctcagggggaataaaataaaat

SEQ ID NO: 181636 - DNA, 337 bp, Homo sapiens
agactgttttaaaattctagtgcaaatttagaagtacctaagaatccagaattagaagaatggtgatgcaaatattaatgtatacacaactgacacactatcatgcagttattaaaatatggtcatggccaggcacagtgggtcacgcctgtaatcccagcactttgggaggctgaggcaggtggatcacaaggtcaggatctcgaaaccatcctggctaacacggtgaaatcccgtctctactaaaaatacaaaaatcagccgggcatggtggcgggcgcccgtagtcccagctacttgggaggctgaggcaggacaatcgcttgaacctgagagg

SEQ ID NO: 181637 - DNA, 304 bp, Homo sapiens
aaaagaaacaaaaaattgaaacagtacactagaaagtatgtatttaacacaaaagaaggtattaatgaagacataaaggaacaaaaaagacatatagaaaacaaatagcaaaatggcagatgtaactccagtaatcacactaaatgtaaatggattaaataatctaataaagaaggtggaatggggaaaaacatgacctaattatatgctgtctgcaagagacacaatttagattcaaagacacaaataggttgaaagtaaagagatgaacaaagatacaccatgcaaacagtaactaaaaaga

SEQ ID NO: 181638 - DNA, 602 bp, Homo sapiens
agtcctgccaagttatcctaagttttcagtgataacctcaagcttgtttagctctgctaacaaaatacagggtcaaactgttgccaaccccattttaaaacaaggtccaaaatcaagacaaatggaaccaacaaacaaaaacatgtaacttctcattttaacattaggaaaacatcagctcactctatagtaataaagtttttctgctcaaaatttctataaatagcttttcttgtgagtttgtgaaaccctgtaatgagttttagaactatccacagcaaaaataatgtagcattgttttataaaaaactacataaactctaaaggcatatatatgttgtaagatttcttccatcagattctaaactttgattgagctatcaatcagtttttaaactgtgaattcactttaagaattaactttaagaattcagagtttaaaaacctgacatttacccacttatacctactgttccattatctacaactatctgatctttgacaaacctgagaaaaacaagcaatggggaaaggattccctatttaataaatggtgctgggaaaactggctagccatattgtaaaaagctgaaactggatcc

SEQ ID NO: 181639 - DNA, 740 bp, Homo sapiens
attttgtgtgcttgccttgattttgatttttgctaatgaaactgatattctttttgcaattcaggttttagatcagtttctaatcttatttcagagtattccacaaacatgtgtttacagcctggcaacagctatgactgagactaaccgaggaggttatggttactcttctgcctgctccttccctggtttctgtaaatgtttatcttaaccttagactctgcacattagtggttcctgttcatgcttttgagttgacatcagtggattcctcaaaactactaggttggtgcaaaagtaattgcggtttttgcctttgaaagtaattaaaagaaatgtctatatttatcgttaaccttgaatttgcatccaagatttatacttttttcattttcccaatttcttgactgaaatataaaaatctcccaaaatgcagagcaggaattttcacaggaaaacattaagcatgtatttggtcttgtttcttcatcgagtctgttcatctctggcttttaattggtgtgttagactattatatttattataattattaatgtggtatttcagtatttattttctatttctcccatctgttctttgcttcttttcctaccatcttttgaatcaatcgagtattttttagtattccattttatttttaccttaggcttatcaggtatacatttttcttccatttttcagcaattgcttatggcttgccatgtgtacctttacttctt

SEQ ID NO: 181640 - DNA, 142 bp, Homo sapiens
agttaacacataaaattagccatcacattgtccttcagtaatcgcatgtcatttcccctaacaagtgacactaattcagttattatgacaaatggactcaaccagtttctgctattccaataaaccagtcaaggatgagtgg

SEQ ID NO: 181641 - DNA, 573 bp, Homo sapiens
agaaaccccagccttttctgggatttaatggtaatacatatgtaatctagtaccttgttactttcccaggcatttagtctgggaaccctaatcttgagtctgtctacagtggatatttttctccaggacaggaaccaaatgggccagttactggtctaccctgtagctcaccacagacatagcctaggggcctttggcccatcttcactagttggcaactggctttttaggcgaaatgcctccttttgcataaaggagagatgcctgtccccacctgcaccgcccatctcctgctttaaggccagcaagatgtcccgagaggcctccttgtagatgagtgaaatccacacagggaaactcaagtaaaaatatggggtggggtctgggaagagctgtgtttattataaggatccagagggacctggggaatttaggatagggaaccactgtgggtgggataagaaccagagtggctccaggccctagttttttctcctctgtctctctgctttcttttcccactctcttctctccccttccttctccttattcttcttctactcctcttttttt

SEQ ID NO: 181642 - DNA, 351 bp, Homo sapiens
ttgttttatttctggatcatcaaatagaaatatatctacccagaagaagaaacatgttttccaaacaaaatcaagcattatgtgtaaaatcaagcatgaccctgcaggaaggtctggccagcacagtggcagcaccagtcaggctctataattatttacttgtgtgtgaatcctagtgccactttttaccccctcccacagacctgcaatgattaacaaactgtgatgattagaaaataaattacaggtccttccataaattatatctggaaacctgcctagattctttgtataagaaacacaaatttaatttctatcttcatacaagcatagaatttacttgggtgagga

SEQ ID NO: 181643 - DNA, 269 bp, Homo sapiens
atttccagcccttatcaaaataaatgtgcctgtaaagcaaattatacgcatctttacttatgggaagaacgtaaatgctttcaggacatgtattttaggtttagcgaaacctacttatttccgggttttatgggagatcatttttctaaacgtttctttactctaagaaattcattaattcatactaccctgcatatgaatttgttaaattagggcttctgaatacattgtatatgtctctctttttttttaaggaaccttgattaaac

SEQ ID NO: 181644 - DNA, 592 bp, Homo sapiens
gaggtggaagcttaggggtttccaccatcttggaggccttcagataaggtgtggccacccacttgtggatcacaatagggaccctggggagaggggcttggaaaggattaaagcagagttggaaggaggcccagggaagccaggaggcctagctgaggcaggctcaatgcccagtctgagctgtagaggagtagctgagctctgcactttgccagccatatgaccatgggccgatttacccttcctaagtcacaattttctcctctgtaaaacgaggataataatagtatgtatcacatagagttgttgagaaaatgaaacatgataatgtatctaaaagtgcttattgtgcagtctgatacgtgtgaaagatttagtatcatcttcaccgtcatcaccatcattctcatcatggttgcaacaggacttgaattctgaacatgtgacttctgggacctgggaagcaaagctctcaaataaaaatgaggttagctgaagcgtatattcactctgggaagcaggcacttctgagcagtatgacacactgtggccttgtcaagggttccgccatgagaaggaaccaagctgcctc

SEQ ID NO: 181645 - DNA, 209 bp, Homo sapiens
tttgttatcgtaacctgagcagattaaaaccctaggtgaagtctggaagttttgagctaggaggctcaaataacatgagccatttccttcctaggtggaagagaagcaaagatagaggaggaagagaggccctgggggctttcatgcccagcctctaggcaacccagaggctcagcagtgacagccatttgtccttgatgaatttctgt

SEQ ID NO: 181646 - DNA, 245 bp, Homo sapiens
gtagaacggagcttaatggaaagttcctgaataagtggatgagccagtacactgggtaggattttcacctgctacaggtctttaagaagccttgtgggccaggcacggtgtaataccagcactttgggaagcctcggcaggctgatggcttgagcccaggagttcgagcccagcctgggcaacataatgaaacctcatcttacactccatctggggtgacagagtgtaagaccttgtctcaaaaa

SEQ ID NO: 181647 - DNA, 201 bp, Homo sapiens
caataaatgctgaaaatgtgagacaggcctaacgctaaatgtattcaattgtagagaaggccaaactcttagaaaaacaaaattagcaaggtaattcctcaacatatgctgtctattgaaaacaactgctaatcaggatcaagaccagactccttaaaatgctgtcatgatgattatttaatactgttgtggaaaatctga

SEQ ID NO: 181648 - DNA, 512 bp, Homo sapiens
gggtgagctacttccccaagccctggagcggaatgggccatgggactaacttgaggatttagatccaaccagcatgaatacagtagtatctgtttatggagcacgcctgtccctatcaactatgtgttctcattgccatgtattcgacagagaagacaatgatgcggctagggacaaaatcagaacacgaacccagtacttgtcatggccagagtcattcatttttgtagcctgcaggaagagggaacagatgggatgccgccaacctcgactctgagcctggttctgtgtccagaaccatagcctctagaggcaggaggcagggcacgcaccacatctgtcccttcagggctttgggcccatcccgtcagcttctgggcctcactctctggacattgagttggggccgttcattgcctctcatcatgattgttttgaaggcaaaggattgagaggagacggcccctctggtgctgtggtctccatagatgtggtcaggctgggccttccct

SEQ ID NO: 181649 - DNA, 607 bp, Homo sapiens
catttattctggcaccctataattcaagaaaggaagtttaattcctacttggaaatgaaatatagaggagaaatttcaaagcaagccacattatctattgatcataatgggaattacacaaaaccttggtaggttttttaaagaaggtatttttttttctacggaggcaattgtgcactgacaattgaagttaataattttgttttaattttaacaaatgtgaggttggctgagtacctcttattctgagtttggacaaagagaagtataataacctctcacatgtatgctttacagactacttttacataggtattcccatttgatcctcacagcaacgctatgagaaggcaattattattttttccattttagagttaataaaagggaagcacaggttgtgaactctatgaggacagggtcaggtcagtcttattcgcccctctaattccagcacctaatatagcaactggcgtatgataagctctcaggaaccatttgatgcatgagattaattggaaagattttagcattaaatggctttttaatgctaagactttttcttcttcccaaggtcgctccacctgataaaacttttaatggtttt

SEQ ID NO: 181650 - DNA, 309 bp, Homo sapiens
aatgttcgaactagaggatccccttgaccattattattctaattccctctacatctgtgaacatctgtccattttagagttaataaaagggaagcacaggttgtgaactctatgaggacagggtcaggtcagtcttattcgcccctctaattccagcacctaatatagcaactggcgtatgataagctctcaggaaccatttgatgcatgagattaattggaaagattttagcattaaatggctttttaatgctaagactttttcttcttcccaaggtcgctccacctgataaaacttttaatggtttt

SEQ ID NO: 181651 - DNA, 752 bp, Homo sapiens
agaataaaatctcaggtgtgtttttttagtgccacagtcttggatgatgggcttctagatgttgagtcctagaagctctcaacatctcttcttaattggagaaagtgttaagccccaaagtagctggagcagtacatcttcaatttttgacaagaaagcaggaacttggttactttgagtgttattcattagtttctgctttcattgagaatgcagcaaaagccaacgaggctgctgctaactccttgctggacatcttctgccactatcacaggaactgtgatctcactggacaattaactagggagcctttcatcttgaatgactgctgcacaaatgatcttcaaagcattttagccaccagaggaattctcttcaaatacccaaaatccatcagtatcttgaatcatgctggattttgaagaattcttaacaagccatgtaaagggggctctctggccttgaaatagtgatgttttttatacagaaaggagaatgccgaatgttcagactaccatgcactgttaaatttgatttcaagaaattacaggaaaactttccaaagttccgtctcacagaatttatttttacaaagaattccaagataagtttagttttatggaagatttttatgtggtttttactcactcttcatctcagacatcaaccgatgattacatcacttatttagctagtaaatttattaatataaaactcagagacattccaatatccacattgcttacatcatc

SEQ ID NO: 181652 - DNA, 272 bp, Homo sapiens
aattaaagtaatggtgattcagttaaacatagagctggaaaagccattattttgaaatatcttctgagcctcattgaagagagagtgtcttacacaccttgggaaccaagttttgcatattatagtattaccacattgtattcgatcacaagaatggtgtgaatacttggtggttaaacaaattattgatgcttgttagcgcgtgctgtccagtacaatatttagagcacatgttttggacttggatagactttggaatgcttctccgcgat

SEQ ID NO: 181653 - DNA, 205 bp, Homo sapiens
ggtgcgatctcagctcactgcaacctctgcttcctgggttcaagcgattctcccgcagtagcctcctgagtaggcattcaccacaccctgctgttttgttacttgtttgttttttgagatggagtctcgattgatcgcccaggctggagtgcaataatagcaccatctcagctcactgcagcctccgcccccccagggttccaga

SEQ ID NO: 181654 - DNA, 464 bp, Homo sapiens
tacaatgcggtgtttctctgacctgctgagtgtcaaaacaaagtctcatatttagttggcattcaaaaatattatttgaatgaagcatatgactttgacatcaatgcaagggccatgaatagcataacatgagcaacttactggctattctgggagatgttgtaaggctgaacgcaagttccaacaagattcctgctgtcagagtagcatttaacccaacaatagccttcctctttgatgtctgtgttactgtaacccaatttcattccatttttattctccatttcagaaaatcagtcaagtgatacaattcatatatacatttctaatgaaacacttagaattatgaataaattacatagcattaagaatttcacattttcttgtgtagctctgtcagagcatgtgaccatgattaaaggctattttgtttgtttttgatacataaaactgtctctatatgg

SEQ ID NO: 181655 - DNA, 290 bp, Homo sapiens
ttcatctaggctttcacacagggacatgagaatgtgaacaacaagtggaacaaagcattatttggctgaacgttacacttctgtgccttcctcgctgcttttttgcaggcataacctgacttcctcgcctaccacctccccacaactgagcccacatcaaactttctgcttgttatctctgtgaaggagcaaggggtgaagaaacaacctagcaggattgaggaaaatcccatcatgtgcttttctccaacatctttaataggtgagtgacaatgaacttcaaggatggt

SEQ ID NO: 181656 - DNA, 701 bp, Homo sapiens
ggtctctttgaatatttccttataattagattcagggtaagcctttttgcaagaatactacataatactacaagaatactaaggatattgtataacatattcttcctatttgttgcattactttagtcatgtaatgttgctttatcccattattgataatactgtgtttattttattttttatttttatttttcttttgaggcggagtttcactctgtcgcccaggctggagtgcagtggcacggtttcggctcagtgcaacctctgcctcctgggttcaagcgattctcctgcttcagcctccctagtagctgggattacaggcatgcgccaccatgtccagctaatttttgtatttttagtagagacacggtttcgccatgttggctaggctggtcttgaacccctaacctcaggtgatctgcccgccttggcctcccaaagtgctaggattacaggcatgagccactgcacccagccgatactgagtttatttacttggttaagatggtatctgctagatctctctattgacaaggaactcttttccacgtgtaaaaataaataacttggatggtaagttgagaccatgcgaatatgcttttccccagcaatctatcagccattggccttagcattaataatccttgcctaatttatttatttcattgtgtttgtaatttttatttatttatttattt

SEQ ID NO: 181657 - DNA, 350 bp, Homo sapiens
aatgaagggtatatgagaaccctctgtactactcttgcaacttttctctaagtctaaaataagtggaaattaaaagttaaaacaaaaaaaaaggaaaattttatctatcccaagaccacaaagttatttttctgtttcttcctccagaatctttattgtttgttttcacacttagacctatgatccatcttgaatttatatctgtgtatgtagtgggatgaagttcaaaatcatttttttcatacagatatccaagtgcactggcaccgtttgttaaaaacactggccttctcttaagctgcagtcagacttttactgtaaagcatgggcccatatatgtgcaggagtct

SEQ ID NO: 181658 - DNA, 677 bp, Homo sapiens
agcctataagaaaggtaaatctgtctcctgaacttaaggggcctctgctctaaagtaagtttgacattggccaataatcaccctgacattcttgtggctttggctgctcttgaagctgctgaattgcaccaagagaagaggctgagtgagaaagcctggttatagcaatggcccatcctgtcagtgctgggagtgggtactatactcaaagcagtataaatacagatgctgcacattatgctctgctatgctggctgcctttgggatgattgttgggaaagttcttgaagccagtggtgttagaggggacagtgtgcttcttgaaacaaaagagttgatggtgagaatggtctttgaaaactgtactctttacaaaggtgaactctgcaaactgggcctactgaaagaaatagggattctattttcattactgttttatcatcaaaataccataaggcctggcccttagcaaatagtccttaaatatctgataccattagaagcttgcttctatgaagggtgatcacccatcccagtttgcgtgggacagtcttagtttacattattgtccttgcatcctgttcagctggtatatatccaagtctcttaatttttattcaagtattattattaatagttgtacaaaaataagtcagaataagtttggtagacctcta

SEQ ID NO: 181659 - DNA, 157 bp, Homo sapiens
ttctcacggttctggaggtgggaatccaagatcaattaaggcgctggtggattccccgcctggtgggggccccttccagcttcatggaaggtgccttttgctggtggaaggtgggaacgagctcccctgggccttttttttttttttttttgagaca

SEQ ID NO: 181660 - DNA, 363 bp, Homo sapiens
tattccctttccccattagcttgtctttcatctcacacaaactctaccttagatgggcccctgggtgtctcttattcctggctcctgtctttgttcccttgtcttatccactccaccccatcacttcccaccagagttccttgctccatctggaaggcgaaagtggaacctcacaacaggagatgaatttgccttttacagtcttcagtgtgaatcaactataagacagagcgtttgccttttagagtcttcagtgtgaatcaactataagacagagctttctcttgctaatactcacaagtgaggatgggatgaatgctaatactcacagggatgaagaggtacaggagaagagaacatcat

SEQ ID NO: 181661 - DNA, 138 bp, Homo sapiens
ttacaggcgttagccaccacgcccagcctcttactcctcttattttctgcctggatttaaatcagacacctcccctagcaaaaacaaaaaactccactttctcctggaaaccctattccctgtcctcagcaacagaag

SEQ ID NO: 181662 - DNA, 336 bp, Homo sapiens
attatgagaacttgaacttttattgttataaactgaggacatcaatgtatgttattctggattttcaactattttgatgtgagattttataaatgttatgagttatatatgttagcacatgtggaatggtgactgaagaatttgtttgcacaatttagaatgatcttgtccttttaaaataccagtttagtttacttggtataccaggctctcttttgacattaatgtaacttttgagacattaggttagacatagcttagctttaaattctgtccaaaagcaatttatggtatgcctgtattgtattaggtgctagagtaaatgaggttatacta

SEQ ID NO: 181663 - DNA, 187 bp, Homo sapiens
agaatcattccattcacatatctggagagagtggagaaaatgaatgcagtccctttatgatgaggatgtgctccatgaaggagaagatcctggctcgtggaggagcttcctgctctgtgaacatactgaaggcacaattggcccttcaaactctcatttgaagtcactgtgttgccatagagatatt

SEQ ID NO: 181664 - DNA, 549 bp, Homo sapiens
attctctagcctcagcctcctgagtagctgggattacgggcatgtgccaccacatctggctagtttttatatttttagtagagatagggtttcaccatacttgccaagctggtcttgaaatcctgacctcaagtaatccacccgtctcagcctcccaaagcgctaggattacaggcgtgagccaccacgcttggcctattcatgtactttcatatttcttgtattgtcaggtatatattatctgttatctgagggagtcatatcagccgttatctgtccaacgaatatcaagttgcaactgtgcgccgacaacataggcgagcttgccaacatcaacctcggcacaggcctaagggcactaccttccaatagaccctcagaacagccgcttctcaccattctgctgctactaccatggggcagcccacactcatctattccggcagccccctggattagtcagggttctttagagggacagaactaataggatcgataaatatatgaaggggagttgactcacacgatcacaaggcgaagtcccatcat

SEQ ID NO: 181665 - DNA, 382 bp, Homo sapiens
cactctgtcgcccaggctggagtgcagtggcacaatctcagctcactgcaaactccgcctcctgggttcacgccattctccttcctcagcctcccgagtagctgggactacaggcgcccaccaccacgcccggctaattttttgtatttcttagtaaagatagggtttcaccgtgttagccaggatggtctcgatctcccgacctcgtgatccacccaccttggcctcccaaagtgctgggattacaggcgtgagccaccacgcccggccctgtaatataatttttaaagtcaagaaagcactaatttagaaaatatctcagtcaattttcttatgatcagaaataacaataatcagaagagaggtaagatgcgttctacta

SEQ ID NO: 181666 - DNA, 258 bp, Homo sapiens
ttgaacccaggaggcagtgacccaagattacaccactgcactccaacctgggtgacagagcaagactccatctcaaaaaaaagatcggtggtgggagaaactgtccaaaggcccagctcacatggtactgcgtccctgaatctgttcctcatcttgttccctcccagctctcacaggctttgtttgtacatgtcctaccatcttctcttaatttgcctttctagtagagtaacttatatatccttcccccccatcctt

SEQ ID NO: 181667 - DNA, 270 bp, Homo sapiens
cacattacttttgggggttttaaaacttttaatatgtcaatgtgggaaaatacaattaagtcacctgaacatttaaaaatattttcacacagttaatggatgttattaatatttactataagactagatatagtttgtcactagcatcttaacttatttaagcttgttatttcatagggtttaatttgctgaacggtgttcagtttactctggtgaagattcacgctttttaaagtttaccatgacatttcagtatatagaaaaaaattt

SEQ ID NO: 181668 - DNA, 786 bp, Homo sapiens
ataataatgataagcaattcacttggaaaataaaagatttgaggttttcattgaacaagaattctatataaataagccaacaataaaatgtggcagttaaagtaatcacaatggatcttaaccagcagtagccagtaggtaaaataatcataattaatctgaatcagcagaaactgaagcagagagtggaactcacaagaaagagcagctattccatgttcttcactggacatagcatagctgtagtactaggatttatccttgagactacacacagtgaaagataccaggaaactgaggtccactcaaatgagggcaacccaagtaataagggtaatgaaaaccaatttcaaatcacatcttgacatatctgagggtatttaaactggaaaagagaaaatcagggaaaatgatagtgatccctaaacccttataaatcagtaagaaaacaaaaatagacttgctttgtgccatggaaactgcagttctcccacacatctcccagcggggatacacttctttttagtcatttggtaggtgaatcccaactgatgtgttactaaaaacaattaaagactacaagtctgtgattgagactcactggttataaattagagattccagtttactcccataacatcacttttattaattcattctttattgaaagagatcctggtaaatgtatatccactggaatgtcacataaactcagttaagctcaacagagtatttctcatatgtaaacctctttagaaggtagaactagtgtctgggatttacatg

SEQ ID NO: 181669 - DNA, 142 bp, Homo sapiens
tgaattgtcatcttgcaggctgggaaaatggctcaggtggggttgcggaaaacagcctggatcagggagaggttggaggaaagaaggctgaaggaggtgcccgctcaggccccaggctaggctgaggcaagtaagacatttg

SEQ ID NO: 181670 - DNA, 591 bp, Homo sapiens
gtgctctctgaaacatgtgctgtgtccactcagggttgaatggattaagggcggtgcaagatgtgctttgttaaacagatgcttgaaggcagcatgctccttaagagtcattaccactccctaatctcaagcacccagggacacaaacactgcggaaggccgcagggtcctctgcctaggaaaaccagagacctttgttcacttgtttatctgctgaccttccctccactactgtcctgtgaccctgccaaatcacacccaagaatgatcaattaaaaaataaataaataaataaataaaaaacaaaaaaaacaaaactactttcaaaactagcttaatgtgttttaaaaacaactcactgaaaatggaagcctggcgcggtggctcatgtctgtaatcccagcactttcggaggctgaggcgggcaaatcacctggggttaggtgttcaagacccagcctgaccaccatggagaaaccctgcctctactaaaaaaatacaaaaaaattagccgggggtggtggcgcatgcctgtaatcccagctactcggcaggctgaggcaggagaatcgcttgaacccggccggcggg

SEQ ID NO: 181671 - DNA, 288 bp, Homo sapiens
gtctatctctaaaagaacaaactctaggtaatcaaaaagctatattctaccccccaaccaaaaacaaattgcttattttagctaatacctagtcaaacataaatgccagggtagaaaaaataatgtattttctctttccttgctataataatatataccagttgaaaactcctgattttcctcagaccacctaaaaagctttgtccattgcttgtgctcatgtagtagctaaaggaggttatttacaaggcacaaaggagaaatacatagcccgtctatactgcatca

SEQ ID NO: 181672 - DNA, 394 bp, Homo sapiens
aacaatctcgatcgttatgtccagataatgtatttatgtatgtgagtatatactgtcagtttcttgtaatgttactatattggtaattatgtttacagttctatggagatgagtgaataaacatatgagcactgaacaaacatatacaacccatgtacttctgagaagattaagggattttaaaattacttatctagctttgggaggccaaggcgggcggatcacgaagtcaggagatcaagaccatcctggctagcacggtgaaactccaactctactaaaaatacaaaaaattagctgggtgtgctgacgggcacctgtagttccagctactcgggaggctgaggcaggagaatcgcttgaacccgggaggtggaggttgcagtaagctgag

SEQ ID NO: 181673 - DNA, 524 bp, Homo sapiens
cagaatatcccaaggatggaaaaacctccaaggaaaggaaacaagtatctttttgcttattgatgagcttcttataataagggttataagctctgttcactgaaaatacatgtaatactaatgggtttctttccaggacatacaacaaaactccagaatctacaaagatcagcagattatactccttcactgagccttcagaccttgaagtagaagacacaggggaagccctccatccccagatattccgagtctaactagagtacagccaccacaacacctggccaggttgaaacagaggattcctattccgaagaacttaatggggaatatatacctgttggcatgtggtgatgggatgtcacaaaggcatactttttctggttgatttgatgtcactccatctttttagctcacgggggacaaaagcagcaatgaagaaaggcatatggaactctcacagcagtcaattctaagaaaaaaaactgcaattaaattttcctttctcctaacatctagttttt

SEQ ID NO: 181674 - DNA, 496 bp, Homo sapiens
tagttttatacttcctattaagcttttcctgatagtttccttgttgaggcccttcaggcttttgctgatagcctcttaaaggccttgcaatttccacctgccacccagccccaaagccagtagcacagttctgggtttttgttgcagcatctcacttccaggtgccaaaatctgttccttagtcttgctgcctgaaaaatgacccccaaaagttagtgacttaaaataattccgtgatttctgtaggtcaggaatttaggaagagcttgattgggcaattgtggctcaggttcttgctttggctgcagtcagatggtagagctgaagagtagtgcacaggcaaggcagtgtgcacagctggagagggccgagctgagccgcctccacaaggtctctgtgtgaatttgtttgtgctgcttcttcagggcactcagactgcccacatagctttgtgtccaaatgtatgtcctgtgggaggatgagcagaatctgtatt

SEQ ID NO: 181675 - DNA, 257 bp, Homo sapiens
gggtcaggctgctcagctgcctagaggcctgggaatgcctagggggaagcccctgcttccggacacacaatcaattacatataacagtggggccttgtgtgtgtaggcgggacactgggaggggtcggctcacagctcatgttttaatgctttacaaggagagtgtgttcatgcattgcttctgcaacttataatcaatttaaaacattctacatcttgatctaggctggtggttacattgatatttacatattggg

SEQ ID NO: 181676 - DNA, 495 bp, Homo sapiens
aacttaacatctgttcatttttgctattagggtttgaatcaaggaaagagaattcatgagatggttgagaggattcatgagatagatgagcttggtagaataaataggccgtatgtggataaagccagggtgacccacaagtagtagtagaaggagggttaaaaaaagttagatgtatgttgggagaaggtttaatcttgtaagagtcaaggacagtttaaagataggaactagaaaagaagtaggaaactagcataaaaatatgagatgaattgggtcagtataggtgagaatgatgggactgagaagtaatgatacttggtggcaaggtttttgaattattaggcatagaccgaactagaagaagcagaaatttggttcgaaaattgggaagggagagataaatgacaatgcattgatctttaaaaagcttatactaagtcatatgggggtaaggagattcatcagaaaccatcagccttgtttctcctattt

SEQ ID NO: 181677 - DNA, 678 bp, Homo sapiens
aggcctcatacagtacgattccatttatatgaactattcaaaataaacaaatctataaagacagaaagattagtcattgacaggaaatgaacagaagaggaaattggaaggtacaaggcttccccttgggggtgaagaaaatattctggaattagataaggataatggttgtacaatattgtaaatataataaatatcacaaattgtatgttgcaaaatatttaaaatggtgaattttgttgctattttcaaaacatgtgtttccctggaaatcgtatcctaaaacttaatctccaatgcaacagtgttaagaggtggggtctttgggaagtgattaggccatgagggctccacctccatgaatgggattagtacccttacaaagaagcttgagggagcctgcaagctcctgctgccatgtgagtacacatagaagtcaccttctacaaggaactgaatctgctggtgcctcgatcttggacttccaagcctctagaactgtaagaattaaatttctgttgtttctaagttatcccacttaaagtcttctcctatagcaacccagatggactaagacatttgttaagtgaattttacctaaaaaaaaaatttctgtatcagagttgttaaagaatgatgaaactagcactcaatacctgaaataaaagagcaaacctg

SEQ ID NO: 181678 - DNA, 555 bp, Homo sapiens
  misc_feature (446)..(446): n is a, c, g, or t
  misc_feature (529)..(529): n is a, c, g, or t
tatctcgtcctgcactactaagccagaagaggaaatgatccagacaactcagattttaatgtaactgaaataagcacaaacttacacactagggctgatgtattacaatagagtacgatggacaataatactgggtcaaattcatccacttcatgtggacagcttgagtctccgaaagaatgcgacaatacattcaaagaacataaatgctggaatcagttcttgctagcaacacgagccagcaatgttattatgtgaaactgcatccaaaaaaaaaaaaaaaaaaaaaaagaattcagccaggcacagctgctcatctctgtaatgctggttgcttgggaggttgagatgggaaggtcctttgaagccaggagtttgagactagccttggaacatagcaagaccctgtgtctactaaaaaaaaaaaaaattttttttttgattanctgggtgtggtgggatgactgcttgagcccaggagtttgaggttaacagtgagctgtggttgtgccaccacactctaacctgngttgatagagtgagacccgtctgttt

SEQ ID NO: 181679 - DNA, 609 bp, Homo sapiens
  misc_feature (315)..(315): n is a, c, g, or t
  misc_feature (333)..(333): n is a, c, g, or t
  misc_feature (350)..(350): n is a, c, g, or t
  misc_feature (356)..(356): n is a, c, g, or t
  misc_feature (358)..(358): n is a, c, g, or t
  misc_feature (367)..(367): n is a, c, g, or t
  misc_feature (381)..(381): n is a, c, g, or t
  misc_feature (389)..(389): n is a, c, g, or t
  misc_feature (399)..(399): n is a, c, g, or t
  misc_feature (408)..(408): n is a, c, g, or t
  misc_feature (447)..(447): n is a, c, g, or t
  misc_feature (457)..(457): n is a, c, g, or t
  misc_feature (464)..(464): n is a, c, g, or t
  misc_feature (471)..(471): n is a, c, g, or t
  misc_feature (504)..(504): n is a, c, g, or t
  misc_feature (531)..(531): n is a, c, g, or t
  misc_feature (538)..(538): n is a, c, g, or t
  misc_feature (540)..(540): n is a, c, g, or t
tatctcgtcctgcactactaagccagaagaggaaatgatccagacaactcagattttaatgtaactgaaataagcacaaacttacacactagggctgatgtattacaatagagtacgatggacaataatactgggtcaaattcatccacttcatgtggacagcttgagtctccgaaagaatgcgacaatacattcaaagaacataaatgctggaatcagttcttgctagcaacacgagccagcaatgttattatgtgaaactgcatccaaaaaaaaaaaaaaaaaaacccattctagggtggtccacccataaanggaaatgagcaaagtaancaatatgtgggggtacntggtangnaatgagggntgtcccttcgggtnaggagtgnctggtgcaangctgacaanggtgatatgtgattgctagtaagtggaatacaagtgggncacagagaantgggctnctaagtncggcctaaagagaaccttctatgtttggcccgngtgggtaaagatacagctcagatgtanatgctcnangccatggtttaactcagggaatccatagggtggcccatccaaggggtggccgggggaccctcaaaagtc

SEQ ID NO: 181680 - DNA, 228 bp, Homo sapiens
aaccttaacaatggtattatctcagggtgaagataattatccatctccccttgaggtactaaatgttcctcttcacccattacaatttgttaaaaacaaagaattttttttgtaaaaatacaaagaaagaaatggaggcaaatatatgagccattccttaagtttttatgatgaccaatattccaattctatcttcaaaactatcaccaagtaagttgtacgcctgat

SEQ ID NO: 181681 - DNA, 529 bp, Homo sapiens
aagtcatatcatcatgggcatgaattctagttccctcacttattagctatgctaccttgggtcaattaacctctctgagactcagctttctcatctacaggataagaataataatcccttcctcataaggttgttgtgtgaatttaataatatattacttgtaaaacacttattggggtgggaaattaccttgatgcaatggtagcttccacgtacgagtcaggccatcccagagggtcatggaactcagatggctgagttcaaaaggctcagatcaaattgagatgcctgagtcacacagtttattaaatcaatttattttcattttaaataagtttattcaaacaagacatttgacttgaaaggaaaactaggatttttttttaagagtaatgtgtcattactgaaagattgccttacatgtaatagccacgtacaaagagttataaaattgtcttggctaggccggcacggtggctcacgcctgtaatcccagcactttgggaggccaaggcgggtggatcacctg

SEQ ID NO: 181682 - DNA, 409 bp, Homo sapiens
caagaggagttgaggggaggtgctatgcacttttaaacaaccagatcttgtgagaactcatcactatacagtaccaaggaggtatggtgctaaagcattcatgagaacttcgtccccgtgatccagtcacctcccaccatgccccatctccaacactggggattacaattgaacatgagatttgggcggggacacagatccaaaccatatcagcaggcatttcccaaaagaaaaattcaaatggccaataaacatgaaaaggcgctcaccctcattgcaatgagagaaatgaatagtaaaaccacgagagctctacaaactcacaggaattgctacattaaaaagactgacagtggcaataccaagtattggcaaggatatggaacaacaggaattctcacatgctgcc

SEQ ID NO: 181683 - DNA, 686 bp, Homo sapiens
taaatcagctcggtaccgattacgctcctagacgggaggtctggaacggagacatggggagaatggagggtcctagagtcaggctgcctgggttgagtcctggctcccctacttattagctgtgtggcttgaggtgggttacttaacttcttggagcctctgtttcctcttctgtaaaccgaggctcagagagacaaacagacttgtccaggctccccactgtcatgccaactggtctattcagaaggaaacccggctgggcgcggtggctcaagcctgtaatcccagcactttgggaggccgaggcggattgaattcctacaaccagcccatgatgtgagtattatccccatttcacagatgaggcaactgaggctcagttgcccaaggcctccttgctagccagcagcaggtccaggcttcctacctcagtctctgccacgccacagagccccgtttcgccatccccacccacgctattacgcacccactgagggaggcttagctaagagatgtggggtaacaaactgtgctgtgaaccaggaggcccaggggctaaccttacttccagggcacacttgctgtgtgaccttgagcaagtcacagactctctgtaagcttctgttgcctcgatgaagacagggagacggatggcctggtttgccccataataatttatctgtggt

SEQ ID NO: 181684 - DNA, 201 bp, Homo sapiens
tgcaagacttagagggtaaagggaaaggctgggcacagcacattggagctggcatgagaatggagacaaggatgacagggtccaggagtgaaacttgagttgctaggtttccatagttgcatctcttaaataaggcattctgggtctccctctccccacacatatacacacaaatcttttaatgcttctaccaaagttatt

SEQ ID NO: 181685 - DNA, 1280 bp, Homo sapiens
actgtatggcccctggcctggtctcagattggatcataagctccctcattcttgtatccccatgcccaaaactgtgcctggcacttaagggcccataatacatatttttggctttgttgaatagtttaactcattagtgatgcaaagtcccaactgcatatttagagatatttatgtgtgcactacattatggatcgtatgggtgagaaggaggaactcaaggagaataaatcatactttccctccccaaaatgtttataaagccaccaagaagacaggacatagacacatcaaatataaataaaatacaaaaggatgtaccctgacatgccaaatatgtgttcacagcaaacaaagttcctcttgccaaattcctgttgtctaaagcagtttttcctaaaacatattcttcagaataccagtttctcagagtgccaatgtgaggaaaagctttggtggtcagatgagtgcagggctgggttaggctgacttctttaccagagggcttcctgaagacttaaagaaatctgtattgagatataatttgtatagcataaagttcacccactttaagtaaacaactcattggcttttagtatagagttgtgtatccatcaccacaatgtcactgcagaatgtttccatcaccacccaaaacacctcatgctgtttgcagccatttcccatccacttccttcctagcccctgacaaccactaatttaccttctgcctctatagatttgcctattctggacatttcatacagatggactcatttactgtgtgatcttttgcgaccagcttctttcatttaacttaatgttttcaaggttcatccacattgttgcatgtatgcactgatggacatttgggttgtttccactttttggctatcataaataacgtcattataaacattcatgagcaagttgtatttgaccatatgttttcagttctcttgggtctatacagaggagtggaattgctgggtcatatggtaattctacattgagcttttagaggaactcccagactcttttccaaagcaggtgcactattttgcattcccaccagcagtgtacacgagttccagtttccctacattctcaccaacacttattattgtctgtccttttttattatagccatcccagtgggtatgaagtagtacctaattgtgattgtgattttgatttttgtttccctaatgactaattgttttgagcatttttcatgggttcagggcctttgatatgttgattttttcacaaatcttcaa

SEQ ID NO: 181686 - DNA, 1352 bp, Homo sapiens
gagggatcttgcagccgtcagaagctcagatttaagaagtctctgcaggatacggagcaggcagcaggagttgtcagcgcacggaatacagagtggttcccgggtcacgatggggtgtggaggcgggggtggggggagatggtccagagaaagatggtccagagaaagaggggcagatttggagaagtctttggagaggatcactggccaagtggaagaggcggatgaagagctccctgggtgtgctgctgaccaaggcagatctggaggcagagtcaaagcaacagtcggcaatcgggcaatttatgaagacgttgaaggaaggagttgacacacggattcagtcagaaatttcaaagagagtagagtgaaaagaagggtttggtgaaaagattcaggcattcctggtggaggtgacatagtggagcaggacatctaccagaagtcccggggctatggtccatgagcttggccctggcggagtgaggccagtgcagcctggctccgctgcaggagatgccaagacaaggctgccctctctggaacaaaagtgacctcatttctcaggtactgctggggactgccggccaattgccaattttgcctctccttcactcaatgaagaagtgtttgtctttgcaaatacaggaagcgctcttttttgttttctccttgtgttgttgaggctttgctgtccaggagtggtttctggggagggccaccccatccaatgtccccaccttttttgacctttgggtgctttatttgggctggtgagaactctcttttgtcctgggggcagttctgagcttataggccactgaggtcttcatatacaacagggcctattccttttgtgattgggtagtcccaccaactgtaacaccagaatcatcaggaggtagagcccaatcaggagagctgggaatgaatggctcagaaccggtgtttggcacacatgtaggacaagcattcttcatgtgtcttattttgaacagctgtctggattgttgtctcacaggttttggcattatgtgacccccacatccccaattctgtcctgctacaggccgtaagatttcagggggaccattcccagggtggtacctgtggttgatatatgaacttccttgtcccccacaaatctccacagggttcaaacccagtgttgaatgagtctctgtttgaaattagattagaaccaccacttgggaagggcaaagagcagacagcctcaacagtggtggagccaaccatgaacttctcaggagtgacctgtgcttccttcaaggcagtttctgttatgtgtatccttctaagacctgcatttctttcaagactgatcctgtcca

SEQ ID NO: 181687 - DNA, 359 bp, Homo sapiens
ctgaatttcaggacaccctgagccaggctgcctccataggtccaagcacgtttgcaagtattgattttggaaactcctcctagaaacaataagggaaggtcagagaatgaaaaaagatgcgtctgtgaataaaataactgacttaaattaatttcaaatgccaataataataataatttcaaaggccaaagccctgcaagtgaatcacgcagggaggaagatgtggaaactctgcttctgaggttggttcccagcagaggtcatgcaggaaacttggggcataatacaacagggtttaaaaatacactacgaggggaagggtgatgaaatgatcctctcgctcgcagaacggtgctagg

SEQ ID NO: 181688 - DNA, 276 bp, Homo sapiens
tagataccaaggttaaagtagcgaataagatgtgagctcatggggtttacattctaatgaagggagacaataagagaggatgatgcagtaaagcaactaagtggctactttagatcggttggtcatgaaaggcccctgaagaggcaaaattgaagccgagatctgaatgacaagtcaagtcaaccatgcaaagattggggaaagcatttcaggccaaggaacagctagcacaaaggctctaaggtagaaacatgcacaacatgttgaagaatagga

SEQ ID NO: 181689 - DNA, 495 bp, Homo sapiens
gtttgatcttaatttcaaaattcagaacagaagccacatgtggctcaacttgactcaggcttccttccctagtccagtcagctgtggatggggtgtgaattgtgcagtataaatgtggctggccaggactggggataaggggggttgttctaagggaaagacaatagtttcttttgaactaggctgccacaccaaaaggcatacctttttctactatctgttctggtggtttttttgcttttactgtttcttcatgtttctctcaattcctaaagtatcattgcatcctaggtgcggttttgaatgacagtctgttgtttgtcagaaaaccatgattttacttggaatatgatttcatttcggcggaagccctacttgtttatcatgtaggaattaacttttctattaccaaatttagtcactcctcacattcccacatttccgtctttgtaattcaagctgttttcagtaggtgtatattcctgattctctcat

SEQ ID NO: 181690 - DNA, 156 bp, Homo sapiens
tgccaaaaaagtacatttccatttgtgtcaacaagatgtgaattaaagaataaagaaaaatgcagaaaaaattacatgtgttctcaacttaaaccaaaggtgcaacattttagagtatcagagtagtcattgagactgtaaagttcagttgaatct

SEQ ID NO: 181691 - DNA, 377 bp, Homo sapiens
tctgcctcctgggttcaaatgattctcgtgcctcaccctcccaagtaatcctcaactgggattacaagtgcccaccaccacgcccaggtaatttttgtatttttttttttttttttagtagagaggggtttcaccatgtcggccaggctggtctcgaactgctagcctcaagtgatccatccacctcagcctcacaatgtgctgggattacaggtgtgagttaccatacctgccattggaagtctattatctgaagagagtagactagaggatgtgatgggggctggcccagcacaggtgaggacctagatagtttaccagtaacaggggcatgaaatgactataactttcatgaatgctaaatactgagagccaac

SEQ ID NO: 181692 - DNA, 288 bp, Homo sapiens
tcatttgactcacaatctggggcttttagaaccctctcctgaatcattgatgagttaggctccgtgcccagtcacgtaagggctttgaatcctatgtagtattaacccccaggtttaacacaggcaaagtaatacctttgtggcaatgtcaggacaattacagctctcgtttagtaccagtctgcctatttctatggactatccagttttattttggtcactgctctatttataaataaaatagcattttattttagtatattcctaacagttatttgaagttttcat

SEQ ID NO: 181693 - DNA, 296 bp, Homo sapiens
tacacatgtatgttcttttacactgtgtcattgtttgtaaaatatacagtatttatgtacagtttcagagacattcaatattgaaaaccacttcagttagcctcctagtgaatactattaatttttcatggattacatattaccatatgaccccataaatacattttattagttactttggtatcttcaaattggtaagaaaaaaacataaaacaaaaatgttcttattttctgcaatttttttttctagccattccttcctcccaaatagaagtgagggcaattgtagagagagg

SEQ ID NO: 181694 - DNA, 358 bp, Homo sapiens
tcattttcatgtataaggtatacatcgcttttctaaaacaccaacaatgctagattatttttgctttgatttgctttgtttttttcatattcctttgaatgatttagttattacttctctttgtttaatattttttaaagggataactatttatcctaactttctctatactggaaaaacaccccctttccttcccccatttacaggattgtgcaacctttcagttaaacaaaaccaaaattgttcacttgctcagtgttccacccccttgaaataagccacatagctctctatgggtgtggcccagcgtctttggctgccacagttacttgatccccttatctcatgtcacccttgg

SEQ ID NO: 181695 - DNA, 160 bp, Homo sapiens
agtccaaaccaatgtatacgtttcatgtatacattagtatttgtattttacttttactatatatttatggcactatatcttgacttacaattttgttccattgatttatgtctttgcctgcaactcctgtctccctgaaatgtgtaaaaccaaactgtaa

SEQ ID NO: 181696 - DNA, 1074 bp, Homo sapiens
cggaggcttgccctccttccctgcctgccgggtgcgtgtgagcggctgccctgcggatgctgtcctggacctgttggcaccacagacagttgctctgctgtgcctgtggcctcggggcaaagagaaagtggcgatttctacactcagtgctcgggaaccagtgggcactgagaatggtttatggcctgacattacttgcaaccaaagccaggcagcatttggattttcgcttttggaaaccaccttacctggtttgctccatgagggaggggcagcaacatcgctgggaaccctgaggtgtagatatgtataaatgagctgtgtgtgtatctgaagctcgggcacttgtggggttaccaggagtgtgcgtctcactcccaggcctcgttctggaaacgattctgtaggtctgtctgggaggccttaggcaagtttgattaagaacagtcgagctggataaacaggctgttccttgtccagcactagtcatcccaggggggcgggggcggggctgcaactcctgtgcacaaaggaagggccctgggtaggggtcaggagctgccttgcccagagatgtgtctgggtcactttggaaacaggaatcctctccccaaaatgggtagcaatgggggtacagaggccaaagacgcagctgcatgtcctgcagtgcctgggacgccccgtagtgaagagtgatgtggcccaaatgtcagcagtgccagtgtcagactcctgctaagagacagtatcaagaaagataacttcaaaatacactttctggaggcctggcgcggtggctcaggcctgtaatcccagcactctgggaggccaatgcatgtggatcacctgaggtcaggagttcgagaccagcctggccaactgcctgaaaccccatctctactaaaaatacaaaaattagccaggtgtggtggcgcaagcctgtaatcccagctatttgggaggctgaggcaggagaatcgcttgaacccgggaggcagaggttgcagtgagccgagatcgcaccactgcactccagcctggacaacagagtgggactctgtctcaaaaaaaaaa

SEQ ID NO: 181697 - DNA, 222 bp, Homo sapiens
gcccaaggagagatatccagaatatatggctttctgggggctgggtggacaagaatctaggatttggaacaaacagagattaagccacaagcaaaggccaccctaacatcataaattaggagatgttgctattacaaaacaggaatttctgcagaggaactttccggagtttggaaaatataccagaatccgagaaccgtcagacccattatgctccataaa

SEQ ID NO: 181698 - DNA, 758 bp, Homo sapiens
atcatgtcgtggctcgtacaggctgtgtgccatctctttggtccatttgtatctgtattcttagctcttagtatcaggatttgcccggaggtgttgaagctggcaatcatccttccattccaacaagaataaatataatttatcacatatatgtatgaaataaatgtatttaatatgtatagtaaatgttgaaggtttttaaagaagtgatggaatttgtaactaattcatggaatttataacagttcaattcattatatgctattgaagtagcagtctcatttttaatctcagaaactgtttctttcataattcatgttaaattaagaagtcatttgggaatttaaaaagcatctggactttcctccctgccccccttccacaactgtctgtgaataaattgaaagaggaaaatagtgcttacataatcttaaaccttttcttttgacatgtcttggaatatttaatttctattattgtgataatacaagtaaaacaaaattatactacaggatttatagatgtttactttttttgaggaaaatcactcaaaacaataagcttttaaacccaaactcaacaatcattgctttttgttcttagtgatagtgcttgtgctgatacaatatgatcaaaatatttggccagtattaggaaatgtcctagagatgattataatagtaagagccagtcttaattggtaagtgccagatatggtgctaagctctttaattctcatgactaccttaggagatagg

SEQ ID NO: 181699 - DNA, 266 bp, Homo sapiens
tttcccatcttactgtttgttttctattcattctacctcgtttatgtttgtcccttctttcttgctttttaaaaatgaatcatgtgttttgttttattctgcccctatatcatctactgttatcctctcacatccactagtgtttagttgtttctattttattcttttgggggttaaaatagacctcacagtgtgcacctttgacttactgctaagagaaatcattgctttggccacttccctgataattctaagacatcaaacca

SEQ ID NO: 181700 - DNA, 356 bp, Homo sapiens
aattcgaggatggctgctgcacattcctacctgggaattcctacctgggaactcctacgtgggaagcttgttaaagtacagattcctggaccttggcagcacagattctggtttagtgggcaggcctaagaatcaacattttccaaacgcttcccaggtgatgatgatgacaccaaaattggaaccacaccccagactatagttagtacctgcctcaactgaaagagaaaatagtctgggctcggtgaaaccctatccctactaaaaatacaaaaattagccgggcatggtggcaggcgcctgtaatcccagctactcaggaggctgaggcaggagaattgcttgaacccaggagg

SEQ ID NO: 181701 - DNA, 278 bp, Homo sapiens
aattcgaggatggctgctgcacattcctacctgggaattcctacctgggaactcctacgtgggaagcttgttaaagtacagattcctggaccttggcagcacagattctggtttagtgggcaggcctaagaatcaacattttccaaacgcttcccaggtgatgatgatgacaccaaaattggaaccacaccccagactatagttagtacctgcctcaactgaaagagaaaatagtctgggctcggtggctcatgactgggaccccagcactttgggag

SEQ ID NO: 181702 - DNA, 228 bp, Homo sapiens
aattcgaggatggctgctgcacattcctacctgggaattcctacctgggaactcctacgtgggaagcttgttaaagtacagattcctggaccttggcagcacagattctggtttagtgggcaggcctaagaatcaacatttctctaaagaatatacatgaatgtccaacaagtacatgaaaagatgctcaagatcattagtcattaggaaaatgcaacctaataccac

SEQ ID NO: 181703 - DNA, 574 bp, Homo sapiens
tgggatatagtagtcagagcttcccttatcatagcttcatactgtgcattttgcttgcttctcaccttcactaggacctgctctctgtaagggtggaacacaatcctacatttctcactgtcagcgcagtgtctgcatctgtacatgttcactgaatgctgaccaaattttcttgactttagagctaagtatgtgagaattaaatgggattttctttaattgatccagaaactgcttagccggcacttgtattatgtttaacatttgcttccattggaaaaagaaggcaattactgggcatcagtcatgtgtgccttgacaccttttaaatgtttcatttaattatctcaataactctgcaaagtaggtgtattatccccgtttttaccaatgaagtacttgagatttgaaagttatgtaacttgccccaggctggtgaaatgcctgcgccacaactgcaatttatctgatgttaaagttttttgaaatatgacaggctcacgtttgaggactgccttatgtatagttaagagaccacatgttgacttatttggactttgctgtgtctttagaa

SEQ ID NO: 181704 - DNA, 494 bp, Homo sapiens
ccagccaagatgtagatgtagatgtgtgtgtgtatatatatatgtgtgtgtgtgtgtgtgtgtgtatatatatgtatatatattttttaatccaagtgccataagaggtgatttaagtctaattcctactttgttgtaaattgctttgggcagacaatttaagcctagacccaacagtgctattcaggttaggggctgtcagtgtttggtagaaaagggcaaatttaggccaggcatggtggtcatgcctgtaatctaacccttggggaggctgaggtggacagagggcttgagttcacaagttcaagagcagcctgggcaacatagcaagacaccccaccccaacaaaaaaaatttaaaaattagctgggtatggtggtgtgtgcctgtgggcccaactactcaggagactaaggcagaaggatgacttgagcctgggaggcagaggctccagtgagctgaggtcgcactactgcattccagcctggacaaca

SEQ ID NO: 181705 - DNA, 367 bp, Homo sapiens
actctgcatttgtcaaattcgtagaactgtacatcacagagtgactttatataaatttgtaaaactcaaccaggatgtgtatgggagggggcacgtgtcgggcacagggaggaagacagaatgcagactgagatgaatgaagacagcagaactcttacaaatgatttccataaccacactgcaaggggatagaagaagaaaggaaccgacttaagtagctgggaaacattggttcaaccgatcttataagacagaaaccaagaagagtcgtatataaacactgtacttcagctgggaatttttctccctcctcaaaagtatatgggttaggggccaggtgtggtggctcacgtctgtaatcccagca

SEQ ID NO: 181706 - DNA, 480 bp, Homo sapiens
ggaagagcaatggattgaggtccgaacctggaggatctgctatacgcagagctgggaggagggacagagtcagtaccagagtcggaaaaaagcagggtgggaaggggaacctgagtcaggagacttgcctggcaggcgctgccctgccagcagaggcctgacagtggtttccatgaactgcatccctgctgtgggctgggacagggccactgacacagtatcggagcacagagggggaaaggagcaggagggattccaactctgccagttagcagctgtgtggctttgggcatgttacttaacctctctgagcctcatttatttcatccataaaatggaaataaaaataatacttttgtcaaaggcgcattgtgaatatttagatcctcagaataatgcctggcttgtagcaaatggtagctggaggaaaaggaagagaaaaccaaagtcagcagctgaaggattttcatattagaactg

SEQ ID NO: 181707 - DNA, 184 bp, Homo sapiens
ttgagagtatctattcgtagatttcattaatgtttaccactaaggatgtctcattctttctgcaattctaagtaaagcttgcatacaggataatcttcaaagaagtagaatgactgggtcagagttgtaatgagaagactgtaacctccacgatggcaggggtgtccccaaaatctagagccca

SEQ ID NO: 181708 - DNA, 398 bp, Homo sapiens
tggccaagggcattcctttctaaggaatccttagcaaataaactggtcctctacagaagaaagcataaaaaagggacacttggaagaaattcaaaagaaaagaacctgctgagcagtcaaattccagaaggccattactggtgcatctcttgctaatatagtggccaagaggaatgagaaacatgaagttaaaaaggctcaatgaaaacaagctagcagggctgctaaggaagcaaaaaaggctaagctagcatctgaaaagaccgcaatggctgctgctaaggcagcatctacacaaaagatggtgaagcctgtgaaagtgtcagctccccgaggtggttcaaaacaccaagttggcagatcagattcttaaagattggactgtagaaaaatataaa

SEQ ID NO: 181709 - DNA, 332 bp, Homo sapiens
aacaagtatctattgagtgaatgaatcaatgaatgaaaaatatactatttaatggaatgcaattcaaaaaatgtttatctattacccactgcatggttggcactgagctgagctccaggaaatctaataaatgaacaatcttgtgcgggtgttgcccgaggcattaacctcagtccccttctcagatcttcactctctctgggcaagcacattcttcacagtggctttaatcaccacctttgtatgtaaggatacaaaaacctgatctctgatcacaaagacacttctccctagataatagccactttactaacccagaatcagaccaatag

SEQ ID NO: 181710 - DNA, 193 bp, Homo sapiens
atcgcgccactgcactccagcctgggcgagagagtgagactcggtctcaaaacaaaccaacaaaaaaggacatggaagtgcagaagggccccccgctggctggatccggggtggtgtgtgaagagaatgctatctcctcgtctccacctccccggcccccactcttaccacggcccccctgcacagccttccc

SEQ ID NO: 181711 - DNA, 351 bp, Homo sapiens
gtagcacatgccattctcctgcctcagcctcccaagtagcggggactacaggcgcccaccaccatgtccggctaattttttgtatttttagtagagacggggtttcaccgtgttagccaggatggtcttgatctcctgacctcatgatctgcccacctcggcctcccaacgtgctgggcaaactccaagttttaaaagtcctgaagaaaacaacatcaatgcacatcataatcaaatttcttgaagcaagtgataaagacaaaatcttgaaagtgaccagagataaaagcacattacatagataggaccaaagataagaatgacagccaacttttaggcaatacaaaccag

SEQ ID NO: 181712 - DNA, 221 bp, Homo sapiens
ctgctggataagagtcactgtgagtcagaaacttggattcgagctggctctggcactcacaggctatgagaccaactcatatcccatatcccagcatttctctgaggctgttttctcatctgtaaagtgaggaagttgcattcccatcattttcacaaatgaccccaagttgaacaatgcccggtgttaagggcatcagtgggactcacaacatctccctg

SEQ ID NO: 181713 - DNA, 119 bp, Homo sapiens
atacccggaccgtaaaatgtcacaggcggactgtgtaggaagaacacctgaattctggggaaaagcatcattcatcacttttttgctttaaatactcagaaatattttttctatcatct

SEQ ID NO: 181714 - DNA, 565 bp, Homo sapiens
tgaggatgagtcttgctctgttgcccaggcttgagtgcagtagcttgatcacagctcactgcagcctctatttcccaggatcaaataatactcccacctcagcctcccaagtagctgggactatagctgtgtgtcactacacctggctatattttgtattttttgtagagatggggttttgccatcctgctcaagctgctcttgaattcctagattcaagcaatccacttacctcagcctcccaaagtgctgggattatatgtgggaaccacatatgtccgaccccctctgattttctgcctcatctgcaactagggacagtttaaaaaattattttccaatctacgtgccttgtttccttttcacaaataggatattgacattgatgaagttaagatacataactttctgattaccacaggatcctttactttatcctttcgtagtcacacctcactccaatatgtggctacaatttctagtggtatgttaaatacagttgacatccttgatcttagaagtaaacattcagttttttactcttaagtttagcattaataaaaga

SEQ ID NO: 181715 - DNA, 726 bp, Homo sapiens
gaagcaaaatgaagcctaagtaatactgggcaaggacataggagatgaagctctagtaccaactctgatacttactgtgaaacttaaagcaagtctttatcggcctcgattttctccactacaaaatgggaacgatgataccttcacattcttttccaaagacagtaagaattagatcaactgagaccatgaaagtgaaggtacgttatgacatcaaccaaaaaaatactgtgcctaaataagagctagttaatcataggcagtgttcctccctttgggctgttcttctgggtacagaagagaaaaagcttccctctccagcttcctgtaatgtttgctccaaaccctagctccctcatggccactggcaaccatactattgctgatcactttccaggaaatcgagaggagttagggcactcctattagatttgcttcaagacgctggagagcagacaaagggaaccattctgtcaccctgtattctcttccccttccttcctaggtacaaagagaagggattttccacttgcaggctctgggcaggctgagtgaatttgggaagttgtttctcttcactgagcctctattccccattatgtataatgaaaaggtgaaacagaatggtatttaagtttaggggtggccacgaaatttactgtcaaaacagggacacttttaagaatgaaaatatgaggccaggagcggtggctcacacctgtaatc

SEQ ID NO: 181716 - DNA, 377 bp, Homo sapiens
taatcgagctggtccgatttgctcctagacggggtttcaccatgttgaccagactggtcttgaactcttgacctcaggtgatccacctgcctcggcctcccaaagtgctgggattacaggcgtgagccaccgcgcccggccataggcaagtcctttatctccattagccttcagggggtggggaggattagactttattttcctccattttactgatgaggaaacagagactaagagatatgaaatggcttacacaagagtttcctgctcaagggtgtggtatgagacagcttctaaatcttggtcaagatgacagaaaaagaagaaactcacttctgagcaagcctcaggcatgagtttggcactaaaatcgtctg

SEQ ID NO: 181717 - DNA, 426 bp, Homo sapiens
agtgtgatgttcacaaaacaatgaaatggcctaacgacacatttctcagaacatatccatattgttataccatgcatgactgcatatgaaatgcttcatacaaagcttggcattcataattttaataagttgttggccaggtgcggtgccatgcctgtaattccaactctttgggaggccaagttgggaggactgcttgaggccaggagctcgagaccatcctgggcaacacagtgagacctgtctctacaaaaaattatctgggcatggcagtgcatgtagctgggcaaggtggtacatgcctgtagtcaaagctacttgggaggctggggcgggaggattgcttgagttcaagagttcgaggctgcagtgagctaactatgccactgcacttcagactaggtaacagagtgaggccctgtcacc

SEQ ID NO: 181718 - DNA, 581 bp, Homo sapiens
tgattagataaatatataaatttcattgaagcactacaggatttttcctccctttaatgtgtaaagtatttttttgtgcattaaataagaacaaaactatgctcaaaaagcaaaataggcccatttaacttttacaaaatttactgctgatgtttagcagataaactagtttgattctgctttggttagaagtgttcaaaatttaaaaattttttgtaggataactattaggttcatagaataatttcaggttcttttgatcttcttgtgttattaatcctaataaaacattatttgaaagtacatagacaatgtctagagtttatcttttgaaaaaattattgtgatttttttttttttgagacagagttttgctcttgttgcccaggctggagtgcaatggctccatctcagctcactgcaacttctgcctctcgggttgaagcgattctcctgcctcagcctccagagtagctgggattacaggcatgtgccaccacacccaactaattttgtatttttaatagagacagggttttgccatgttggtctggctggtctcgagctcctgacctcaggtg

SEQ ID NO: 181719 - DNA, 432 bp, Homo sapiens
gaaatggggcataaataacagaaaatagcttgcctctgtatcgccccgggaaatattggaaaatgccatgctaagcccaataacagcagggagtatgccacttttgtctaatactggacatgctgtgctggcacatagtaggttattgagtttaatatttcggtgaatgaaggtcttgccaaattctttgagcaatggattttgcatttacactagctggagaaagggagttacattcagagcagcccaactgtgtatttttagtggaagaagaaggctctttcttaggtaagaatataaaaagaatcgtagatatagaggtggaagggacaaaagaagaagcaatagcatggtctccatactaatcccactttaaaggtgagggcgtggagaaaccatagctggacagttagcaacggaagacagctatga

SEQ ID NO: 181720 - DNA, 194 bp, Homo sapiens
cattacacagcataactattgcgcaatatgactgaaagatagtcatgtcttgaatctcaaatcttcagaatgataaaccacaaaactctactttgacacctaatgtatacagatgaatgtctgtctacttcctactggaatcgtgatagttgaattaagatttttttttttttcactcaaaatagtttatgcgg

SEQ ID NO: 181721 - DNA, 202 bp, Homo sapiens
attcacccacatccatccccaggcctgaatgtaagggctcaaacagacctgcaaatacactcggcacctgcgagtgggcagctgctgtgcagaccaccccatcccattttctggtccgttaaactcatgcataatggtcgtagcaatggccaagttgtcattgctgggcagaaagttccgtttaagacaggaataataaggc

SEQ ID NO: 181722 - DNA, 1113 bp, Homo sapiens
cacttgattttccacatccctttagcaattatgtatagtttgcacttcattaacctacccttatttatgttacttctcacatacacccatatctcttctgtattttcaatcaaaagataatgcctcaaatgttatatatattgtatgtgccactcaacagtgcctcatatgctgcaaaaaaaaaagacagtaaacaatcggggtacctttttgtcttttaagccatattttctgggtcagtgtggtctttcaagggagtttagacaggctctattttttgttacttcactcctatagtatgtgactgtaaattgttccttcagtgttcaatttaagtacaaactaaagagaaacagtttcctaaagaaaaacattttaaagttacagagacacctatgtgttcgtaacatttctccagaaatatttgaagtaacgtaaaacttctggactggtcagtttaaatattttcttggaatttctatagaaatttctgtggaatggtgttatattggaaatattaattaactataagaagactcctacttcttcacagagaacaagcagggatatcctggattttcacagtatttaggccactccttagttgtctcatgaaggaattaaggtagtggaacacattcaagaattgcttaggtgtcaaaataagacaaagtgtaacagtttttttctgtagtagatttttaaaatagttaaaagactctgccctctttatctatactgtattctggcaataataaagttgggcagcctatacataaaagcaatttctaacaatgccaaattaacagcagtttcttggccctttcctttccctccatgaaagttacaatattaggttatttcacaggtttcctccatgccccccatacccaacctaaaactgtgttaggctgtcaaagaaaacaaatcaggtaagattagtgtttgcctttacgcagtcattctaagtacacataaaatcatacataatatgaaaatacagcaggaagagaaacatcaaaccatagaactgagttttagttttactgacatttatatggcatacttcctgtttttgatttcagaagtgcaaccatgcagtgcttctatgaa

SEQ ID NO: 181723 - DNA, 653 bp, Homo sapiens
ttctttgcctgactcctcttcttctgcctttcaaatgccccttggaggtttccttctggggaggccatctctgaatgccccttagcctgagctgaactggacatttcccagcagcatagtgtaactccccatcctctctctcctcgggtctttcccatgctgtgaacttcaggcctaacagtggtgggaccagggatccattggtgaagtggatggacagatgggtggatgcatgaagccgaaaatgcagtaggagagtgaggcttagagagggacgggagccttatggggtcacagagcagggcaggggctccaaccctgggctccagactccctgtccagtgactcaccaggctcacctccctctctctggagcccccactctgaattcttagcaaaccagatccaaaagggctctcagccgagggaggggagccgggggcttcctggaggagcatctgggatcatgtccacctcacctgagatgccaggccccaccctggggagctggtggtaatttctcctggcgctccaagccccgctcacagggtccagcaatgcggccagctggcaagtcacactcggcttgttggggatggggaccatgtcctaggccagggcttggagggtgggggtgaggggcaccatttaca

SEQ ID NO: 181724 - DNA, 536 bp, Homo sapiens
gtctggccaaaactcctggttatcccggaggtgggacagcattgtctcatctcataccggctctgccagacacaagctcttggtattgtggagacgactctcatgacaactttgtggctggctaaccagagctgtagctttgcaatgacttaagagcagttttttgtgctcttccgaatggggttccacccccaaatccacaaattcttgcgagatgcagtgaggtaccggctcgaactggagcaggccaccgccaggccgagaagttctttcttagtgtccattatgtgattcctaattattcattgagtgatacagtgaatattctacaaatttaaaagttctgtgagtttaaatacaacctaatgcatttgttctgggagtgatcaaagcccatgattttcactgtctttttttttttttttttgagacagagtcttgctctgctgcccaggctagagtgcagtggtgccatctcggctcactgcaaccttcgtctcccaggttcaagcgattcttctgcctcagcctcccaa

SEQ ID NO: 181725 - DNA, 346 bp, Homo sapiens
aaactgggggaacaaagaaagagggctgtatgtctgtttatgccccgtaattatgtataaaaggggttatatatataatcacagaaaaatgactagaacacagaaaaatgttaatagaggtaagatatggagtctgagtttacatgagacttaggttcatttttgtgtatttctaaactctacaatgaacatacattgtatctccctcatcccaaaaagtcacgtcaaaagttatgttttttaaggaaactactgaagtagtagtttctattccagagtaaccagcttaaatctattgtgaaattaaacaggatctaaataaacaaaatatgaaaaaacttctacg

SEQ ID NO: 181726 - DNA, 815 bp, Homo sapiens
cggctaatttttttgtatgtttagtagagacggggtttcaccgttttagccgggatggtctcgatctcctgacctcgtgatccgcccgcctcggcctcccaaagtgctgggattacaggcgtgagccaccgcgcccggcccacctgactattttttattgtttttttttttttttggtggagacaggtctcattttgtttcccaggctggtctcaaaaactcctggaagattttaatttttaggaatgtctttctaataacagtatggaaatggtgtagaggaaatgagattggaagtaggagattaataaaggagatattaaaatccaagaaagaataacgacctggcttggacaaaggtaatgctatgagattagagattaggaggtaaaattaggagcatctcaggatggatgtgataaggtggacaagaacacagatttggcatgattgctggtttctagcttctgggatagggatagatattggggaatgaatgaagggagcagattatagtttgagggtgggaaaaagaatattttaaacatcttggaggtattcaaggaacattcaagtataagatgttttattaagtatctgagtactatttgaaaatcattaggtttgggcatatagggatgaacaaaacatgtcccctgccctcttagatattatagatcattgagggaagaaacaaagtaaatggcacttttcacagtaaggatcgatgaaggaaaagaagagcgtggatgagaagatggcaagggaaccaaaattagaacatggaatttgggggatgctgccagggaagctta

SEQ ID NO: 181727 - DNA, 870 bp, Homo sapiens
atggtaataataataattgtcatttgttgctcacttgcagcctcagcacagttagaagaaaccttaggcaagttactgaactttatgctttacctgcaaaatatgcatagtaatacctaccgtacatagtcattataggaaatacaagataatgtacataatgtgcttagcataatgcctgccacatagtactcaagaaattgtagcatttattttactgtatcatgcaggctggctgagggtgttactagaagacatcactagaatgagatcccttttttctcctacagctttatgttactcccacaggtcttttttatttttatttttttaaacttattttattttattttttgtgactccagaaatatgcttatccatcccacgggtctttggcatgcttttgccttcaagtttatcatttctaagcaggtgcatgtctctggccatatgtagagtacttctctacctctgtaatcagcaggcctgttgtttttgaatgaacaatgcaccttttggctgtatttcattgcagattccatctcttcaaactgaagtgatgttcttaactacagtgctgtctccaattaattcagatggggttgggaagaggaatggaaagcacaagcatgtgaagtaacttttctatttaaagggttcttcccttcaggttttgagtaaacaactatttgaatagaaataaactattttgacagatgccagctccaaagataattggttacaaaagacattttctgggatgatgcatcataagatatgaaagcacttaggaatgtgatgcggtttggctgtgtgtctccattcaaatctcatctcgaattgtaatccccatgtatcaagagagggacc

SEQ ID NO: 181728 - DNA, 302 bp, Homo sapiens
attatttgatatggatgagttaagactgacaatgaatgaacatttatgtgaattattaatagtcattaaaaataactcatctcattgagaggaggacatgtcatatatgtttgcccaaaaaatgattctaattttttgaagtattttcatatatatttctcagaagacattcacatatttgattattgttaaacaattccaataaagaggtaggatgagtgtaaatattcttatcatttcacagctgagcaaactaatgttcagaaaagttaattgaatctactcagcttgtttagctagta

SEQ ID NO: 181729 - DNA, 175 bp, Homo sapiens
aatgttataaaattaaaactgtacattttaaatgggtgaattttatggtatgtgaaatatatctcaataaagtcattaaaaaaagagttgcaagatacagtagggagtaaatataaaggagagagagcattgctggaattatatttatggtatatctctacaactcctttttttt

SEQ ID NO: 181730 - DNA, 742 bp, Homo sapiens
gggcagccccatgcggccaccaggctagtgtacatctgtccctggctctagctggcctggaggtggccccaccccaagggagagagtagtatacagccagtgggcctgtgtgaacttgctcccagcttgaatagctggcccagaggttgtctgcctgtaccactggaggattgtgcacagctgccgggccacaatttcctgcctttagtccaatagctggtttggaggcactctttccgcagctcaaccctacatcaccagagtcatgcacagcctccagacctgtgtgcatccacccctggcctgatagccagcccagcagtaaccctgctgccattcaggagagacagtcgtacaacctttctggcctgctgcatcagcatgtgcctgaccagcaaccagcttggtgccaactccagaaaaaccatgccaccacagtcatgggcttctgcatactaagtcactgagataatcacggacatcgcaggtgaggattccagctgaataatctgtttggacaccacaatactgagtccaccctgaaccaaagccaccacacgccatttccaatcagcaccctaggacccatcaacaggaaaaaacctcttcctatgaaagctgctcgttaaaattggaaaaagcaattgtccattacatgcacaggtaccaacatagagacagaagaatcatgaaaaagcaaggaaacgtgtcacccccaaacctggcaccacaatgcatcttt

SEQ ID NO: 181731 - DNA, 197 bp, Homo sapiens
ccaagcaataccacttctgggaatctacagaaattctaccagaagaccacaaagatacataagccctgagcactgaagcactgtctgatgtgaaaacctgaaaatatcctttgtgtttcccataagcaaacattgatgcatttatgccgtgaaaagggctgttagagcaaggccgatctgagggatgaatattgacg

SEQ ID NO: 181732 - DNA, 365 bp, Homo sapiens
tataacataacttggttccagatcttacgcttttaacttcttggttattttgcatccctcattagtcagatacagacattcaaaagcgaagcacatctgaaaaatctaggaccataatctttataaattaaaaaagctaagagcatacatatccacagaatttaccacttgtgggtgtttagctgtttggcttcaaacacacagaaatctcaaccacattttcccaccacctaccacacaaatcccttttcccccacttaccagtagaaacttttggtgaggtctctggacaaaagtccaaaaaggcaaagcctactcaattgctcatcggtagctgagctgaagaggaaccaagttatgttata

SEQ ID NO: 181733 - DNA, 491 bp, Homo sapiens
gacgaagggcgactcctaggctgacagtggccggggccctcaaggagacggcagcgtgactcgggatggaagcagactgccgccggacagaggcagcgacacaggcaccgaggccacacggaggcagagcagaggggacgccctcctcttgacagggggcccctgcgtgtccccgcaatgctcacacgccactctccactggcccgggtcccgagatccccgctttagcctctcaggcacagaagggacctcgttgcaggcctggctccctcgtgcgtgaagacgaggcctgacctgccaccatgcgcccaggtcagcatcaggagccggagcaggaccccgggcctctccagggtccacgcaagggcagggacttgccgcggttctgccgtgcgtcttggggacaccctcagcacctcatcgtgagacgcccacttctccaaatgggccttctgtggaacactcggccaccggccactgcaggtggatat

SEQ ID NO: 181734 - DNA, 442 bp, Homo sapiens
cattggtccgagagaaattagacatggtggacaagtgaccaaaaaggcctacgtgtttactgaacacttaagaacacacattatgtctttaggatctagcctattctataatgtgtagtacagtcttaattaaataaatcaccaaaatgaaccgatcactttacacactgccaggaacaatcagattcaagtggagaaagaagacttaaggtctacaatccgaagactccagtatctgtgaacccaaactgttatttttaaagacttgtatatcttagatattatagattttacttagctttgtttagagtccactaattacacatctagatgtaaattccaaatgtgtacaaccttctcagcaactctccatatagaaatctgtatggttttaatctactggttaaaagaaaatgctaatttctctcgaccaatgggcaga

SEQ ID NO: 181735 - DNA, 517 bp, Homo sapiens
catggcttgctcaacagtagatctactgaatgtatacaaatactaaacagtattataagagctaaaaacttaatatattcactcttggttcatcagaagctgagagatagcatttagcaccacaaatagtatcactgatactaacagaaattagctacttattcagtttacaagttccctaatgattatcaatgtattaggaaagtaactggaacagtctgatgcagttccacctatcagaaagataatggctcagacacgggtctcatttagttagtaatagccacatcaacaacaaatcacgaaaacaattttgaaaaaccaacaaatgatttagaaaatatggcctggcacggtggctcatgcctgtaaccccaacactttgggaggccgaggcaggcagatcacctgaggtcaggagttcgagagcagcctgcccaatgtggtgaaaccctgtctctactaaaaatgcaaaaatcagctgggcgtggtggtgggcacctgtaatcccagctac

SEQ ID NO: 181736 - DNA, 212 bp, Homo sapiens
tacttggaaacggcacctagctggccttgacttctgctacctaaggttatgctgggggagtctgacggaatgctatttctgtggctttgtagaccacttcatttattcatttgttaattaattcattcactcatttatttattttaccctaaaataatcacatgaaaaacgttttgtgtgtatgtgtttgcttgtgtgcacaactgcttatg

SEQ ID NO: 181737 - DNA, 500 bp, Homo sapiens
gttttctgtgagtgaatattacttgcatcgttaatgtaaatcaaaggcatcaaagtattttactctttttgaaaaaaatttagaggagaaatttattatattaatattctacccatatatgagtttaatttgtaaattgtagcaaagcatgatgtgctttactaaattcctttataattagaataagcttttataagggtgaaattatgtctttgctacagcactaaaccaaaatggcaaaattgttttagtcggtaagctttgcttttttaaaatatgaaataaacaggtttttaaaatgttattttaatagtcttctctgttataaacaaagaaaattggtgtttctctagagcttattaaaagtagtgattattgtcctaaaagaggagtagcagttttagatgctaatgcttttccctgactgagttctatttgccatttagttataactgcctagtgcaaaaattctaataaaatgtaatgatgaggatcctgtc

SEQ ID NO: 181738 - DNA, 351 bp, Homo sapiens
actcatgtttgtaacacttgctattataaccccttttttaaaaaaaaacaaacaaactccagtttcatcccatggagtttacattccagtttctctcctgcaaatacactttatttaaccagaggtattactaaagaagtaaggtacttctttttttctgaaattcctaaaagaatcagtgtaagcctaacagccttcagattgtatttcacatatccatgatcaggagagtcctaaaattgtcatgggaatatggtagttgcaaaaaaaaaagacaatttaaataattatttttcatctaaatcaaataatacaaggtcctttcctagattgttgttttctcctttcaat

SEQ ID NO: 181739 - DNA, 460 bp, Homo sapiens
agacaaacccatggctcatcctttctattgtgttaatacagtaaataacatccatcgattttcaaacttaaaccaacgaaatccacttggtcatgatgtattaccctttttatacactgctggattccaactgctaaaatcttgctaagaatttaacattggccaggcacatggttttaaacaatttgattacagtaagccttggtgtagttttcatgtttcctatgctcaaatgttgttaaatttcttgaatctgtgggtttacagttttcattaaatttggaaaattttaagccatttttcaaagaagtatgaggatatttagtctggtttttattggatatgtttgcttagagagtctctgtaatttacctgttgattttctttcttttcctcacccccgagcctaggttgctgcctcctttccagcactaaatggcaccataagcccaggtttgcc

SEQ ID NO: 181740 - DNA, 291 bp, Homo sapiens
tggcaggggttagctcaaaggagtgggggcttcccaaggcaggaactggaaatttttcagagaaggaagaggccggagccccagcaccaggtgtgccttgctgcctccagctgtttggtggctgttttttcccctccaccagcccagagcacgttgttcccatgactctgcccaggagtcaccctctgtcttctcccaattttccagacccagaatccaggctgggggatgcacagggacaacaacaagggcagtgacaaggcaggcaccctgcaggcccctggctcccca

SEQ ID NO: 181741 - DNA, 442 bp, Homo sapiens
cagcaaacaaatgaaaaaaatgctgtgtctgtatcccctatttagatggatctaggcactgatcatcaatagtgactaatagctcaagaagagacaagtacacattatgtgccacctgatggaataccaccacctataaatactgtccccatccaacaaaacaactatctgaatctgattacgtctgtggatctgaaacaaatttataggaaacataaaggccacagaaattcgttaaatgatatgaaagggatgcaactgcagtatctgggaaactacatggcaaaaaagttattttcttcatacattgcaatgaaaaaattagtaagagtcggactcttcattaatatatgaacttccattggatcttgactcaaactgtttacaaaaactaaatatttgaatatcaggaaattataaattttttgatgtgataatggta

SEQ ID NO: 181742 - DNA, 433 bp, Homo sapiens
tcccagagtcctggagaagcccagcgcccgggcgagtatctctgttctacaggctgggactctgatgctcagagagttaaacccaccgtccagggccaatgatggggcaggggccgttcctaagagcaagaaagaggacccggggtggagaaaccgagaggaacgaggagctccccataggagcaggaacagccaagtaaagatgggtctgcagctcagaagaagcgtgggactgggcaaaggaacaggacaaaaccttcaggaatggcccgaggccacttcagcagctgcaggatggagagggagatgtaccgtggacgcgtctgtgaccacctgcgcacgcaggttccgcgaccccgacccgttcgtccgaatgagtcagaatccggagcaccacggcggacgtaagagagatggcatccttggcaagttg

SEQ ID NO: 181743 - DNA, 357 bp, Homo sapiens
tagtgtgtatagcaacatgccttttaatttgctgggggagtgccatttgcccattggagctctggccctattatttaacagtgaggaggacagatagctgcagggcacacctgcagagcctgcccccagcagcagcttgtgtgtcttgcagacacacaccctcctcctgccacgagatggcactcttcttctccagtgcgatggcgcgctctttgctggtgtgaagagcaccgtgtttcttgcaccgtcatcatcagggatgcccccgccgggatcattgagccctgcaggagctagtggggagaggtttacaaggggaaggtggtgggcgaggtcatccaacatggctgaccatgc

SEQ ID NO: 181744 - DNA, 282 bp, Homo sapiens
tagttttctgaggaacccccattatggctgtactaatttacattcttaccaacagtgtacaagggttcccttttctcacatcctcaccaacacttatcttttgtctttttttattatatccattcttacaggtgtcaggtgacactttgtggtgcagaagatttttattttgatgtaatcccatttgtctatttttgattttgttgtttgtgatttgacttttggggtcaaatttagaaaaaaaaaaacaacattgcccagaccaatgttatatagttttaa

SEQ ID NO: 181745 - DNA, 198 bp, Homo sapiens
accctgtctcaaaaataaagtgataatgatattggggttgcaaatgtttagaattattatgttttagggctctctctgagatctgaatgggcaggatgatggagcctgagattggcttcacattaatccagtgaggagggtgaagaggggagcagatgagccgggtacccgtacctcacgaatcccacgtacagggat

SEQ ID NO: 181746 - DNA, 490 bp, Homo sapiens
ggaaaacagagctgggcaagcagagggagagaggggaggacagagggaagggaaagagtgatagaaaaggaagggaagaagaaaggaaatgtggagggggatggaaaggagagactaaaatcaggagacacaaaaaaccatttatcttcatggaaagtagctcattgcataattttttagtggaaagtctttaagtgccataatcatttaaaatatctgataagaataggttaagttagagttttgtgatttaggaggaaaggtagtcctaataaaagctaccatttattgtgtgcttactgtgtgtcaggaaagggcagtgtccttacatgtctcatctcactggggaggcaggacaagacagtgatggctgagagggtggactgaatttgaagcccagctccatcacttactacctgtgattttcagaatgtgttttttttttttttatgtgtcctgaaactctaaacccaagtgtcccaatctcaaa

SEQ ID NO: 181747 - DNA, 519 bp, Homo sapiens
ggttttgggacattgtgccttaagtcctgccattgtttttgatagctgatgacaaatgtttcttagatttacatagactaactaggaaaaggactatttctgtctcttttaaatgggtagtgctgtttttattgacattttgaaatgagttttattttgaagtactgaaaatcaggactttggtaggcggataattacattggccattttgtgttttggtaacttagatggtaaaacagttgaaaaatgtgtacaacttttaattatgccaaaaaaattagtgcaaaagactattgaaaaaaagttttatattgccttgtagtctgggttgttgcagatgaatcttggctttttggcaaggagctgttaaccttttctattagtgcagaataagttgtatactgaaaagcagtgtttttcagtagggcaattaagttcaaacggcatttattccagagatgcagcaagagctgggacagccataaagcttgtgagccttcctttctgtggaaggaatgc

SEQ ID NO: 181748 - DNA, 564 bp, Homo sapiens
cggcctaacggctaggtccttgggacactcccttctgattttttccccctacagaggtgaggttgagcagccttgaatctgagggaaatgcccattgtcactcccaaatccatggtacaaagcctcggaagcccggcggggttgcccaccagttgcgaaagccccctttcctcagggagcacgcgggacctcggaggagaaagctaacagaaaattcgttacctgaggtcctgcctgcagtttcaaatagcttccagcagttttacaaaacacatcctttccatttcttccttttaaatgtttccctaagaacgatccatttaggtgctataagtcctcagccagggagtctctgggacactggcattcaaaattttaaacttccgccccaaaaccaggaacattccaagacagaactcttttagggggccatttcctgggggtgggggagagggcttggaatcaatgctagattgaaaacgttgtaatagctttgccccagacttaacaccggttgggcaggaggagggtaatttttatttagccgtttctccgatcatgtgg

SEQ ID NO: 181749 - DNA, 549 bp, Homo sapiens
aatgcagaaagggtgactgaaaattttgcaaatgaacatgacttcccatgaagtctaatgttccattcgctgccatggtccaggggactcccaccagcttccaccggcttcaacaggatctccactagagagcccagacttatctagtcctgtcggggaaaagggagaagaggccttgcaggagaaagctaacagaaaattcgttacctgaggtcctgcctgcagtttcaaatagcttccagcagttttacaaaacacatcctttccatttcttccttttaaatgtttccctaagaacgatccatttaggtgctataagtcctcagccagggagtctctgggacactggcattcaaaattttaaacttccgccccaaaaccaggaacattccaagacagaactcttttagggggccatttcctgggggtgggggagagggcttggaatcaatgctagattgaaaacgttgtaatagctttgccccagacttaacaccggttgggcaggaggagggtaatttttatttagccgtttctccgatcatgtgg

SEQ ID NO: 181750 - DNA, 240 bp, Homo sapiens
cacctttagtctggattttcccggagccccatttgtgttagtgtcctcgggctactgtaacaagttctcaaaaatgtggtagcttcaaacaacaggaatggaatctctcatagttcagaagtccagatcagtttcactgggctaagatcttggagtcatcagttctggctccttctgaagctctagggagcagtctgatttagctcttccagcttctggtggcttctctctcccgggatg

SEQ ID NO: 181751 - DNA, 102 bp, Homo sapiens
gtggcattgctctgtgatagctaatacacatgcatacattactgctgacatttaaaaacattcctaacagtttgtgtgggtacatggtaaacagatgctatg

SEQ ID NO: 181752 - DNA, 380 bp, Homo sapiens
cacaaaaaagaaaacttcagaccaatatccttgataaactttgatgcaaaaattgtcaacaaaatactggcaaactaaatccagcagcgcatcaaaaagcttatccaccacaatcaagtaggctaccccaggtagacctaactggagtggtttcaagagagaatggaagcaaggaattggaggtagtaggtacgtacaatacattcaagaagttttactgcaaattagggcagagcttggggagagcagctggagggggttgcaagaaggggaaactgatgtgaaaaatgatggttaggttacctgggttaggtctacctggccaggtagacctaacgcggaaccgcctactatttcctctaggcacacagtattcacca

SEQ ID NO: 181753 - DNA, 621 bp, Homo sapiens
cacaaaaaagaaaacttcagaccaatatccttgataaactttgatgcaaaaattgtcaacaaaatactggcaaactaaatccagcagcgcatcaaaaagcttatccaccacaatcaagtaggctaccccaggtagacctaactggagtggtttcaagagagaatggaagcaaggaattggaggtagtaggtacgtacaatacattcaagaagttttactgcaaattagggcagagcttggggagagcagctggagggggttgcaagaaggggaaactgatgtgaaaaatgatgctgcaggagacagaaaagcataattttaaaagaattcctagctgaatatgtcacttttcacatcattcttatcttctgcatgtcacccttggttaaaatttactcccctgttctggaatgttttccacattattccttcatttcaccaccttaatgcttaatatcacaaattaacccacttcttactccacccgcttctctctaacctatgggagttccctgggctgctctccatcatccagggagcggtgaagcaaggacctaggtctctcgggtgtgggcagatcccgattccgccagacatcctacacacagcatggctgctcca

SEQ ID NO: 181754 - DNA, 426 bp, Homo sapiens
tgttgggatgacaggcatgagccactgtgcccagccttaactgagaccatcttaactggatctgagagggtcagctcagctcagccttctggtctcaggcccactcactgcctgcacttgcccaggatctcctggaggagcatgactggcggagaccatggcctcggttttcctcctgagtctgtgttcttggcttctcagcctccctgctcagcctcagtaactctgtccatctctgagtctcgggacctcccacccttcgtctgagttgtgctctggcgtttgtccctctgtccaggtctgtctctgtgtccacccatcccccacccaggctttgccctgtgtctgggacacgggggcctggctcttctctcatgctcctttccatcccctggcagtgcccacaggatcagacatgaaagcaaa

SEQ ID NO: 181755 - DNA, 690 bp, Homo sapiens
tctgcccgcctcagcctcccaaagtgctgggattacacgtgacctgtagaattttaaagttacaaatgttgttcagcatcttcagctctgatgaatgcggtgtcagtacaaaatgatgagctagagccagggcatggtggctcatgccaataatcccagtgctttgggaggctgaggcaggagaatctcctgaggccaggagtttgagaccagtctggacaacatagtgagaccccacctctagaaaaaatttttaaaaatagcttggcctctagtcccagctactttggaggctaaggtgggagaattgcttgagctcaggaatttgaggctgcagtgagttatgatcatgccactgcactctggcctgggcaacagagggagaccctgtctctaaaaaataataaaatgatgagctaagttcgagaccagcctggccaacacagtgaaacgctgtctctattaaaaatacaaaaattagccaggcatggtggcatgtgcctatagtcccagctactcaggagactgaggcacgagaatcacctgaacccggaaggcagaggttgcagtgagccgagaccacaccactgcactccagcctgggtgacagagcgaaattccatattaaaaaaaattgatgagctagtcattaaaagtgctcattatggctgggcatggtgactcgcctgt

SEQ ID NO: 181756 - DNA, 163 bp, Homo sapiens
cctatgggacctctcctactgtatctaggatatggttgtgaattggatggcaaggtaagaaagggaggtgttggaataattccttggtttctctctcaaacaactaaaggtacctagttcatgtgttgaacttagggaagagatcagaatttccatcttgaat

SEQ ID NO: 181757 - DNA, 671 bp, Homo sapiens
aatttttaaaagaatgtgttctacagattttctaggaaattacatgactgtctccattctctattttctatactccttgagaagcaagatttatttttccatgtcatccttctgtcatagtcagtgatcatatctgtacttcatcagaaaattctgggttataatttgtctaggactgaggagttataattattcatgtaagacagacatgtacactttctttccatctatcttaggcttcagttggctcttagctatgtttactataccttttccagtttaaggatcattctccttgatagaactaaataggaattgagtagttccactttctctgtcatttggttctattcattcagcaagcatttattgaacagctaagtttatggcactgccatgagtgcttgaagaaagatggccctgggaacagtacttgtcttcagaaagtaccaatatgagtgtgagtgtatgtgtgttggtgacagtgtgtagggggaattggtgagtgtcaacaaaagagggagggatcacaaaattccatttacaacatttccctttgttttaaaataccaagatcactttgtgtctttgctttactatgttatttcatcaagtgtgaggacaaaattattgctctcaaatttgtttcctgattaattactattactgta

SEQ ID NO: 181758 - DNA, 264 bp, Homo sapiens
agacacaccgccacactgtcacatggacacacctccacactgtcagacaccaccacacagacactgccatgtggacacaaggacacacagacattgtcacatggatacacacactgtcacacggagacatcaccatgcagatacatgaacacaccaccacatggacatagcaccacacagacactctgccacacggacacaccaccacacagacacaccaccacgctgccacacagagacaccaccacatcgttgccacatttt

SEQ ID NO: 181759 - DNA, 342 bp, Homo sapiens
tgtggcaggcccacgggagtgactggccaggcagcgggcctggcacgtctaaagcttcctaggctcccacagcacgccgcctggggcggcgcacccaggacggtggcagagctgacctgactcgagtgaccggcagcgtctgcagggaggatggggacgaggaaaaggctcccactgcgccgggcctcacctttgagtgaggatccagcctccccattctgctccctgagggggcacctgggtctcctggtgactctgtgggcatgaaaggtgctgagctcacagtgcgggggctcccatctggccacccactgcacgggccgtgagagcagcacccagtcc

SEQ ID NO: 181760 - DNA, 795 bp, Homo sapiens
agatatttttagtagtcagctcataaaaacaaagtacaatggtgtttgtcaagaggtgggggagagtgaaaatgttaccaggaagtgcaaagtccttagttcttgttttcttgagagaaacaattcagcccagacacaaagaacacaccaaaagaggagtaggttggcccagctggaaacagtcttgagagttacatgttgcagtttttattatcatagacttaaaaaaaatttcccacctctgtcttaagtgtctgcctttgtttagtatcctgcttcctggtaaatctcttcttttatcctcatcgagtttctgcccaggtctgtgagatgcttccttactgtcagctgatatacatgtgtgagttccagtgatcaatgaatcttaatggcagcactgcttattaccgccatcttaggaaaataatatagcagtcaaatgtgtacttactatgcctacgtatctcttaggaattttcctttagccctttttccctttttatcagcatgtagctagctacattctgacagtttaatcacagtatgagcaattactgggtgtcctaagtggtgtttcagggtgttcttcataggtatttctgctcctctctgctcaaatttagcatacatgttttgggttgtctttggagcatgaggctttttcctctggggctctttttttctgttcatgtctaactgcctactcgaacattccctcaatagattgtgactctaaaaatctttgagacagtgcactgtgggtcttctgtaactacttcctggtgacataagata

SEQ ID NO: 181761 - DNA, 393 bp, Homo sapiens
gcagttgccagcagtcatcctctgggctctgccagcaagttggcagcagggtaggattcacaccccttggcttctacctcacagttaccaccaaaggcctttccaatttaaaaaagcaattttagaaattgaaccagaggaataaccaccatgtacaaatcaaaaagcatagaggggcttataatgagaagttgtgctcctctgtcctaccttaactccctctgaaatccaggctccctatgatcaatccccttgacctttcagttctctgggtagatttcttttcttttcttttctttctttctttctttttttttttttgagacagagtcttgctgttgcccaggttggagtgcagtggtgggatctcagctcactgcaacctcctcctcc

SEQ ID NO: 181762 - DNA, 653 bp, Homo sapiens
aaaaacaggaaagagatcaatatcatccacctcaatgggtatatagattcaagaagataatcacatggaggttctttgaagagtgttatccacaggtaaacgtgggaactattattactccttgcgtgcagaggaaggcaaagcatgcggaatgaagcaactgaagactgatcacagttttatccctggggcttaagaaaagctgtatccatttcttcaggcactgggggctccaatctatcaatactctacactctctgagtgatatagtctatagctctggagtgagttttgagacggagtcaagctctgtcgccaagctagagtgcagtggctcaatctcggctcactgcaacctccacctccttggttcaagtgattctcctgcctcagcctcccaagtagttgaaactacaggcgtgcaccaccaaactgggctaattttttgtattttagtagagacagggtttcaccatgttggccagcatagtctcgatctcctggccttgtgatccacccgcctcggcctcccaaactgctgggatgacaggcatgagccactgctcacagcctaggggaagtcttatttatttatttatttattgagacggagtcgcgctgtgtcaccaggctggaatgcagtggcgcgatct

SEQ ID NO: 181763 - DNA, 438 bp, Homo sapiens
ctcagcctgccgagtagctgggactacaagcgcccgccactatgcccggctattttgtatttttagtagagacggggtttcaccgtgttagccaggatggtttcgatctcctgacctcgtgatccacccacctcggcctcccaaagtgctgggattacaggcgtgagccactgcgcccggcctcatttttgctattttaaagtgtacagttctgtggcatgaagtacattcccattgtgcaaccatcaccaccgtgtccagaactttttcatcttccccaactgaaattctatacatattaaataataactccctattcctcttttttttctcagcctactcagcttcttgaatttgcaagcttatatctttttacaaacttggaaacttttcagcattatttcttcaagtaccttttttttgagacggagtcttgct

SEQ ID NO: 181764 - DNA, 496 bp, Homo sapiens
atggatggatggatggatggatggatatcagttcacaccactctcaaaaggctctgcaaaccagtctataatataataattgaaggtcttctggtagaaaatgttaattttctgatttaaaatattatcttccccaacaatgcatgctctttcacctcattttcctcccaaacctccaaattatgaagcctaactgtatcaattaagaatcttctggcttgaattaacagaagagccaaccatatgcaacttaaccaaaaggggctcatcaataaatatcatccccaaaataataaagtctgaaagaaggaggtatgagtgtctcaagaatgacagtgctctcagtcagtgttgctacaaatctaggcacctgttcatagtcataatgtggctgccatagctccaacaattatgtcctcacctaacagcctccagagcaggaagaaaggatgaaaagaaagagtctttcctacatgacccaaactgggtccagtgc

SEQ ID NO: 181765 - DNA, 387 bp, Homo sapiens
ggtgtctcacatgttaagcctatttattgcagtctttgagttaagttaatcaccagccctgaattacttgggtgtagtcagatgagcagaataatgtggtttaggtgataataaccttatgtagaaagaactccctgtggctgctaactcacacgtccacagagctgcatacagacgtgtcaggctctaagagttctacagattgtccaatacagtgcttgctttttttttgtttgtttgttttttgagggcttttgaggctgtttttagaatatattactgggagttattaccttcctcctggaatttgcctagtattggtgagctctcagttgttcaccacttgaagaaaagttctacctcctcctttcctgcttcccaagataa

SEQ ID NO: 181766 - DNA, 724 bp, Homo sapiens
ggtgggcatcagttgcctgcttggcccacctacagagtcggcgccagccaagcagggcagaattcggccagtcctgtgggaggtttggctgtgagttgggggtggtggtgcaacttgttattttcgttgacttgtgtttttaaaacagagggttgagtgatgccgcctttggaacagttgcattccagggcagtggtttgtaaggcagttgattggaaccaagacagccatcatctgcccttagaaaatgtccccagttgcaataactggtcatcggtccagcccgcagaagctactcaggtccttattggagctgaagtggaattatcttagaaacaccggctttgaggtttagaagaagggggtgccgttttgaccaggagctctgggagccaagtggatgaaggtggggacactggttatgaagctggtgacaggctccacatgtcatgcctaggcgagcgggtgagacctgctgctgctgaactttgtttggaagggacatgtgtggcgtgatttgctaacatcctctgggagctccccagcctctgccagatgccattgtccctgacagtggccattgctggttggtggcggtacgtcccccaccagcctggatatttcctgtcctttcatcctgttgtggtttgtctggaccctgtcacaccaccatcgggagaggctttctctgagattggcatgggacgggacagggccccacagc

SEQ ID NO: 181767 - DNA, 490 bp, Homo sapiens
atttgataaaattttccattatatagggtgtcttagcacaactctgctgctataacaagatacctaagctggtaatttataataaacaggaatttattttctcacagttcagaagactgggaagtccaagattaatgcaccggcagttttgttttttgtttgtttgtttgtttgtttgtgtccagagaggggtgctcttgctgctcccttaatgaggtcttgttgctacatccccagagggaagaaatgttgttttttatgtggcagaagaaatagaagggcaaaaatgaatgaacttcctccatcatgccctattttaacgacaccgaatcctagtcatgagggactcaatcaccttctaatggccacacctcctaatactgttctattgggaattaagtttcaacatgaattctgaaagagacaaaaatattcaagccatagcatagaaattacatgaaaataataacaaataaaagagacaaaaaca

SEQ ID NO: 181768 - DNA, 434 bp, Homo sapiens
ataatagagcattcgtttcgtcatctggaagcagagatggaagaagctggggggaaatgagagacatcactgttgctttcgtggagggaagctttgtagcatgttatcagacagcagtgcatattgaagaaaatatctgttaggaatgcatgtcaccagatgtattttgctttcaagaatggtagacacatcaaacaagaatcagataaaagcctgagaaaaagatgttcagaagaatactggagttattctttatgcttcactgccctttacctctcttggtaccttccagagaaacaagtatagatgtatttttagcttgccgtttccagcatcaatatgacaacatgattttgtctttatatcagtaagcagcttctactatgttttcctattttctgctagctacagtttacaaaggatgtcacagcact

SEQ ID NO: 181769 - DNA, 293 bp, Homo sapiens
ggaagacagcagccatgtcattctaacttctagcggacacatgagaatagctgccactgtaccagcatattcctctggttcattctcctgcatgtcctccaggcactgaggcaggttgcagatccaaccacacacttccaacaccacttttatttttattttttaaaactgtggtaaaatacaagatttaccgtgctcaccattttcaagtgtacagttcagtagtgttaagtacattcacactgttgtacaaccatcatcaccgtccatctccggaactcttttcatcttga

SEQ ID NO: 181770 - DNA, 1064 bp, Homo sapiens
actaaaaatatgacatttttaaagaaataaaataatcacaaaataaacaaaaaatcacaaatcaccagacaaatgtgaaaaataactaaataaaacttctactaatgaaaaattgttgaaatcaaaatctcagggttagtttgaattagtaaataggaagccggatattttttaaaaactctccaaaggccgggctggtggctcatgcttgtaattccagcactttgggaggctgaggcaggcggatcacctgaggtcaggagttcaggaccagcctggccaacatgataaaaccccatctccacaaaaaaattagccgggcgtggtgaggtgcacctgtggtcccagctacttgggaggctgaggcaggagaattgcttgaacctgggagacggaggttgcggtgagccgagattgtgccattgcactccagcctgggtgacaggtgagactccatctcagaaacaaacaaacaaacaaaaactctccagaaagcaatacagagaacaagcaaatggaaaatataaaaggttaaaagacggggttaaaataaagactgaagtcctagaaggaaagaaaaaagaaaataaaggagagccaaagtgcttagagacctaagagctgagaatttttgaagctaagaaatgaaaccacagttatgggaagcacaacatataccaaacagaataaataaattcatgcacagtcatgttatagtaaaactgcaaaacaccaaaagagaagatcttaaaggaccaaagaaaagatacaccacctacaaaaaaaccacaatcaataagaaagatagatttctcactgctatattagaagctggaagaagagggcatactatcttcaatgtgataacctggaatgatcaacctggaattttatgtccagagaaactatctttcaaggatgatggtgaaatacaaagacatttcagataagcaaaatagaaactgcctccaacagactttcacttaaggaaattctactttaggaagaagaaaaatggtgccagaaaggaagtctgagatacaggaaggaacggtgagcaaaga

SEQ ID NO: 181771 - DNA, 194 bp, Homo sapiens
tgtgatgatggaagaagttccgaaaagaaaatgaaacatgcaaagcctaggctcataagaaacttattgtcatttcgtgtcaatggccaaaccaagccatatctccaaacccaaagttaaggggtgagaaaaatatatttctccttataggaggatttaaatgtcataaaacaagagtaagaatatagggaggg

SEQ ID NO: 181772 - DNA, 467 bp, Homo sapiens
gctggaaaaagaaacagcaaatgatacaaaggactggacgcaatggcttatgcctgtagtcccagcacttggggaggctgaggcgggaggattgcttgatcccaggagttcaagaccagcccagacaactagtgggaccctatctctactaaaaaaaagttaaaaaataaaccaaagaaagcagaagaaacagtgcaagaagagaaatcactgaggccgagcatgagctactgtgcctggccggctgcattcctttctataggttctaagggagaatccatttccttactcagttgttgacatacttcaattccttgtggttgtaggaatgaagtccatatttacttgtagactataaactgaagatgttcccagcttttagaggctaacagattccttggcttgtgtctcgcttccttcatcttcaaagtcagcaatggcagattaaatccttgtcatgctgcaac

SEQ ID NO: 181773 - DNA, 274 bp, Homo sapiens
gagcacagagtgattagtttaggagtatatgacccagacagagtattttctggaactaggaaatggatactatggggtgggggtggtattttgcagctaaatttaaaacatagaagccaggagcagcccaggtgcaaactggataaactcatttgctcctcataaaagcactacatttatcatctccatttcacaaataggaaaactggggcccagaagggttagggtcacacagttaccaagtggtggggctaggatctaaactactcaggca

SEQ ID NO: 181774 - DNA, 363 bp, Homo sapiens
ggaaacgcatgaggcgtgtgctctggaaccttccctccagctgtggtgtaaggcagagcttcctgcgtttgcccggggctcttaaagggtcctggagacatcgtttggcctccctgtgttttacctgcatctgtccttctgggcttactcagcagccatcttttgtgtgatagattagttgataaggaaaacttaattattggagttgcacaatctcagggattggttctgttcactaaacgggcgtaaactgtcttgatgtaggtaagagttattggccttgacagactttgtcagattagcgattggggagatttgttccaagtgctgtcctctttcgttgtaattgaattttgcatgttt

SEQ ID NO: 181775 - DNA, 408 bp, Homo sapiens
tcttctcctaatagggagcatgggaggaacaacccactatatttttcaaggcagctccaggaattagacccataaatcatgttttaaaatagcatgcattgtgcagagagcatgcagaggaccgctttttgaacacatcccctttgttttagaaaaagtggaaattgttcatgccagacaattgttgagtctaaaagttaagtgtactgatgggcctaattatcttaataaacaaagagcatgatttataggtagctgcagtgccctactttgaaggatagaaatctttaacctttctttctcagctgttcccgagagattccttttaagcagagctatggattatcatcattgatgtttaatacctgagttggttaaacttgtaaaaggaatagtactttgaagtac

SEQ ID NO: 181776 - DNA, 542 bp, Homo sapiens
cccatttttcttttaaatacaatcttattttaagtctctaagggcagctggctgaaagtgtcatatgggtaatcctcttctaaaacaaataaacccctgttgtgttttcaggtctaaatctgaatcgtcacctattcacctcctgtcttgcctagagcagagacatgtttattagcactggtgatgataccacttggaggccaccaggtcactgggtgctgagaggcattttaagaatactacttttttccctccaggagacactgcccccttttttttttggtcaggatgtacaattttctatgatgctaacctgaaattgggagaaaactttaaccagggggagatgcattggagtttccctccttggggacccagctctctggccttgagccctttcctcggggacatatgaccctgaattgggggtctgaggctttccggacaggagaaaacgaagtggtgctgggagactgatggggggccagggaggggtgctggcaggaaataggatgtaggcaaggatagaaggagggtacaag

SEQ ID NO: 181777 - DNA, 866 bp, Homo sapiens
aggcagaggttccagtgagctgagattgtgccactgcactccagtctgggtgacagagggagactctgtctcaataaataaataaatagagtgtgaatttaatttaaaaataaggcattgtaagatttttaagcagcggagtaacatggttcaggaggctattgctgaggtccagaaaagagatgatagtggcttcaactggggtgatggcagtgaagatgatgagtaatgggtatatttaagatatttttaggcttggcattgtggatcacacttgtaatcccagcattttgggaggcctagccaggcaggtcccttgagcccaggagtttgagaccagcctgggcaacgtggtgaaactctgtctctgcaaaatatataaaaattattcagtcctggtggtgtgtgcctgtggtcccacctacttgagaggctgaggtgggaggatcacctgggaccaggaggttgaggttgcagtgagctgtgatttcaccactgcactccagtctgggcaaccgagtgagaccctgtctcaaaaataattttaaaataggccgggcctggtggctcatgcctgtattcccagcactttgggagcccaaggcgggtggatcacctgaggtcaggggttcaagaccagcctggccaacatggtgaaaccccgtctctactgaaaatacaaaaaattagccaggcgggtggcgggcgcctataaaaccagctactcaggaggctgaggcaggagaatcacttgaacctgggaggcagaggttgcagtgagccgagattgcgccactgcactccagcctgggtgacagagcgaaactctgtatcaaaaaaaaaaaaaaaaaaaaaaagaccatgga

SEQ ID NO: 181778 - DNA, 480 bp, Homo sapiens
cagcaatgacacgagcctgaatcagatgccaagtgagtgagccaagctggaagcaatgcgagaacatctgactccattgacagaagctccagagcaggcagctaatccacagtgagacttagaggcacaggatgctccagagcaggcagctaatccacagtgacagactcagagccacaggatgctccagaacaggcagctaatccacagtgagagactcagagctggggctgcctctggggatggaggcctctaccgggaagaggacagagaagggcaatggcaacgttctttatctcgacgaggtatgcgttgcgcaggtgcatgcgttttggggtttctgttgttgtttttgagacagagtctcactttttcacccaggctggagtgcagtgtcagtcagggctcattgtaacctcgacctcctgggctcaagcgatcctcctgactcagcctcctgagtagctggggtacaggtgc

SEQ ID NO: 181779 - DNA, 238 bp, Homo sapiens
aaaattgaaagctaataaaaattacaaaaatgttcttaacattattatggaatatttcaaacatatagaaaaatatagagaataagcctggccacttttacaggtggctcaaaggtactgttggcaccagacagaggaatgaagttcctgtaggagttaagcattgagctctgctgtctcgctttctgtgtccagaggtggctcctggtagttgaattagaccattacattttgggca

SEQ ID NO: 181780 - DNA, 520 bp, Homo sapiens
ctccctagtaatctcatcaaacaaccaggaaatatcaaccactagagaatagattgacagtcactatgacctgacagacttttcatctgttcttctgagggcagccccaagggattacctggaggactttctctgcataataagacaatctttgttcctgtgcagctctacacctcaccttcccattaatgtctgccttccacctccaaggtccatttgttctccctaatgacttgctgtcactcaaaagaatttctacattctccatctcccccttcccttatgaaaaagggtatataagtttctttaccacactaaataataggtaatcactctggattattcacacacacacgttaatttaaaaagtttggtgtttctgaaacaggatctcactctgccacccagactagagtacagtggcactatcacagctcactgaagcctaaaagtcctgggctcaagcgatccgcctcagcttcccaagtagctgggactacaggcacacaccaccatgccc

SEQ ID NO: 181781 - DNA, 308 bp, Homo sapiens
ttgatgttgttttgaatctgtggctgttaaccaggatagagaatctagaaagaagaatctgctgacgcgtggggattaaatggtttagttttgcaaggaattggttttgagatgaccataggacgcatatagtagagccctgctgtgtattctcataacaccctttacacacctctgttataacaagcactatattataattacctgtttactggtctgttttctctaccactgtaagcctgtcaaaggtaaggagtgtcttttattcctcaccataattctatacctggtgtctggcacatatcaga

SEQ ID NO: 181782 - DNA, 648 bp, Homo sapiens
cctgccctccccctaattgagaatgaccttcctggtcttctctctgtgactaaatcctacccatttttgaagactcagccaaataataccaccatctgaccactctagttcaaaatgcccccctttccttgctgaagtcctgcaattctgccccatttattcactatatgttacactttgtgaagaaaccattcacataacttctttcttccaaatgtgtgttgaattatttagagggcaaaggtgctaagcctctttaagaggcttggaaggaattaggcaccaggaaagtgaaagctttatttatttatttatctttttttttctttttgagacggagtctcgctgttgcccaggctggagtgcagtgtacaatctcagctgactgcaacctccgcctccgcctcccaaagtgctgggattacaggtgtgagccaccatgtctggccaagagttgttggtggtacacacgtctaaagccactatggacagaccctaaatgacctgtaagagggatttcctatatgtcgtcttgggaaagatatttgacctctgtgtgtctcagtttcttcatctgtgacatgcaggagattaggggaccatgatgccttaaggctcttttgttttgactattctacgcatctggcc

SEQ ID NO: 181783 - DNA, 636 bp, Homo sapiens
ggaggggtggatgaaaacgggaatctctgctgtttcctagggccactcctgctccaactctacctcctatctgcatctacagtccctgactttgtcctcccttcggctgaccacgctgcaggctgataaaggctcttaatgcccagacctgtgcctaccaagacctaagatacctgccttttctctccaccgatactgacatcttagaaaattccacctgttgccttccacatccctcctgtctaatcagactttgggtcttgatcccccacagccagtcctgtgctttcatattccataatgaagagaaaacttgggaggctacacaaagactcagataatggataagggtcagctttcttcagaggggcagaatccaagcccttgtttctattcaccttcattaagaagaaagggcagttctaatcctctgtgtaataccgtgagcattcatctctggtgtactcaacaggaaagcctataaaattcaaaccagagtgaatcctcttcaaaacttgtcacagcagatggtgatacaggtttcttgctatgatgtgtgctttgtacaatgccaaacatgctcctgcttaaaaataaagatgtaaccggtaggtatgatgaaggacggggtaccga

SEQ ID NO: 181784 - DNA, 179 bp, Homo sapiens
cctgcactctctcccatctcatttaccagcaccttcagccttccagttgtcagaccaaaaatctatgtatcatagctgactcctttcatactctacatctaacccaaaagcaaatcctgtcagttcagacagttcagaatatatcaacaatgagcttgcttctcctcacctccactgtt

SEQ ID NO: 181785 - DNA, 400 bp, Homo sapiens
ttttcaggaaaaagaagagttttacagcttatcttaaaattaaaacaaaacaaaacaaaaatgaatactcaagaggcattggatttaggaatccggtaaaacaactaattccagacagccgtaaagaaacctgcaaccaggaaatgatttaaaatggagatcttcaaagtcaggattgtagttttttcaggtagctttttgtagaccttgaaaatataggccgagaccacatgtagaaattaaacgttctcatccgaagccggaccatttggtttggcgacttaagggaagagaaaaatgaagtttgctaagtaagaattaatgatttctcaggaatttttaggatgttgaacagcttaattgcatagtttgggtggatatgtgttgaagaaagtaattt

SEQ ID NO: 181786 - DNA, 278 bp, Homo sapiens
atcatcttaactaatgacatatgcaggatcccgtttctaaataaggtctgaggttccgggttgatgtgaactttgagggacaccattcaacccagtacagggctcttggctgagagctgcgggcacctccaggtgtggcggagggcccacctctttctcagcaaccccagagggatcaggctgccgcccccccgtcacaccaggctgtggtgggcaccccccagtgtctttccagtccccctgggagtccccagtcacttcgagatgctgcctccacg

SEQ ID NO: 181787 - DNA, 449 bp, Homo sapiens
gttgaactagcctggactgctgaccagctcctgaaactcaatcctggaagaactgtagaagcgagaagaaaacatggcttacgggaactgtaaaaaaatggtaaacctcctgtagagaccaaggcagtattgacccggtgtgtgtggaaggttaatgttcaccgacagcagagagaaaacaagatggagaaaagtattttcggttctgctcttgcgtctctctccatggctctgggccagctgcgcttcttaccccttcccgaaagagatttgtcagcggctcttaaccctccaatgcggtagctgcgatgtgacatcgggaacccatataggcttcgctgaggaaaagagtagatgaaaacaggggtgaaaccggatgatcgcggggctttcctcttcagagtgtcctcctcaggcctccagagctaatgattgccatggcctcccca

SEQ ID NO: 181788 - DNA, 539 bp, Homo sapiens
aaatggagctttccctgggctttcactcatcagcagcaaggccctcatcagaagggtattaaactgttaactcttaggcagcagtttagagcaaaaagcagaactaaaataataaactgcaaagagagaagacactgactaaagaggcaacccttaaaataagattttctggggcagccaactaaactgtctctaaaagcaattccaaaggaaaaggacaaaaaaaattataaacaatggcaacatcatttgatccatttcaagggggcctactttgaacaatactcctcatttcagcagatatatctcagttctgatatgtctagttcaaaatcagttttatacttgtgaaattgtaactttaaaacctttaaaggaaggtaacaaaaataaaatgattgctgcaatcaactaacaaaatggaaaatttctagctaaaatttttaaaaattgattttgtttattcggcctgaagctcactacttttaatccttgaactcaaaaaacactcaagttacaagattgagattgtttcccac

SEQ ID NO: 181789 - DNA, 421 bp, Homo sapiens
actagtaatgtcaatatgaaaatgaaattaagaacacaattccatttacaacagcattcaaaagaaaaaactactttagaaataaattttatttaaaaagtgtgatattcatgagctaaaactacataagaatcttgaaaagttaaataaaatttaaataattgaaaacccaccccatgatcatgaagcaaaagaattaatattgttaaaatgacaatattctctgtcttatttcgttctgtgctgctttaatagaatatcatatactgggtaatttataatgaatagaaatttatttaccttgtggttctagaggctgggaagttcaacatcaagtggccgcatctggtgaaggctttcttgttgggtcataacgtggtaaaatgggtaaagcttattaaacataaattgtaaccccata

SEQ ID NO: 181790 - DNA, 632 bp, Homo sapiens
agaacacatactgaggctgagtttatatttgaatgtatctgtttttttgttgtatgtttgaatgaagacctagagaaaacatggcaacattcactttcaagagtgagagaatgaagtggagcaggaatagaatcagtacataaatcctgtcaacatttattagcatttgcaaatctgactcacaaaacctcagcctaatcagactggatttttgcatgtcatgacaacagcatacaacattgtttctggagggatcagctgcggcagcctcctactgtcctttggtgacaaggctttaatgactccataaatgtatgctgcccagctgctgcccgcttaattagacgatgatttccacttgattgaacctgcccagcagccagttgtcacctaacattcacaggagaccacactggtctctttcagaactaccaggatcaaacagtcacacgagttctatggttcctacaacatggcagtatactgtttgatttaggacttgaatcatatttctccctttttaagaatatacccttctctgccagaaggttgttacttctcagattaaagatgtgaaaggaaaccttcccaggctcatcttaattggacatatacatcatcactttagtata

SEQ ID NO: 181791 - DNA, 1214 bp, Homo sapiens
cttttactaccatgacggcattgatagggtttttctcctatatggattctctgatgtataataagatctgagctctgactgaaggctttcccacactcatcacatttataaggtttctcaccagcattttttattttttgactttttaataatcattctgactggtgtgagatggtttttcatggtggttttgatttgcatttctctaatgatcagtgatgttgagctttggatcagtttgatcaattgatcagtttgggattgattttgattcaatccttattcttattgtgcattatttttttttgcctctgcatgcctggtaatttttgactagattctatgtgctggatatttttttatccctagaaatcttcttgaactttgcttagggttacagttaagttacttggaaataatttgacctgtttcttgttttgcttttaggattttttaggtgaatctggtgcattgctcagtgaggcaagatcttcctgagtactctactaaatgtcctgtgaattatgaatttttcttgtctggctggtatgaacatccactgttcccagtaggctctttgtaagcaccaggcagtgttcccaccagtcctttcatgtggttctttccattgtctcagttagtttcttcacgtgcaagtgctgctcagtactctgcttaatactcaagggagatcctttgcagatctctggggttctctttctttgcacatttgttctctctggtatactatcctataaactgtagcttccccagtctttccagactcagccttatttctgaaacttagagagtccataggtctgtgccttaattttttctctctgtgcctttgcctgaaaattttcttgatgcagtaatttacaggcaataatgggactcaccttgtttgttttccatcatttagcgattactatcctctgttgtctgatgttcattgtcttgaaaaccagtgtttcatgtattttgtccaaagtttttggttgttttaggtttcaggctaagctcaagtacccattactctattttagccagaagcacttttttaaaaaaaaagtcaattcctattatgttatttttcctcctatttactgggcattcttaaaatatcctaccccatgctgcctcatttttttactcatttgagtatttgcatatatgtatatttccatctttttctaacagttgcccttgaa

SEQ ID NO: 181792 - DNA, 390 bp, Homo sapiens
tacagtagttccccccatctgcagtttcagtttctgtgacttcagttgctagcagtcatctggggtctgaaaataggtgagtatggtgcaagaagatgttctgagagagagggtgagaacattcacctgactttcattacagggtcttgttatcattgattttattagtcattgttgttaatctctcactgtgcctaatttataaattgaactttatcatacatatgtatgtgcaggaaaaagcatagtacatatagggttcggcactatctgcagtttcaagcatgttgagcagataacttgtcttttagttgattagcacaaggaaccagacacattcaaacctggtgggaaactggcacagtcctgcccgatcccggtacatgcaag

SEQ ID NO: 181793 - DNA, 662 bp, Homo sapiens
atgaaagacacttctggagggacttgaagaaagactcaggtctttcacatccattcccttctttcccctgtttcagcataactcccacttcatattgtgtgattagccggttctgtgatgtgtctgaatgctgtctcctacaggtaaagtttaagcattactgactataggcaaacaatggcctctcagctgtccatcagaagaagctacagaaaagtaagttttctttattcagtcaacaaatatttactgagttcccactataggccaggcatactctgctgggcgccgggaagagaaaacacctgctctcaggagggagagcgacaggggttactggctcaaatctgtgtgtgagattgaagttctaaggaaggctttgacctaatgtagtgagaagaataaaacacaaataatttatagtaaatgaggatgagagagaccacaaaatttaatgttattaaattcttcctcataaggaggaagaaacaaggcctttaagaaaaacgttgtaagttgtcattgttttttgttttttgtttttttttttgagacggagtctcgttctgttgcccaggctggagtgcagtggcatgatcttggctcacttcaagctccacctcccgggttcacaccattctcctgcctcagcctcccgagta

SEQ ID NO: 181794 - DNA, 399 bp, Homo sapiens
tgatttaattgaagcaataatttaactattgatccagaatgattgctatgtatttttaaagacacaaattacatttgcttgctagacttttttttttcatattggtcaggtttctactgttattttgaaaagaactcaccatatcttgatgttgacacattccttaaatagaataataaaatacatcaggtacaatctaagcaaacagctgaaatcaaagtgtaaatagcaaattacattctggatcacacaagttatgactatggttatatatgagacagaaaaaatataaaaggataccgtttctttaatattctttaattgccaattttgagtcatcaaatttatcaggaaaaatactttaaattattgtaagcaaaggtaaaacaacttaataaa

SEQ ID NO: 181795 - DNA, 470 bp, Homo sapiens
atagctatttattctcaaagagtggaagctctttgagagtcagtatggaataactgtaaaatatattacggaatgacaaaagcagttttcatggtatgttgatacatcctttgtgtaaaaagagggaaaggctgggtgtggtgcctcacggctatagccccagcactgtgggaggcagaggtggctggatcacgaggtcaagagatcgagaccatcctggccaacatggtgaaaccccgtttctactaaaaatacaaaaattagctgggcatggtggtgcgcgcctgtagtcccagctactcaggaggctgaggcaggagaatcgcttgaacttgggaggcggaggttgcagtggcgcaatctcagctcaatgcaaccccgcctcccgggttcaagcaattcgctgcctcagcctcccgagtagcctccattgaaggaagtgccatagtgtgggaggatctttttatttt

SEQ ID NO: 181796 - DNA, 642 bp, Homo sapiens
gaagaccaagatcagtaagatatagtttctgctcttaaagagttgtagccttgtcgaggaaatcagaagtgaccataatcataacacagtgatgggtgccccagagaggcccagcagaatattctgggagtttaaaggatggagaaacactgatttccccaatgaatagagggagtgaaggcttcatgtgggaggtagtatttaagcagtgtcttactagatgggacttgaacctatgaagagtttttcagattgaggcatgtgttgaggataacaacttcagattgctacattgtctagtgaggaaaataaatgataataatgctagtgtttattgaatgtttaacttgtgctgttttaagtgttcttatcatttcctcataacaataacatagtaaccctatgagataggtattattgtcattccattttacagatgaagaaattgaggttaagaaacttgaaactcttaacccacactggtcctggagagttcactcttacttgctatgttatactttgggaaatgtagcaaagctggatggggttccatttatgtagagtctcaaatgcccagatgaataatttaatatattggaagatatttttaaaatggttctgtgtgaaggttttaagcacatc

SEQ ID NO: 181797 - DNA, 241 bp, Homo sapiens
cctcactaccgttcccccatgacagtgtcttatttacgtttatggttttactgtcacatgccaggcatgatttcagcccaaaattagctcttcctttgttttatcagaaagaattatttaagacaatttctctaaaacccaaatcttcacctttgggaaaggagcagcaagcagtcctgtcaatggaaaattaggaaccgatgggcagaaatcccattcttcagtaatcatcaggaaaaaa

SEQ ID NO: 181798 - DNA, 1068 bp, Homo sapiens
tggctggaacactggtcatgacagaggcagtgactctgactgaggtcaaggccaaagccagggaagtggccatgaaagaagcagtgacccaaactgatgctgaggctggcaaaatagttaagaaagaagcagtgacacagaccaaggctaaagcttgggcgctggttgccaagacagaggccaagagagaagcaatgacccagaccaaagctgaaactcatatattggctgaaaaagagacagagattaacagagtaatggttacacagagtgagaccttggcagtacccagggaagtggccaagatgggggccacgaacaagactggaattgtggatgaaaccaagacaagagctctggaagagactgtgagtgtggctaagactcagtctgaggccaggcctggtgccacagttgatgctaggggaaatcccaatggcatgtccagggaggtggctggagtggacatgaagtcctgtgcacagtctcaggctgtgaccaagatccagggtgatgacatgcctggtactggggttgaggacatggggaattgtaaaaccatgtctagggcagagtctggggcagacacgagggcttctgctcagcctcaaatttttgccaaaacccagactgaggccattcctggggcaaagattgatgccgggggtaacaccaatgccatgtgtaaggtgggggcaggggcagatgtgagagcttgtatacaacctcagactgtggccaagaaacaggctgaggtgacgtctggtgccagggttgatggtaggggaaataccaatgtcatatctaaggcaataactggagctgacatgagagctgctgctcagcctcaagctgttgccagtactcacgctgaggccatgtctgatgctaaggttaagaacagaggcaatcccaatgccatgactaaagcaggggccaaggcaaacttgagggccaattcccaggttgaggccttgcctgatgccagggataagagcagaggcaatcccaatgttatggctaaggtgggggatgggacagacatgttgtcctgtacacagcctcagc

SEQ ID NO: 181799 - DNA, 181 bp, Homo sapiens
aaattaatgagttttgaaaatgcatacatgtgggtaatctgtgcatcccccaccccaccaacaagatatagaatatttccatcaccacataaaaaggttcctgcagtacctacccaataagtccctcccccaactcaggaaactgctgagcactattctgattttttcatcatggattagt

SEQ ID NO: 181800 - DNA, 493 bp, Homo sapiens
agctcctacaactcagtgagaaaaagatgaacaatggaaaaaacaggggtaactgacttgaataggcccttcacaaaagaggaaatagaaatgaccaataaacatataacatgatgcctagtatatcattagaaatacaggaaatacaaattaaagtcaattttactttttttcattttaaccaaatttatttaaaccccaagactttgtagacacagtggctcacgcctgtaatctaagcactttgggaggccaaggtgggaggatcgcttgagcccagaaggttgaggctgcagtgagccatgatttggtttatttttaagtaatttatccctacttaaagacagattaccctacatgtgaaagctatgtacaaaaatcatccactgattagaaggatttttttaagttatacaattgtccttggtttttacaatgataaatgaaaaacattaaaattcttcagttgaataaagtatggaaggatttttat

SEQ ID NO: 181801 - DNA, 441 bp, Homo sapiens
caaacaattgtagaatatcgatgggatactatcagcaatacaaaggaattaactattgatacatgcaacaacatggatgaatctcaaaatatgctgaaagaagccaaacaaaaaattagtatatatcatacaattccacttacagttgaccttccataaattccacatccatggattgaaccaactgcaaatcaaaaatattccgtaaaaagaaaaaaacacaactataaaaaatgtagaatacaaattttaaaaaacaatacagtatggccgggtgcagtggctcaatcctgtaatcccagcaaatcccaaatttgggaggctgaggcagacggattgcctgagctcaggagttcgagatcagcctgggaaacatggtgaaaccccatctctactaaaaatacaaaaaattagccaggcatagtagtgtgtgccttaatc

SEQ ID NO: 181802 - DNA, 305 bp, Homo sapiens
gaaagggcctgtttaataataatgtgaagaaagggcctctttaataataatgttaagaaggggcctgtttaataataatgttaagaaggggcccgtttaataatcttaagaagggtcccatttaataataatgttaagaaggggcctgtttaataataatgttaagaaggggcccgtttaataataacttaagaaagggcctctttaataataatgttaagaaggggcctgtttaataataatgttaagaaagggcccgtttaataatcttaagaagggtcccgtttaataataatgttaagaag

SEQ ID NO: 181803 - DNA, 701 bp, Homo sapiens
gtagcagcagacagtgctatgcaaggagaatggctgtttcagaagtccagctcctcacatgaatttaatgtgttgccttttcccccatacattttgtttaaatccatggtcatcttgccatttagtggtgtggtttaattgcatatttgggttagtctgtatgtaatgtttaacataggtgtctctgtgttaaacaggaatcctcttcattttctttaccaatatggtttgtggactatgatgagccaaatctgacatcagttctggaatgtctagaagatgctaagaaaaacaattcagtgaggaaagaagccaagctattttctcttttcctcatgaacattatatttagaaattaaatattaagatatgataaaaacaaaagcatgattaatgactataatattagaggaattaaagtctgggtattttaagtccttccaatcttacttactacctggattctctttattatttcccacatgtataaccttagtttagattaggaattcaggatctctttttccctgaattctaaccattaagccaagcaagcattttgggtagtgaccactagccaaggtgggaagtagaaaaaagaccaaggtggaagtgaaaggagagaaggggagaatgacaccagaactagtgggaggggattgccttttctttcaagggtctgtaagtctgcagtaaaagtc

SEQ ID NO: 181804 - DNA, 299 bp, Homo sapiens
  misc_feature (4)..(4): n is a, c, g, or t
  misc_feature (19)..(19): n is a, c, g, or t
aagnctaaaaaaaaaaaanaaaaggagatagagcaggaacgtaagaaatagttgggtgcagtggctatgtggtggcactataggaggctgaggcgggcagatcacctgaggccaggagtttgagaccagcctgggcaacatagtgagaccccgtgtctacaaaaagtaacctttatatattttttttaacagtggaggcagttcaatatagagtcttttttgaacaaacgtgaaatagatgtcttttaattttctggaggaaaaagcaaagcaaaagaagcagtggatattttaagact

SEQ ID NO: 181805 - DNA, 853 bp, Homo sapiens
cgcccagtaacttaggctaggtacgaggctgggtggtggaatgaatggagatgacgcctcagagattctttcttttgagatgaggtctcattctgtcacccagactagagggcagtggtgcaatcacagctcaccacagcctcaacctcctgggcctcccaggtagctgcgatcacgggtgtgcaccaacatgcccagctaatttttttttaatttttaatttgtacagacagggtcttgctgtgttgcccaggctggtctcgaactcctgggctcaggtggtcctcccacctaagcttccccaaatactgggattataggtgtgagccactgtgcccaggcttgcctcagatatttgaaggctgggaaggattttgcaaagctgggaaaaggaaaaggcattcccagcagaggggatagcaggtggaaatacataattaaaaaaaaaaaacgtggagcagatccagcgcaggggctcatgcctgtaatcccagcacttggggaggcagagcagggaggattgcttgaggctaggagttcaagaccagcctgggtaacatggaaagaccctgtctctacaaaaacacaaaaaattagccaggcgtggtggtgcatgcctgtagtaccagctacttgagaagctgaggcaggaggactgcttgaagccaggagtttgagaccagcctgggcaacatagtgagaccccgtgtctacaaaaagtaacctttatatattttttttaacagtggaggcagttcaatatagagtcttttttgaacaaacgtgaaatagatgtcttttaattttctggaggaaaaagcaaagcaaaagaagcagtggatattttaagact

SEQ ID NO: 181806 - DNA, 1239 bp, Homo sapiens
gttctcccatgcatgtgtactgtggcaagggagactttgaggaagagattccagtggctgagcagaagggctcgcattgccctggcgaaaggttggaaggcttcacctgagagtgtgtcgtggcctttgtcatatccactgcttgattcctttctttaaaaattatttttattgttttctacatatgagaaccaccacacctggctaatttttgtattttttgtagagatggggtttcaccatgttgtcccggctggtctcaaactcccgggcacaagagatccacctgcctcagcctcccaaaatgctgggactataggcatgagccactgcacccagccactgcttcattcctggtggctgctgtgcctggcatgttgcagatcctccatgaatatgcatttgaatgaatgaatgaatgaatgaatgaatggagatgacgcctcagagattctttcttttgagatgaggtctcattctgtcacccagactagagggcagtggtgcaatcacagctcaccacagcctcaacctcctgggcctcccaggtagctgcgatcacgggtgtgcaccaacatgcccagctaatttttttttaatttttaatttgtacagacagggtcttgctgtgttgcccaggctggtctcgaactcctgggctcaggtggtcctcccacctaagcttccccaaatactgggattataggtgtgagccactgtgcccaggcttgcctcagatatttgaaggctgggaaggattttgcaaagctgggaaaaggaaaaggcattcccagcagaggggatagcaggtggaaatacataattaaaaaaaaaaaacgtggagcagatccagcgcaggggctcatgcctgtaatcccagcacttggggaggcagagcagggaggattgcttgaggctaggagttcaagaccagcctgggtaacatggaaagaccctgtctctacaaaaacacaaaaaattagccaggcgtggtggtgcatgcctgtagtaccagctacttgagaagctgaggcaggaggactgcttgaagccaggagtttgagaccagcctgggcaacatagtgagaccccgtgtctacaaaaagtaacctttatatattttttttaacagtggaggcagttcaatatagagtcttttttgaacaaacgtgaaatagatgtcttttaattttctggaggaaaaagcaaagcaaaagaagcagtggatattttaagact

SEQ ID NO: 181807 - DNA, 488 bp, Homo sapiens
ctcagcctcccgagtagctgggactacaggcacccgccaccacatccagctaatttttaaattttttgtaaagatgatgtctcccaggctgaagcgattctcatgtctcagcctcctgagtagctgggattacaggctcccatcaccacacctggctaatttttgtatttttagtagagatggggtttcactatgttggccaggctggtcttgagctcctgacctcaagtgatctgcctgccttggcctcccaaagtgttgggattacagatgtgagccacctgcccggacccctatttaatgtatagtttttgttaaagttatatcagaattctagctgaatgatatttagagtccttgttcctgctttgtacctgggacactgccttgttactgatatggctttgaggagtagaggaacaccaggttttttgttttgagttgaattagataaaacgacacggacacacgtggagtggttttaagga

SEQ ID NO: 181808 - DNA, 129 bp, Homo sapiens
ttgaataactacactcctaagcaggtagactcttaaaatttaaagaaactctaacacctggtcaggacaacatggcgtttgagcctaaacctagaatctatagttaaagaaaaggtttatcaggctcac

SEQ ID NO: 181809 - DNA, 231 bp, Homo sapiens
agctaattttcgtctttttagtagagatgggatttcaccatgttggtcaggctggtctcccactcctgacctcaagtgatctgcccgcctgggcctcccacagtgttgggattatacgcatgagctaccatgcccgtgccagtgatgaatcttgccaaggaaagattccttaacttaaattttataaagtattattacattttaaaaatgtcaaaatgcaatgcaagtaat

SEQ ID NO: 181810 - DNA, 189 bp, Homo sapiens
caaagtgctgggattacaggtgtgagccaccgcgcccggccatggtttggcttttttaacttgggagtcttatttgcagtgagaatggacctgaaggcatgtgggtgtgtggggtcttcattccaggtgatgtgaggtgttcttttgtcctcagcagctcatgtgaggagcctttatgtatgtgtatgt

SEQ ID NO: 181811 - DNA, 482 bp, Homo sapiens
gcagttcctaacgaacttctttgattattaacctatgctgggcccagggaaattactcacttgttttctggccaagagaaaatctcctggaaacttctatatataaatctttttgacaattccgcattcaagagagttccctggcagttcttctatttgtagggtggggagaaaaacccatgtaatttcccccaaactgtggattttgttcctatagaacatgcttgtgagattcagtgtgcgtatttgtgtgagtgtgtgtgaatgtgtgtgtgaatgtatgagtgtggatgtgtgtgaatgtgtgtgtgtatgtggatgtgtgtgaatgtgtgtgtgaatgtgagtgtgaatgagtatgtggatgtgtgtgaatgtgtgaatgtgtatgtgtgggtgtgaatgtgtgtgtaaaggtgattgtgagtgtgtgaatgcgtgtgtgaatgcgtgagtgtgtgactgtgtgaatgtgtgaggtg

SEQ ID NO: 181812 - DNA, 410 bp, Homo sapiens
tctttacttttctctccttgtgtcttctttctcagtctgtctaccttatcacctcctggatttccttatcacctcctgggtgcatccttattgccacaccagactgatcaaacatgttaggtacaatcttcatcccagatgtgttcatttgttgatgggtgctcaaagactacttcttcactgcccctctaaaaagagaaagtttcaggctgggcgcggtggctcacgcctgtaatcccagcattttgggaggccaaggcagggggatcatgaggtcaggagttcaagaccagcctggccaagatggtgaaaccctgtctctactaaaaatagaaaaattagccaggcgcggtggcaggcccctgcagtctcagctactcgggaggctaaggcaggagaatcgcttgaac

SEQ ID NO: 181813 - DNA, 1680 bp, Homo sapiens
gagctagcatcaccctgagaaagcaggctggccccaggactcacgggcgtccatgcagctgatggaggggagctggaccggacgactgtgctctcttagctctagcatcaccctgagaaagcagcctgtctccgggactcacgggcatccatgcggctgatggagggagctgggccggacgactgtgcttctcgtgcttcatgtagaacccttaggtttgcccctgaagtctgtctgctccatgtactatttagttgcttttcagcatagagcttggttttccctttttttaattgtaagaatgatgtgctctggcatgtcacactgtgaaaggggaccagatgatggagcctggactgaaagggtgaatggggccgctcacctcagaactctccctgctttgctttgctgggagcagggagcagggcagcctgggagaggctggagttcctcaaagggcagagaagaatggccttcaggggaccacagggaggaaccatgccatgatagactcaaaaagctagattatgctaataaaaaggggaagacatctgtgacacacaggaaacagtgttcgtggccttgccatagaaggcgcagtaaaggaggaaaactccggagactccctgtgaattcttggctaagaatgcacgttatctgcagtgatctaaaaacacaaacgagaacagaagtgagtggccctacctgtgagatgcacagtgctgagcggcacccagcgctggctgcaggatgggaggctggctgccgtatgattgttcgtgggaagaaattttgtagaagttatcaagctccttaaaatgttcgtgctgtgtctgcctggacagttgcaattctgagaagcgatccttgaaaatgattctgggtatagaaaaaggtacagcacagtggtgttcttagtatggctgtttacagtcgcagaaaatgagatgctaaactgctgccctaggggattggttaagcaaactggtgcttccactccatgagataggatgcagccatttgaaatatttatgaaggttttggacagtcatttggaataatggttttgttggggctcttaacttgcaagccaatagaaaagaaatctggctaatataatcctataaattatttccctacagcccatttttaaggttcccagtaactttcagaatcaaaggagacatcggatggccaggcctcagtagtggcaaggcccaggcagttccagatccctgcagcctgccactaccccgagtctctccaggtcaccagccaggcttgggggtgatggaggaggactcggtaagggacagttcacttggcaaatgtttagggagcacctgctgtggccaggcattgccctagaggcagggaatatgatagaaattgcggcagtacaggaaggtaaggtccctgtaccgcagagctcacagtctcatgggaaggagttcttacacaggtgaggtaagtgttagggagaaactaaagccaggtaatgagagagggcagtggggctgcagaggctggggtgagccacagactactgtagacacggtagcaacgtaggtctcttaagaaagtgacacacaacgtaggcctaatcacagcactttgggaggccaaggtgggaggatcactgagaccagcctgggcaacatagagagaccctgtctctgt

SEQ ID NO: 181814 - DNA, 553 bp, Homo sapiens
ctggaagattgggtagatgaaaacacaaatcaaaaatcagataatgtcagataacaagagatgctaagaaaaataaaacagggtgaggagatggagtgacatggatgggaacttggtcagggaagcctcctttgaaaagataccattttataacagtcctgaatgaagagaacagatcagtcaagtgaagatgtcaggcaaaagtattccagacagagaaaatagctcagacaacgcccaagacagaagtatatttgggatgtttcagaataaaaggaatctcattggggttaaaaattatccaagcagagaagaaggcagaagccaagattatgtaggccttgtagactatacaagcaattaaggttgtattcttttgggatggactccagtggaggatcttaaatggaaaagtgacattactacttttatgaacgagcactctaacttttcttctagatggaggataaagtagggatacaagaatggaagcagtgaaaccatttagaaggtcatttctttggaccacgtaagagatacatgatggcatgaa

SEQ ID NO: 181815 - DNA, 536 bp, Homo sapiens
aagcgatcctcctgcctcagcctcctgagtagctaggactgcaggcaaacaccactgtactcagctaatttttaatttttttgtagaatcagggtctccctgtgttgtccaggctggtctcaaactcctgggcccaagtgatcccccctacttagcctcccaactgtctacagtttatgaagttaacatttgtgatttgctcctcttttgtgagttgcacttgaggggagagattattgcccttgttaccaaaggaatatgaactaagattgagttgaaagggcaattaaagtgatttttggacctatttccctatttcttgagagatagcagaacatagatcctatagtatcaggctcaaagggcatcagtgccccattagaaagtcatctttgggctctgacccatttgttcctggctagcattgagagcagctgtttcctttcctccctgaggaatcactgagcgtggtctattctttggcttcctaacctctctcatagcacataccttagatgaattatctgcattcccac

SEQ ID NO: 181816 - DNA, 769 bp, Homo sapiens
ttgcgcaggctggagtgcaatggcacaatctcggctcactacaacctccacctcttgggttcaagcaattctcctgcctcagcctcccctgtagctgggattacaggcatgcgccaccatgcccagctaattctgtagagacagagttcttcagcagagacagggtttctccatgtttgtcaggctggtctcgaatcccagcctcaggtgatccacccaccttggcctcccaaaatgctgggattacaagcatgagccaccgcgcccggccaagaatttttatacatacataatccagcaggtatcagccttttttcctgcccaaacacaagaaagaacaacttgacagacacaacaacttcctctattaaaaccagttttattccaaaaggggggcaaaatgctgcattatacaaagagactctattacagataaaataagtgctgtgggttccctacatgagaggagggaaactgaattcagttacagcaacaattaagcatgcgggaaaatgctctcctcaaaggaaaacggaagaggtgcgtcatgaaaaccatgcagtctccgggagcttgaatcaataggcaataattatttttacaagttatccaataatcaatttgagagatcaataggaaacataaaaaaaatttcttggtcaaatcttttctgcctacaaactatctagatgggagatagatgaggtaatactgacaaaaggcagatgtggaaataaaatggtcacccatatttcagtcataaaaatgg

SEQ ID NO: 181817 - DNA, 659 bp, Homo sapiens
tgggaagtaatttcccatgctgttgttgtgatactgaatctcacaagatctgatggttttacaaaaggacagttcccctgcacacactctcttgtctgctgccatgtaagacataactttgcttctcatttgccttacaccatggttgttaggcctccccaggcaggtgtaactgtgagtccattagacctcttttataaattacctagtctcagatatgtctttattagcagcgtgagaacagtctaatacagagaataacaccttaaatgaaataacctttttggactctacatttcttcctgtaatttgccatttaatttccttttttatatacaagaaactagcattgcaatttcttagtacttaaatctcattacaactaacattgatgagctggtgtcctacgaagcattttcagatatccttggaagaccttgttcctttttttccccctgagaagttaaatatctaattcaaaggattttttaacctggacaaatttgttcttgaacaggtttatccatacctaactggtcagcatctttgccagaagatgaaatatgtaataagcaccaattgccttgttgtagcatgttagaaagccagttaggaattcagcaacttatggcctatcaaaacctgtagctgcttttcga

SEQ ID NO: 181818 - DNA, 126 bp, Homo sapiens
atcccgacagctacggcagcagctgaggctgccgatctgccctcgcggctcggctgcggcctccgcacccggtcccagcgcctgcgggagggctgacttgcccgctctgcgcttcccccgggcagg

SEQ ID NO: 181819 - DNA, 230 bp, Homo sapiens
attaatctgcacacccctgaaatcactattccaacttctatcactatttgttagttttgcttctgtgttcttcgacttcatataaatggaatcatacagtatatattcttttttgtttgacttcttttgctcaatataaggttagccttaccacaacttagtcaaatggaagaaatacagatgataggctatagttgccaagggctctgtctacataattcttataaaat

SEQ ID NO: 181820 - DNA, 490 bp, Homo sapiens
atcccagttctggaattcaataaagctgtatcttttaattaattgttatttctatgaataactattcaaagtgtcagcgattatgtaaaattattaacactttaaagctgtgtgtgtgtgtgtgtgtgcgtgtgcgtgtgtgtgtgtgtgtgtgtgtgtgtgtgtgtaagtattagctcttccccaagttggagtactgtttatttgcctgtttcatacaggatttatgctttttaattatgaaagccaaattattccaatcctctaaaaatctatgcaagatcaataagaacagaacagataaaatcataaaactccatgtttttggcatgagaggaagacagagaacactacaaattttaaactctccataagtagaaaggtaaacactaacttctggaaaagagatttctcaagtttccttctcaagtctttgtggagagctgagtttttagaaaaattgcatggaaaagagaagatgtaattgagc

SEQ ID NO: 181821 - DNA, 304 bp, Homo sapiens
ccctgctgtggccacctgccctaaagcagcccagggttctcctctcctaagctcgcagctgctacttcataccaagctccagggtgagggctttggtaattggcatcggtgtctgaggcggatgtaggcaggaacagattgaatctgcatgagctatttcggtgtgacaagggagctggaatagttgcagcagaatgcagtgtaaccaggagccagataatcctttctggctccaaagacaggggtttctgtgttgtcctgagacatgggtctcctttctttgccttcttgagtgcacaggcat

SEQ ID NO: 181822 - DNA, 186 bp, Homo sapiens
gatgttccccttcctgtgtccatgtgatctcattgttcagttcccacctatgaatgagaatatgtggtgtttggttttttgttcttgcgatagtttactgagaatgaaattttttcagttttatacgtttatgtaagtggcaccatacagtacatattattttgcaacttgccttttttttttttg

SEQ ID NO: 181823 - DNA, 323 bp, Homo sapiens
acaaaagagtaaggagtgtccacctgagaaggatgaagaagtggtaacctcaggaataagttgaattcagttatgccaaatggggaaaatgaatattgaggaataaatgagttaattatcatagaattggggtttctgatagcacaataaatgagtgctgcttcaataaagaagtgagcaataaaagaaagcatgaatctaaaatctttacataacaggatggttgtgttgaaaagaccagataattagattggcctataatttagattatggacaaaattatgaagacgggaaagtcagttagctcacatggccactcaata

SEQ ID NO: 181824 - DNA, 507 bp, Homo sapiens
acttgttagttttcgttattatttatttatttttattgatcattcttgaggtgtttctcgcagagtggggattcgtcagtgatcatatggtcacactactgtgatggaaggtcagcagataaacaagtgaacaaaggtctctggttttcctaggcagaggaccctgcggccttccgcagcgtttgtgtccctgggtacttgagattagggagtggtgatgactcttaaggagcatgctgccttcaagcatctgtttaacaaagcacatcttgcaccgcccttaatccatctaaccctgagtggacacagcacatgtttcagagagcacggggttgggtactacgctttggctgccaaagcgtagtacccaatagctaggactacaggtatgcaccaccacacctggctaatttttgtatttttagcagagatggggttttgccatgttggccatgctggtcttgaacccctggcatcaggtgatccacccgccttggcctcccagag

SEQ ID NO: 181825 - DNA, 395 bp, Homo sapiens
ataaggaatcaacacttcaggtgggttcatgaggacgccattccaaacaactagaactctacccatggtggaaccccttcctcctcccttcggaagcagtcatcattgtctggatgtaaatccccagatgtaaccctgattgatctcattttctcttttctggcactcagtggatatgtggattctagcttgtctgtgatagctttctttccctagcatgaatgatctgtttctttaccataagttttttttcaaagccttacagatatgaaaatgacccacactccagtcttttctaaaaagtatggatggtgtcatcagacactttcccccccgcaaaaaaaaagagagaatatttgcttctttccaaataccatcaaaatactctgtgtgct

SEQ ID NO: 181826 - DNA, 327 bp, Homo sapiens
agataataaagctaaggttcagagaaatttttaaaaaatctttcttgaggtcacataactaagtgatgaagccagaatgaaatacaggtcaagtacaggtaagcctgtgatctttccaacacaccatgcttgcaatagcagttataaaattatccaagaccaacaattaacccaattaaaaactgagctaggggtttgaacagaaatttctccaaagaagatacacaaatggcaaataaactcctaaaaagttgctcaacatcattagtcactagggaaatgcaaatcaaaatcacagtgagataccacttcacgcccaccagaatg

SEQ ID NO: 181827 - DNA, 255 bp, Homo sapiens
gttcgggctagtcacttaccttctctgatcaccagttgtctcttgtaaagcgagatgtaaaactaggtggctcttcaaactctgacattggtttttttctttatttactatacataccaatgccaaataaggtgccgtaagaaaaaagaaaggtggattgcacactgaaattgggctcgttttcatagactgaacctacatggacatttactggcctaaagtaactttatctctttcttttcttttcttttcttt

SEQ ID NO: 181828 - DNA, 477 bp, Homo sapiens
ggacaggtgatgccaaagagacagagggccattacaggacacagccaaagagaagtgggaaaggaattcttatcccccacaagaatgtaagctcttgagagcagggactgttttgtaatctgctacatacctagtgcctaaaaccgtgcctggaacataaaaagcactcaatactggtggaacgaatagacaaatatgaatgaatcatttgtttaggtaccaggctctgcacaaggttgtccacacaccagcccagtgagataggtgcttatgccattttacagatgaccaaattgaggctcagagtggtaaagtgaaacggcaaggatccgaaccaggtgcagcagactccaaagtctatgctctttctttttttttttttttttttgagacagagtctcgctctgtcgtccaggctggagtgcagtggcgcgatctcagctcactgcaagcttcgcctcctgggttcacgccatt

SEQ ID NO: 181829 - DNA, 748 bp, Homo sapiens
ctggctgaccacatttcaagtgcgcattagccacatgtggctagtggttactgtattggacagcgctggtttagagagttaacgtttcttgcaacttttcagtattagacaaaaagacactttgggaggccaaggcgggtggatcacctgaggtcaggagttcaagaccagtctggccaacatggtgaagccccttctctactaaaaatacaagggttagctgggcgtggtggcgctcgcctgtagtcccggctactcgggaggctgaggcgggagaattgcttgaaccctggaggtggaggttgcagtgagccgagatcacgccactgcactccaggctggagacagagcgagactccgtctcaaaacagcaacaacaacaacaacaacaaaaaaaaaacccttgagttgctcatgtatgtaactcttcccatcctccatgagaatgaagctttttcagtagcttcatttttgagactaagtacctgaatgttagtaagacatttcccccaaactgtgagtatatctctgtgtatctcttatagtataagatgtcgtttgcattaacaaaagcttatccagcctgggcaacagagcaagaacccatctcttaaataaaaaactaaagaaagcccaaaaacaaaaaacacaactttcccacataccaaactctatatggaatacgttttttccctcctacttaagaaggggattcaggggacaacatgaattgataaggaagccacgt

SEQ ID NO: 181830 - DNA, 425 bp, Homo sapiens
ctaaatcaagtgttagcaagggtaccttcctttctggaggctctggggaagaatccatttccttgtcttttccaggatctagaggctgctcatatcccttggttcatggtccccctcttccatcttcaataagcaatcttcagctgagtctttctcatattgaatcctactctgcttccctctttcacttttaaggaccacgtgattatattgtgtcccagataatacaggataatctcatctctagaaccttaattttttccagctataaaatcccttttgccatgtaaggtaacatattcacagattcaacccagtatccaaccctgttaggttgtggacatcttttggcagaggagggagggaataggcaggcattatcattttgtatgcaacattatagaaaagacagatagtactcatta

SEQ ID NO: 181831 - DNA, 440 bp, Homo sapiens
cacagaacatgacccagtccacccaagggaatgccaaacccagcagagaaaaggtcaagcccagcaaaggaacacgagagagaaaacgtcaatccaagcaggaaacgtcaatccaagctaccaacgccaagccaagccaagaacgcaaagccaagccaagccgctacaggccagccaagccgttaaagcgcgtgcagcatgcgcgtgcaagccattacaggccagccaagccgttacgcgcgtgcggcgtgcgcgtgcaagccgttacaggccggccaaaccgttatgcgcgtgcggcgtgcgcgtgcaagccgttacaagccagccaagctgctgccgggcgtgtgcgcgcggcgtgcgcgtgcgcgtgcggcgtgcttatctcaggtggcgtcagggcacgtggcacagacactggccgatgcatgcaacgcgcctgc

SEQ ID NO: 181832 - DNA, 640 bp, Homo sapiens
taagccttcaagtatcaagttcaatgccacctcctcagggaagcctttcttgccaccccaggctagggctgtcagacaccctcacagtagcagcctttactcttgcagcaccagtcacaatggcaattaaagaattattgagaaatttacaagtgtcatgagggcatcatcagctttgttcactcatggatttccagaacttgcacattgtaggtgctcaaatatttatactgatattcagttttcccctctaactctcccaactcctactcaattaactcagaaaagtcctatttttattttttattcatgtttgaccccaaacaaaataaaccatagcaccctaccccaccaccacccaacatgacagattaatattagaatgatgctattttagatctgtaccaaagaaaatgatgtgaaagaatgaagaatgaaggactacatgtatctctaaatctgagtttataaaatggcagtttacattgaattcaggtaccacgtgtgatttacttaacttgtgctgcttaggaaaatgaaatgtaggtttgtgaatccattgagaaaccaaaagatctggcaacatagatgatggattcccgcatggtgactacagactgggagtgagtagccgtggtgc

SEQ ID NO: 181833 - DNA, 1349 bp, Homo sapiens
ctgtagcaggcagagcttaccaagtctctccgaactcaaatggaagaaataccttatgaatgtaagaatgtagggggtcatggcttgtaatttacacagtgtaaatgaaaccatcctagaggattatgaggaatcctttctatgtgattttcaatcatagcaagcaagaaaggctccagtgtcaaggtagttcagctcttacaggatataaaacagtccatacttgagagaaaaaacttagatctgagtgatggaatgtgaagcaaatctttcaaaatcagtagacatttcttggacataaaacacagatgaggaaagggcttcaaattagaagttacgtaatcaccatcagaaagttcatgtttggtaaattctgttactagaaatgtaggaaattcaggtatagctttgaatcccaattacacattggtcagtgggaaaactaagggcctccaacaggcaaattcagggaggataggtttcagggaatgccctggattctggaagacctcaccatgggacgcccccgacctcgtgcggccaagacgtggatgttcctgctcttgctggggggagcctgggcaggacactccagggcacaggaggacaaggtgctggggggtcatgagtgccaaccccattcgcagccttggcaggcggccttgttccagggccagcaactactctgtggcggtgtccttgtaggtggcaactgggtccttacagctgcccactgtaaaaaaccgaaatacacagtacgcctgggagaccacagcctacagaataaagatggcccagagcaagaaatacctgtggttcagtccatcccacacccctgctacaacagcagcgatgtggaggaccacaaccatgatctgatgcttcttcaactgcgtgaccaggcatccctggggtccaaagtgaagcccatcagcctggcagatcattgcacccagcctggccagaagtgcaccgtctcaggctggggcactgtcaccagtccccgagagaattttcctgacactctcaactgtgcagaagtaaaaatctttccccagaagaagtgtgaggatgcttacccggggcagatcacagatggcatggtctgtgcaggcagcagcaaaggggctgacacgtgccagggcgattctggaggccccctggtgtgtgatggtgcactccagggcatcacatcctggggctcagacccctgtgggaggtccgacaaacctggcgtctataccaacatctgccgctacctggactggatcaagaagatcataggcagcaagggctgattctaggataagcactagatctcccttaataaactcacaactctctggttc

SEQ ID NO: 181834 - DNA, 626 bp, Homo sapiens
agcctcccgagtagctgtgattacaggtgtgcaccaccacacccagctagtttttgtatttttagtagagacagggattcaccatgttggccaggctggtctggaacgcctgacttcaagtgatctaccgcctcggcctcccaaagtgccgggattgcaggtgtgagccaccaagcctgtctgggatttcattctttcccctcttctgtcagtgttttgaccactacccttagacaccatgtctgtctgtacatggaagccccaagccctgtcctgactggtctcaggggacaatgcttttacccccattggctacaggggaccaatcatgccaaagaactggtaaaacgctgggacagcaggaaaagggacgttgtggacatctcagatgcaaggctgttctcattctccctgtctagggcgattctggaggccccctggtgtgtgatggtgcactccagggcatcacatcctggggctcagacccctgtgggaggtccgacaaacctggcgtctataccaacatctgccgctacctggactggatcaagaagatcataggcagcaagggctgattctaggataagcactagatctcccttaataaactcacaactctctggttc

SEQ ID NO: 181835 - DNA, 575 bp, Homo sapiens
ggaaagaaagggggttagatccagacagggatggaggcaaagggctgctctctcagggaaccttacaacctcttccccctcagagaattttcctgacactctcaactgtgcagaagtaaaaatctttccccagaagaagtgtgaggatgcttacccggggcagatcacagatggcatggtctgtgcaggcagcagcaaaggggctgacacgtgccagggcgattctggaggccccctggtgtgtgatggtgcactccagggcatcacatcctggggctcagacccctgtgggaggtccgacaaacctggcgtctataccaacatctgccgctacctggactggatcaagaagatcataggcagcaagggctgattctaggataagcactagatctcccttaataaactcacaactctctggttcaaaacatgtctctgttttggccctgtggggagggctggatggggatccgggattgttcctgctggcagactaggtggggatgtgcagaaaccaagttctcatggtcactttggccatcaccactgcctaaagtgatccctcgttttctgga

SEQ ID NO: 181836 - DNA, 777 bp, Homo sapiens
agcctcccgagtagctgtgattacaggtgtgcaccaccacacccagctagtttttgtatttttagtagagacagggattcaccatgttggccaggctggtctggaacgcctgacttcaagtgatctaccgcctcggcctcccaaagtgccgggattgcaggtgtgagccaccaagcctgtctgggatttcattctttcccctcttctgtcagtgttttgaccactacccttagacaccatgtctgtctgtacatggaagccccaagccctgtcctgactggtctcaggggacaatgcttttacccccattggctacaggggaccaatcatgccaaagaactggtaaaacgctgggacagcaggaaaagggacgttgtggacatctcagatgcaaggctgttctcattctccctgtctagggcgattctggaggccccctggtgtgtgatggtgcactccagggcatcacatcctggggctcagacccctgtgggaggtccgacaaacctggcgtctataccaacatctgccgctacctggactggatcaagaagatcataggcagcaagggctgattctaggataagcactagatctcccttaataaactcacaactctctggttcaaaacatgtctctgttttggccctgtggggagggctggatggggatccgggattgttcctgctggcagactaggtggggatgtgcagaaaccaagttctcatggtcactttggccatcaccactgcctaaagtgatccctcgttttctgga

SEQ ID NO: 181837 - DNA, 792 bp, Homo sapiens
ctgtagcaggcagagcttaccaagtctctccgaactcaaatggaagaaataccttatgaatgtaagaatgtagggggtcatggcttgtaatttacacagtgtaaatgaaaccatcctagaggattatgaggaatcctttctatgtgattttcaatcatagcaagcaagaaaggctccagtgtcaaggtagttcagctcttacaggatataaaacagtccatacttgagagaaaaaacttagatctgagtgatggaatgtgaagcaaatctttcaaaatcagtagacatttcttggacataaaacacagatgaggaaagggcttcaaattagaagttacgtaatcaccatcagaaagttcatgtttggtaaattctgttactagaaatgtaggaaattcaggtatagctttgaatcccaattacacattggtcagtgggaaaactaagggcctccaacaggcaaattcagggaggataggtttcagggaatgccctggattctggaagacctcaccatgggacgcccccgacctcgtgcggccaagacgtggatgttcctgctcttgctggggggagcctgggcagggcgattctggaggccccctggtgtgtgatggtgcactccagggcatcacatcctggggctcagacccctgtgggaggtccgacaaacctggcgtctataccaacatctgccgctacctggactggatcaagaagatcataggcagcaagggctgattctaggataagcactagatctcccttaataaactcacaactctctggttc

SEQ ID NO: 181838 - DNA, 1077 bp, Homo sapiens
ctgtagcaggcagagcttaccaagtctctccgaactcaaatggaagaaataccttatgaatgtaagaatgtagggggtcatggcttgtaatttacacagtgtaaatgaaaccatcctagaggattatgaggaatcctttctatgtgattttcaatcatagcaagcaagaaaggctccagtgtcaaggtagttcagctcttacaggatataaaacagtccatacttgagagaaaaaacttagatctgagtgatggaatgtgaagcaaatctttcaaaatcagtagacatttcttggacataaaacacagatgaggaaagggcttcaaattagaagttacgtaatcaccatcagaaagttcatgtttggtaaattctgttactagaaatgtaggaaattcaggtatagctttgaatcccaattacacattggtcagtgggaaaactaagggcctccaacaggcaaattcagggaggataggtttcagggaatgccctggattctggaagacctcaccatgggacgcccccgacctcgtgcggccaagacgtggatgttcctgctcttgctggggggagcctgggcagagaattttcctgacactctcaactgtgcagaagtaaaaatctttccccagaagaagtgtgaggatgcttacccggggcagatcacagatggcatggtctgtgcaggcagcagcaaaggggctgacacgtgccagggcgattctggaggccccctggtgtgtgatggtgcactccagggcatcacatcctggggctcagacccctgtgggaggtccgacaaacctggcgtctataccaacatctgccgctacctggactggatcaagaagatcataggcagcaagggctgattctaggataagcactagatctcccttaataaactcacaactctctggttcaaaacatgtctctgttttggccctgtggggagggctggatggggatccgggattgttcctgctggcagactaggtggggatgtgcagaaaccaagttctcatggtcactttggccatcaccactgcctaaagtgatccctcgttttctgga

SEQ ID NO: 181839 - DNA, 1013 bp, Homo sapiens
gttcccagaagctccccaggctctagtgcaggaggagaaggaggaggagcaggaggtggagattcccagttaaaaggctccagaatcgtgtaccaggcagagaactgaagtactggggcctcctccactgggtccgaatcagtaggtgaccccgcccctggattctggaagacctcaccatgggacgcccccgacctcgtgcggccaagacgtggatgttcctgctcttgctggggggagcctgggcaggacactccagggcacaggaggacaaggtgctggggggtcatgagtgccaaccccattcgcagccttggcaggcggccttgttccagggccagcaactactctgtggcggtgtccttgtaggtggcaactgggtccttacagctgcccactgtaaaaaaccgaaatacacagtacgcctgggagaccacagcctacagaataaagatggcccagagcaagaaatacctgtggttcagtccatcccacacccctgctacaacagcagcgatgtggaggaccacaaccatgatctgatgcttcttcaactgcgtgaccaggcatccctggggtccaaagtgaagcccatcagcctggcagatcattgcacccagcctggccagaagtgcaccgtctcaggctggggcactgtcaccagtccccgagagaattttcctgacactctcaactgtgcagaagtaaaaatctttccccagaagaagtgtgaggatgcttacccggggcagatcacagatggcatggtctgtgcaggcagcagcaaaggggctgacacgtgccagggcgattctggaggccccctggtgtgtgatggtgcactccagggcatcacatcctggggctcagacccctgtgggaggtccgacaaacctggcgtctataccaacatctgccgctacctggactggatcaagaagatcataggcagcaagggctgattctaggataagcactagatctcccttaataaactcacaactctctggttc

SEQ ID NO: 181840 - DNA, 590 bp, Homo sapiens
gttcccagaagctccccaggctctagtgcaggaggagaaggaggaggagcaggaggtggagattcccagttaaaaggctccagaatcgtgtaccaggcagagaactgaagtactggggcctcctccactgggtccgaatcagtaggtgaccccgcccctggattctggaagacctcaccatgggacgcccccgacctcgtgcggccaagacgtggatgttcctgctcttgctggggggagcctgggcagagaattttcctgacactctcaactgtgcagaagtaaaaatctttccccagaagaagtgtgaggatgcttacccggggcagatcacagatggcatggtctgtgcaggcagcagcaaaggggctgacacgtgccagggcgattctggaggccccctggtgtgtgatggtgcactccagggcatcacatcctggggctcagacccctgtgggaggtccgacaaacctggcgtctataccaacatctgccgctacctggactggatcaagaagatcataggcagcaagggctgattctaggataagcactagatctcccttaataaactcacaactctctggttc

SEQ ID NO: 181841 - DNA, 1635 bp, Homo sapiens
ctgtagcaggcagagcttaccaagtctctccgaactcaaatggaagaaataccttatgaatgtaagaatgtagggggtcatggcttgtaatttacacagtgtaaatgaaaccatcctagaggattatgaggaatcctttctatgtgattttcaatcatagcaagcaagaaaggctccagtgtcaaggtagttcagctcttacaggatataaaacagtccatacttgagagaaaaaacttagatctgagtgatggaatgtgaagcaaatctttcaaaatcagtagacatttcttggacataaaacacagatgaggaaagggcttcaaattagaagttacgtaatcaccatcagaaagttcatgtttggtaaattctgttactagaaatgtaggaaattcaggtatagctttgaatcccaattacacattggtcagtgggaaaactaagggcctccaacaggcaaattcagggaggataggtttcagggaatgccctggattctggaagacctcaccatgggacgcccccgacctcgtgcggccaagacgtggatgttcctgctcttgctggggggagcctgggcagcgtgtggaagcctggacctcctcactaagttgtatgcggagaacttgccgtgtgtccatttgaacccacagtggccttcccagccctcgcactgccccagagggtggcgatccaaccctctccctcctgctgcaggacactccagggcacaggaggacaaggtgctggggggtcatgagtgccaaccccattcgcagccttggcaggcggccttgttccagggccagcaactactctgtggcggtgtccttgtaggtggcaactgggtccttacagctgcccactgtaaaaaaccgaaatacacagtacgcctgggagaccacagcctacagaataaagatggcccagagcaagaaatacctgtggttcagtccatcccacacccctgctacaacagcagcgatgtggaggaccacaaccatgatctgatgcttcttcaactgcgtgaccaggcatccctggggtccaaagtgaagcccatcagcctggcagatcattgcacccagcctggccagaagtgcaccgtctcaggctggggcactgtcaccagtccccgagagaattttcctgacactctcaactgtgcagaagtaaaaatctttccccagaagaagtgtgaggatgcttacccggggcagatcacagatggcatggtctgtgcaggcagcagcaaaggggctgacacgtgccagggcgattctggaggccccctggtgtgtgatggtgcactccagggcatcacatcctggggctcagacccctgtgggaggtccgacaaacctggcgtctataccaacatctgccgctacctggactggatcaagaagatcataggcagcaagggctgattctaggataagcactagatctcccttaataaactcacaactctctggttcaaaacatgtctctgttttggccctgtggggagggctggatggggatccgggattgttcctgctggcagactaggtggggatgtgcagaaaccaagttctcatggtcactttggccatcaccactgcctaaagtgatccctcgttttctgga

SEQ ID NO: 181842 - DNA, 501 bp, Homo sapiens
ggacccccaggccttttcccctaaatttgcaacatgtatttttctaggacagtgattttatctttacaaatgaatttagttgcatggcgtgaggtgtctcagcacctgtttgccttctattccctttagaaggtaagtaaaagtaatgggggaaaggattaggtggagcctgtctaaacattctagtgtgtcttggcaaacatagcctgaaatgattcttaaagaactggcattgtttaatcaaatatttttaagggagattcctattttgtcccattaattaatttgtctatttttacatcaatattacaatatcctgatgactggacttgcaaccagctagcattggtactgtacctctgttcttttttaaggttgtttgggctattttaggtcttttgtatttcaacataaattttagattcagtctgtcaatttctacacatgatcttacttaagttttgattgggattgcattgattctatccataagtttggggg

SEQ ID NO: 181843 - DNA, 143 bp, Homo sapiens
attctgtacccttcacacttgttctataaagaactgcccaagactgagtaatttaaaaaggaaagaggtttaattgactcacaattcaacatggctgaggaggcttcaggaaacttacaatcaagtggaaggtgaaggagaag

SEQ ID NO: 181844 - DNA, 380 bp, Homo sapiens
tctgtgccgtaagtgccaattctatgctcaattatgtaccccagcataaaatgcatctccatattgctaaataaagattcacaattagccaggagcagtggctcatgcctattatcccaaaaacttgagaggctgaggtgggagggtcgcttgaggccaagatttcaagaccagcctgggcaatatagttacatcccatctctaaaataagatatttaaaaattagtcaagtgtggtggtgtgtgcctgtagtgccagctacttgggaggctgagccagaggactgcttgagtccaggggttctaggctgcagtgaactatgatggagacactgcgctccagcctaagtgacagagtgagaccccatctcaaaaaaaaaa

SEQ ID NO: 181845 - DNA, 282 bp, Homo sapiens
aattgactcccaacgtaattaggccagggctaccaggcaaaaaattcctcaaattattcagaaccccagagctattcttttgcaatcactcaagtaactgagaaaagagtcaacttttaaatataaatttgttatcagcatcatcattgtccaagcaattcccagcactccacctgcccaagaatatagactcatgagctgagctgagttgagaaccaaatacaggaatacttctctccagccagccaaaatcttttcttccactgggacctggaggcaatc

SEQ ID NO: 181846 - DNA, 196 bp, Homo sapiens
aaaatgcaagtggcctattaataaaggattggggaacatgaattaaaacctagaatggtataaagaggttgcctcatctagaatttatgccctcatccttcaaacagttcatgagaggtactcacagctgctataatcagcaaagctgaattccttgagatctattcatccttccttgctagaagacctgatacat

SEQ ID NO: 181847 - DNA, 365 bp, Homo sapiens
ccaaacccaacttcacacaggttttttcctgctgtcttcttttatagctctgtgttttacatttaggtctatgatccatttgatggtttctgtgaaaggtgttagatgtgtcttgattcactttttgcatatggatgtccagtagttccagcagtatttgttgaaaagactgtcctttctccattgaattgcctttgctccttgatcaaaaatcaattgatctttgactaagatcaatttgtatttgtgtgagtcacacaagtgtgtttgcgtgggtctatttctggtctctttattttgttccatcaatctagttgtctgttcttttgccaataccacattgtcttggttactgtagctttaca

SEQ ID NO: 181848 - DNA, 616 bp, Homo sapiens
gtgtggctgctcacagggcatactgaaaagttaaatatgtctggattgtagggtgcatagaggaatgatgagaacctgaagctagaaaaatagaaagtggagccagttgaaagattttatagtgctgtaggtttgttttatctaatgaagtttgaaagcagggggagtatcatgattaggccattgggcacaattaacactcgtagtttacatggatggcaaccttctctagtggtgcagacttcaggctgtatgcagcaaccctgatcaggattcagttcttaaggaggagagtgtgatagcaggagaataagttaggattcttttaaaatataactgatagaagatgcctatgttgaaaacatggcattggtgagggagaagaaaagttagatttgattgagatttctaagctagaactgatagaattgacctgggtacatagtgatgtctttaaccagtattaaagatgaaaagaacaagttttaggaaatgataatgagttcctttcaggcctgttaaatttgagtggctacaggattttcatctggatagaagtataaagcgttgagctcaacgctttatacttccaaaatcagcagtctcctggaggagc

SEQ ID NO: 181849 - DNA, 875 bp, Homo sapiens
ctagcctccttatgcaaaattcataagtgcaagtcatattcatctttgttgcttggttatgtcctcccctaaagaatctttgtgtatctaatacaaacccagaagaataaaaaggcttttcaaacaaaaaaataatttacctcttaaaaaattcctgaaaactaaaacatgacctcttaaacctaaaatatttctaagtcttaagtagctggatataaggacttgtctcctccccctattttttggaagaattgcttaccgaacaaagatatttgtaatggaaatttgtttccctccctctccatcatctaatgataggttcccacataatggatttatattagtaatgcagagagaaaagcaggcctcaaagtctgatagattttcttttatatgaccagcttttagattattatatacaagatgtagcttaagtgttctggaaatgagtaaaagtgaatcttatgtctcagatagaatgtaggagtacttttgcatgacaggaacttggcagcttgcatttcttgtgtcaatataatttaaagtattctaattttctgcctaaaacttatttttatagtttggttgcatgtactacctaaccgttaagaaagaaataggatcattgggcatgtgggctttatgaattaatacaggtagaatggttctatgaataattattagtccgcagagtgttattaaatttcaatccgtttggtctcaaggtctcaaacgcttcggtggttcacgcactcaggtggttcaagggctttgcaacatacacatgatggggcacgaaactggtaatctagcgcaaatggacaaggacatgtgtgtcttgcacacgtgtctgttcattcggttgtttttatcct

SEQ ID NO: 181850 - DNA, 363 bp, Homo sapiens
aatttgaaatcttgtgtcctttaatttgaaatcttttcaaatttgtgttcatattttaagacattaaattttttcagtaaataatttaaaacagtgtcctttaatttgaaatcttttcaaatttgtgttcatattttaagacattaaattttttcagtaaataatttaaaacagtactctttgtatttgagatgaataaacatgagaattaaattgtagagtttatcctaaaaacttgatttaatttatgataataggtaataaatagactgctcctttccttacgtatttttctaaaatattcaccctcttttacacttgttcgttatacattaaaactaaaataatctgtttacttgatct

SEQ ID NO: 181851 - DNA, 626 bp, Homo sapiens
  misc_feature (85)..(85): n is a, c, g, or t
tcgaatcgacggtttctcttccactatgttaggaggtgatctcagagctttgtcagcacacgctctaacaactgagctaaacganctgctgatctcagaggctttgtaattggaccatagtttgaggcatcttgtgtgagttccttaaaaaacttttttcctcagtgcgtaatagtataatatatattacgtcttatttctttcctttctttcgtcctggaggcttgggagaaacctggtttcttaaattctttctgaaagcttcatcattccccttctactttgggaaccttgatttccctggtttttgctgggagagaagtagaagagagaagctaagtccaagagaggagagggatttcaccgcctcctttagccttcttgctcctttcatggctctgccccatattctcattttccaaacattccaatcacctagagagggttgtttttttgtcttcgggtttttggttgtttttataaaatagagttcttggggcccacttttagttattatacttaaggaagtctggggcttcagtcctgagaatctgtgtatttcttgagttatgcaggtaattttgatgcccagttagatttgagaactgtaggatatgtttcccacc

SEQ ID NO: 181852 - DNA, 467 bp, Homo sapiens
ctccagcaagatttttgagtgtgactttttcgtccttctgcgatctgttttgcattccaaggtggtttttttttttcatatttttacccaaaatagaaactgagtctaactagaagtcaaatacaattcataaatcaaattgctttgtgatatttttaatagtataaatactggtaaagtgacatttatcttttgctgtaacagctagtattttgcacttaattagaactctaaaagtaggaaaacacacaacacaataaaattgttgcaagatcttctagttccttgatcccaaatttttgacattgggaatttaagatccgtctaccttaaaatatttcatgaaactaaaacatttagggataataggtcttaagggaattactctggttgaggaggttaaaaaaactaatctgatagctattattgaattttcaatgttttactttttaaaaaatttattaaaa

SEQ ID NO: 181853 - DNA, 126 bp, Homo sapiens
aacaaataatacaccctagtcaatgacatccattctgaagtgattaagagtaccattaatcatttaattcactttgaaaagcattaaaaacttagataaaataatggctggctaaacagatgtgat

SEQ ID NO: 181854 - DNA, 502 bp, Homo sapiens
aaataccagcttctccacttaagagcctagtgaccttgggcaaggtacttaagcattttaaggttctctttcctcatttataaaatgagaataacaatcatattgacatacttaataaagttagctgttattattaaagctttatcctatttttaaaatctccaccgcacacagtgtgaagcaaaaagaaactaagctaaaatttgtatagtaaatctaaaaagctgtccagaatatcataaatcaggctttctactgttccttcattattctgtataaagtgaatgaacacccagaatactggatatattcatgcattcatatcattttagaattaccaaaattcaccccaaagcaaaatataaaatacaggattttttttttgtattttgattttttttattatttggtggtttttccctttgagcaaatagccatgttatgtctgcattgaaattttgtccctttaagaattgtgaataactttttataatggataagt

SEQ ID NO: 181855 - DNA, 371 bp, Homo sapiens
cccaataaatatatagaacattttcccccaaaagttcccttttgccattttgcagtaaattctcctaccctcttgcactccccactcccgatagtcattactttgatttctatcatcataagttgattttgcttgttctggaacttcatataaatgaaatcatataatatccactctatgtgcctagtttcctctgctcagcaagtttttgaaattcatccctattgtgtgtatcattaatttgttcctttttaatgtgaagtagtattcattgtatggaagtgccacaatttgtttaaccattcagctacttatgaattgtttccagcttgtagctgttataaataaagcttctataaacatttatgtac

SEQ ID NO: 181856 - DNA, 567 bp, Homo sapiens
tgatgtggcttaggcaaacagctaggcatgatggacatcagatgggtcactttgaaatctcaggtactccattataaagtgggttgttaaacatagagtctatttttttataggaccaatgggatagattaaatactacaccctcgattaaagacttagcgccatggaaatcaaatgataaaagccataccacaaaaaccaacaaaaaattaaaacaccaatgccaatccacaaaaaaatctgtaatttatatcacatatagtacatatttcacattctaataaaatttcatgaatatgctgtataaatttgcaaaagaatgtttctccataaaatttttaagtagagagaaaatgatatttttatatcactgatataaccacacacatatattcagtagcaagtatcatgcttaatgaacatccagtaagaaaaggaaacagaatttctcagacttagcaagtttgaacaaagaggaaaaaatatataaaacgttgatctcagaagagagttgggatagtcacatgattattactatgtggaaggcactgttctgtgtacactaca

SEQ ID NO: 181857 - DNA, 554 bp, Homo sapiens
gatttcatcagtttttcattaatatcctctttttgttttaggatctcatccaggacgacaatgcatttaattgtcgtatctccccagtctcaaaggctgtttttcacttacactcaggagatacttgtttaagcacggtcatttgtataaatttaaccaaaacatttaacttctctgattctcaggtctgtttgctgtagaatgaggaaataccgctatctgagaatatctaataagataataatatgaaaaggccctataaactgttttcatactgggagtgtatatttgcttaatacatattattcacaagctagtcaaggatctaaaatgtcttctcttataaaatgtccagagagaattaaaattctcttccccaccccaacccgccaaatatgtaacttcatctttataactacatggagaacccaaagactcgacatgttcataaaggacttacatataatgtttgagaagccccaaggaaaaaaatcacaatgtaagtctaaagaagtgataatataaaatgtatttaatgttctaatcttactaat

SEQ ID NO: 181858 - DNA, 323 bp, Homo sapiens
cacagaatacccagtcctggcacataatatcaatacacgtgttttggatttggatgaatgaatgaatgaaggaatattccttccactttagtcagcatcccttagctacctaatctctgagaaaacaaaatgcctcctgtaagataaagctgtaagataaagcctatgcttttggatttggtattcattcactcattcattcagcaaatctttatttaatacagtcatctgattcctgtttatctctagcttccttttgttaacatctctcagatctgcatgacttttctaggtctgcaccttctggccagtcttctgtcaat

SEQ ID NO: 181859 - DNA, 448 bp, Homo sapiens
aaggtgccaagatcccacaatggggaaaggacagcttcttcaatgaatggtgttggaaaattggatattcacattcagaagactaaaattagacccttatctctcatcatatataaaatgcaacttaaaatagattacagacttaaatgtaaaatctgagactataaaacaactagaaaaaaataggagaaagctttataacattggtctggggaggattatttggataagacctcaaaaacatagacaccaaaagcacaaatatacatataggattacatcagattaaaaagcttctacacagcaaataaaacaatccacaaagagacaatctacagaatagaagaacatttacaaattatttaactgataaaatgttaatatccaaaaccaaaagtcctccagcaactcaacagtaacaaaaaaacaccaagaacctgatttaaaa

SEQ ID NO: 181860 - DNA, 542 bp, Homo sapiens
aacatttgccaaaaatttataaagaagacagtttctgggctgggggtagagggaggggcaggtggaaaaggggatcaactctctccttccttctttccttaaatttatgaaataagtgcatggccaaaacacttgatgttagccccaggatagttcaggacctagaaaatttgggaggtgccaagatgaacatggcaagcctatctacacagtgattttcagacttctgaggaagtttttcaacatacatagaaaagaagtgcacgtgatttacccctctactattgtggcagcaggagcttgaaaaggattcgtagcacaagccaggttcatggtgaggtggcataactagacatccaaacaaggatctgctcagagtcaaagggagtgccagtaataactgtggagggaaaacaggcataaaccaggacacatggccttcctaccaatgccctaacctggcacactcatggctcaataaatgttttaaagagtagcagacaggacctgaaataattgctccaatggaagaataaaaggtc

SEQ ID NO: 181861 - DNA, 447 bp, Homo sapiens
caggtttagagagtacaacatagctacacatgcttcccacatacctcaaatttatgggaaatccatggatgtttggatacatgagtcacatcagagaaggctcttctcaaaggctagcctccagtgccgtcataccaagttaaaacaaactaacaagcaaaaacacattcacagcatatataaggcctttcttctttgggaaatcttgtgttagattcgtagcacaagccaggttcatggtgaggtggcataactagacatccaaacaaggatctgctcagagtcaaagggagtgccagtaataactgtggagggaaaacaggcataaaccaggacacatggccttcctaccaatgccctaacctggcacactcatggctcaataaatgttttaaagagtagcagacaggacctgaaataattgctccaatggaagaataaaaggtc

SEQ ID NO: 181862 - DNA, 521 bp, Homo sapiens
agtatgtaatatggaaatcgaggagaaatctgcttctcagtgctatccatattccaggaacattgagctgtttctgataaagattaaaggaaagctcaaggtgatgatctactttcagcccaatttgagagagcagtgtctccgggagtaaaatggctaataacagaatcttcctcatcctaacccctcagaattgtcacacatgaaatgggctatgaagcagtcaaaggttatactgcttgaactcttccactcatttcagttcctgtttataagtaggtgacctaaatttattttgtaagttaatgagactatgttttcttttgatttcagtttgggcggaaaagtaccttagtttttgagatcacgtgcctttactttagggatgttgaggttgagtttttcagctactagcttttgagataaattcagttaatcatttcattgggaaaaaatacatatatatttaagtaatttttgttttgttttatcttagagacaaggtttcactgtgttgccca

SEQ ID NO: 181863 - DNA, 601 bp, Homo sapiens
cctttattcttttcctttttttttttttgagttgtgttgtgatttgtttacctaggaactcaagctgttagagttgtctcagcctaatggactcccaattaattattttaacacatgttaaattaataatggagaaattaaattaagaccacaatgaaataccattttatacttgctggattgctgaaaattaagaagtcttggtaagtctataaagcaataggtgctctcatatcctgctgtgtaacataaattagtataaccactttggaaaacaaatgatcattatgtgtaaggctgaatgtgctcataccatgtagaccagcagttccactcttaagaatgttattaaggaaactgttatacacatgcctcagtacaaatgtgtagaatgttcagagcacatggttgatcatacaaaaaactgtggccgggtgtggtggctcatacctgtaatccaagcactttgggaggccaaggcaggaagatcacttgagcctgggaggttgaggctgtagtgagctgagattgcaccactgcactccagcctgggtgacagagaccctgtctcacacacacacacggaaggaaacaacccaaa

SEQ ID NO: 181864 - DNA, 260 bp, Homo sapiens
gcttttttcagaatctcattgtggtgctaaaatttctgaaggattcaatgaaagcagatgacaacacaactaccttcagcacacttaatgtctgcttggaaaaagcaaatcaaaacatgaaagagatgatatataaaatacagtcctgaatgcattcacatgtaatttacagagagttgagatcatgaaggaaggaagtagacacactgtcggaaatatctaagtttacagaggatacttgtacagccagggttttgtga

SEQ ID NO: 181865 - DNA, 431 bp, Homo sapiens
ccggcttccgggagacactcccgccccagcctgcgctccggccgcgaacccccactggggcccccagggccaggggcgcgtctccctccgggggcctggcgcgaggctcttttgaggctcttccccattcgagccggggcaagaaaccaagaactccagcccgggtggcgttcctcgttcctgctccctcccggacctgctaaccacctggctgcagtactgtcgggagatggggcaggagggctggcgccaccagcttcgtgggtgccatcccagactctcgctgtaaacgagggagcggggaggagccggccagccccgaggccaggcttggactgggcgtcagaaatgtttctacaggcgtgacagcccttgagctccccgcatccccgtctgtgcctttgcctcctaagtatcagctgaggctaaat

SEQ ID NO: 181866 - DNA, 611 bp, Homo sapiens
ccaggatagtcctggaaatgatcttgatgctatctgttcctcgttacagcagacctgctcaacttcagcagctagaaggaggattgtctttcaccagctgcaggagcctgttcccactacaagcctggtggagtcttcggagcagatgtgactgtcctacttgtatagagaagagaaactgaggctcagaagagatgcctggctgagtttaataggactgcaacaacaattttgcctttctactttctgctcaccgaagaagacaggaaaacttgtcagatggggaaggatgtgtcaagagcatgcacacagatttactcttcagctagaagctccaattcctagatgatctgaatccaactcagagtgcttgcacctgtttcctgccacacagctagagctgtgtccctctaggttctctgattggctgaagctactctaagccaagagatcaaagaagctgataatgtagaatgtaagtttgtctcctgggccacaatggaaagcagagactgtagctggaggagtgaatagaggatatgcagctctggtaattctcagtacaattcccagtggtccactctgcagaatgaaccaagttccattttgcc

SEQ ID NO: 181867 - DNA, 309 bp, Homo sapiens
gtgagatattttgtttcatatggtcttgttggtctgactgagcaaacaaccttgacgttgattttccagtatttaaaagcattagggaatgaagggatcctgattgtcatggcctgtctctggtaaaatatcagtggatttagaactgctatgttaatcagatcaaggggcttttgccctgatgttatgtatttctctcactgttccatgagtgtccctgtgggcatatcacagtatctagcattttctctgtctgcttgaagactgaaaatgtctaattccagttcaatgtttctccttggaaactaa

SEQ ID NO: 181868 - DNA, 368 bp, Homo sapiens
cacacctgccctcatttatgttgttccctattaaccccaccttttaagctgaagtttataaacaactaaaatctggtgacttgtacttgcaaaatcagcaatctcattgggttggtaaaaagacacatgcaaagcatggttttctctttcaaaccattgaaacccaccatccctccaaaggaaaggcacctttctcccagatttacagaacctcccctgacctcagcgatgcaggactcccatgaatttcttccagctgcctcagctaggctttcaaactgtccacatgcgcaggtcttcacacctcctccaggtcaccttatactcaatgctgctaaaggcatcaccccagagttggaggcctgagt

SEQ ID NO: 181869 - DNA, 382 bp, Homo sapiens
gtcgacctttccactcttgctttcctttctttctttccatctttctttcttccctctttctttcccctttctttctttccttccttcttctttctttctttcctttcttcctcccttcctccctccctccttccttcctttctctctttctttctctctctctatctctttctttctttctttcttttctttccttccttccttctttctttctttctttctcagagcctgactctgtcatccacatgggaaagcagtggtgcaatcatagcttactgcagcctcaaactcctggcctcaagcgatctcccacttcagccccccaagtagctgggactacagatgtgcaccactacacccagctgatttttttatttttatt

SEQ ID NO: 181870 - DNA, 547 bp, Homo sapiens
tttactttctacatatcagagaaggaagaatgacccatttctgggggcggaggtagggtgcggttaaaagcttgctgatccagtgttttagatgtcaacttacaatttggtgccagattttcatcttaggagacacttattcatatttgcctaacaatgagtacaataatagttgcagtataaattctagactgaaacactactaaattattactgttgaactagattaaaattcataggcattcctgtttaataaacccaatataaaaaactgattaggctgggtgcagtgggaaagggtattggcaatgcagtgctcgttttaaaaaataaatgcaggccaagtgcagtggatgctaacaacatttttaaattaaaaaggacacaaacacttctttaaactttctataatgaataaattaatttttttttctttttggaaatattggctcactctgtcttcccagtctggagtacagtggcacaatgatggctcactgcaccctccacctcctgggctaatgcgatcctcccacctcagtcttcc

SEQ ID NO: 181871 - DNA, 486 bp, Homo sapiens
ggagtctcttcagcacttaagtatagattgaaattggtaacaagatgcctcttgaaggagaaagaacagaagaaagtgctccctcaagagagaaagcactctgctggatttccagccccattaaaccttcacaactctaaagcagtcctgatacttatgcagggacagaaggggaggccctgggcacacgaggtataaagttggtactgagattcttccagaaaaccagggctgtcttcaaaggtctatcctcatagttaaaaaatggtgtcggggaggagaaattcactcatagtcatattaagacttaagagagcttgtctctgagaatctgggtgaagaggacaggggaaatgctataaatgctataagaaattaaaatcctaaacctatgacacaacagttttgaaatgtgaatcttatttgtatgagaatctcctaggtaaaaaaattaagaatctccaatctaaggaattagatcctggg

SEQ ID NO: 181872 - DNA, 657 bp, Homo sapiens
  misc_feature (503)..(503): n is a, c, g, or t
ttgaggtaggtctacttgttagatctcattgaagtatagattggtcctgcctatacttattagaagaaaagccacagagttttgtgtaatgcaaaaaatatgtaaagggagtcctaaagtttgtctccatctcaaccgtaagcatataaaaatcaatcttaaaaatccctgttttttcagaaagaagcattataccggtgttttctctcttacaacctgagttagtcaaatcaaagtcaggtgatttatgtacatcaaaataaagtacataaaaacaactgaaagaatttacaatgaaattattatatgcacaactacctaagatgataaaattaggctgggcgagatggctcacacctgttatcccagcactttaggaggccgaggcaggagaattgcttgaactcgggaggtggaggttgcagtgagccaagattgcgccattgcattctgtcctggacaacaagagcgaaactccatctcaaaaaaaaatatattgattntgttgttataaatgcactccagtctgggcaacaaagcacgagtctgtctcaaaacaaaatttttttttaattgtggaaaaatacacaacataaaattagtcatcttaaccattttcgaagatacagttcagtcatcgcctcaacattttatatt

SEQ ID NO: 181873 - DNA, 231 bp, Homo sapiens
ccttaggcagattgttgtgcattcttgagttaatttttgccatctcactggcttgaccaaattgtaatgttcagagaactaaagcctaaacttagtgtgtttcaagcacttgattggaacttttcattaagcacatattcttatggggcatacatactacaggctacagatactgaaacattttaatactactctaatcacataaccccagaaacaaagaacaaatcccta

SEQ ID NO: 181874 - DNA, 314 bp, Homo sapiens
caaaactttgctgatgactccttggatgaagaaacttctcatacagtggtgtgagccctggagtcagaatggttggcttgagccccaatttcattactgcctggccaggtgaaggagattctgttcatcagtggcagccagggatgtctctccttcctaccctgactctcctctttctgctgggtcccctcccggatacagggctcacacctgtggacctcagagccagcgtcaagaccaagaggaaagaaatcaccaaaagccagacccttgtatagagggaaggggaaggaagggagggaagacagactcct

SEQ ID NO: 181875 - DNA, 410 bp, Homo sapiens
tttaattttaaaataaatgataaaaaggtaggctggaatattttacacatctgttataaaacccacagaagctgtctgtaaaacaagactcaaatccaaagcaggtggacaagacatactgtctgtttgaagagctggaactccctcgaaagttcacaaaccaaggaaaaagtcaaactgtcagaaaacagcaattaatgactataaacactgtgcttcctgcccttatgataaagcttctgtggagacagtcatgaagagaacaagttcaaattctcaattctctacctaactccgaagctccataaggcatttcaggttattatctcatttgtttaaccacacaactgttagaagttcaactgtccctcccaacccccaccacattcctatgctgaagtcttaatccc

SEQ ID NO: 181876 - DNA, 135 bp, Homo sapiens
agaagtcagaattttgaaatggctttcactgggctaaaatcaaggcttttgaagagcttagttccttctggaggttctagggaaaaatctattcccttgccttttctcgcttttagttgctacctgcatcccttg

SEQ ID NO: 181877 - DNA, 685 bp, Homo sapiens
catgaatgagtcttcttaatttaaactgactactggatggcttcctgttatgttaagaggtagcaacttaaacatagagcattttaaaattgagctttaacgtacatcagagcctaagatttgactctgattttgataccctgagtaaacttaagcacttttctccttcattcactttggtaaatgagctgtgcagccatgctcttctcgtaaacttttacctgctgtgctaggctgtgagccacgaagtgcctgcactgccctgtgccagtgtctggaacattctccaagtaattggccagtgcctgcgcagatagaatgcaggtagaatgccagttctccccaacccttgccattgatctgcatcttgggaggctgtgcaaggagttggaggatctggggttttcccagtgtctggtcactgaaagaaattttttctttttagtgactccaggttagtgtctgagaaaagttggccatcaaaacaggaccagcccgagcaggtttgaagataaaaatcaatcattccgttcatagtactttcttatttcatgttcctttgcttccaactcccataaggaatttgctaaagatacaacctcagagatagcttaaggtggagagaaattttcgaccataagttccttggagaatacgaattcaagtagggtgagtgggaagaggt

SEQ ID NO: 181878 - DNA, 351 bp, Homo sapiens
ctccaggactacgggggttagaggagaccaaatgagtttacctgtggggtccagtgcctgaccagggcaggtgctaagcaaatggagatcctatcccctctctcccagggactgtcaaacagtgccctctgccctagaggctgacccccggcaggttgaaggaacctgaagaactattttcagcagtaagttctgctgaatacattaatactacagcaataatgattataacacaactacacttcttgagcatcttttatgtgaaaggctcgtagaggaagcaatggtatttctctcatatgctggatgtttctcccactctcaatttctatatcactgcctatgtaccca

SEQ ID NO: 181879 - DNA, 156 bp, Homo sapiens
aattaaagagtaataggcaccctctagtcccttgctactcaaattgtggtccatgaccagcgtcattgccaatacttggggcttgttagaactgcaaaatctcagcccctcccaggcctacagaaccaggtcctgtagtctaacaagatctgcagg

SEQ ID NO: 181880 - DNA, 616 bp, Homo sapiens
acacaagtgtaatcagaatttttattccaaaaacagaagaaatgcagccaactgttgaagctaatcaggcagcaaaagaagacactgtggttttgaagattggctctgttgccatggctccccaggctgacaatccccttggcagatctgtccttaggaaagatatttaccacatacggcggcatcaagaaaggagagcaattttgacccccgttttgacagatttttctgtccgaataactggagcacctgctgtcattttcaccaaagtagtttctccagaaaatttgcatactgaggagattttagtgtgtggccattccttagaagtgaatataaccacaaacctggacttcttcctaagtgtggctcaagttcaactcttacatcagttaatagtagcaaatatgactggactggaaccatcaaacaaggctgcagagatctctaaacaagaacagaaaaaagtggatatatttgatggaggcatggctgaaacctcatctcgctacagtggtgctcaggatagtggaattggcagtgacagtgttaaaatcagaatagtgcaaatagagcagcacagtggtgccagtcagcatcgcattgcccgtccctc

SEQ ID NO: 181881 - DNA, 308 bp, Homo sapiens
acacaagtgtaatcagaatttttattccaaaaacagaagaaatgcagccaactgttgaagctaatcaggcagcaaaagaagacactgtggttttgaagattggctctgttgccatggctccccaggctgacaatccccttggcagatctgtccttaggaaagatatttaccagagagccttgaacttaggaattcttcgagatcctggatcagaaatcgaagacagacaataccaaatagatctgcagtccatcaatattggtactgcacagtggcatcaactaaaaccagagaaggaaagtgtctca

SEQ ID NO: 181882 - DNA, 706 bp, Homo sapiens
ttagctgggggaacacaggagacatcaccgtgccaagtatcaggaggaacaattgcacagactgtagaaagacaatggcaaattggaggaagtgacagaaagctgaagggctggggtacgctaggtgaggggagtaaggcagagagtaacagcagctgggtagggagaggttggcaagggagaaaatggagaaagggatggaggctggtcaagcggaagctcgtaacagcagggctagggaagctcaaccaataggctggaggggtctgaacactgccacaagcagagctgcacttcaggaaggtgggactggagacacatgtgaagcgctttgaggggaagcagcactggtggtgtggaaacaatgaccacatccaggtagaggtaatgactatgacaggagcgagcagcaaggaaaaatagaggtgagaaggaattcaagagagatagcagagagaggtgggtcagaaccccaggaatgcctaggggtcaagggagaaagctgagtcccagctggggactggggacatggagctatttaaaaaccagcaaaatggcggggcagagcggctcacgcctgtaatcccagcactttgggaggctgaggcgggtggatcacctgaggtcgggagttcgagaccagcctgaccaatatggagaaaccctgtctctactaaaaaatacaaaattagccgggcgtggtggc

SEQ ID NO: 181883 - DNA, 704 bp, Homo sapiens
gaggagccttggtctgactagtatttacttaaccccacgagaataagaacatcgtatagtttaacatcactgtcctcccagcacccagccctgccacatagtagttgcttaataaataattgttgaatagattaatgaataaatatttcagcaagaaacctaactcatggggaaacgtgtgattagaaattgaggttagtaattgaagctcagtgtgcactaagtaaaacatcccaatataaccacttttagaccatattgtaatattcaagtgtgttttgtagggcttagtgaggaaactcttttaagaggcttggtaggaattattgcttgctaaaagtagatagagataattgttagcatcttctgcaagtgacctgtatgcaaatggccacttcaaaggcaaggaactgagggacctgccagcttagatgtcacagaagaatcctgccctagcaaaggcaactcctgggctttgtgcaatcaagaggatgccaataatattcctcctccatctgtccaggaggccagggtccccatgtgcagcacaacaagagcaaaatagtttagagacactgagcagatatttatacaaatgaaccgtgggggaagactgaatgaaaataggaagacatgcaatactttctgtttaggaactagcagctaaaattatgaataggtccaaagccccagaggtaagttaa

SEQ ID NO: 181884 - DNA, 298 bp, Homo sapiens
ttaagcatcaacaaattagttcaaaacttagtgactacccaccactgtagaggaaggaaggaaaggagaggaaggaagagagggagggaggaaaggagggggagaaaagtaaataactctgaaaggaagtgtcctcagtacaggaaaagcacagatccttaactaaggtcttagcagatctcaggaagaagcctttcttttccagcacaaattcagctaccatcctgacatatttatcatcaggactttactgtttaatgaaaagatgattctgttctctctgctaacgctttccttt

SEQ ID NO: 181885 - DNA, 711 bp, Homo sapiens
gctttcccagactgactgggaatgtagcagaaggcctgagaaccaggaagtgacacagacctgtttataccatcccactcccaggcctttggaaaacgatccacagagatggtaaaaagtaaacataactgcatcagccagctctctagggtttgctatttttgacctggaggaggtgtttcctgcatagctgtaagtactcggaataccaaaatttagctcctaaacattctttgagtgaaggtatatagacagacagacattttttgttaccagacagcagcattcagtgactgtaggcagacaaaattaagttttttttccctcctctctctgccatccttttggtgagttgttcttccatttctttatctttctttgtaagtagcactgtgcatgcaaaacactgtcctgggagctctaaatttgtgcatgggttcaaggtccaactcaaagctttctctttcacttctccctactcccatcagaagtctttgttcctgtgtcctctgtgttctcatagcactttttaaaaaaccttctttggggccctagtaacaatttgacagtgttatatagataaacataattcctctcacgtaagttgtgaattccttgagagtaagaattgaactgtgccccaattcatctctatgatcacccaagccttgcatagaagacagccagtaaatattagctgaattgcagtat

SEQ ID NO: 181886 - DNA, 892 bp, Homo sapiens
gaaggcttaatgccctgctaagaaaactatacttagggccgggcacggtggctcacgcctgtaatcccagcactttgggaggctgaggcgggaggatcacttgaggccaggagtttgagaccagcctggccatggcgaaaccccgtctctactaaaaatacaaaaattacccaggcgtggtggcgcgcacctgtagtcccagttacttcggaggctaaggcaagagaatcgcttgaatccaggaggcgaaggatgcagtgagctgagattgcaccactgcactccaacctgggtgacagagcgagattctgtctcaaaaagagaggttataggtcttaattggacagagggatgctttagttcaattctacagctatgttttgagtgcagattacgtgcaagcctgggaataccatcatgaggttttccaaggtataaacttcaaagtagtatgtgctacaaagtgaatggtctcatgaaagtcccaaatagttctgcccttttgtgggaaacagttttacaaagtgtgctacaattgcaggaggtttgagcatgctgatggctccccagcataagacttcactctgcccaggccaggtgcggtggctcacacctgcaatcccagcacttcgggaggctaaggtgggcagatcatttgaggtcaggagttcaagaccaacctggccaatatggtgaaatcccatctctactaaaaatacaaaaattagctgggcatagtggtacacacctgtaatcccagctactcaggaggctgagacaggagaattgcttgaactcaggaggcggaggttgcagtgagccgagatcgcagcactgcactacagcctaggtgacagagtgagactctgtctcaaaaaatttaaaaaaaaaa

SEQ ID NO: 181887 - DNA, 282 bp, Homo sapiens
tgttttagtctcatgatccctttatattcttgaaaggtaatgagaaacctaaagaatttttgttgtagccactggtatttaccattttataaattaaaatataaaattgtaaatatttatgtaatttatttaaaaatcaatgattgtaaacccattacatgttaacataaatagttatctttttatgaaaactacttttaagaaataaaaataatttagtgacaaagtggcattgttttacacttttgccaatctggttaatgactgctttaacagaaggca

SEQ ID NO: 181888 - DNA, 232 bp, Homo sapiens
ctgagtagttgcaacagagatgctatggcctgcaaagcctaaaatatttactatctggctatttacagaaaaagtttgctgacctctgctctgacttaaaacaatgtttttcaaactgctgtttttaccatcagtgtgtaaaagctcattgtttcaattttgtcttattttgtttattatgctctctatcatatggactggatcacgccaagtttcttgtatctctgttcct

SEQ ID NO: 181889 - DNA, 357 bp, Homo sapiens
cagttaaattctgggacactatcttgagctataactaagataagtcatttttttcttccatttctaaaaatatttgtagattaaacccatttttttcttttttgtaccataccaccaggatagctttccaccttccatcactcatctgtgtgacttcttaagttccttcaaatgtaactctgtaattataattatatattcacacaatcattgtgattctttaattgcaattgatttaatctaccttatcatccaatcggtgctgacagtggatttcattcctttttttttctaacagtaggaatagaatgcagtgcgcttgccaggactgaggaaagagggaggggttgtttccgc

SEQ ID NO: 181890 - DNA, 398 bp, Homo sapiens
ccatatcaagagcatctcctatgctggctgcctgctccagttcttctacttctccatgtgtgctgcagaaggctactttctgtctgtgatgtcctttgatcggttccttaccatctgtcgacctttgcattatcccacagtcatgactcaccacctgtgtgtccgattagtggccttctgcagggcaggtggttttctatccatactgatgcctgcagtgcttatgtcccgagtgcctttctgtggccctaacatcactgaccattttttctgtaacctgggaccattgctggcactgtcctgtgccccagttcccaaaactactctgacttgtgctacagtaagctctctcatcatcttcatcaccttcctctacattcttgggtcccatatcttag

SEQ ID NO: 181891 - DNA, 223 bp, Homo sapiens
ctacattttcagattcctatttcttcatccaactggaaaacctgtagcaaaggtagaacagtcaaaaacctgtttcttcttttactttgccacctacttatttggtgacctagtgagtaagctaggtctcactgtcgctccactcatcctataagcatgctgcataatcagaatgtctgtctcattctgtaaacataaaatggctgtatgtatacagatattt

SEQ ID NO: 181892 - DNA, 661 bp, Homo sapiens
tgtcctgctcacaaataacttattttcttgtacatcaagccttttctgaataaggtactatatttaccactgtcatttattttattttattttattttagagacagagtctcactatatcacccaggtaggagtgcagtggctcaatcacacctcacggcagccttgacctcctggactcctgcaaccctccgaagtagttgggactacaggtgtgcaaccaccacacttggataattttttattttttgtagaggcaggatctccctaagttgcccaggctaggcaaactcctgacctcgtgatctgcccacctcggcctcccaaagtgctgggattagaggcgtgagccaccgcgccctgccacatcctgttttttttacaacagggtgtcactctgtctctcacccaagttagagaggagtgacacagtcttagctcactgcattctcccaggcccaagcaatcctcctatctcagcctcccaagtagctgggactttaggtatgtgtcaccacagttgactaatgttttaatttttgtagagatggggcctccacatgttgcccaggttggccttcctgggctcgatcctcctgcctcagcctcccaaggtggtgcatgcctacagtctcagtagattagaatcaccctaaccctca

SEQ ID NO: 181893 - DNA, 355 bp, Homo sapiens
atatattaaaaatagaactaccacacaatccagcagttctatttctgggtatatatccaggggaaattaaatcagcatgtggaagagatatctgcaatctcaagttaatttcagcattattcatggtagccaagacatggaatcaatgtaagtgtccatccattgatgaataaattttaaaacaggttatatatacaccacggaatatgtttttacctgacagtaaatcaatcctgtcaggtgagataacatctatgtacctgaaagacaccatgctaactgaaataaaccaggcacagaaaagacagatactgcatgatctcacttatatgggatatctaaaaacatttaactc

SEQ ID NO: 181894 - DNA, 227 bp, Homo sapiens
cataagtcttcatacaaatgtccccaaatacaataaaatcaaaatctgtcccaactcactaatactgcctgggctcaaatacaaagctccagctgtcaaactgtgtgacagcaaccaagtgatctccaacccccccatcttttgtgtctaaaacagaggtcgtcatggggcctcactatgaaaatgaggattcacagccaaggcaagggagacacagtctgtgtgtg

SEQ ID NO: 181895 - DNA, 248 bp, Homo sapiens
  misc_feature (195)..(195): n is a, c, g, or t
cagatccaaaagtcagaggccctgattcagggtctgagcatggcaaaaagtcaggttgctgccaagctgcaggagacagagcaggcgctacaggagcaggaggtggtgctgaaggccgtgaccctggaacgagaccaggccgtgcaggccctgaggatgcatgggctccccagaccaggggcacagatgcttctnaggcagcatgaagaagaaataagtaaagactttccatccagtgagatccagcg

SEQ ID NO: 181896 - DNA, 585 bp, Homo sapiens
cagcgtctgtgtggggtgtgcagcagccctgagccaaggattaattacgtaacaagcccagatcccatccctgcctgagcaggccatgtgccagcaaggggggccccgaagtgccgctaggtgcctcacgattagcataaggcccgtttatccaggaagccagaaccagtgcacatctgttaagcgcatgcaccaagcggcgattccatagttgtatagtgattgtctttatggaactccagaatagcttcttagatatcactcttcaggccctgaaatggagccctgtgcaaagaaatgaagaaaagctatcggggcatctgcagccactattataccatctggcagctcagaaatattttataatcaaatgagtaagacgggcgtcccacactccacagtactctgctcccccttcccttcctcccaggacttgctctgtctctgtctctttctctgtgtctgtctgtctgtctctatgtgtctgtttctctctccctctttctgtgtgtgtctctctctgtgcctgactttctgtctctttctgcttctctctctgtgtctgtctctgtctctctctttctg

SEQ ID NO: 181897 - DNA, 363 bp, Homo sapiens
atcgcagcggccacttctttattatcgttgttattattgagacatggtctctctctgtcacccgagttggagtgcagtgacacgatcttggctcactgcaactgctgcctcccaggctaagatgattctcccgcctcagcctccccacgagccgggacgacagttgcgtgccaccacgcccagctaatttttaaaattttttgtagagacgggatttcgccatgttgcctaggctggcctcgaactgctgagctcaagtgatcctcctgcctgggcctcccagagtgctgggattacaggcgtcagccaccgtgcctcaccttttgttgaggcctgcgggcttttaagaacacgatgggctcc

SEQ ID NO: 181898 - DNA, 354 bp, Homo sapiens
acttatcagtttacacgtttccctttttagacctagtaagctccctgaggacaagtatcagcccttccagattttgacctcaacatttattcaatacatgtttgttgaatgaaagaagaaatgaagctcctccagagcttcgactataactgcttctgtttcatttcttgaattcttaggtagagctctgagtactgagtatacttctgcctaacacatttggtctgacctgtaaatcttactgctggatttattatgagacaatatatttcagtaatgttttaaaggacaaaaacaacctgaataatcagccaagggaggaaaagattatttcaaaaattaaaatatcactct

SEQ ID NO: 181899 - DNA, 614 bp, Homo sapiens
atgcagctttgatctcccaggctaggctcaagcaatcctcccacctcagcctcccaagttgctgggactgcaagcatgcaccaccacacctgcctaaatttttttattattttgtagagacaggcctcactttgttacccaggctggtctcgaattcctggcctcacatagtcctcctgcctcggcctcctgaagtgctgggattacaggtgtgagccaccacacccagccaattcccattttaaaatgaggaaaccaaggcttgggttcggtgatttgctgtgactgaaaatccttccctccccacaaatagggacaccactatcagatatcacatagatcatttcccaggagccaagggcaaagggcagacccgtctttggccaaagccaaattctttcctacacagtaaatatgggaaaaagagagacttcaagcttcacccaagagttgagacattttgaagaaagactgacacaattaggggagtcgctggatataggagtgaagtgcgagagaggtatcaaatatcaggctctggcctatgcttggagaaatggtgcaaaaccgttagcagaaatatggaaccggagtgcatgctgatttgagagggg

SEQ ID NO: 181900 - DNA, 314 bp, Homo sapiens
tgtataatttggtaacattatcacctaagccttctcaccttcatcctagggaaacatgaaattgacaacctatatacagtgctttgaacttttaagaaaactctgttatgcatttgggctactaggagtaaacatgaccattaacaaacagaactccaaccactgacagtcgatgtgattagctttctgtaataagctttctgttatttataaatgctgctaatgcttgtggaagaagcaatttcatcttccactcccttagttatcactaagctactatgtcaagattaagtctaatgtttgaagatgttgtt

SEQ ID NO: 181901 - DNA, 487 bp, Homo sapiens
atactgtagtggactgaggaggggagattagtgagagagtctgaggtcttttaattccatagagctttttgtgtgtcattggacaggtggatggggttacaatagtttcttctatgataaactccgtaccaagggttatgatggggtgaaaaggtggaccaaaaacgtgagtttagaattcacatccacttgtgtaatgccttgcctctaaagaatgagagtcttgtactctctgagccctttccctgcacgcggtcattcagtctttcaaagattacacgtctcttgtgtgtgtcaggcactaaggatacagtgttaaataaggaaaacttgcccttaaagttaacatggcagctagtgcatcaagtgctgtgggcagcatcaacaccaagtgctgggattacaggcttgagccacagcgcttggccaagatctcaatactaatcttggtgttgatctgggtgaatccagtgcaaccttccttttc

SEQ ID NO: 181902 - DNA, 642 bp, Homo sapiens
gtgctcaggatccagggagagaggcagactcaacatgcaaacaactcttctatgagggtaagtgtaattgagggccctaggagaactttagtagtggagggtttcttgtgtttctccctttggactgcctaactcaagcagtgttcttgacccatataagctatgtagtgtttcccctctcttatctactgtactaatttctgtgtctctcttggaaattactgccctgatctcgaaacttaacttcacccattgcttggtgagtggtgtggaaaacttctctcgggtctatgtcttatccctgaaaaatcttgccacagctgctcaggaagagtgtacaaactcatttccccaacatgaaagtcacaaaaattttgaaaaagttttccctaaaattgctgtgagaaggtcttgctgattatttttgttctcaattatatattctttggggggaaagcctgtagcttgctcactcatgggacagatctttcgtgggttacatgaagagcagatctgtgaatgttgtcatcccctgcttgttcctgctttcttgtggttaccatctttgtctttaacctttagtttttggctgagtgaaaaatttccagactcctgaaatcaccacaatcagatacaggagac

SEQ ID NO: 181903 - DNA, 458 bp, Homo sapiens
gctgagataagacgctgaggaaaatgggcagtaaattctagctgaaatgggaacaaaggagagtcttggtctagtttcaggttaacctaggaccgtgctctcactagcaggcagatggcaccctgtcagtgattatggaggtggtggaaagatcactgctctcagtggcatcatttagttctttgacctacaacctaagaaatcagatccctcacgtggaaaagtgaaagtcacaatacaagaccttacagctgttgaggtcaaatgagatcacatgtaagtgccagtgcttagtaaactgtataggaccataacgcccttgaagtaggtggacagaggcctccatggcaggcactgggctgtcataacctcttatcaagtaccaggcctggagctactcaggcttcacatgcacttagctataaggaaatcctgatacacactgcaggcccttacct

SEQ ID NO: 181904 - DNA, 504 bp, Homo sapiens
caggcaaataccaccatgcctggctaatttttctttaactttatgtggtgatgtagttgcccaggctggtcttgaactcctaggctcaagtgatcttcccacctcagcctcgctacgtgctgggattagagatgtgagccaccacacctggcctcccatatttatgtaatatttgttaaatacatgtagtttctatatgattaataaaacatatatccatttaagtaatgcagaattaacagtagtttattagtaatcatgtattttataaatctacagatacttatagttattatgtgggaatccataacctgaaagggttagttttaaactcatgatgagtaacggtgaacagaagtaaaatgtcaaattgtaactaaaagtatggcaggactacattagcaacagaagaatatgaacctgaatggaaggccttgcatgtgtatttgtctgtgtgccaatacactgtcagtgatctcaagctacagaatccttactccccta

SEQ ID NO: 181905 - DNA, 381 bp, Homo sapiens
aacttggtctttctcctgatggctttctaaaaacctcactgtctaccaccctttttccatcctagactggttgagtttaatctgtttttgatgtctcaggatcatcatccagaacatcaactactgaatagtatgacacgttctacggagagtggtgtcaggcttttcatttgcttccctaggtggcgaggattttaaattctactcttttaatagttttcctattacttccttagttggcctctactagactgccagatgccagcccttccctagaagtgctgctcatctgctgcttcttttctggtatggtctagagaaacagataagctggttataactataccttaaatgagagcataagggtataggaaggtatgg

SEQ ID NO: 181906 - DNA, 396 bp, Homo sapiens
aatggctcatatcagaagtgtccaaataaaagttctgggaaactaggtatttgcttcccagagcaatgggaatagctccaaaggtcagagtaaggtaatgagaatctcccggtcaattccagtgccaggcttcctgaaagaagtcaaagcttggatcctcattttaaagggcgcatccatgactcatctagcagcccctctctatttttcccttcacttgatggtaaatccattctatatgtccatttactagctggacatagagaacttgagctcacctctgggagttaaatattccaccccaactatcccatattgatagcaactggactcagaggtccccctcctgtttgaaagtgaacacattgccaatgttttgagaatggcaaaagcaat

SEQ ID NO: 181907 - DNA, 333 bp, Homo sapiens
ctattcatgggtaggtaaacatagggaaaaaatgctgaaacagaatagtaagtggaatgttcaaggggaaaatcattagactaagtttttatcaactattaataccaggactcttaaatgctcagctgaggattgcttgagcttgggagttggagaccagcctgggcaacaaagcaagaccctatcctacaaaatatttaaaaattagccaggtgtgtggcagacatctgtagttccagctacttgggaggctgaggtgggagaatcgcttgatcccaggaggttgaggctgcaatgagctatgataatgtgactgtactccagcctgggtaa

SEQ ID NO: 181908 - DNA, 384 bp, Homo sapiens
caagaaggagaggagaaagagcctgggtctgaaaaagtactggaaatacttgaagaaagtgctgaaaacttcctaaatttggtgagagacataaagctgtagattcaaaaaggtcggtgaaacccaaacaggataaatcaaaagaactgtcaactcagaatctgttttttgtttgtttattttgtctgtttgttttgaggtggagtctcactctgtcattcaggctggagtgcagtggcatgatctcggctcattgcaacctccaccacctcctgagttcaagtgattcttgtgcctcagcctcccgacgaagctgggattacagtcatgcgccaccacacccagctaattttttttgtaattttggtagagacagggtttcaa

SEQ ID NO: 181909 - DNA, 214 bp, Homo sapiens
tcctaagaatatcaccaagcttcttctccagcctttagatggtctattgtatgtctccatccagaattttttgcctcaggcatccattggtttatgttcctcttgtagcttttacaaacagtggtcaccatttttactgcccgtgttcagagatacgtgggacagagatgagttagtccttcatgttacaacagatgtacacaattatatgcaa

SEQ ID NO: 181910 - DNA, 213 bp, Homo sapiens
ttgctcagggaggtgatgttcagaccttcccattttaattataatgaagtattaacatgaacagtgtagggggaaaaggtggtcatgggagcacactgggtagtgagatcccagagaggctcccagaggaagtggcctctatgctgagatctgaaggatgaggatgtgggagtcaaaggaatgttccaggtggagggagcagcttttgcagaa

SEQ ID NO: 181911 - DNA, 623 bp, Homo sapiens
agagggagaagtaacacttgttgagcaatgaattaaaatgccagattcattttcaagtctgtgcaattttattccctttaccttttttaatactcacaataaatctgtgagaaaaatatttctatgcccagtttataagaaagaaaaccaagttcaagagctgtagcccaaggttttaattgtcagggctggaattagaagcactgtctgtccaactcccaaaattatgttatttctgttatgccctataaaccaagaacagtttttttgtaaaaagaacttgaggactgtgtaatatatttacctagatttaactgttaggtgttcaaattagcatattattatcagacacacccattagattccaaacttattgctgagaccaaattaataagaaacacgagaataataataaacataaaaagtttcaacacaaagcaatttcagttatggggtcaatgataacaacattcattagttgggatatttagagcatgacactaaataaggtaaagtcacaggaacggtccccacctgagcaaggaagcattactcccggttatgaccacagactgcttcttgggcaggtcctgccatctcacatgtgtaaactttcatctacc

SEQ ID NO: 181912 - DNA, 484 bp, Homo sapiens
ccgtctcccaggttcaagtgatcctcccgccttggcctcctaagtgtgtgccaccacactcggctaatttttgtatttttactagacactgggtttccccatgttggccaggctggtcttgaactcctgacctcaattgatccgcccggctcagcctccctaagtgatgggattacagatgtgagccaccatgcctggcctatgggaaggtttgatagtaatgaaaattgagaaagccagtctactgaattgcctgacaattttgagggcttatttgatcattatggttgcaaatttaaagtcatactagtcagcttgcttgtgtggtgtttcctccatgacattcagctgttttgatataggtataagatttctcaggcaagtacatggaggaaggaagggacacgggagttagtgtttgctaaggtatgattatgggccatggaatctaagctgagaagggagcagagagaaagcatggcag

SEQ ID NO: 181913 - DNA, 443 bp, Homo sapiens
catgatgcgaacaatatgaatgtcatgaaggccgctgagctgtacaattaaaaatgcctcagataggccaggtgcagtagttcacacctgtaatccccgctcttttggaggccgaagtgaaaggattccttgagcccaggagttcaagaccagcctgggcaacatggggagaacccagctctacaaaaaataaaaaattagctgggtgtagtggtacatgccagtagtcccagctattcggaaggctgaggtgggaggatcactggggcctgggaggttgagctgcagtgagctgtgactgcaccgctgcactccagcctgggcaagagtgagactgtctcacaacaacaacgacaggctaaaattataactttcatgtgctgcctattttaccacagtaagaaaacaatcattaaagcgttgtgttggtcagggttctccag

SEQ ID NO: 181914 - DNA, 335 bp, Homo sapiens
ctcaggtgctttcttcaagcaatttcaagtaaaatacctataaacagctactaaaatttagctgaaatataactggcctctccccttgaagggaacctagggttttcatgttttcaccaattcagagaagagatctgaaattgtgactcatgagtagaatcctctgaagatttattagcaagagatctggattataatcttcactatcactagcctgtgatttaactttctttgtaaaatgaagatgataatccttgtctgtcttacctgtcaaaactgcagtgaagattaaataattaaatgtgggaaagtcggccgggcacggtggctcatgc

SEQ ID NO: 181915 - DNA, 578 bp, Homo sapiens
aatgattagtttcttaatgaaattttacaagctcagttgaacacagaaaacatttgcttctctaaaagcaaacaggtctgtttctattataatcagacatctgaaccacagaagacccccagcccttaggagtacagaggtgaatctgttcaggaacttccgagttttctttgaagatgatagtggccaaagagtgatgggagaaggaagctggcgatcaacaagatttgaaactgcaggatctaatgccacagaccctgacataaactttgggcagttgtgctaaacacagcagctctcaagtagagggacagatgatcaaaggagctaatatagtcagtggttatgctagaatgtctgtttgggagggctttggagtgacagtctaactggaactacttttacatttctggcaggctgttcttacttaggttatatgagaaaattaaataaaatgaaatttaaaattcagtgaaacaggagaaggaaggatgattagggagaacaaaagggatttttagatcagtgaaactattctgtatgatattataatggtggatgtaagatatgcacttgtc

SEQ ID NO: 181916 - DNA, 328 bp, Homo sapiens
atgaatattgacaaatatatacaaatatatataaatgtttgatatatataaaatatgtattgaagaaaagtactataagaaaaattacaaaatattttgatggaatgataactgatacaaaataccaaaatttgtagaatgctgctaaaaagtatttagaaggaaatttatagttttaaatgtttatactagaaaggattagaaaggaaaaaaggtttaaaattaaaaactcatgtgttcaatttaagtagataagccaattaagattatctcaaaataattgtgcctaaaattacaattttattaaaaatattaattttaaaagaag

SEQ ID NO: 181917 - DNA, 116 bp, Homo sapiens
aagagaatcaaaagatgacaaattgcttctggttttaaaggagctgttcaggctgggtgtacacccagggggaaccagcttccgtgccaggagccatcacttcatcccagtctaag

SEQ ID NO: 181918 - DNA, 212 bp, Homo sapiens
caatattatgaagtgactggttatcaactctgaattgagtccagaaacatcctcattccctttgctcagttgttcttctgtcccatcagaatttcctcttcatatatataaatactataagtataggaaaaataaaaggaaagacaaggtccctgccctcatgagactagagttcctttaagatttgttctcctaatatcttgaatacagaa

SEQ ID NO: 181919 - DNA, 418 bp, Homo sapiens
gatcagggattctctgggggtggggtggctcccaggcctcagccaattgtcctattggtttcagccataaagacagctcaggctgctaccacgcactgataggagatttgtcaaagatcgaggcatcttcactcagaatccctctgtgattaccaattgtgaacacaaaatatctgatatgggtctcagtcaatttagaaagtttattttgccaaggttaaggacacatccatgacatagcctcaggaggttctgttgacgtgtgcaaggtggttggggcacagcttggttttacacattttagggagacatgagatatcaatcaatatatgttaagacatatatcaggtggtccaaaaaggtgggatgactggaaacagggagggggcttccaggtgataggtagataagagaaaaa

SEQ ID NO: 181920 - DNA, 835 bp, Homo sapiens
ccttgatgtacttgatgaatagtgactattattatcacacatagtaggccttcaaaaatacttctctcttactgcacacatctctgtgttaaagtagtcacattagtgctttgtaactatttatttgactgcctttctttccagaccagtgtttccagatcttctttttttattattattattgctccctaaggagactttttagacagttttttcctaattgcacccctgctgtgaaattgtaatgccacagacatactacgcctctgcttccgtaccatatgtacatttgtgcttttacatagaaagaataagaatttttgccaccgcccccaccccccaccagcgccaaaacaaattttcactcctttggggggcaatatcagccccaattactagaatgcacgttctagaatggagcttcttaagggtaaagtggcaatgtattcatgtttatgaatgaatggggatcatgccttcttcaaatggaagacattttggattacccagttctgccgtctctgtctgtgcatttccattgaggaatctgtgtcagttggagtctgtgcaatcagacctgaactgcacatgttttcatactgtttggttggagtcaccagagggttcatctttgctattggtcaggtcactgaagtcgcaaattgaaatcagtgattggggctcagagtttggggctgcgccggaaccctctgggcagcctagctgaatgcaggatccccctcgccccagagaactccttttccaggagaccaaggtgggtcccagaatctgcaagttcagtaatagccccaggtgattctcatgcaggcaggtg

SEQ ID NO: 181921 - DNA, 124 bp, Homo sapiens
tttccgttcccaggaaagacatatttcatacttgagaatcttcatatctgaataactatacagaaaaggaccgggcacggtggctcacgcctgtaatcctagcactttgggaggccaaggcagg

SEQ ID NO: 181922 - DNA, 557 bp, Homo sapiens
ctgccacagccacaccatgtgctgactgcaagacctggggaccttacttactatctgggggctgcagctttctcttctgaagcagagtcaccagagcccacatctgactgtgctgttgtgagggttacgtgaggcagtgaacatttagacagcactaggggcatgatgctctctcaagctgacgcgaccaatgtaggccactgccaaggtggagccttcatgtggaggaggatttgcattgctcagtaggttgttacaagtaactaacagagaaaagcaggctatgcatgaccaatgcgtgtgacacacaccaaggattgaacacaatccaattctctgtcctgggggcctaagaacctgacaagcctctcacctgccagctcagaacttacatctagacaatttctgctccaacagtttcaaacgtggttcctcccaccttctggccaagtgctcttacccatctaggggggccagtggaacgccctttccctcttgctgagcacgtaggaggggctgtttcaggaaagttctcaccaccaaagccctactgctca

SEQ ID NO: 181923 - DNA, 861 bp, Homo sapiens
attaaaaattgaattaccatttgattctgcaattctacttctgggtatataccacccaaaattgaaagcagtgtctcaaagaggtatctgtatacccatactcatagcagcattgttcacaatggctgaaatgtagacacaaccaaagtgtctatcaacagataactggataagcaaaatacatggggaggcacatgtgtacacatacataaatacatgttagtattatccagctttaaaaaggaaggaaattctgatatttgctacagcatggatgaaccttgaggacattattatacaaagtgaagtaaaccagatgcaaaaggacaaatactgtactgtatgattccacttatttgaggtacttagactcatcagaattatagaccgaagtagaatgattgttgccagtggctagcatggaaggagggatgggaagttagtgtttaataggtatagaatttcagttttataggatggatagcactgatgtttgcacaacattatgaatgtatttaatatcactgaaccatacactttaaaatggttaagatagtaaattttatgttatgtgtattttaccacaataaaaaaatgagggggaagtatacatcaaatgtcatcactccctccactagtgttctatcccagtgggaataaagtccttgccatgacttataagagctgtgtgatctgacctccaccagttcatccatgcttatttcctatcactgtctccctggttcactatgctctaactggtctgctgaccttttcattttggaacacactcaacccacttctagctggtggctttttcctttgctgtttcccgtcttgaaaggctcttctcttatgtcc

SEQ ID NO: 181924 - DNA, 373 bp, Homo sapiens
tgatattttcttgattatccagaaaatcatcttgtctgacttctgctgattccacagatgtaattgcaagaatgcaggatatctccctatttgttttcgcaaaggtctggctcttctcttctggtcataatgacctacacagattagaaacttaacgtgttttgaatttataaaaggaatcatggtataaaaaagccaatagcatttgacttcgcatttgttgtgtaccttgactgttcagatagttactttaatctgtgagtttataatatagttgttgctttcagaatagttgtcgtgcaacttctgagttaccgtgacacataaatgaaatttgccgaaggaagtataaagtgagggggatcctctagga

SEQ ID NO: 181925 - DNA, 712 bp, Homo sapiens
gtctgagaagtttgctgaggtccattgggggctagagcctggggtgctggagaaactcagtacagagcaggccccactgggcacacgccactggcagctgtgccttcagaggaaaaagagaccctggaaccaggaagagaagctgctacctcagcaaggcctggcagctccccacagtgttgtcccctgtggatagagcctgacatgactgtatttggccaaggagaaagactcataaggcctcggtccagtatcacggagcggggcctggcaggatgtatgcagagttaagaggcaatacatgggtaactggcatatttttccagattctttgttttttttgttgttttgttttgttttgttttgttttgtgacagagcaagactccgtctcaaaaacaaaaacaaaaacaaaaacaaaaacaaaaacatccgaaatgtcttccctaaagtttctggagccagaaatcccagaccgaggtgtctgaaggttcattcctcctgggggttccgagggagactgtcccatgcctttctccgagctctgcggcggccagcaacccctggtattcctcggcttgcagctcggcctaccccccacctggccttcaccctgtgtctcttcttgtgtctctgtccaaactgccctctctgttgtctttttaatttatttttagggacaggttctcattctgtcctccaggctggagtgc

SEQ ID NO: 181926 - DNA, 145 bp, Homo sapiens
acagggaaaggtcaaggggaagcaggtgggatatcttggggcacagggacagtatcagagagactccctagaggaagtgatctttaagatccctgagacctgaaggagaaacacgggctaatggggaagagcattccaggcagaa

SEQ ID NO: 181927 - DNA, 542 bp, Homo sapiens
ctcaaggttgggacggcgaggatggggacagcaggtgatgggggcatggaatcgagtgcgtggaatcaagtgccacttgtgttgagatgcccactaggtggcctggtggagagggttagctacccaggtctggctcagggcagtggttggggccgacgcagcagataaaggagggtgttcaggagaccagatgtgagccccagagcaagaattgggccaaaaatagaacctgggcagagggaactgttcctacctcattgggctgagcaagaatcaatggagagtcatggaaagcactcagcccagtgccaggcaaggagtggacacccatgactgtcgcctggtgttccgctatactgctgaggagctggacccaagatccagagagggccagcagctgacccagggtcacacagctggacgagggtctgaacccagtttgtttttgttttttgagatgcagtctcgctctgtcacccaggctggagtgcagtggcatgatcttggctcatagcacctctgcctcccaggttcaagtgatt

SEQ ID NO: 181928 - DNA, 613 bp, Homo sapiens
ctcaaggttgggacggcgaggatggggacagcaggtgatgggggcatggaatcgagtgcgtggaatcaagtgccacttgtgttgagatgcccactaggtggcctggtggagagggttagctacccaggtctggctcagggcagtggttggggccgacgcagcagataaaggagggtgttcaggagaccagatgtgagccccagagcaagaattgggccaaaaatagaacctgggcagagggaactgttcctacctcattgggctgagcaagaatcaatggagagtcatggaaagcactcagcccagtgccaggcaaggagtggacacccatgactgtcgcctggtgttccgctatactgctgaggagctggacccaagatccagagagggccagcagctgacccagggtcacacagctggacgagggtctgaacccagtttgtttttgttttttgagatgcagtctcgctctgtcacccaggctggtcttgaacccctggccttaagtgatcttcccacctcagcctcccaaaatgctgagattgcaggcgtgagccaacgtgcccggccaaatttttatatttaatcagagtacctcctatatttgctttgg

SEQ ID NO: 181929 - DNA, 318 bp, Homo sapiens
  misc_feature (11)..(11): n is a, c, g, or t
  misc_feature (28)..(28): n is a, c, g, or t
ccgagtcctantcccttccacaaaagcnttcccctattgcagttaatctcatccttctttgttgtagcttctctcacattctatctgcagtatagttgtttcttttcctggtctagaaggtaaactctttttgaggacaggaaactgttcactgttgcatctgcatttatatacacatagtgaaaccacaggtacttgaaatatgttggttgggtcaagttcaattttggagattgtttattttcatgggacctgcacaaatattagcagaaaaaaaaagaatttcccatcatgccaagtatcaggcagagtgttggg

SEQ ID NO: 181930 - DNA, 1502 bp, Homo sapiens
  misc_feature (809)..(809): n is a, c, g, or t
  misc_feature (1230)..(1230): n is a, c, g, or t
  misc_feature (1249)..(1249): n is a, c, g, or t
  misc_feature (1266)..(1266): n is a, c, g, or t
  misc_feature (1276)..(1276): n is a, c, g, or t
  misc_feature (1310)..(1310): n is a, c, g, or t
  misc_feature (1396)..(1397): n is a, c, g, or t
  misc_feature (1402)..(1402): n is a, c, g, or t
  misc_feature (1419)..(1419): n is a, c, g, or t
  misc_feature (1422)..(1422): n is a, c, g, or t
  misc_feature (1429)..(1429): n is a, c, g, or t
  misc_feature (1433)..(1433): n is a, c, g, or t
  misc_feature (1437)..(1437): n is a, c, g, or t
  misc_feature (1441)..(1441): n is a, c, g, or t
  misc_feature (1452)..(1452): n is a, c, g, or t
  misc_feature (1457)..(1457): n is a, c, g, or t
  misc_feature (1461)..(1462): n is a, c, g, or t
  misc_feature (1469)..(1469): n is a, c, g, or t
  misc_feature (1483)..(1483): n is a, c, g, or t
  misc_feature (1491)..(1492): n is a, c, g, or t
  misc_feature (1501)..(1502): n is a, c, g, or t
tttttttttttggtggaggtggggtttcgccacgttggccaggttggttttggactgctgacctcaggtggtccacccacctctgcctcccgaagtgctgggattacaggcgtgagccaccacaaccagcctcccttttgtcagcttatcaccccacccttatgaccttatttaaccttaattacctcccaaaggccctgtctccaaatacagtccctgttggaggtcagagcttcagcatatgaatttagtcatgggtaggtgacacaattcagtccataacagatggtcaaagtctgacccatagtgttcaacagctgctgttagttactctccttggctagtagtatgccttgaggcattaaagaacaaacacacaaagctagtgtggtgtaggaggcaccctgagaagttctgtgatgggctctgtctcctggtgctgcagaggaaggcatttgtgtgtaagtgactggtggcctcaaccatgggagggtctcagatttcaacatcctcctaaatcccttgggggtgtttttgtggaattcagattctgcctaacaggctggggaggtacaggctaagggcctacatttcttttctttttcttttttgagacacagtctcactttgtcacccaggtgaggcgatcatggctcaatgtagcctcaacctcccccaggctcaagcgatcctcccacctcagcctcctgggactacaggcacataccaccacagctggctaatgtatttttttgtagagacgaggtttcactatgttgcccaggctggtcttgaactcctgggctcangtgatcctcctgccttggcctcccaaggtgctggggttataggtgtgagccaccacacctgatcaaggacctatgttcctaaggagctccctggtaatgctaatactgctggtccacggaccacacttttgagtagtgagggcctgtgttcagcagcacagtagccaggagccacgtgtggctgtttcagtctccgtcttagttaaataaaactagaaaatccagtgcctcagtgactgtaattgcattgcatggaggaaagttctaattgggcagtgccacatcttaaaggaccgaatgatccactttttctttacttttaaattttctttctttatatttttagagacagggtcttgctctgtagctgaagctggagtgcagtggcactatcttagctcactgcagcctaaacctcctnagctcaagctgtcctcccncatcagcctcctgagtngctgggactncaggcacatgctaccacacccagctatttttttnttttttttgtagagatggggtctcactatgttgcccaggctggtcttgaactcccaggctcaagcagtcctcccacctcagctacnngggangctgaggcaggagaatngcntgaaccngggnggcngagnttgcagtgagncgagntcannccactgnactccagcctgggngacagagnnagactctcnn

SEQ ID NO: 181931 - DNA, 555 bp, Homo sapiens
taaattaaaggaaaaatgaaatgtctccttaagtggaagagaacgacttcaaattgggactttgggagttgagtagaaaacatcaaactggccattgcagacaaatcgtttccagttggtgaataagaataggctgtggacctcagagcttaaacataaaaggcagcaggaaaacttgtgtttctttcagtactgaagtaaaaaggaaacatttatcttgctgcatccatccttacagtaatgaaagttgactagaaaaaccagacaagagctatttaatttgtttatttgcaaaccttcagatgtggcagaataatctggaaagccagagttcattatgtcttcctcattctgggacagcaggggcattttcatttatatattttatcccacaaacagcaaaagacaaatcagttagcacttcttcctcactgtccaaaattatgaggcattggcaatagcactaattgttttctttgtgttttgttaggacggcttttgcatcatataaggattgtgtctaagttgggtttgcaatgtaccctggcaaggtta

SEQ ID NO: 181932 - DNA, 441 bp, Homo sapiens
agccgactcctgaggataaaccgacccccggggaagacatcaggactactggtcagccccagagacctgaattgtgaggaccagcgaagatgagggggagggtgtctctagtcagtcctcccccactgctgacctgtgccctgcccaccaggacagcataggacttaggattgcatctttctttacttcataggagcagaagtcagaagaggaaagagggctttttaaatgaggtagtggcagaactgacaagggggtatcagaatgagagtgcacacaagtaagtgggagtatgtattgattagtcagtacagcaaagagactgaaacctgtggtcgctacactcctctggatgcagaggactggtcaaaaaattgcagaatcatccttttataagatagtatgttctcataacagctctttgaggatcagggaggtagg

SEQ ID NO: 181933 - DNA, 259 bp, Homo sapiens
tacaaccaccatatcagaggtgccttcaaaaatatcagtatttgtgagatatagaggggcagaagtctggttggtgtgtttattttcttgaaaattctgtttctacctccttttggaacaagctcagcttcatgaagaagaaataaaaagtcttcctaaaagaggttttcctcagctattggaaatattaaatagaagtattttaaaatgctatatttagttgaatgcataggtttttccccctaatagtttatgctgt

SEQ ID NO: 181934 - DNA, 236 bp, Homo sapiens
gcagtgtgtgagggaatgtgagtgtgtggtatatagtaagacagaaacacatagccagtctttgtacccaatcctggcacagagcttcaaaaacccatggaatttcctgagagatgagagtgtcttttattattcataatgagccccttttgatcttacctgagtttctgctactaaacagggactcctggtgggaccttagattcaagggaggtgctggccacagaaagactaag

SEQ ID NO: 181935 - DNA, 388 bp, Homo sapiens
taattttactgatctctctgtgcattactgaatctagaaatctcttcgtgcttgacaccaaagcttttcattataaccctttcctgatctattcctcatcttcccaagttcaatcaactgcctctgcctgatgcctgtttccttccttttcttcccactaagttccagtagccatttttttcaactcctacagcggctaatatgaaatgaaattctccccaaacttaagtgtaacttctttaagaaaaaattggaaaaaaaaatccagtagatgccagtcttctattgaaaaagacacgtgggtataatatagctgatgcctaacaaaagctacttcctagtcactccttcagaagagggttatcctcattccatcttccccaccact

SEQ ID NO: 181936 - DNA, 765 bp, Homo sapiens
ggccaaaaagtaaaacttgtactccctatcaataaaactgatcataaatcactttttctaacataaaacagccttttcatactaactagatgtaataagaatttgcagattacatgcagttccatataaattcctcactgagattattttaatttcctttactttcaaaacttgaaagtaagccaggtgtagtggggttcacactttgcgaggccaaaaggggtaggactgcttgagcctgggagctcaagaccaacctgggtgctgagtgtgatggctcatgcctgtaatcacagcactttcggaggccaaggcaggaggatcacctgatgtcaggagtttgaatccagcctggccaacatggcgaaatcccatctctaataaaaatacaaaaattagccggacatggtggcgcatgcctgataaaatacctctctcattctttataaccagctactcaggaggctgagacaggagaatcacttgaacccaggaggcggaggtggcagtgagtggagattgcgccattgcactccagcctgggtgacagagcaagactctgtctaacaagaaaagaagagaagagaaaagagaagagaccagcccagactcggaaacatattgaggctctgtctctacaaaaaaaaaattaagttagccaggcatggtggcatgcacctgtagtcccagctaatcaggaggctggggtgggaggattaattgaatccaggaggtcaatcctgtagtgagccgcgatcatgctac

SEQ ID NO: 181937 - DNA, 360 bp, Homo sapiens
gcttgcagtgagccgagatcacgccaccgcactccagcctgggagacagagcgagactccgtttcaaaaaaaaaaaattgtggtaaaatatagcaagattaccattttaaccacttaaaaatgtttttgactagaaagaagggaggaaaattttaaccgtttgtaattgtatggttcagtggcatcgcctccgttcacactgctgtgcatccgtcaccaccgtccatctccagaactttttaatcctcccaaactgaatttccacacccttgaggctcaccgttcctccctcctactatcccctggcaaccaccgttctcctttccatttctgtgaacccgactgcttctaggtacctcc

SEQ ID NO: 181938 - DNA, 347 bp, Homo sapiens
cagcaggaagaagaaaaatgagcaaaagatggaaaagcctcttataaaaccattagatcttgtgaaaactcactcactatcatgagaacagcataaaggtaaccacccccatgattcaattacctcccacagggttcctcccatgatgtggggattataggagctacaattcaagatgaaatttgggtggggacacagccaaaccatatcaaaagtcctctgccatgtctggtcttttaattcctttgttccccaaccttccacccctgattgtctcctgccctgtcccccttttgtttctcttcctcaataagccttaatttccatggccaatcacttataaacct

SEQ ID NO: 181939 - DNA, 572 bp, Homo sapiens
cagtataaaagaaattgaaactggaaattctatcgcatagtttatataagaaagatgatacagactccatcagtgggcccatactcacagaataggctttgacccaatatcctaagattgttgaatagatataaatttatgttttaaattaaaataaaatgtttgagttacatatattatcactacttgatttccctcacttcgtcaatcagttaatgatccaggtcatgttgcataagcagttttttcctgttcttatcgaaaaatggtgtggagttcacagagtaaataaaagaacaaatgtttgcatgttgagggaaaaaccaccaccatcaccaccaccaccaccaacagatgctgtaagaatgaggaactacccgctaccataatgaaaagctactatgggttttttttttctttgagacggagtttctctctgttgcccaagctggtctcaagctcctggcctcaggcagcctcccagcttggctcccaaggtgctgggattacaggcatgagccaccatgcccagcccttccagagaatttttatgcttataaaaagcaatacca

SEQ ID NO: 181940 - DNA, 116 bp, Homo sapiens
tgcctctaggaaaagaaaccttcagttttattctagcttaattatgttttcacatacttgggttaataagcctttaacatatttctttatgcattcattgtagaaatttagaaaag

SEQ ID NO: 181941 - DNA, 308 bp, Homo sapiens
tgttgggctccagccactcctcctaccagacccattcaagaaaagacaaaggagcccattttgaagcagctctcctggagccagcaaagacacaataaaacaacaagttaattgtccacagcagtaccaggaagtcacacaggtgcaatcaaggcagaccatttcctgctgttactaccctgaggtccaaaggcctgcccaggcctcaccatccttggtgacccccatttttaccctgtgacgcctcagtaaaactctggaagacttctgttggaggtattaaaaaataccgtgacagccaggagcag

SEQ ID NO: 181942 - DNA, 393 bp, Homo sapiens
agcctaggtctcctcctctgtaaaaaagatgatactgacatctgtcttggaggtgtgttttaatgaaagaaatgagattaatgtacattaagtaactggcgtactgcctaaccacaataaagcacttgataaacagaagctagttaagattaaacccacagttccagaagaggctaatcaaatgagaacaatttatgctaataatctatgtgatatcaaatatatctcaagtacatgttttatctgttttcaacttgagacaaatccacaacatttttaagatgaaagggagcctctaaaccagtgcttcgcaaactttaatttcttacaaatcagagggtcacgttaaaatccaggttctgatgtggtaggtttgaggggactgagagtctg

SEQ ID NO: 181943 - DNA, 408 bp, Homo sapiens
ctctgcagactcttgaagtttttctccagaagcagacagcatcttacatatgtacagctctcctaagaccatgggccaagacttacctccatcctgaaagccgtatccttttactttttttcccctaattttcttctgccccaattatttccttttccttacaggaaaatccatgggaccataatctgtggatagctttacctaaggcttattctgtagcaaaaaacttgagtaatccttgggcttgtgggttaatgccaaaaactcaagaagcaatttcacaaatgccaatgcctccctgtgttcccaattcaccctgacgctccaaaggaagaacagaaagctatcttgatattctagacatcactaccacttgttttcctacacttgctggaaacaatatcctaa

SEQ ID NO: 181944 - DNA, 258 bp, Homo sapiens
ttattgagggctggagccaactatttgtgacttttccaactatttttgtgaggtgtgtattctttgcagtatggggtcagtgaagtttcagtttgtatcctgtggtctgtaccagagggtttaaagcaagggagtgccatgttctagttcattttttaggaagataattcttgctgtcatgtgaagcacagcctgcagggagggaaatcagttaagcagctgtggcagttgtccagataagaggtgagaacaacttga

SEQ ID NO: 181945 - DNA, 290 bp, Homo sapiens
agaaccagcctttgttttctacaagctatctgttcggtctactcaggaatagagataaactgccttaatagtaataaaagcaagcaccgctgagtgagtgctggcctcatgccaggaactgctcttggcactctgtgcacaagggagatactgacattctttctgttgtgcagatgagaaaacaggctcagagaaggtgagtaacttaccatggtcacacagcagcagagctaggtcagtataatccacaagtcattctcttaaccgctccgccgtaccgcccagaatgt

SEQ ID NO: 181946 - DNA, 289 bp, Homo sapiens
tagaggatccacacacgccacgccttcatgatattatactcatcataggcaatactgccagagctatcaatgacaaacacaacgtctaaaacttcaatccgcttgcattcttcacgggggctgcatattccaaaaacaagatcatcttcaatgcgctgcagaatgtcaaaattctcaacataaaaaaccatctcgggcctcccactgatctcctcaagctgggtgacattggagccaaacactcccacagaatagatgattacaccttcttgccgaagcactactgctg

SEQ ID NO: 181947 - DNA, 439 bp, Homo sapiens
ggacctactattcttgctttccccacaatgaggagacttagccaaagtgatccctcttggtgtgaggtctgatgttacccacaagcagctgcagcagcactggattccaggagcaggtgctcagaatgacaatgggaccatgtcctaggctcagagtctcacaaatgtatttgtggcacctgtggcaaagtgggatatgttacccacatggtcaggatctgtgactgtcaggtacccactggtagcttggacctaagagtctactttgtagctgtgattctatccctgggaattagggcataacactggcctgactaggtagaaggggcattctggaagtttgggtcaagggtctggctgcaattcaggaacatgagtcagcagggctcagtggcaacttaggtcccatggaatgaagcaccatacagtattgactata

SEQ ID NO: 181948 - DNA, 309 bp, Homo sapiens
aaaggaaacattgactcgaagccccgtgagacatggaggtggagcatcaggaggccaccgtggggctgggcaacccctgcgccccggggcctctgcagcacattctgtggggccagcccgctccctttgcctccaggagcaggagacctggcacgagctgcggggcggggtcttgttgagagcactcatgcccctgttctgtgtttagttccacacgggcccagtgctgcccctgctgctgcaggagcccccaggcgaggttcggccttcctctcgcccctgtgcacccggagatgcccacagcaccag

SEQ ID NO: 181949 - DNA, 378 bp, Homo sapiens
tccccctctgctctcaaccccccagccccaacctctgggtccctacaaagcagggaagggacccccggggcgtggtgaggctgcagctctccaggagttccacacgggcccagtgctgcccctgctgctgcaggagcccccaggcgaggttcggccttcctctcgcccctgtgcacccggagatgcccacagcaccagcacctgagctcacctccgaacccgcctcctgaacccgcctcctgaacctgcctccttacctcccacttcctgagccctgagtggaagcctttctgtgccttgccctttgcccactcccctggtgggactgccaagaccctcaatgcccattaaatactcttgcctgcctcttaaaaaagt

SEQ ID NO: 181950 - DNA, 367 bp, Homo sapiens
agaaaaactgtttgaagatgacataatgctattctatacacagagaaaatcctaaagaacctatagaaaaactatcagagctattaagttcagcaaagttgcagaatacaaaatcaacatagaaaaatcagttgaatttctatacaacagcaatgagcaacctgaaaatgaaataaagaaaacatttccatctataatagcatcaaaaagaataagattattaggaatacatttaacaaaagaagtgcacactgaaactacaaaatattgtggaaagcaacgaaggaagacttaaataaatgtaaagccaatccacgtccatgggctggaagacttctttgtttgaaacagggactgagtctgtcac

SEQ ID NO: 181951 - DNA, 463 bp, Homo sapiens
tcgattctctgtttctccctcctccctctgcccttaaactaaagtcaaccatcttgaggccatgtgaaaaaataggcttggatggaaaggtgcacccttaatctaatctttgccatggattggccccctcgtttggtggggaactcttcatgggacatgttgaaaaagacctcacatctttatcattttttaattcatgtttcttaccatattgaattggtttttgccacttgtaacaaaaggattcctgatgaatgcctcctgtgtttggagtcttattttattcttcctctctgtagctgcagggtctaatatatacctaatttataatctgtgtaggtgccaattacatatgtaattgtgtgagcatatgtatataaaaacttagaagcagatatgcccctgagagcaaaataaagaataaagttcctaaaacatacagagaaaaagataatgtaggaga

SEQ ID NO: 181952 - DNA, 297 bp, Homo sapiens
tgtgctagctcaggacagaaaggcagcagctggagctcttagagtggtaagaggtgagggcaggaagggagcaggggccaggtcatgacttgcatttttatcctgcatgaaatggagggctcacagaaagttgtgagtagagaattgacaggaagacttatgttatacagatactgtaggggcttggtgtgtgtctcaagcaatcctcctgccttggccttccaaattgttgtaattacagatgtgagccattgcacctggccttgaaaattattttgatatcaaaaactaaagttg

SEQ ID NO: 181953 - DNA, 435 bp, Homo sapiens
tgtgctagctcaggacagaaaggcagcagctggagctcttagagtggtaagaggtgagggcaggaagggagcaggggccaggtcatgacttgcatttttatcctgcatgaaatggagggctcacagaaagttgtgagtagagaattgacaggaagacttatgttatacagatactgtaggggcttggtgtgtgtctcacgcctgttatcctggcactttgggaggccaaggtaggaggaattgcttgagcccagggatttgagaccagcctgggcaacatggtgtgagaccctgtccctattttttaaaatagtgtgtgtatataaactgcagggctaagattggaagctgggagcccatttggaagcttatgtgataatccaggtgagagatgatggtggcttgggaaagagtgaagttctgaaaagttcagtg

SEQ ID NO: 181954 - DNA, 160 bp, Homo sapiens
caatgatgccatctaacagagatgaaattagggattttttttcattacttttgtccttttgggaatagaaacacacccaaacctcttaatgcaaaagctcattaagtgactttcacacattcaacattaacacctctgaagaaaccatcaggccgggtac

SEQ ID NO: 181955 - DNA, 340 bp, Homo sapiens
tgaaaagactcatgagttcacattgaatctcatcaaaaccccttccaaaaccatagcctaaatctgaaaagttgctacagaaacattctcagcattgggaaatacatcttagaacaaacatatccaaggagaatatgtgattccttaaactttttcttgttctattcttacgttataaacctctacactttccagctaaccagcctactgggcagcccaggaggcaggagccagctagagaccatcagatcattcagcctcctaagaaaataaaaatgaaatcctttcaggcagtgcttcccaaaaagtgaaagcattttcatgaatacaataaaaacta

SEQ ID NO: 181956 - DNA, 176 bp, Homo sapiens
accctctagggaggagaaccagaagcaaggcatcccttgagtgtgatctccaaaagggatgtcttctgtccatttcttatgtgttgccttgatggtggttgaggctggatgggaaggccacagtgtggagaagactgtgctcacccctcaaagtctcggcccagtgacttgcccca

SEQ ID NO: 181957 - DNA, 973 bp, Homo sapiens
tttatggctaagggggtacgttgtatggtttgttttttttttaaccaagatttaaattaaaaaaaatttgagaacacataatagaagaaaattgtgagaatggggtggtcaatatgtgaggggcatacacacaccaaggtcagatttggcattaggggtttatgggtagtttcggagagagccatttgagcagaaaggtggggaaagaagctagacctcaggggattggagagagctcaggcgacactggagggaggtgggggcagccagaatggactcactcccatgtttggtggtaccaggaaagagagactgagtgggggtgacgtgaatggatagagtttgtggtaagattagtgttctgttgtttttttatctagagaacgcctgaacacacctgtaggtgggagaggagagatgaaagatgaggaagtgggtaaagcgagtggggatgctggaggtcagatgattagagaacagatccctggcagtgatggggggagagatgtgctggttagtcttggtggaagagggacctgtgcctttgtgacagagggtagaggaggaaggtggtgtggaggtgtggacagagcattatcagatactgagagagatgtggccaggatgggggtggatgcacagtctttctataaatttgtctaccaacagttgaagccaactgctgcagtggggaagcagggctgaattggagtcacgagaagtgtgggagaggtgtggacagcaactgtgggggccgcagcaggggagttagtgatggatgaggtatcgcctgtctagcagaaggatacaagctgagcctggtcaacaccaacctgtggttggcccaaaaggcaaaagtttgcagcaccctctagcaatgctcagagtggaggaaagtgctgtgggctggttctgggtgggctggttctgggtggggagctggcagggcagaggaggtagtctggagttggag

SEQ ID NO: 181958 - DNA, 917 bp, Homo sapiens
tttatggctaagggggtacgttgtatggtttgttttttttttaaccaagatttaaattaaaaaaaatttgagaacacataatagaagaaaattgtgagaatggggtggtcaatatgtgaggggcatacacacaccaaggtcagatttggcattaggggtttatgggtagtttcggagagagccatttgagcagaaaggtggggaaagaagctagacctcaggggattggagagagctcaggcgacactggagggaggtgggggcagccagaatggactcactcccatgtttggtggtaccaggaaagagagactgattatctagagaacgcctgaacacacctgtaggtgggagaggagagatgaaagatgaggaagtgggtaaagcgagtggggatgctggaggtcagatgattagagaacagatccctggcagtgatggggggagagatgtgctggttagtcttggtggaagagggacctgtgcctttgtgacagagggtagaggaggaaggtggtgtggaggtgtggacagagcattatcagatactgagagagatgtggccaggatgggggtggatgcacagtctttctataaatttgtctaccaacagttgaagccaactgctgcagtggggaagcagggctgaattggagtcacgagaagtgtgggagaggtgtggacagcaactgtgggggccgcagcaggggagttagtgatggatgaggtatcgcctgtctagcagaaggatacaagctgagcctggtcaacaccaacctgtggttggcccaaaaggcaaaagtttgcagcaccctctagcaatgctcagagtggaggaaagtgctgtgggctggttctgggtgggctggttctgggtggggagctggcagggcagaggaggtagtctggagttggag

SEQ ID NO: 181959 - DNA, 394 bp, Homo sapiens
catcttgcctgctttagaatcttaatacaggaaaatattaccttattgtaatattacatcaccataaatttatcattacatccattatacacaccattataaaaaccaacatgaattcagcactgacaatgcccaaactctgttcctaagcactgcccacatattaccctatactcaaaacaaacctagggaggtagtatttttagccccattttacaaatgagcaaacaggctcagacaggtaaactgacttgtcaggtcattcagcattgaagcggcagagtagggattggagcccaggcaggccaattccatggcttcagtgcttaaaccctgggctttatggcctttgcaattctgacttcatctggaagttctaaccccgccaagattg

SEQ ID NO: 181960 - DNA, 319 bp, Homo sapiens
accttctcaaatagaatatgcagggagggaagtaggcaaaccatttacaagttgggtttttgttttgattaacctgttaagagacacttttgtaatctctagtgtttacattcctttatactagctatctataaagagaatccagaaggctaaattaatcagaaataattatatttctatgtcagggtattggctatatgtagcatgaacaattctccattttctgcaaatgggtttttcaggacagttttataattctgagtttgctttttcttattccctagacagtttgtactcagggaatacaaattgattttta

SEQ ID NO: 181961 - DNA, 240 bp, Homo sapiens
gaagtggaggctgcagtgaggcgagattgcgccattgcactccagcctgtgtgacagagtgagactatttcaaaaaaaaagagagtgatcaacatcaggtgagtttcaggtgtgcaagaccagttgcagcatctgaaagacgtggccctcttggaggaaaacaagagggtggacagtcaggggaggagaatgtcaactacagaggaagacgcatgcgtctaatatgtttgacgcttctag

SEQ ID NO: 181962 - DNA, 502 bp, Homo sapiens
  misc_feature (474)..(474): n is a, c, g, or t
ctcagccggaccggatgtatcccaacactcgagtctagctgagtcatactcgtcataatataaacatcattttctcagtgaagcttctggtatgcccaaatttgaataagctgttctatgtgcttccatagcatcctgaattcctttatgaaaggatctaccatactgtgttgggcgataatcattatcgcccaacacgcaaaaggttctgaagggcatggaatgagaatccctgtgctctcggccggctcagtgcctgtgtcctggccgccagtcctccccatgaccccctagcggaaactgacgctatcagattctcagccttcgtttttcatgatggcctctttctcatccccataaaatgcagcatgtaaaaaacatcagaggaccctcagtttcttgtggatttatcttgtttatgtttccgtttgccgtcatgtgtttaaaatttcttcctgttgagtacatggtgtngggcgataacatcacggggatcctctag

SEQ ID NO: 181963 - DNA, 543 bp, Homo sapiens
ctcagccggaccggatgtatcccaacactcgagtctagctgagtcatactcgtcataatataaacatcattttctcagtgaagcttctggtatgcccaaatttgaataagctgttctatgtgcttccatagcatcctgaattcctttatgaaaggatctaccatactgtgttgggcgataatcattatcgcccaacacgcaaaaggttctgaagggcatggaatgagaatccctgtgctctcggccggctcagtgcctgtgtcctggccgccagtcctccccatgaccccctagcggaaactgacgctatcagattctcagccttcgtttttcatgatggcctctttctcatccccataaaatgcagcatgtaaaaaacatcagaggaccctcagtttcttgtggatttatcttgtttatgtttccgtttgccgtcatgtgtttaaaatttcttcctgttgagcttcatttgcacattaatgtgcatcacatggtggcaccgatacacaaataacgtgtgatctgtgtcgtggataactatga

SEQ ID NO: 181964 - DNA, 162 bp, Homo sapiens
tgtatccttaaaagtgagatgtatctttgtatacagtatatagctaagtcttgttttttaatccattcagtaactgtctttttattagagcatttaatccatttataagcaaggtaattattgatatgtaggatgtactattgccatttcctttttcttttt

SEQ ID NO: 181965 - DNA, 497 bp, Homo sapiens
tgcagaaccatgattcagtccagctctggagcttgtttattgctcatgggaccaggcgaggccacctccaccagctcaactggggtcgactcattgattaaatgagtgacctgaattcctttgattcttaatttactggtctttaagtcaagatgaaaccccctccctctccagtggtttgtggaaggagtatacagagcttgtaaatgggctgagtcaatgcctgcccgcagatgggtggtcagctggaatgaaatgcacagtgaagaccatccatgactgtcccaggcacacctgggtggagggtcctgaaagcccccatcctagcaggcaggattcagtgaaatgggagcaaggcatggtgggctgtgtgcccacctgcgcctgtgccggctacacctctcggtttcctggattgtcagcttctcctagaaactcactcagacccctcctgagtcagacagagcatccctggaccaggactgggtctgttctgt

SEQ ID NO: 181966 - DNA, 406 bp, Homo sapiens
gttgggacaccttgcagaaggactcttttatgagcacaaaagacctgtagtctacaatttgatgaagaaccccagtgccctagactagttggtgaccaaccaccattactttaaactgggccttcttgatagtagaatatttccccttttctgcaagactgcttatgcctctcataaatgtgcagaacatataatggctcagggcttaggtttaagctcctcagagtggcatttatggatcattcattaattcatcaaatgtttattgagcccttactttgttccaggatgttttctaagtactgggctacattgttgggacaaaacagacaaggcctcttccctaattaagctttattctgtatgtatgggaatgaggaatatacaacaaacaagcaaataggat

SEQ ID NO: 181967 - DNA, 384 bp, Homo sapiens
gtgagtctatttctgggctctgtattctgtttcattgatctatttgtctattcttttgccaataccacactctcttaattactgtaactttatagtaagtcttgaagtcaagtagtttcagtccttcagttttgttcttcttctacaatattttgttggctaattggatcttttgcctctccatataaattttagactcagtttgttgacatccacaaaatagcttgctgggattttgactaggattgcattgagtgtatagatgaagttgggaagaactggcatttgataatagagtcttcctgttcatgaacatggaatatctctccatttaaagatgctccttggtttacaatggagttacatttggataaacccattata

SEQ ID NO: 181968 - DNA, 426 bp, Homo sapiens
acctcacttgcccatcaccccaacacaggccccaagtacacagtcaggcctctgagactctgataacattgttccctctgcccagaacatcctttcctcgcctctctctggacctaaatcctacccagattttaacgaatgcttcaacatctacttctctaagatgctctcctccatgtttagaaggaatacacattgaggccccgggaaatcaagtgattttctcaaggtcacttagatcaggaggggcaaagttacaacttaaaattttggcttgtgactcgctgtgttactacttaccaatattttgttttcccctggaaatggacagatttgtcttcagcttcagaatcatttcatctgacaccttttatagataagacactagtctcaaacttggctgcatgttggaatcacctggaagct

SEQ ID NO: 181969 - DNA, 513 bp, Homo sapiens
aataccacgagcagccattaggggcagtctcacctcagggccaggcagggagggtcccacagacactgggcaaccaagaagcaactgcggaggtagtgctgggccttgcacaggcctgggcagggtccacctaccagcagtgccctccctcccacttctgttgatgaatctataagacccagggagggcaacacaggaatgaggtggccgctgagaacaagactcctgaaaataagcagtaggcaggccccaggccctttagccaactcctgtggactggcagacaaccccaggagcctatggtctgacagcatctacgctgccctcccaagagcaagcagtggcctcaggtcaggtccatggtcaaggtctagcagagtctgcttcctatttgctctccctcctactgcttaccctcctgaggtcaggagttcaagaccagcctggcaaacatggtgaaatcccatctctactaaaaacatacaaattagctgggcatggtggagcacacct

SEQ ID NO: 181970 - DNA, 443 bp, Homo sapiens
tcaaccgtgagtgcatctcactggatgtgtatatcatcacgaacacctgtgtacgaccttgctaccaaccacacctccctcccacttctgttgatgaatctataagacccagggagggcaacacaggaatgaggtggccgctgagaacaagactcctgaaaataagcagtaggcaggccccaggccctttagccaactcctgtggactggcagacaaccccaggagcctatggtctgacagcatctacgctgccctcccaagagcaagcagtggcctcaggtcaggtccatggtcaaggtctagcagagtctgcttcctatttgctctccctcctactgcttaccctcctgaggtcaggagttcaagaccagcctggcaaacatggtgaaatcccatctctactaaaaacatacaaattagctgggcatggtggagcacacct

SEQ ID NO: 181971 - DNA, 1531 bp, Homo sapiens
caagttttatcttgtatacatataatgtggaatgatgaagaggatctaaaattgtacaactgggatgcatcttcacatactaattgatgaaagcaactcacaggtatcagcatgtgtctatgctgggctaacaatggtaacctaattatagtacagaccatcaactcaaaggtattgtttgatttggccttttcaataataagagcactacgatcaatgatactcaattttcaaattgaactgtgtcttttcaatgccatgcaaaagccactgctgccccattaatttttaatctcactcttcatgtatcttcaggaacactacaaccctttggttttcaccagtaactctagccacaatctcctttaatgggtcttcctcattttctcaatatctaaatgctagagcatccaaagcatggtctcagacacatatgttcctactcccacatacactctatctctagatctcatcctttcccacagcgattaagtattatctctacctccaaattccccccagctcaagcttcctatttacactttaaaaaccaaaaccttaatctgtgggtttaatatggatctaaaactggcaaaatagcatttttataaaaaatcatgcactcagagaaaaccaaccctccctagcagttgttgaggtctaaatcataagtcctgtttccgtcctcttctcctctcacatgataccattcaatactttatcaagtagaactggcaaggatttcaaaatacaccccaaatcccatactttgtaatactttcatgtaagacaacctaatgtaacacctatgtacaacttatataatacaacttatttctacttttgctattagtatttatatcatccagtgatcttcatcctacctaacttgttttaatatacataaaatatagaaagttaagtactgcagaaataaaaattgtaaatctaaaaaaacccaaagcagttggaatgctaattatgagtaaaatacagccattgaacaaggcattcttatccaaggcattagggagaacactcgctaaatcttggaaatgactgaatgagacatgagatgacatttttaaaatctctaattcctgaagataaacaatgaatcgattttagaatcaaattatcttgtggaaaaaatcaagataacatgattgtcatatattccaaggtgacaaacgagatacaacaatgtaacagaatatttcaaaccatcaaataaacatgagactggtatttttaaccaactgtacttttgtcttggaattaactttactagataaatcaaataccagaagagtcagaggcctgaatttttttgtgcaaatcgtttatcagtcagcagtgaacctcaacaaatataaggagaaataaaaggctacaatcttctcctcggctttccttggtctatgtcactctgctcccactggaaggaagaggctctaatttgatcggtggaatgataacagtacttactcggctattctttagagggcaatcactgtgttccaaggtcaat

SEQ ID NO: 181972 - DNA, 803 bp, Homo sapiens
  misc_feature (138)..(138): n is a, c, g, or t
cccatccccctttgttaaccgccggcaaatgattttaatcccctccattaaggccaattggccaagtgagcctaattgcggccgaatgcataactttctcgagttaaaattcgactggcccaaggcggccaacatggnttttattttatttatttatttttttgagagggagttgcactctgtcgcccaggctggagtgcagtagcgcaatcttggctcactgcaacctccatctcccaggttcaagcgattctcctgccttggcttcccaagtagctgggattacaggctcatgccatcacacccagctaatttttgtaattttagtagagacggggtttcacaatgttggccaagctggtcttaaactcctgacttcaagtgatcctcccgcctcagcctcccaaagtgttgggattacaggcgtgagccaccacaccctgccaaaacaatgtcttatataataaaaatagtagttttttttccttttttgagacagggtttcactctgtcgcacaggctggagtatggtggtgtgagcacggctcactgcagcctcaacatgctgggctcaagcctgcatcagcctccccagtagctgggaccaaaggcgtgcaacaccatgcttggctagtgcattattatacattcagtacataaactttttgatccccatccataagtttctagaaattgcccacaagtatcaaaaaatgttcaatcttactactcatcaggaaaatgtaaactaaaaccacaatgagttatcacctaacgcctgttagggtggttattatcaaaga

SEQ ID NO: 181973 - DNA, 1016 bp, Homo sapiens
tttatgggggaattggtagagactcaaaatccacaccactattactttccaaaattcatgaatgataaattttccccttctaattcaaaccacaacaaactcagagcaaaccaatttcaacagttcctccaatcatgaaagatttcttctgtttctttctccttttcttccttgcttccttccttccctccttctccaataaggaaaaatctttcacataagaagcactagaggccaggcgtggtgactcacacctgtaatcccactttgggaggccgagacaggcagatcacttgagcgcaggagtttgagaccagcctgggcaacatggtgaaaccttgtctctacagaaaatacaaaaattagctaagcgcagtggcgcatgcctgtagttccagctactcaagaggctggggtaggaggactgattgagccctagaggtgaaagctgcagttcaagcgattctcctgccttggcttcccaagtagctgggattacaggctcatgccatcacacccagctaatttttgtaattttagtagagacggggtttcacaatgttggccaagctggtcttaaactcctgacttcaagtgatcctcccgcctcagcctcccaaagtgttgggattacaggcgtgagccaccacaccctgccaaaacaatgtcttatataataaaaatagtagttttttttccttttttgagacagggtttcactctgtcgcacaggctggagtatggtggtgtgagcacggctcactgcagcctcaacatgctgggctcaagcctgcatcagcctccccagtagctgggaccaaaggcgtgcaacaccatgcttggctagtgcattattatacattcagtacataaactttttgatccccatccataagtttctagaaattgcccacaagtatcaaaaaatgttcaatcttactactcatcaggaaaatgtaaactaaaaccacaatgagttatcacctaacgcctgttagggtggttattatcaaaga

SEQ ID NO: 181974 - DNA, 272 bp, Homo sapiens
ttgttgcctgtcttggatgtctcatagaagtggaatcacaacacctggccttctgtgactggctgtcctgttaaatctagattttgtccttgcacactcaagtttcccatgctttctttttggttttataaattcattccttttaagaacttactgtacatctgttataaaccaccctttgtgttggaattctagaaatgaaaccctcagttagctaggattcctccatgaaagaattccgattaaggtaagctgacaaccacatggccact

SEQ ID NO: 181975 - DNA, 363 bp, Homo sapiens
tttattactgtatatcccagtggctagcagagtgcctggcatgtaagcagtattaaatactttgctgaatggaaattaaacaacaacaacaacaaaaagcctgctaagatttgttttaggaaaatccctgacaaataagaatgggcaatgtggagggtgaactcatggagacagcctttaaaacaatatttccaatagccgagccatagaagggagctaacaaattggcagtgggattaggagaaatagggtagttcgggatgtggaagtaagagaaagaaagggctgtcaagaatgcagcagatttttagctttggcagctgaggggatggtgacaccattccttgagaggatcagctaaga

SEQ ID NO: 181976 - DNA, 728 bp, Homo sapiens
ccgggaggatgcgcccccggcgtgggaagccgaggaaccggcgcgcggcgcgcggcgcgtggcgcgtggcgagtcggggagagactggtcttgctcgctcaggagaccctcatcgcccacagagcgcccgcggcgacccggtcacggcccttccatttcctgaccctgcttaatgacagcgaggtgaaaacatctaccaaacgaagggtaaaaggctggagtccgccaaaagccaatttaaggcttaacattgcagaccgtttgtctttacaaaagcttcaaagacggggctgcagctcccggttatccccactttgtcaagccatgaatctgaatgttcgtggggttgtgtgcatcgaatcagcaagagcaaggcaagaattcaagaaatagttcttttttatccccccttccaagtcacaggttcagaggatcatcatctttctcccacattagcaaaacatatttgcatttttcagtgaagttctttaccgcacgagtgccctaaaatagcaaacagttccctgttcaaaagcaatagtaaagaaattcgccgaagagtttaattgcctggggacagctgcagtagtcgcatcatcgtctcttattaaactgttgcagaaatattcggtctagtccatgtattttcaactaaatagcactgcttacgcagttggtgatatggtgatatcacggaagtagcaataaaccttggttatctttttttt

SEQ ID NO: 181977 - DNA, 542 bp, Homo sapiens
  misc_feature (520)..(520): n is a, c, g, or t
gctggtggacaggggagtgcatggatcagatacgccctggtcctgtgggaaagacagccctgctctctccaggtctggcagtcaacaaaggttagagcctcttagaggaatatggagagccttgggggataggtgcctatggttgtgttttgttgcagctgttcccatgcaaaaccccatgggctctgtgtagcctcgagctctgtctctgccagctctccaagcagttttccctgccaactcaaacgtccatggtggctgtgggatctcttgcagctagaatcccagatgtccacagtgacagtggcctgctctgcagttacttctttcaccccttccttaggagccattcagagcccatgcagggttctcagtttcctccctcttcagcctcagtgactgcatcatctctccactgactctcagtgctttctcttaaaaggtctgttcaaagtatgctggtttactcaatattttggtttctcttggtaggaaagagaagccaaaatattgagtaaancagcatcaccctacccagggat

SEQ ID NO: 181978 - DNA, 397 bp, Homo sapiens
tgtggtgaagctcagtcttgctaaaattaatatttctggtgcggtcacagctgtttccacttgttataagttgctgtatctaatgcacacacacgtatgtgcgctgggggctcagtcctaaagtcaaatatgcacacgcagagaagacagctgttgctttgttttagagaatacttttttcttcccgcagctcaagctgacacttttggaattgctagtggagatgctgttgttagatactggctagaacttgtcaaggtcgaccatgaggctctcttcatgtgctgacctgtgcctatctttccaacttcatctctgcaacattctcccttcagtgttcactgtagcaaacaccttgcagttcccagaaagtgcgctgtgtcctgctttcctctta

SEQ ID NO: 181979 - DNA, 588 bp, Homo sapiens
aagtaaattaatgtctgcaatttacactttaaaatacataaaaaataagatagcttgatggatgaacagagattgttagatggacagaaatgtgataaaacaaatttagcaaaatgctaactatagaatgtaggtcttgggtgtatgggtgttcaccgtgatattcaacttttgtgtatatttgagtattttcaaaataatacgttgatataaatagagagggaagaagaggatgagactagtgttaacaaattggctatatccttttctcttaaaatgtaaagtcaacagatattatctagtcaataaatcaggagactactgtgcttcattacaagccgaggttgatttttaaaaccctgtacagattgaaaccacagtagtagctattgggtactatgtttattacctgggtgacaaaacaatctgtacaccaaacccccatgacataaaaatcaaaacacacagcaccacacacacaccacggtttttttccccctcggacaccaccgtccgccacggcttcccagctccaacacgcgggtccaattctccagggccctttttcggaccaacttacccctacat

SEQ ID NO: 181980 - DNA, 241 bp, Homo sapiens
gggcgaaagggaaagacggggatggtccatttcagcagaagcaaaggtttccagtccattaattttaacgtaatgcaaatcggtttatggaagtgctgacatgccgttatttaaaaagcatgagtagcatgataattaaatctccatctatattttattctagcacatttatagtgtatccttgcccagctggggagatagatttccagccttataataattatataaactgcaaattact

SEQ ID NO: 181981 - DNA, 181 bp, Homo sapiens
gtacatggtaggagcagcagcgagacaagagcttaagccctgcttaaaaggccaagaaggctggcagctagcgttctggctcttccattttactgtctgggggaatgtggggaaattacttcacgtttctgaaagtaaaagttgtagtgtaaagctttaagtacaggatgttcatgatata

SEQ ID NO: 181982 - DNA, 240 bp, Homo sapiens
cgtgagtgggccccatagagtgtagctgctgctgttgcggctgtttccctctctgtgttctcctaatcacactgggtggttgtcattttttatttcactgggaaaaaaaaatttaagtcagctgtactttgggaaaagagatgttaaaaaatgttttccaatacattaaaaatattagcactgttgattcttttagaatcatgctgtctaactcttactttgaaactatactctgttaca

SEQ ID NO: 181983 - DNA, 325 bp, Homo sapiens
gctaagttagagtttattagtgttaatgtttgagaaatagataaatgggttggaagatataatttgtggtaaaatgaaataagtatgtaatatataccacaaccagtaagtaactggccaaagacagcaaagaaaaataacaattatatacattagtgtattataataaaattgtcagttaactacattggaaaaaaagtctgtaagcctcaattaaagaagatcagtgacagaacttcataatcggttgccaaaaaagcaatacttaaaatgataagatataaagacactaaaaggttaaggtttttcatgcacatgtaagtaa

SEQ ID NO: 181984 - DNA, 333 bp, Homo sapiens
atcactaagtcttttcccatcaaacattgctgtccatttttgttgctttctatcatgttatgcatataggaactgctcaatagtggtattatgcctgtaggaactgctcaacaagtgtaagtgtcagattaagggtaatgacagtggctgtgctgcagacacatgcatttaaagataaaggtggttgaagaattgcatgtggtttctgcaaagagcaaagcgataattattgtgtgtgttttttcctatcttgcagatctttgggcagactgacaatattctgttgatgccaagaaactattttagggggaatctctttcagggaaatcttag

SEQ ID NO: 181985 - DNA, 447 bp, Homo sapiens
taactacaatgtaaaactcgaagcactcttcctaactcagatttcatttcaaccccaggggatttttctaatgagaatttttatttctaactagctgcttattcaggagaatcattatccatttataaattaatttcttcttgtacacactgcaagctacttaagagtttccatgtgaaagaaagactaaatttcgatcagctcctgaaattgcatttatttgtccttgaaactttcaatttgggtcttgtattttaaacttttgtgcccatggtattttaaaatgtatgacagctttctcgcaattggctgtcagttgacccctcactgatcctgttacagttgctctgaaggggtttttaacctgtctttgagctgctgccagaatcctgcaaagaaaattcacataaatcccactgcctatattttatcacagcatcccagatc

SEQ ID NO: 181986 - DNA, 519 bp, Homo sapiens
tggcttctagtgcaggagcttagagaaagaaattgctttcggcttttaaccataaagtaccaggaaaggatcccttgaaagggaccttggggactacaccttcaagttttgttttgtgtttttgagacagtcttgctcttgtcacccaggctggagtgcaatggcatgatctcggctcactgcaacctccacctcccaggttcaagcaattctcgtgcctcagcctcctgagtagctgggactacaggggcccaccaccacgcccagctaatttttgtatttttagtagagatggggcttcaccatgttggccaggctggtctccaactcctgatttcaggtgatctgcccacctcaacctcccaaagtgctgggattacacgcgtgagccaccacaccctgccacatgcatttgttttctgctactctgtagtgaattagtgtaactcagctactgaaaacacctgttcattagcttacggttctgtagggcagaattctgagcatggcatgactggg

SEQ ID NO: 181987 - DNA, 275 bp, Homo sapiens
gtggaataagatagggctggagaggtgtatcgggccagaccatcgacatcttgtcagctgtgctaaggagtttgaacatttcttctacaggcaatgaggcaacaactagaagagtttgatggagaagtgatgaggtcatattttgtttcataatggcaacatgagcaatagtttaggggatgaattagaagggtaagagactggagatagggagactaatcacagaagagatgaaaaggacctgaagtaatgtagtgtggatagggaagagtgag

SEQ ID NO: 181988 - DNA, 328 bp, Homo sapiens
tgaggctaaagatgagcaaagatgagagtgaaagagtgatgatggaggtagggagagggattcctgaaggaccagtgaagtcccccaaggaaactgacattcctgtggctggagggtagggatttggggaggctggtgcaggataaaactgggaaggtgagcagaggccagctcttaccaggccctgtggccaaattagtttggactttgtcttaaaggcaatgggcagtcaccagcaggttttaatcaagaactattttgatccaaatttgccttttaggagaattcctctggcttcagtgaacaggccgaagtgagcaagcctaat

SEQ ID NO: 181989 - DNA, 267 bp, Homo sapiens
ataaatcttcagctttgatttttctcgccgttcagctctgcttggactcagggtgatggtcccaaccgtgagaagccagctagagcagccaccttggatcccagcagaacgggccgctgtgtgtctttagttgccaaagcgactcggcaggaaaacaggccttttggtggcgacagcagtgtgtccttgggcgcctgctgtcagcctggaacaccattctggggccatctgctgcaggcttgttggaaacagatcctcttggcagct

SEQ ID NO: 181990 - DNA, 339 bp, Homo sapiens
tcccagtagtgatgaggaacatgtcctaggaaaggcagagtggtagaatcagaaagccaagtgtcagcatattctgcccatccctatatccccaaactatgaataatgagtaaaggcccccagtgaggatgcaatgagacactatctaacacctgagtatcaactatgtgctagacatttagttagcaacagatctgaagaaatgacaaatctacatgacccagaaaaatcaaactgagtagagaaggagaaaaaaatgcagaaaacaatgaaaaagtattttacagcagaactacaggcgtccatcatgtgggctatccagaaccagcaggacagcag

SEQ ID NO: 181991 - DNA, 282 bp, Homo sapiens
cactgctaggaaaaaaaattgctttgcttggaaatcaattcattgtaagctttaatctgcctagttcggtttctcagaatgaatatttcaaatattaaatattttcttgagtagaatgtatagtacatattttatactaatatctatgtgtgtgttagacaattaagaagactggagtgttttccaaaaacttgaaaagttttcggtgactcgtaatacagaagtgacatttttatttgagaacaatttaccagattatgtcaagttcattattggtatgat

SEQ ID NO: 181992 - DNA, 423 bp, Homo sapiens
taacaacttaggttccagattgagtaatcaatcatgtatccctttagcatgttccctaagtgtttaaatcagaggtgagtgagattaagaggatgaaggaggtaaactagaacgagtaactttttagtccttgcattgattagagttgttatgagtgcactgtgtgatttaagttactaatctatcaaagtgttccttcataacaaaaaaaaaaagaaaaaaaaaatttactaacctagtgaaggaaatggaaaggccacaattccatttacaacatagattttcttttaagaagtgcaacattctaatttcagaaaaaaacaaaaaactaaatagtttatgctgtacagcataaactatggaagtccagaaggtttccatagttaatgctgtaatagtttatgctgtaatagtttatgctgt

SEQ ID NO: 181993 - DNA, 471 bp, Homo sapiens
aaatgtctattacgagcctttgcctattttttaattgggctgttttttgcaaatatttactcctgttttgtgggttatctttttactttctttacggtgtgctttaaagcacaaacattttgaattctgatgaggtccaatttatatattttttctttggctccttctgtttttggtgttacatctcagaaaccattgcctaaactcaaggtaacaaagagttacttctagctttgctttaaagaactttatagctttagctttcacatttaagcctatggtctgttttaagttaatttttgcatatgatatgagtcaggggtccaagttcattttttttaatgttgtcccagcaccatttgataaaaacactactctatccccaatgaatggtttgataaaagtatcaaaccattacttttgtcaaaatgaacgtaaatgtaagcgttggcattttttaaatttcacttt

SEQ ID NO: 181994 - DNA, 163 bp, Homo sapiens
taaagctcccccactcctctctctgcagcatttgacgttgctgaacactccctgactctgcaaagtcctattctagtttgctgaaaatgcaagatccgaattctccttctccctgaccactgtttcttagcctttgccagttcttctgtctcttacagatctt

SEQ ID NO: 181995 - DNA, 106 bp, Homo sapiens
gttttcccctcctctccgttgttttcacagcagccatcacagagccttctctacctcccagtgctgagcccacctggaggcacccgagagcctcctcccaccaacg

SEQ ID NO: 181996 - DNA, 180 bp, Homo sapiens
tcacttgtcttgtacttcttttcccatttaatctttctccaccatttccacctgaacgtaaccttgaagatttatttttagttgtcatttcttaatattatattcacctctccaaacacaaaaatactttctgttatctttagcttaagaagaataatagcagtcactgaacctgaacac

SEQ ID NO: 181997 - DNA, 576 bp, Homo sapiens
ttttgggttttctttaaatgtatgcatccaatgtctttttcatttcattaaggtcaaataaatatttgtcctgggtttccaataaggtatttgagattttcctgtgccataatgactgtatttggtacaggcaaggcaatatactaaggtctctctacagatcttgaaaatcagatcagccttggaggatgaaattagtaacaactaatacaccctggaggacaccagcccttgggaaggcattcatgggaagagactagaaaagcagttgaggttgggagtttctcatttcaggcaaagtgacaagggagtggtatcagaaaatacgatcttaactaagaaagctagaacctatatcactctagaagactgttcacaaacggtagcagggcccatgtgcagcttggaaagaggaagcttaatgtgcaaaaatttaatatccctgcaactctctggaaattggcaagatggtccctcagaagagcagatctgtgtggtgagtgagatatcacagctccatgaggtgaacaccaaaccttccaatcatcagttgtctcccatgtacttatggagaat

SEQ ID NO: 181998 - DNA, 286 bp, Homo sapiens
ttgatttcttcaaggtagatttttagatggcaaagaattgtactgtatgcatactgtatatttttttttaggtctcactatgttgtccaggctagtcttaaacttggggactcaagcagacctctgtcttggcctcccaggaagccaggattacaggcgtgagccaccgtgcccagcccacaaatatatctttaaaacatgttagtgcaagtgcatattgcatttttaaaaagagaacaagatcacaataccatgtagatcaattaagaatatatagtacaccaca

SEQ ID NO: 181999 - DNA, 404 bp, Homo sapiens
gccacttgcacacacacaggcacagagctacttgcttgtagccttgactgccagcagccctgaacaccgtagctggtggtgccaggccttgtgtgtgtttaggacttgccagttcagtcctgggagctgaactctggacatcctgctgtgtgtctctttatcccatcgctggtgtaatttatgccactacttcctgtttgcatttgctcagtctctcctttggtttgcttctctctgctgaagccggtccccatagctgtgcacatggctagctatggggactaggcatctagatattctagacatctgcagttgtttcttagtgggaatggttgctttatgtctctctacagaattttagttgaacttgagtgtatgatttaatttacttgcttgttccgctg

SEQ ID NO: 182000 - DNA, 237 bp, Homo sapiens
tggctaattggaatatgatttcttttaattacaacattccatttgctagtattttattgagaaattttgtatctgaaatcatgagtattccatctggccaaatatgtggctggaatttcatcaaaagtggcagaggggttcccagaagggactgtttcaaataatagtttatgctgtaatagtttatgctgtactagtttatgctgtactagtttatgctgtaatagtttatgctgt

SEQ ID NO: 182001 - DNA, 272 bp, Homo sapiens
tgttaatttacgttttaaaaaaaatcaattccagaatttaattcccaattactttagtaacttgaattaatttagtaacttcagtaatctggatttgtactgtattgttccccttatatcattgcagtacacacataaaagcagataacatggtgaaatactgcactgaaaataatcctttaactctggatatataataaaattttgttaatgtgcaatacatttttttttcacatgaaacatccatcagaagtttttaaatgttcatgagg

SEQ ID NO: 182002 - DNA, 559 bp, Homo sapiens
gctggacacagatgcaaacccacacaacgctggcaggtccaagcactcagtggccactcaaggggcagggttgtctctctgtaacaaaatctccttgaaaaacaaaggtctacactgcttcctggccaggggctttcagtgtccgggatttgggggtgattctagactccttttgaaaacagaatacaagtttgtggaaattgtcacacccgtggctctgggcagctagagtgagaattcctgaatttgtccaggaattaatcctaagcacctgccgggttagaacagagttgcgtcctctctctccattcacaagtgcttcatccccgagtctggtgacaggacaggggtgcagtggacaggggggtgcccaggtgtgggggcacaggcaaggcttgaaatgcccctagccactggcccaggcccctcgaagcccagccaccttctggttctggtactggttctctcctgtcttagacttggcttccccttgtccccatcatctcttctccctcctcctctcgctctcggcctctctctgtctctgcgtctgtctcta

SEQ ID NO: 182003 - DNA, 451 bp, Homo sapiens
gttgatctgtgaccttacccccaaccctgtgctctctgaaacatgtgctgtgtccactcagggttaaatggattaagggcggtgcaagatgtgctttgttaaacagatgcttgaaggcagcatgctcgttaagagtcatcaccactccctaatctcaagtacccagggacacaaacactgcggaaggccgcagggtcctctgcctaggaaaaccagagacctttgtttacttgtttatctgctgaccttccctccactattgtcctatgaccctgccaaatccccctctgcgagaaacacccaagaatgaacaattaaaaaaaaaaaaagaaaaaagaaaaaaaaaaccacttgttgaaatattgagttagatatggaagggggcagtatggcataatgacttaaggtccagtttctgtatacaagtcttagctccatcacttcttagcta

SEQ ID NO: 182004 - DNA, 152 bp, Homo sapiens
tgatagtcatgttttctggtagattatccagaattttttaaaaattattcttagataagttacataagaacaacaactctttatgaaaatctagcatgcgttttaggatcctgttggccacatgacatacacagttttcttgcttctcaggg

SEQ ID NO: 182005 - DNA, 289 bp, Homo sapiens
ggggtggggttatctactttatttataggaaacttcatgaaatattattcaatacagtttttttcatctgaagtgacaggaatagaacaatataattttaacatgtttattattctattatagtaccttaatttacttaatttctcccttactgttcattcattcaacagtactttagtgcctaccatgtgccaggcactgttttatgaagtaggggtaccacagtggaaagacaaagtctgatcttaatagaacttatattcaagtgtgtgagagctttgggatatta

SEQ ID NO: 182006 - DNA, 296 bp, Homo sapiens
caagacgaagagttctgtggatgaatggtgttaacagttgccaacaatgtgaatgtacttaatgccactaactatacacttaaatatggttaaaatgttaacttgagttatgtgtatttcaccacaatttaaaataacaattttaaaaacaacattaacataatttcatgttgtaattttcccttgggggatgggcatgttttttccacttctctgtatactccctcttttaaaaaataaacctggccaggtctggtggctcactcctgtaatcccagcactttgggaggccaagg

SEQ ID NO: 182007 - DNA, 563 bp, Homo sapiens
atgtctgaggcagctaggggatgctgagggggctggctcagctctggcctctcccctcctggcctgccctctgtcccacagtgaagatccatcctgcttctctttcacttcctccctcataacgattgtctggcatctatcttcaggtacaggaagggaggttgggtgcaggggacaagacccttcgggtcccttctatgacttgagaagatgagatttgggcagcagcctgcacttgtctcaatttgtccattaaggaaaacctgtcggcgaaagcccttgaaaactcagagatgagtgagtaaatatcctctgaatgtgaagttagaggcatttaccgtatttaagtgtgcttataaaggagcactgtctgaggtctgtgtcaggagtggtgggttggagcctctgtctctgggcacctctgccgtgcacatttgtgcagtgtgcacagatgtaggtgtgagctgttggctcccttcctgaaggacctctgtgggggtcctcactgagtcctcagaatcagtgggctcaggacttgccccatggggcagggggcgggtaag

SEQ ID NO: 182008 - DNA, 367 bp, Homo sapiens
tgattaagcatgagaggatacttcctgctctcagataaattatttattatattctgtattatccttgtaatttttctggatatgaataaataacaatgtatctcagaaaaacacattttgaaaagccttataaagttaaaactttaaatgcttttcatcaaaatgttatgaccaataaaaatgccattcatgtatctcatcacactttctatacattttgtagtgatatgtatttatacatactgcagttggaaatagggaatgcttttttggtttcccacggtaggctgcaggttttaaaagcagaagtcctgaacctctgaaggcaacataagaaaagtattcatttgaaacctgtagtgttaaa

SEQ ID NO: 182009 - DNA, 308 bp, Homo sapiens
cctttccatccacataataggcttactctgctgtaaacctaccatcttaaatcatttcttttaacatttcacagtgtaggtctgccatatcatagcagccttattgctcatattttgagaatggtcagaaccttcaaattacctattgccacaaactccaaatcacaatcactgggcttttccctttacagcaatgtatctcagagtgtattccatggaaccatggcatttctgggcagcttctagagaggttcacaggcaggacggccattttggggagagagaagcatagggggaagggagaaagg

SEQ ID NO: 182010 - DNA, 525 bp, Homo sapiens
actctgacttggaaagctcaatgaaccaactgggctatttcaacatcttctatattttgtttataactctgcctcattccagggtggatttgaggtggtttggtttgattcgtgaacatttcccatgccaattagaagacattatgttagggggggtccccaattcagcctcatctccctcatcaactaggaaatgttatagtaatacccaaatatactttcatctatgttttgtaatagaccccactcatagaaatggtagggataatatcttttcctttttagcattacaggagaaattgtgactttgaaatgaaccaagaaggttacagttgtcttcaaaggaaaaagagtcagtctagcatgccattccagatgtgactctatggtgtatcctgtgcctttcttgactttaagctattttacaactctgtaagttgtgcataactgatagcaatgcaaataatagtaacatttgtctataaacatgcaaataaattttatcctgtgaaagtaaagttgacc

SEQ ID NO: 182011 - DNA, 286 bp, Homo sapiens
aggatggatgcagttgttaaaggaacagcagatacatatgtatagacatgtaagatagctttcatacttttttttttgagatggaatttcgttcttgtcacccaggctgaggcaggaggatagcttaaacccaggagacgaaggttgcagtgagccaagattacaccattgcactccagcctgagcaacaaaagcgaaactccatctcaaaaaaacaaaaactaaaactaaacaaaacaaaaaaaccatgtgtaaaactgttaatcacaacactgatttcaatagc

SEQ ID NO: 182012 - DNA, 499 bp, Homo sapiens
tgtgagttatttgaagccaaggtcccagctgcagcctttggttggggggaaccacagacagatctagtctggaattttggctctgctgggtgcctctgggccattgtcttcctctctgagctttggtttcctcatctgtaaaatccctacttaaaagaaggtcaaggtgatgtagtggagtcatgtctctggcgcatagtaggtgcccagaaggtgtctgtttctatgttcgcgtcacccgaaccctgtaaactcaagagggtaatgacaacaattgcataatagctgttgctgataagaaacaacctgaaaactcattggtttaaaccaataaaggtttatgaatcctgataagtctgtgggacagttcgtggattcttctggatgtggatggaagggatcagtcatggtacatgagcagcctggggtcaggtaggcagccttgctggtgttggctgagttctctcacatgtttgggttttggctggcttcagaccga

SEQ ID NO: 182013 - DNA, 281 bp, Homo sapiens
caggcactatcaaaagatgaagaccacccctcccccagatcacttcacatgcacaggtggcttgagtctaaatcccaggtaaacacaagttatggcagcaggattcatgcccacacttcttcaaatccctcagagtgttggggacactcagggctcaatacaggccttgaatcactcacctatttaccctaaaacaggtaacttctgggagaggcaacaactcagtgcttcccttcaggagaaacattctgcctggaattttcatggttaggtctacctgg

SEQ ID NO: 182014 - DNA, 426 bp, Homo sapiens
gtaacaaacctgtgcatcctgcacatgtactcctgaacttaaaagttaaaggaaaaaaaagagaaagagatggcataaatgaaaaaaccatgcactttggagtcatgcaagttgcatctgtcccctatctttgccttttactccctggtaacttttctttgaccattttgaacttcaactttcctgtagatagaatgaggaatcataaaatatggcatgatcatttaataattaaatgaggatcatttatatataatacttgggatggcaccaaacacaaattatggacttagtaaagaatatacattatcattactattctgtttacaaattgtcattgtgaaatttccagaaacatttaatgactaagcttaatgatgtaagtcatgaaagcataaaaaataaattatttggatttaaataaca

SEQ ID NO: 182015 - DNA, 387 bp, Homo sapiens
taatgtaagtatttcaacatatgtatgtcaaaatgaaaagtaacgcaaggtatgtcaaaatgatgagatcaaagaaaaggatataaataatgtaagtgtttcagatgttactttttcataaatacctctagaagaatctgtcaacgagtatttgataaataccacttctgtgctagttagttgtacataaaaaaattaaaattcctatttttcagtgcattcctcaagaaatgaaaggcaaagcctttaaaattctctaggcaaaggctccatttgtcttctaaaagctggttcaagaggtattcctctagcaaaagacatcaagcattattgtacctggaggctaaacaacccagtagtctataagatgttttaagtaagactaaa

SEQ ID NO: 182016 - DNA, 553 bp, Homo sapiens
ctattatgataggtaggaacaagtgtaacctccctagctaacttcttacccatgccaaagtagaataccaagattaaatttgatctccagggaaattacagagattagtgccaccattaaagatatgaaagatacaagtcttttccttttaactcctcttggcttgtgcaatagccaaattagttttggagaatgtggattattaaaaatttaatcaaatgttgatgctagtcatagttgtggttccacatatgggggatctttactagagcaaatcagaacagctcttggcacctagaaggtagctattgacttgaaaactagaaagtagctttcttttcaattcccgtcagcaaaaataatcagaagcagtttgctttcacatgattgcaacagcactgtcattgtactacctcagggatatttaaagacttctgttctatgatagagtatcattccagagggacctttgtttccttgatatccagtagaatatcatggtagtcttttatcttgataacattatgcaaattgcaccttgtgagcaggaagt

SEQ ID NO: 182017 - DNA, 251 bp, Homo sapiens
taaattgtaattattattttttatagagacagcgtctccctatgtttcccaggctggtctcaaactgctgggctcaaggaatcctacctcctcagcctcccagagggctgggattacaggcatgagccacccaccatacctggcccaccaattgttaatattttgccacatttgtgttctctctttcatatacaggcacagacacatatatacatatttttttttctgaactatttgaaagttagttgcaa

SEQ ID NO: 182018 - DNA, 142 bp, Homo sapiens
agggatgtccatgtgactggaacctgcttagttgaatggagatagtcaggaagttcttttaaagggtcagcacatggagggggcttataggccatggagaaggctttggattttattcaaagtgtaatgagaaggtgttgga

SEQ ID NO: 182019 - DNA, 214 bp, Homo sapiens
tgcaagttacatgttgttcatttcttggcattctagaaagtctttttccatttcaagattccatgatcccttaaagataattttttcttaaagaaaaagtaggatgcataattatttctaagactagaaatagggccgggcgcggtggctcatgcctgtaatcccagcactttgggaggccgaggcaggcggatcacgaggtcaggagatcgag

SEQ ID NO: 182020 - DNA, 436 bp, Homo sapiens
ccagcacctgttgtttcctgactttctaatgattgccggaatggctgggttttatggtatgtatggtatatgtttaactttgtaagaaactgccagactgttctctaaagtgattgtaccattttacatcccccagcagtgtatgagagtttcagttgcttcacatccttactaacgcttggtatgattagtctttttaaatttagccattccaatggctatgtaatagtatcttattgtgatttcaatttgcattcccctaatgattgctgatgttgaatttttttcatgtgtttattgaccatttgtatatattttttgggacatgttcaaatcttttgtacagtttttagttgaattggatacctttttattaaattgcaataattctgtatataacctatacaaatacatttaataaatacatatatttaac

SEQ ID NO: 182021 - DNA, 308 bp, Homo sapiens
cgcccacctcagcctcccaaagtgccaggattacaggagtgagccactgcacctggccagaagccatattctataataaatagtggttggattaataggacatgggagagactgcagtagagtggatgagtcccctctaaaggagcactcacaaatgccctggtagctatggctgtgtggggtggggtattacaggaattccaaagacctaaggagctgtgtacctcctgtagccaaggtcaatgtcagaacaactaaatcaatgattttatgaattcctgtagcctccctggactataaatttcaaa

SEQ ID NO: 182022 - DNA, 262 bp, Homo sapiens
ccttttcaattgagcccagaaagagcttcagaatcattttcagcataatactctagatagccatagccagccagccatgattagcacgtgagatgaaacttctttaggcccaactttgttgtttaattatttcatgtgtgtgtcttaattgctttgccatgtgggaccttcctaaacagcaaaaacaatgtcttcgaattctttcacgtaactgttagctgcaagtatagttctttgccctaataagtgctcaataattgtt

SEQ ID NO: 182023 - DNA, 197 bp, Homo sapiens
ggaccaacctcccgtctttagagcaatctaagcatttgttctctacaattagattaaatgggattaaacacaggcactgcttcacatatgaaattgctgtgcaaatacacacggctgaaaaatacgagaggtcaatggacagcattagcatgtccacttcatgaaaaaatgacacacttctccgtgttggtttagtg

SEQ ID NO: 182024 - DNA, 488 bp, Homo sapiens
cacatgcaagctggggatttctaagaccagatttggtcattctctaggagaactcacaggattctgtatatagtcatactcatggctatgatttattttatagtgaaagaatacaaagcaaaaccagcaaagagaaaagtgcatggggtgaaggccataggaaaccagatgttaacttccaagggtcttctcctagagtagatgtgcttaaccccttccaggaccaaattgtgacaacatatatgaaatgttgtctaccagggaagctagttagagcctcagtgcccagggttttaatggggggggctggttatatctaggagtccactgcctaacacataccaaaattccaaactcccagaaggaaattaggtgttcagctgtggttcagccttaaaccatatctatcacaaataagtttaggcagagtgagtgagccactcttacaagttaaggcagtgggaccccttccaaaacccaagttcgca

SEQ ID NO: 182025 - DNA, 373 bp, Homo sapiens
atacaaaggctccttataaaggagaagtaactatctgggatggaaaagaaaatgatgccgattcaaagctgactttagctttttaacttctgaaatgcctagagggtggagactggactcctaatggattgtcttccctagaactgctgtgagctctgggaagcagtcactgtcacccccacctcaaggagacttcctttctcttcccttcctttggatggcactgccactctcccaacagcaggatggaatccttagggagtcatcttccaatttttccttctgattgcctcttctgttggttctttccttggaatcactctcacgtgaggtttgtcctttcagctcctttccttgagaaaaaaagtacatc

SEQ ID NO: 182026 - DNA, 216 bp, Homo sapiens
tataacaaggggctaagaaaaaaataggaatatgccatctgtgtgccagctggaaaaacaggttccagttgcagggactttatagattgggaaagtctacaactagggaagctggaaaagaagatagctgcagtagtttaagtcaggtatggatattggtgagggtttatttgcaaaaaactaaatccattcttagtaaaggcagaagaggattta

SEQ ID NO: 182027 - DNA, 263 bp, Homo sapiens
aaacccaccagacatcattctcccaagacagatgcaatttactgacagggataattctgaccataagtaatgttgttaagtgatacatgtcttactaggttgccagaggaacagagctagaaatttaactgaggttaagctgtcaaggggaaggaataaagttttgtttacctttctcccacaataatcaatctaaaagaaatacagaaaaaaagaaaataaatacagaagagtcaaatagaagcattaacaagatgcctgat

SEQ ID NO: 182028 - DNA, 439 bp, Homo sapiens
ggagccattgtggctccggccggttgcgcgggccctcggaccctcagagaggcgagggttcgagggcacgagttcgaggccaacctggtccacatgggttgaaaaaaaaaaaaaaaaaaacaaaaaaaaaatttggggcggcctttgggccttaggaaagagcttttcaagaccccttcggtgtggggggcgcgcgcggcgcacgattggggttagagttaacacgtgtggcccagaagcgggttgccaaaggaaaaactcgtggcaaagaaacaaggctgcgggggattccctcacccaaacttaaaaaggcgcgcggggggaaaccgagagtgttcgtgaaacaaactccagaggggggtccggagaggacacaccgggagctctacccacgagggagcaccaggggaagcggaaattaaattaggcccgggctgga

SEQ ID NO: 182029 - DNA, 247 bp, Homo sapiens
tatatttgatcaaatctgtcacattctgtatcaaaaaaccttatccattgatttaaaaatattctgcagtattacacatcaactttcaggatacacagtggcttttcccaactcccaatgttcattttttaaattaaaatgtagcaactttacagtatgtaaagtttttaatttaaaaacttacatttttaaaattaaaatgtagcagctttacagccatgaatgattcactggagaaaaaacactg

SEQ ID NO: 182030 - DNA, 690 bp, Homo sapiens
catcatccagtcacatgggccaggatgtctcaatatattgatatatcccaacactgcatctacagcctgaccgtctccccttgtatctgtcaagtatgcttaggctatgctgcagtaataaataaaccctaaaatcccagtgcctaactctccatgtcatagtctgatatatagaactacatcgtccggacatggtctctcctggtttgccgccgtgtctgggaaaaagactggaggattgtatgggatgttttaaaggcttagaactagaggtggtttcgacccacatcccattatccagaacctattgccatggctcaaatctaactgcaaggtggtgtataaaatgtaatcagatacagttcctgaaccccagactgacacctccactgagatgctaaatacatatatcacttttgcacttagatgtcaatagatatatcaaacgtaacctgtccaaaactgaactcctgatcttcccctcaaaacctgctccaccagtagccttccccattttaagtggtagcaactccatccttgctcatctggccaaaactttggaatctccctgactcctctctctctcatacaccctacatcaaatccattaacaaagcctattgggtctatctatttgtcaatgcctgctattacagacccaagtcatcaccactgacccggattattaca

SEQ ID NO: 182031 - DNA, 197 bp, Homo sapiens
actagaggatctgagaatgctttgtcggggaagaagatactcaaataagaagggaggaagaggtcaggagcgatgcctcatgtctgtaatcccatcaatttaggaggccaacgtgggaagactacttgaggccagaagtttgagaccagcctgggcaatatcacaaggccccatctctacaaaaactcaaaaattag

SEQ ID NO: 182032 - DNA, 235 bp, Homo sapiens
aatttttaaattttctgtagagatggtgtcttgctctaattggtactacaccagaaatggactggccttttctatctgcagtacctccgccagcaccatcattcaagggcttgtaaaatgcatctgacttgtggggaagggatctcctatgtcatctcttcagaccaaggggtcatttagggcaaagaagatgcagcatggccaggtgcggtggcacatgcctataatcccaacg

SEQ ID NO: 182033 - DNA, 680 bp, Homo sapiens
cctcaggtgatctgcctacctcagcctccgaaagtgctgggattacaggcatgagccaccgtgcctggcctagcctcttgatttttctatgccagctgtcaacctgggtgatcctcccaccacagtaatttcttatcctcagtaattctttatccctagtagttatggaagtttggttggttgattggttggttttatattatttctctttgaatgaagcagttctgaataccttcatcctgccatcttagcagaattactgcaatgaaataaaaaagattttgagtatagaaccaaagtcaatacacgataaggaaggatcttgattttattttacatccttgtctcgaaggtgcttttctacttgttaaattatctatcttattaggacattctttgtacgtttgatgtctctgcttcccattctgttttccttctaggaatctatatccttgtggagacttttctcatctaccaacatttttatgtcccctcaagtactgaagcctttgcagctatcattggacagctcaagttgtttatagattttacccgaaggccaatctaaaggaaagtatcttagaagaaagatgccttttccttttggtggttattttctctttaaataaaaatcttatacagccttataatattgtaataaaactataacccagcacttg

SEQ ID NO: 182034 - DNA, 734 bp, Homo sapiens
acatagtgtactgtatgctgactcttagtgccctgagttatttaggtaagtatgtaagttaatgtagaaaggaaatgtcaaagttcttctgattgtgtaatggtcctgggcaatactgcatataggaaagtccactggaaatttaaggaatagtgattccatgactgcagactttcatgactgttgtctccttaaataatgcaggaactttaagtgagcagttgaaagtgaaccttaagatggaactgtttatttctcagagctgattttccaaaagtagttatacgttgatttatgtaattttccatactttgttagcatattgaacagcactgaaattttggaatttttttcacatttatttgcatagatcctttttaaatttcagtgtacagcttcattttatttttttctctaacctggtcattatatttctgaatgttgtatcttgtcagggatctgattttttttgttcctgatggattaccacttattgaactaataatgtgtgatagtgggaaactgactgactgttctgtactctagaatttgttgcctttaacatttgggaagaatggatttcttggtaattggcatggaattactttgttattattaggtataaacttatatttcattctttttaatctagaatacttattaatactgataaagcatctatagtaatatagatccatactctcttatcttaaattctgaaatatgaaagttct

SEQ ID NO: 182035 - DNA, 637 bp, Homo sapiens
gtgtaagtccttgtgcacattttcttaaggacatacttacatgtcgggccattgtagagcaacaaagggcagggtgtgtgtgcatctcactgtatgtctatatcaccaagagcagctgtctccaaccttgttcggcaccacagactggggttggtgggatggtttcatgatgattcaagtgcattacatttgtcgtgcactttatttctactattattacattgtaatagataatgagataattatacaactcactataatgtggaatcagtgggagccctgagcttgttttcctgcaactagctggtcccatctggtggtgatgggagtgacaaatcattaagcattagattcttacaaggagcgcgcaacctagatccctcacatacaagttcacagtagggtttgcccactcttatgagaatctcatgctgccctgatctgacaggagatggagctccggtggtaatttgagcaatggggagtggctgtaaacagatgaagctttgcctgctcacctaccactcacctccctctgtgctgcccatggacgcgtaccagtccatggccctggcgttgggcacccttgctatagagtcattcctccaacccttatttgcgggggatgctttccaag

SEQ ID NO: 182036 - DNA, 465 bp, Homo sapiens
tggccatgtgatctctgtactgtgactcccttttgctttctgccataagtggaagcttcctgaggcttttgtcagatgcccagtcttccagccaggaaaactgtgagtcaagtaaacctcttttcttcataaattatccagccttaggtattcctttatagcagctctaaagggactaagacaaggagacttagaatttcattttgggaagtttgtcaaaaagattcaaacacttgatcaaaaataggatcacatttttgatcaagtgtttgaatataatactcatttagccacaatgataattaaaatacttcaaaagaagttacatagctgtagaaaatcttaactcttataataaagaggagactcagttttcctaagtaattaatgacctaagaaagaaaacatgaagcacagaaattattttgacaaaatacagaatctttcttttctaggccacatacc

SEQ ID NO: 182037 - DNA, 184 bp, Homo sapiens
acctccagggtagccctgccctacaggagcagtcacagggctgtaacgctgcctcttcaataaagctgttttcttctatacctccagcttgcccttgaattctttcctgggcaaaggcaagaaccctcatgtgctattgagaggtgacagcgttctggcagccctggagctcactctcagtgtc

SEQ ID NO: 182038 - DNA, 230 bp, Homo sapiens
tctcgctctgtctcccagactggagtgcagtggcgcgatctcggctcactgcaacgtccgcctcccaggagaatcggttgaacctgggaggtggaggttgcggtgagccaagattgcgccactggatggcagcctgagcaacagagcaagactgtctcaaaaaaaataaagtgtgctctattgaactcctgaattttttaataaattattttgcccccacatatcatgaa

SEQ ID NO: 182039 - DNA, 407 bp, Homo sapiens
tgagacagacttttgttcttgttgcccagactggagtgcaatggtgccatctcggctcactgcaacgtctcgaactcctgacctcaggcgatccaccctcatccgcctcccaaagtgctgggattacagacatgagccaccacacctggccctgtttgatgatttttgttctataggagcggcacaaagagaagaggacagaacaaaagtaaccaaatctattctctctgaggaagatcatatgtagagagcagaggtctgtgtgtgtgaaagaaaacggggaagaggatgaaaatgtccagagtggtgagctctgctaggccctggaatgaagctgagatgctggaagcgctaagttctctctagtgggagaaaacccactgtggaaagctaatcatttgatgtag

SEQ ID NO: 182040 - DNA, 423 bp, Homo sapiens
agagctgctatctcttcagttacccccgagatcaagcgaatcgagcgtacttcctctggacctaacagtctcatggcacacccccagctctccacctgggccacactggacacggcagttacttctcgtttcatcctagctgtgctcctgcgcatgaaaacttcatctgctccctgcagcttccttgattttgccaggcctgacttttaacgcttactgtataagcaattaacaggatttgaaaagtcaatgggaaacagatcttcaagagcattctctgaataccagcaccccgtgaagcggttttaaaatgtgcagcatcgccctagagatactctgaccccagtcaattattagggggattatgagagtccaaacagcatttatcaaactgacagaaaaaaacaaaatcccaaactagta

SEQ ID NO: 182041 - DNA, 708 bp, Homo sapiens
tctaattttctgttcaatccatactgcacagatacaaggatgaaccaccattttggttcccaagttttattcaagaattcgtataaaatattccacataagtgaattttaatcctcgtcttcctcctcttgtttgttctggttaatttggaagtaacgtaattcataaccccttttgctgttagcagttacgcacgtccaatcacgtagattgttcttcttcaaatatttcttatttcaaataccttttgggaagaggcatctcggaagtcatggtgatcttgcccttgctccttttgatcacaacccctccaatgacattcctagcttttctgctcactttgatcctctcttgcaaaaactgctcaaaattggcagcatccatgatccgtcttctatggggtgggtgcaatcaagagtgaacttcagaacctgcttcttttttttttgcccccctttaccacaaggtttttcatggatgccatggtggcagtgaaggcagaaagggcattttttttttttcagcctgggtgatagattgagactctgtcaaaccaacaaagacatacctacattcatgcatgcatatatgatgaaaactcaggtgaaactcctataaaaactctgtttatggtttgctcttacataattaattatttgagaagtcacttgttaaatgtgtctctcttgctgggctgtaacctaatta

SEQ ID NO: 182042 - DNA, 133 bp, Homo sapiens
ataaagcacaaaatcatcaaattttacaagagagcatatgtaatttgttgttctggacaccaagacaaatcataattgatctttccagtcaagccctactattacatcaccaggtatctatcacaaataaaat

SEQ ID NO: 182043 - DNA, 148 bp, Homo sapiens
gtcacttaccacactgagttgaagtaatctttagatagatatctttcctactgagtataaaatccttgaggacaaggaagatctatattttcttcatcttcgcatccctggtgtttagcagaatcgggtgtatttttgatatctatgt

SEQ ID NO: 182044 - DNA, 218 bp, Homo sapiens
tcttgtatgtttggtagttgttggtgaatggttatcatttcttcttatctgttcctcagattttatacttgcctctccaactgtcctcttcagagtcatctccaattttgagagagaaaactgcttatgtgtttcccccatattattctatattatcagattttttagaaaatcccaggtattgtggttaacacttcatgtataaatttgttctcata

SEQ ID NO: 182045 - DNA, 634 bp, Homo sapiens
aaagctgactgacttaatggtacccacgaccaccaccattcagagagtcacagggacaaagagcatgatcacatgcttggccccatatttcaatggtcagctcctcatcttctgtcctcatcttgctccaccacctgccgggagttaccctggggtcgtccattagataatggctcagggttgccaaggctccgtcttctgttgtctgcagcagacaacagcacacacacgcacacacacgcggcacacacgcacacacacggcacacacacgcacacacacgacgcacacacgcacaccctggaccacagcctgggccaccacaggagtgacagccacagcaggaagtcctgcctgggtccacgttcctgcgtcatttaacgcctgttcgctgggcaccagctctgtgccaggcttgcactgggcacaaggacactgtggggagcagaggcagggccctggacagcgtggtccgtgggacagcacgtgggtggcagctctgcctggaacacaactcccctacccgtctacctgctgtggtccaagctaccgcccctcttgcctagtgaaagcccaggcctcgggccgcccactctgcttgtctcccctccatgtcccatccccgtagccccag

SEQ ID NO: 182046 - DNA, 126 bp, Homo sapiens
ccgagatcgtgccactgcactccaggctggggacgacagagcaagtctcaaacaaaacaaaaaaaaaaggactaagagcagagaagggagttacagtttgtgtgcgtgtgtgtgtatgtaatatag

SEQ ID NO: 182047 - DNA, 222 bp, Homo sapiens
  misc_feature (16)..(16): n is a, c, g, or t
gaactagaggttacgngcgcctagcaacttccgttgaggtatagagtcaagaagagtgtgagaacagtaatttcccaagactgccctctgtgttgactgtatttcagaaaacacactggtggggctacctctcaattcacatgtactgccctagcctctccccatccccggctgacgctcatccataactgcactgttccataacagcagtagaatgttgca

SEQ ID NO: 182048 - DNA, 394 bp, Homo sapiens
  misc_feature (229)..(229): n is a, c, g, or t
ctcagcctcccgagtagctgggattatggatgtctgccaccacgcccgtctaatttttgtgtttttagtaaagacaaggtttccccatgttggccaggctggtcttgaacccttgacttcgggtgatccacccgccttggcctccctaacctcaaaaagtgttgagattacaggcgtgcgccaccgtgtctggcctgaagtcagttttttttttttttttttttttttngagacagagtttcgctcttgttgcccaggctggagtgcaatggcacgatcttggctcaccataatctctgcctgccgggttcaagtgattctactacctcggcctcccgagtagctgggattacaggcatgcgccaccacacctggctaattttgtatttttagt

SEQ ID NO: 182049 - DNA, 598 bp, Homo sapiens
catgtcgtggcttatagcaaatatgcaataaacatctgctatttataataataatggatattcagaattactttaattcagaattcatgaccgtttttctaaactagactgaaatttatttcacattattaggaccagttagcaacaatgtaaaaaattattacggcaatgtttaacaaacttaagaaaacagacctttaagcaaaccaattcttttttataatttcctgggaaaaaactaaatgcagtcattacacaggtgaacttatctcccattcaaggaggccttgctcagctcttcccatagttacctggagaggctaatactgcaattagttataagcggtttttccttccaatttctccctacggctgcctctctgagcgtgaatttggaaggtgattcttaatgtttacattacccctcagttctgagaagccaaacatttgtttgaaaaaaagaaatagaatttctgaatcagaagaaagagtttttgtgtgtgtgtttatgtgttgttgtttttttttgttttttggggtttttttttaattgagacaaagagtctggctctgttgcccaggctgctggcatgggtgc

SEQ ID NO: 182050 - DNA, 157 bp, Homo sapiens
taaagtttacattgttttttattttctgctcatacacttgtctcatattttttgtcttcaaaaacattctcagagacaagtacatttagagatgatcccagaattgtttgtatagaaatagaaagtgagaatctcattatcaagaggatttgccata

SEQ ID NO: 182051 - DNA, 182 bp, Homo sapiens
acaagaggagaatgaaggcaggtttcaaggtgtttgatctgatccacccaaggaattgtaccatctactgagaatgggtccaatgagaacagtaggttgaatggggaattaaaaagttgttagtggacacattaaatttgagatgtcattaaataaatatccaagtagatatgtcaggtaag

SEQ ID NO: 182052 - DNA, 381 bp, Homo sapiens
gaaaattttaaaacaccctgaatcacctgtttcccattcccagcttgacatatggctgccctgtaggaattcttggcccctgggtcaaagggctgatgagacagacacaaggctccatggggactgggcccaaggccaagtatgtctgcagtacggctgccatttccaaaaggggatgctgatttctgcaaatatgggacttaaccggctctctgctttgaaggctgtttgtggcatgagagctgatgaaattcagtggctactggccaacagcatggactgatttcctctctccaaggctctgccaaaccactgctgtccctgacccacagctgccacacccctcagtcctctcttctgtcctcttgaacttccatggaa

SEQ ID NO: 182053 - DNA, 222 bp, Homo sapiens
caaaaatctgtatttctatacaccaataacatttaagctgatagccaaatcaagaacacaatcccatttacaacagccacacacacacatacaaaatacctagagatacacctaaccatgcaggtaaaagatctctaaggaggactacaaaacattgctgaaataatcatagatgacacaaagaaatggaaaaccattccacactcctgggttggaagaacc

SEQ ID NO: 182054 - DNA, 278 bp, Homo sapiens
tagcgaactcaatgttgaaagagaaggacaaagttggagggctcacaatacccaacttcaagatttactactaatctacagtaatgaagacagtgtggtattggatcaatggaacaggatacaaagcccagaaatacactcaactgatttttgacaaagtagcaaaagcaatataatagagaaaagatagtgttttcaacaagagatgccataattcgacacttacatgcaagaaaatgtatctagacacaataaaataaagaccttacagtcttcac

SEQ ID NO: 182055 - DNA, 585 bp, Homo sapiens
atagatatatgtctagataggtaagtagattagatagagttggtaggatggaggattataaagtaaatatggtaaaatgttaacattcgaggactctgggtaaaggatatacaggaattctctgtattattctttcaatttttatataattttgaaattgtcaaaattcaaagttaacaaaacttaatgtctcaggaaaagagcgaattacttaaaggaaaatcagggcaggtgtggctactgagaaagcttgggtcagggagggggaaggaggaatatcaagaaaggaattactaacatccacccattatagacataattttaaatgatgttatagaactatgttatggacatgtaaaatatgacataacaataggaaaaaaattagtttaccattatacatacaatttgctaagtaggcttctggcaataagtgacttttatctttattctcttacatgttattttttctttttttttttttttacaataagctatcagtaaatttataatcggcaggaaatcagtaaaacattttaaaaggaagaaaattctcatttagatcaggggtcagcaaacattttc

SEQ ID NO: 182056 - DNA, 304 bp, Homo sapiens
  misc_feature (11)..(11): n is a, c, g, or t
ctagaggaccnactaacctaatcgcccagagtacactgcgggatacaaataaaaaaactactcaaaatatagcagctatattacagtcataagacgacactccagggcatgttttatttggttaattaatgtgtgccttaggaagtaaaattatgattctatattcacccaaggtgtaccttaatgacctaataaaacatgtctcgtcacctttaaatgctatttaacagtacccagtgtacaaaattttagaatcacctatactattaaactgcttattattataatcgcgattagggttagt

SEQ ID NO: 182057 - DNA, 189 bp, Homo sapiens
cagttaatcacaggtggctataaggcaaactccaagctttaaccagtccagctttctctgtacctcacttctgttttctgtatctcactcccctttttgtgtccataaatattattcagccatgtagcagccctggtctttctgaacctgttctggttccaagggctactccatttgtgaatcattcaa

SEQ ID NO: 182058 - DNA, 341 bp, Homo sapiens
tgctgggattacaggagtgagccaatgtgcccggcctgaggtgtttttttagtcaggtaattgaggtgtttccaccaggacgaagcctctcggtggctgagagggaccccactgaactctctgctgaccgatgggggagcatgctaagtgcttaggaacattagcacataccttgtgaaactgatgtttttatggtcaaaaagggttggatatcagcacttccataagatacagtggacattgggacgcacatttactcccagtgaccccccactctgttccttggtgctctgtgtccccacctcagctgctctgggctgtggctttctgctcagcagttc

SEQ ID NO: 182059 - DNA, 373 bp, Homo sapiens
tatatatgagtatttagatgttacataaggaaaacaaaaaaagctaatggtttacataaacaaaaaaatgtaatcatttatacaagaaaattactttaaacatgtattttcatattctgtcttataactatcctgattacttccaaaggattctactaggattactacacaaagctttagtcttcttttaattattatctatgttattaagcagtatattatgtcctaacaattgagtacaaaggagaattcttgatttatagtgcactctatttttggcatttatagtcactgcatttaagaatacaaatgtacattttaagccactcaaaataaaactatattcatgaaattagatgtgattccttaatgt

SEQ ID NO: 182060 - DNA, 560 bp, Homo sapiens
ggggggtcaggaatttaggagctgcttagctcgtagttattgcacaaggtttctcatgatgttgcaggcaagatgtcatcaggggctacatcatctgaaggcttgactggggctggaggagacacttccaagatggcttactcacatggctagttggttagtgctggctcttggcagtagacttcaacttcttagcatgtggagcccccattgggtatctgagtgtctttgtaatgctgtgactgtcttcccccggaagaagtgatctaagagagagcaaggcagaagcctacagtgtctcttatgactagccttggaaatcacacactgtcatttctgcaattatcttattagttacagaagtcttccctattcaatatgagagggaattacatgaggatgtgaataccaggagacaagaatcactgggtaccatcttggaggcaggctaccacaaaaagtaagggaaagaatgaatttgcataagatgttcagctaaaataatttccattttttaaattggaaacttgaactcagtcccatgagcgtaatatttgtag

SEQ ID NO: 182061 - DNA, 999 bp, Homo sapiens
gtactagctcaagttcacctgttatctgatttcatttttaaaaaaaattttttaaaagtggtgttcgggaggtaaggaacaaggaagagacctttagaaaaaagtttcagtgttttatattggatatgaaaatatcagtggaatgtgtcctgaaaaacactggatgacagttactggacaaaaagacaaattattcccttttaccatgcaactgaacacagatttattgaatgtttttctcctgagtttaggttgcctctgggcaagagtataattctggcttgataacaccttgaagcgtgtttgtttaagtttgtggatagtttcatctattagtggaattaggcatctgcttctctttatgaacactgggtaccataatcttcctcttactttttgttttttctactcaactccaaaaaccattgctgagttgaagtagaataataaggggaaagaaacaaaagactaagtttgaatcccagtgctgacacttactggctttacgatattgtttaactcacttaccctttttaacctgaccttcttcttcactaaaaatgaaaaattgagtgaatttccctgggactctgttagataaggcaaaactaagatgggaacacatttcctaaggcgtagaaaaagacagtgaatgggacctttcttgttgtatcaggagttatggtaagaggtactaacaataaaaattaggctttcagccaggcatggtagctcacgtctgtaaccctaggactttgggaggccaaagcaggtggattgcctgagcttgggagtttgagatcagcctgggcaatatagcaaaaccccatctctactaaaaatagaaaaaattagccaggcatggtggcacgcacctgtagtcccagctacctgggaggctgaggcatgagaattgcttgaacccaggaggcggaggttgcagtgagccaagatcacaccactgcactccggcatggggaatagagcaagacttcttta

SEQ ID NO: 182062 - DNA, 1020 bp, Homo sapiens
ttccctcttgctcctcaaaagtgattattaaattgatgataaacctttgaattaatgacatttaagcagtgcaggaactgggcctacacccaatatctcagtaaaaggtatactgcacattcctaaacaaagaaaaacccttagacagatactgcagtgtctccataaggacaaagggctagatctagtcagctgggcatcagaacacctgaaacacatctgagttgacgtcatatcaccactggacactagtcaagtttcatatgcttatacaacatgtactgcatgctactgtgtgccagataatatgccacctgaaaatgttactgatctgggtgagggaactggcaagatccccagaggggagggtgtagagatgctggatgagaagccagggagtgtggactaacaaggaacctgagtgttcttaagagacacagaaaacaaagctggagagaaaacaggaccaactgaatgactccagaagagttgaggttgcgtgggaagtgtaattcatcaacttgttagaaaccatatttatttataacacagagtacaggtagccttgggaattttcaattataagaataaagggactctacgagaagccaaaggggtagatgtaggctcagataaaattctgaccacgggagcagagaaagcaagcataacctgatgtgggctctgcattgagtgaacattacaaaaaattctcaggaaaatcccatatatggggcctaacattcttatatttcatggaaagaatgagataaacagatcttgatgattgcctagtggtatttaacaacagcccccaaagtctgggtgccccttcccagagatgggctgtggggttagaacgcataatatttgtacagctctcgcttaaaaacgcctttgctcagacagcatacttgcgtgccatatatcatgtattttaaaatggggaaacttgtcccttggtggtccaaaggagacaagaaaattatgatcagataccaacagagacccaagtctgaa

SEQ ID NO: 182063 - DNA, 222 bp, Homo sapiens
tcctatttatacatcagtccatgttccagacagttgagtatctaatctttatttcaggttatagtgagctaatgacttttcctggaagtattttcagttttcagatagacccttattgttaaaaaatttcttcttttggtgaatcgaaatcagcctgtatgtagtcttatagagtaagagaataggtttgctctgtagtcttatagaataagataatagggt

SEQ ID NO: 182064 - DNA, 590 bp, Homo sapiens
ctccaatagcttttccaagttgctttttcccattctacaactgcttccttttgcagaaaggaagtgtctctgaccttgtatcaggagcgttaccaaaatcagctttcctgcagcattatccaagttgcacactgtacttccttattagaacatatgcatcacctaagatgttccgtaaaacaaatgtgaacttttcccccacccattggttttcaacgtgaagccagatcagtgcttctcagttttccccagagggctgagagccttgctgtcactggtgaaggctttgacggctgccaacccagtgctctcttacttcctacccactcaaaagcaccttgaattccagctccaggagtgcattgccaccagcgatccccatctgcaaacttaggacaataggaatttttcgtaggctggaaacgacctcttcataatgtggattcttagaactttgccctccttcttttgatgaaattctgggctttaatttcaggcttgaacaagaaggacttcctctgactcatggtggccagctttgacatcttaagcctgatatgacagcatacttactgagcactttccaggag

SEQ ID NO: 182065 - DNA, 365 bp, Homo sapiens
agctgcaacatagtgagcccaggagtcccggtccagcagctagtattaaattctctgttgctagcttggacctctctcgatatctaggaattgtctgcagtgtggggtggcacagtaacaaccatttgtttctcaacaagaatctgataatgttgcttgaacctcctgaaccagtgctgcatgctctgcttcttcatatgtttgtccttagatttgaccaaaaacaataactgataatgtaatacagattccccagctccctgtgagctgggttgagcccaggaagtctgtacaagagagcatgtctactgggatttaaatagcccagaaacaggcagccggaatttcttatactcttgtgctct

SEQ ID NO: 182066 - DNA, 450 bp, Homo sapiens
cacactggtagtagatgaaagcacagacggtgggttcaaagttacacatggttaaataatttgtttaaagttgcactgctgatactcaacagcagtgtagttcaacagggctgctgcataccagcagtataactaaacaaatgatttaaccacctatgaccttgatttcttcttgcataaagttattatgtctgtttcatgggttctgatatatataataaacctgttagatgcaatttcattattattttatatctttacatcatattctccctgagcctgtaatagaaagttggaaaattggagcattcaagggtggcagggtgggggatgagggtggcagtgctcaaagccccaagctgcaaacctgccatgaaaagatgaaaagagataagggaacaagaaaatgactttgtttatccgtccaaggagcttctggggctccctgat

SEQ ID NO: 182067 - DNA, 193 bp, Homo sapiens
aactccaacctatttctttgaaatgaaatttaagaaaaaaaggaaaagaaaaggaaggcacaaacacagggaaggaaacaaaaatttaaaaaggtagggcaagataaacatacatgtaagtagaagcagaataatttttcaaaagagaatgatttattgaattgaaggaaaagactcccttccttccttcctt

SEQ ID NO: 182068 - DNA, 318 bp, Homo sapiens
acctatcatgcactttcaccttcccccaaagaggaaaaagcctcattcactgaaatttgctagtgtagctcctttgcttattttgatatcaacttttcaatcaatattctcaggaaaagatatgactattttaagttgaaagcaaaccacagacgaactcagttccctggtcaattatcctcccagtaggtggtgacagttaaaagcagctccttaagggccaaaagcagctccttaagggcccaaaacagctccttaagggccaaaccctgcagtgaggcctgtaaataacttagattcttcaggtgctcagcgttt

SEQ ID NO: 182069 - DNA, 362 bp, Homo sapiens
gggcacccacttccccaggtcagaggggaaggaaataggaatgcctctgaagaagagtgggcggtctgatgtgcgtggaacagatagtgtgtgtggcggagtgtgagctgggaggtgactcagaaagtcacctagtgtttgggtttttgatggagctctggaatccaccagacgtaggctatagtcacagcaatgcattgtattagccacgtggccttgggcacatcactcagctggcccaaacctcagtttcctcattcgtaaaatgcagataaacatgcctgtctcacagggaccatgttgtggttgttatataaagcacctagtgtaatgctaacacattgcaggaactcagtaaacat

SEQ ID NO: 182070 - DNA, 393 bp, Homo sapiens
ccttccttccttcctttcctttcctttaatttcccctttccttgttcttttcctttcctttctttcttctttctttcttttttattgagacagggtctcactctgtcacccaggctggagtgcagtgacacgttctcggctcactgcggcctcgaccacctggactcaggcgatcctcctgcctcagcctccgaatcgctgggaccacaggcatgcatcctaatttttttgtattttttatacagatgggttttcgctatgttgcccaggctgatgcacccaccttggcctcccaaagtgctaggattacaggcgcaagccaccgtgcctggcctagattttgttaaactgacttagctggtcatttgctcaaactggattctacaaagatag

SEQ ID NO: 182071 - DNA, 229 bp, Homo sapiens
atgttcacagcagcagcattcgtaacagccaatgtgtgaaaaagtctccagtgtccgtcagaggataaaatgtggtctatccttgcaatgaaatcttattcacccataagaaggaatgaaggccgggcgctgtggctcatgcctgtaatcccagcactttgggaggcgtaggcaggtggatcacttgagcccaggagttgccagcctgggaaacatgatgagagctcgt

SEQ ID NO: 182072 - DNA, 145 bp, Homo sapiens
agacacacacacacacaccacacacacacacacacacacacacatgtgagaggagggccaccctgggaggaaaccctgaattctcccctcttagcacactccttctatctactccttctatctcctggtagagggagaagctgtg

SEQ ID NO: 182073 - DNA, 549 bp, Homo sapiens
tggatggatagttgggtggttacgcggaatgatggatggatggatgggtgggtgggtggatgggcggatgatggatatatggatggatggttggatggatggatgggcagatagatggacgagcaaatatggatccgcctccttgattggttctgactaactcttcttctctccttttgtcctcacatccctcagatgctggggatcacagtgtcctctcctttccactcttcatctcagcttccttgactcatagtttttcctttccttgcagtctggctgttgagcagtgttagctatgcccccgtgtggtgcctcagagactcagccactccccctggactttccaggcggcagcagggaaaggcttaggagaatgtcagaaactgttggatggtaaagtgtgtggaggagaaatgaagaggaggacacccaggcccttagccctggatcctaaaggagcgggcagtggagagaacctgagtgctgtcagctcagttccaggacctttagtgaatgtcagtgggtgagagaaggactaaacatggg

SEQ ID NO: 182074 - DNA, 538 bp, Homo sapiens
taccccaacctgatcttttccctcataacatgtaccataaattgaaattgtttactgactggtttgtttccttgtgtattgccagtctcttccattgaactaaaagtttcatgagggcaggagccatcttcatatgccactgtctaacacagtgtctgacagagtagcccctcagtaaatattttaggaatgaatgaaagaatgagtaagccatggtaaaaagtcttgactttttcctcaggagcgatttgataagatgaaagggataagacaagactgagtgaggaaaggagtatgtgagagcttagagggaagaaatactttaccaaggtcctgtcatgttctgggcagtgtaccaaacagtttcacacacatcgtatcatttcactttcctagtcatcctttttcatagatatataaatggagctcaagggcttatgtaactgctccaagttgacacagctgggaagtagaagagcaagcattcctattcatgtctgtagctaccaagccctttctcgggtgtttacagtgaaag

SEQ ID NO: 182075 - DNA, 441 bp, Homo sapiens
atatttatctcagtggcttaacaaaataaaaatttatttctcattcatacaaagtccaatgtggatatgcatagtcaataggcagccgtctatgtggtcattcagagatgcaggcttcttgcatcctatggctctgttttcctgtatggccttggagtcctctgttcaagcctctgtgtctaacagatagtaggtatgggaagagagagaaggtgtggaggatcatatcaaggggtggacatcatatccacccacattctttctgtgataattcagtcacgtgaccaagcctaactgtaagagaggttgtaaagtgagttctgatgaacatatagcatttctgccctacccacttaaatgaagcaacagtaccagggagtagttggaggtaaagaagacatgctgctttatatactaggagaaagtccagtatcataggca

SEQ ID NO: 182076 - DNA, 112 bp, Homo sapiens
aagttatatggagctccttggttctgtgtcctcaacatgctgttctatgttttttacattctgtttgctccttcctgcttggaatgtccttcccctccccgtctttcttaat

SEQ ID NO: 182077 - DNA, 343 bp, Homo sapiens
tttgctacctatataattttaggcaagtcatttaagccatttttctgagtgtacaaactggggttatttaaagctgtctaataggctggacggaagggagtaaaagaaagaatgtaaagtatttaatatggaccttggtacattctaattatttaataaaatggttgctgtgcgaaaacaaaacgaaacaaaaccaaaaaacaaagagaaagccagagttgtagaagagaggacagagaagtagagaaagggttacagaggaaggcagggccttgtccatgtggggctttacagacaaagttgaattttatatgaaatctctagatggctttaatcagaggag

SEQ ID NO: 182078 - DNA, 357 bp, Homo sapiens
cttacgacgacgcaaattcgtaggctatggtcatggactagtagccatgtgtggaaagagaagattgatagttacctggcatcatgataatcaagacattattattagaaataaatatacatatgtatcctgatatatttatttacaagtccaaactgaaattaatcttaataagaatgtaaaataaagcaaaagtattagaaaaaggggaactctagttctgggtttcttcacaaactgtagcaaaattttaacttcaaattttaaatttaatggctagtactagtactatttatacatttgttgaaaaatgaaacattctttttaatttggaactaaaatttgtctttaaaagat

SEQ ID NO: 182079 - DNA, 154 bp, Homo sapiens
tgctgggattacaagcatgagccaccatgcccagccaggacattcctttaaaaaactaaatttcccttaaaaccatttatctttttctgctatgcctttctaattggaaaataaacaacttaaagtacacatctgcacaccttaaccaccacat

SEQ ID NO: 182080 - DNA, 378 bp, Homo sapiens
  misc_feature (45)..(45): n is a, c, g, or t
tttgctggggtgactctagagtatccctttctctgatcgctccangatgagatttgggtgggcacccagccaaaccatatcatattccctgctctagattccagataagggagaggagggaggcggtgctcagccccagccatttatgctgagtagaggaggtgagaagtagttggtagtgacttcctcagtctcttccttcagcgagcagttggagtgcactgttctagtcacatctattcctaggcccagactctgacctgttttcaaagtctcatatgcctaagccctggcttgctctctctccctttctttattagcaaagaaatcgattatcttcaggaaaggtattatgagcacactgaaggtatcagtcac

SEQ ID NO: 182081 - DNA, 271 bp, Homo sapiens
cccccaggtagactaaccaggtagtacttaagccaatcaacctaaccccccttgtcccatcatgagtcttttaaacaaatgtgagttactcaagtctgcaatcaaatgaacgcttttatcaaacaatttaaatcacaattactaggcttttcacagcgcgaaattcttttaaagaaaaatgcacatgttaattgaatcaaggcagtttgggcagttcttgtatttcagcattttcaccattaacctatccttataagttaggtctacctgg

SEQ ID NO: 182082 - DNA, 102 bp, Homo sapiens
agcaccccccacccgccccgcactaccaccaccactgccctggtattacaacatgtgtgcctgtttgcagattttcaagtaaaaatgggaatttaaaggcca

SEQ ID NO: 182083 - DNA, 634 bp, Homo sapiens
actgaatagagtttcagcatggtgtgtgtgtgtgtatatatgtatgtatatctatatgtatgttatatgattgctcctgggagtttaattttgatgtgtaatatattgaatggttactctttcctttttagttgaatcggcttaaaaagtattttattctaggtgctggggatatggcaataaataaaatcgagtccttaggaggctgaggtgggaagattacttgagcctaggagttcaaggcttcagtgagctatgatcacatcacttcactcctgcatgtcggcactggacgacagagtgaaaccttgtctcaaacaaaaaatgaaaaacccccaaaaaactgagtccttgactttgaaaagcctgctttctaaagtgaaattttgttcatatgtaaaaatttttggccgggcgcggtggcttatgcctgtaattccagcactttgggaggccaggtgggcggattgcctgaggtcaggagtttgagaccagcctgactaacatggtgaaacccagtcgctactaaaaatacaaaaattatccaggcatggtggcacgcgcctgtagtcctagctacttgggaggctaaagcaggagaattgcttgaaccagggaggtggaggttgcagtg

SEQ ID NO: 182084 - DNA, 417 bp, Homo sapiens
ccttttaccaaagtgaattttaaaaattacattttccctcttgcaatcatgtttgtagcataaagaagcaataaatgggggcggggagtaaagcttgggaactattctatgttaggcttgagtagtctagtgcaatgtctgataaaggaggggtttgaattttggtatggaaggctttctaacactgcactattttaaagaatagctcagtgatatcagtattcagttacttaactaggcacgaggtaccagatacagagagattgtgtagaagaatgaacactgttaactactgtctcctctccccgtttgctggatctatctatggatagggtgctgacctctaatttactgaaataaaaggaacattgttcctggaaatatttatgaggcatattgcatcttctccacgttatg

SEQ ID NO: 182085 - DNA, 173 bp, Homo sapiens
actgtcttttgtccagtgtctgaaaccatggcttcgtatgttttatcttttttttaagagatgggggtctcactgtgtttctcaggggctagagtgcagtggctattcacaaatgcagttatagaagagtacaccctcgacctcccgtgctcaaacagtcctcctgcttcagc

SEQ ID NO: 182086 - DNA, 418 bp, Homo sapiens
aatgcattataattgatatttctaaaactgtactttttaatttgcattatgtcaggaaatgtaaattataaacaaagatgattttgtattgtttcacttacaatgactcttcattgcaattggaaaaataacatgcacttccaaatgtctaaattttcctactaaattatattcttaaggttttgctattgatacttttatatatgcttgtcctatgtaaaagttcgttttctgtgtaaatatttttgaacatagtctattttgattaaaaagaaatctcacatcattaaaaataatttcaattgttataagtaatgtttaatgtaacaaatactgcgattatttacatttgtctttatgcaaatctaaaataatatttacttgtatatatgtggtaatatacaattttgtatgtaaa

SEQ ID NO: 182087 - DNA, 627 bp, Homo sapiens
ttacattgaaaatactagaataaaatataagtacatatttgtttttaacttaatatacaatttcagtgttagatgaaatgaagatggaatattaacaatgtataagtaatgaaaaattactgaaacttgactctgttttagcattccaaatcttaaattatattccttgccctaaaataaaatatcatgaagatattttgggtgaacagttggaaattgttacaattctagagtattaaagataccaagaacattcagaggatccagccgaacctgacttgcccaagaaaataagtaaatcatttagtttgtcacttcagtttgcatgaccacaaagaactgtacacgcaatgagttattacattgttatagaagaaacaaaatattttataatagtttgccaaaaatatcatgccattatgagaaaaacctgttgactaagtcggcctttggtcacagtaaataatcactgcttttgaccaaaactgcaggaatgtaaatctacgtttttcagtgtttgaaagactttaaaattgcaccatataaggtaatgctggctaactaaactttataacatttgaatgtagaccataagctgatgagccggaggtcaaaattagatagctg

SEQ ID NO: 182088 - DNA, 314 bp, Homo sapiens
tgtatcactattatctagcgaacttgttaatgctctgtagatcctctgtatttgaatgtgctgggtgtgcttgtgagtatcaatcacttgctacatcataaaactcaaaaatatttataaagatgtgtagctgtttaacttcctaaagaggcagtaaacttcctcttaattgtctcattttcaaaataagcaggttgaataaaattacaattaaggtcaactccaagtctaaaatttcattacctataaacccatttagtgctctgcacatattacatggtctacaaatgttgttaagactatagaaatcaccc

SEQ ID NO: 182089 - DNA, 304 bp, Homo sapiens
ctgcagacagtgtgggggatggggtatactacagagaagagaaagtccattgactttccttacccataaaagcttttcaaataaaaataccctgttatttttatttaattagtattgagtctgattgccagatgcagttttactttgaaatgataaataatttaaaacttgtacttttacccggtgttataaccacagattaaaataaagcgaatttttacacattttattcttcagaaacagaccttttcaaagactattttgcaagctaattgaaggctttgtgccatgctggcttgcatgt

SEQ ID NO: 182090 - DNA, 1126 bp, Homo sapiens
gcccgaggtcccagacgcccggcgcagcgggagcggcggggcgtgcctggcctgcgggacgcgactgatcgcagtggggcgaagcggggccggagccgcccgcggtcaggagcagcaatgtctgtgcaggtagcggctcctggaagtgcagggctgggcccagagcgcctgagccctgaggagctggtgcggcagacgcggcaagtggtccaggggctggaggcgctgcgggcagagcaccatggcctggctgggcacctggcggaggccctggcgggacagggcccggcagccggcttggagatgctggaggaaaagcagcaggtggtgagccactcgctggaggccatcgagctggggctgggcgaggcccaggtgctgctggccctgtcggcacatgtgggtgcactggaggcagagaagcagcggctgcgctcgcaggcccggcggctggcccaggagaacgtgtggctgcgggaggaactggaggagacgcagcggcggcttcgggccagcgaggagtccgtggcccagctggaggaggagaagcgccacctggagttcctggggcagctgcgacagtacgacccaccggcggagagccaggtgccacgggcagggcgaggcggggggtgctgggcccttcatagagccccacagtcccccagaccctccttagaatcccacagtccccaagatcctccttagaatcccacagtcccccagaccctccttagaatgccacagtcccccaaccctccacagagcccccagacccaccagaacttccacagacgcccccactagctactccacgaagcccccgagcctcgccagacccccagggggcctctgacgctcgtgaccaccacctccctcaaaccttgagataggctgggtgcggtggctcacgcctgtaatcccaacactttgggaggccgaggcgagcagatcacctgaggtccggatttcaagaccagcatgaccaacatggagaaaccccgtctctactaaaaatacaaaattagccgggtgtggtggcacatgcctgtaatcccagctactccggaagctgaggcaggagaatggcttgaacccaggaggtggaggttgctgtgagccaaga

SEQ ID NO: 182091 - DNA, 303 bp, Homo sapiens
attttaatatgttgttttgtcaactactgaggctataggcccttttaggtcttcaggagaagtagaccagtaaaataaacactgtgtgtttaagctatgagagctcaggatccctgtggttagcagttatgaggcacttggacacatatttatactaagagttgtagcttttacttatcttgggtaaaagaaatactccaaacagttagaacaaaaaaatatatctgatggtaaaatggataatgtattagtccattttcatagtgctatgaagaaatactccagattgggtaatttataaaa

SEQ ID NO: 182092 - DNA, 812 bp, Homo sapiens
cttttttttcaaaacagcctcattaaatgtagaatgtaggtaagaaacactcaactaaagaatagacagaactcatgctctacccttacctgactggctatggggagatgggaaacgtcctggtacccaggtgtgccctgtgattctgaggaggagcaaaggagcaagagtgagaaactccctatcgtacaatttttctgcacccagaagttcaaagttgaaaattgaaatcaaatgatcatcaatgatgaaaaccctggttaagctaggggcatagcataaattctgagtgctcaggcactcaaaaataagttatacataatcaagttatatacagacgtgatctctgccttcatagggatattaatcagacattcaaatggtcatataaatatgatgggttgaaaggtatacataacttggttcctacccctaaagaacctgtgagctggagagcaaggtgcttacttgtggaagcatagctggtagcaggacaggtgcaggtgagtggttcagatgccaggtgccagtgaatcagagaccacttagagctcagtctcattggtctggggatgttgccaagcaggaaacaagatttgaacataaacctccagaaaactgaatagccttcccaggactaaagaggggagcatggtaggcatagtcaggtgtgggggctgccttgttcaggacagtgggcggtgaggacacaggtgtggctagagttgacagttaccttaatttgaacaagcaaactttctactagaaataaatggaaccaagttatgttatccggggtccctggagcggct

SEQ ID NO: 182093 - DNA, 639 bp, Homo sapiens
tctctccacactggagcatgtggaaaaaactggatgacactgcataccttcatcagcaccagaagcagcatattggagagaaattctacagaaagagtgtcagagaagcatcgtttgtaaagaaacgtaagctcagggtgtcacaggagccatttgtcttccgcgagtttgggaaggacgttctgcccagttcaggattgtgccaagaagaagctgctgtagagaagacagacagtgaaactatgcatggcccaccctttcaggagggaaaaactaattacagttgtggaaaacgcacaaaagccttcagcaccaaacactcagttattccacaccagaaacttttcactagagatggatgttatgtgtgcagtgatggtggaaaatcctttagcagatatgtcagcttcagtaatcatcagcgagatcacactgcagaaggaccttatgattgtggagagtgtgggaaatcttatagtcgaaagagcagccttattcaacatcagagagtccacactgaagaaaaaccatacaaatgcgaagagtgtggtaagggcttcggttggagtgttaatctccgtgttcaccagagggtccacaggggtgagaagccctataaatgtgaggaatgtggtaagg

SEQ ID NO: 182094 - DNA, 345 bp, Homo sapiens
aatctggtgattgcttcaataagagctcttttcattcttatcaatctaatcatacaggagagaagtcttatagatgcgacagttgcggcaagggattcagtagcagcacgggtcttatcattcattacagaactcatactggagagaaaccctataaatgcgaggaatgtggtaaatgctttagtcaaagttcaaattttcagtgccatcagagagtccacactgaagaaaaaccatacaaatgcgaagagtgtggtaagggcttcggttggagtgttaatctccgtgttcaccagagggtccacaggggtgagaagccctataaatgtgaggaatgtggtaagg

SEQ ID NO: 182095 - DNA, 367 bp, Homo sapiens
ctcccgggttcactccattctcctgcctcagcctccagagtagctgggactacaggcgcccgccaccacgccagctaatttctttttgtatttttggtagagacggggtttcaccgtgttagccaggatggtctcgatctcctgaccttgtgatccgcccgactcggcctcccaaagtgctgggattacaggcgtgagccaccgcgcccggccagaaatgggtattgttttaagctgataatgtgtagcaatttgtaacacagtaatagaaaagtaatacaagaagatctgacagcatgtatttgataacagtaactggaaaaaagtaaaccacttgtgccaccagcaagttaagaatgcttaataa

SEQ ID NO: 182096 - DNA, 447 bp, Homo sapiens
ctctgtttcccattaagttcattgtttagctaaggaagtgacatgggggaaaggtgtcggtggggaaaaaggaaaactgttgcctaagtagacagcaacagattagaggtccagtccagggtccaccattaaataaccacatgactttcccaaattcctatcatcacccttccgtggcctcaattttctagtcaaaaactaaactaaacaaaattgacccttgtcattctaaaatcctttgatttccaacttataaagctctcaactcccaacagagtcaagaaaaagattcttcttctggctgggcatggtagctcatgcctgtaatccaagcactttgggaggccaaggcaggagaatcacttgaatccgggaggcagaggttgcactgagccgagatcatgccattgcactccagactgggcaacaagagcaaaactctgcctc

SEQ ID NO: 182097 - DNA, 423 bp, Homo sapiens
agtcaccaccctctctttctcacctctgggcttttgcatgtactgttgctctgcctggaatatgctagattcaactaactctggggctcagtttacgtgtgacttctttcagaaagacttctctgacaattaccagtcccccaaatgaaaaaaaaacccactgggcagaaggactcccttaggggctcagccacactctatttctgcagccttgttcttagcccagcggatggagtccaccccattaaatgtgcacttctctggcagtctgtaagccctgagagaagggactctgtcctcccagtattccctcagccagtgcagtgcctgccacatggcaggtgctcaatatatatttcttgcatgaatgaacaaacaaggaatttaaaaaccattagcaaagctcctttctgaaactacgct

SEQ ID NO: 182098 - DNA, 662 bp, Homo sapiens
agaagacccagcgtcatttgcagggtggggcaggacagcccttcccagctgccgaggaggtggatgctggtgtggggtgacgtgggcacctcaggaaagacccacgcctctcccacctgccagcctgcctggggtcaggccttcggtgtccgaactgccctttccccgaatctgttgtgttttgtttttaagctagacctgacctctttggttagactaaggcagcaaacactggatagcagttcttataaccgcaatttactgaccacctactatgtgctattcactttactcgcactatctcactgaatcctcatattatcccattgtggtgggtactgttagcccagggtcacacagtggcacagatggcagagccgggattcaaacctgggtgtcctgaagccagagtatgtgataccacttctcacgtctaggtcctgaacagcagtgggagtctggcttggcgttacgagtttgtattcttctctggaaatcagccagtacaggagaagattcaggaaggggcatgtgggtactcacttgggcagagatagcgactgagtacaggtctcttaagtctctgaccctcatcagcctcccatggcagctccaaccatttactctgtcactttcccctctgctggggctcttgagagcac

SEQ ID NO: 182099 - DNA, 614 bp, Homo sapiens
acatggtcactggctctgatcctgattcatagcacctcagatccagagcctacaagcacgactgggcttccaaataggaattcctaataaatagaaatttggcccagtttatcttagcagctcaggtcaaaagtcaaatgttggctttcctaggggtgtgttcctctttggtgaagtgttggctttgatccttctgctgagcctggattttgggacagagatatatatatctcctagtagagatctttcatctctttggttaagtgtatttctaggtattttattttttgtagttattgtaaaatgggttgaggtcttgatttgattctcagcttggtcgttttttgtgtatagcagtgctactgatttgtgtaaactgatttggtaaattgagactttactgaattcatttatcattggcagagagagtttgacatcgtcttttccaacttgggttccctttatttctttcatttgcctgattgccctggctaggacttccagtactacgtttagcagaagtggtgaaagtgagcatccttgtcttgttccagttcttagggggaattctttcaacttttccccattcagtatgatgttggctgtgggtttgt

SEQ ID NO: 182100 - DNA, 247 bp, Homo sapiens
tctgcatcactgatgaggaatcacaggcccagagaggcttaaataatatgactcatccagtggcaggactgggattccaggttggtgttttcttggggtgatctggcaggactcaccgtcctcactggtctgagttgccccttcactctcagaattgtccccacatccgagtcctgaataatcaacctcagttcttgatctcaggtttccactcgtctcccctcgtgcccatgctcagcccctcaag

SEQ ID NO: 182101 - DNA, 307 bp, Homo sapiens
aagaaacacagaacagggaaattgataaaataatattttaacccatatttatttgtaatttcagcatggctaatgatagatcagatcagaaattgaaaagaaaatggaggcaaagggtgtttctttgaaaggactgaagagaaagttcaaataacgaatatgaagaatggccaagaatgggctgagtccccgggaggcagatgctgaggtggcctttgtatcacaagaggctcactggtgaggaatgcccctgaacagcagcaaggggaggaggccgggaggcctcagggaggctctggagatgacc

SEQ ID NO: 182102 - DNA, 180 bp, Homo sapiens
tatatataagaaagaactttacagcattgctgaaatggatgattatgagtttagttgggtctggaggtaagagatattaaaaatgtgtaaagaacttgggggaagagttctagggactgaggagatgagaagggcaagtaacagattcagtgagtcaagaagtaggttgaggaaaagagg

SEQ ID NO: 182103 - DNA, 268 bp, Homo sapiens
catcaaccgtagtatgtagtgggctgtaccatctaggtttgtggaaatgcactccatgatggttgcagaatgacgaaatcacccaaggacatatttctcagcaggtactcctgttgttaagcaacatatgactaatcagaatgtgacttttcctcacatgcatttgttcttcactttttgggagtcacagcccctttaagaagagtaatgaaaacaatggatgctctcctttattaaatgagctttcaaaaaaaaaaaaaaaacccct

SEQ ID NO: 182104 - DNA, 205 bp, Homo sapiens
aaaagagcatacaaattcaaactctactcttgctcttcacatttacgatggagacccagaaactccaagttacttgctcaggcctcaggcaggactagatctcagatctgagttctgggccagtatttctccaacacaatgttgcttacttcagacctctgtctatgatctattagctctccctttagctaggacagattaaagg

SEQ ID NO: 182105 - DNA, 391 bp, Homo sapiens
gtaagatctctttgccacacatcgagaggcaaaatggcaacgtttgactggtatatgaccttctaggaacatgaggctggtaagggaagattgcctcaagtgagcatgtgtacacttccaataaacacactgcccctgctcactttccaagcgctggcaagtcactgtgcatgtggacagcctaccccaagggaagaatcaggggataagactgatccctgaagaatcaagggatgcaagactccagaagtgtgccaatgtataaaaccctaagtcaaaggtcaaaccgtgcacttgatctctaaagttacctgcttggccatcttccaagtgtactttccttttgttccagatctaaagctttttaataaactttcactcctcctttaaa

SEQ ID NO: 182106 - DNA, 227 bp, Homo sapiens
gattacagatgtgagccaccatgcccagctaattcactttctagtgtactgaaacctaacagacaggtaggtgatcatagaatctcagatgttactgagaacttcttaaatccaaagtctcagcatatagcctcaaatacaacccacgcaaagctgacgtgcatctccagtcacctgcatgtgatcacattcaaaagaaacatcaggctggcatttaaaagggaact

SEQ ID NO: 182107 - DNA, 590 bp, Homo sapiens
ttgttccaggtactgttctaaatgctttatacatggattatctgataatctatttaatccctacaacaaacctaagcaggatgtgctattatcactatttttacagatgagtgcttgtgttggatcttccactatgtcactggaaaagtttacaggaatcataacctctctaggacttaggaaattaacacctataaaattttacttctagcatttattttatgcctgctgttttgccttacctactatgaattcctacaggaaggggcggtattcatcttggtattagacacatacatgtactaggtttacagttgttaaaagagaaaatgtcagtagggaggctgaactagaaaaacaagccactgaggtttctcacatttccatcacattctcaaaaaaaaaaaaaagaaaagaaaaaaaagtgtcaggagacccagtagaaggaatagactggaaatgaggaatttgaggtctgcccccagctctactgattggcaatttggccttaggcaactcacagatttctctctaagattctcaaccagtccaatagaaattatagtacctgcccttgattcagcagatta

SEQ ID NO: 182108 - DNA, 324 bp, Homo sapiens
taagtgaatgaacggatgtctagcaattgtagtcaacccactcttccacatcttcttggcagtggttcaataaaaccttgaaagatgcttgttttttctgttcttcctaattctcgtgtgctcctactatacacaaaaaacagaggggaagagcagggagatgaaggcagatctgcccaaggcacgatcccctggacacagtggccagctcagccctcactgtggccccctgcccaaggtggtgtcagctcggggtgaaagaaattcgccgtcacccaagtggactgtctcccagtccccagtccttggctgaggaaataaaca

SEQ ID NO: 182109 - DNA, 855 bp, Homo sapiens
agaaggaaaaaacctagagaatgcacccttttaggcatttttgtgatagaaatcataattttaaggatttataaatttaaccataacaacaccctacgacccctataaatggcaaccgctactactatttcatgactcttttcaagtgtacatgagaagttcagaatatgaaagtaatattcaaaatctttatcacagtttatttgaagaaaaattatagtataaatacaacattgctcttcaacctaagctcacaactattggtatgagtatcatttccagaaacctaaaagagctttcctgaaatcccaacatcccgtcagctccacctagtcttccatagttcattaaaaacaagcagcatttctttcatgcctcatcattaatgataaagcaaatgagtcaactgtacagaaacaaagaaaacatcaacaataatttactattagcatcattgcatttgtgtagcactttatacacccgctatctcatttgacctttttcatgagcttctgcagtacaaggaaatggaataattattttagagacaaggaaactccagtccataagatgtccaagaacacacggctagtaagaggttatggcaagatgtgattcaggattcgagaacttttcatctagatttttgttcatttatgcaaaactgtctctcttatctaataaaagtgtttaccaggcttaagaagtggatgatggagcttctgagatccacataaataagaagttgtctaattcaggccagatgtggtggctcatgactgtaatcccagcactttggaaggcttcaatgggaggatcgcttgagcctaggaattcaagaatagtctatgctgt

SEQ ID NO: 182110 - DNA, 1010 bp, Homo sapiens
tgtctgcaagattttagatgctttgaacatttgccataggcttcatctgctaagctatgcacttagcataagcgaagttcactctttctctctgtacttgagaatgtagctaccattcacaggtgacgccaaaggctcttcagcaactagactgttaaggcctgtggctttcttcttaaatattgataatatacgtaagccttatttcaggggcttagcattgatagtcataagtgataaccatatattgagcactaagtatgtgctaaatagtgtgctgagagggtatgatattctcaaacttattgccccccatttacaaataaaagcttggctgagagaatcaacggagactttgggaggtaaagtcgtctccactcccaacccaaccatgtcatccgaacgtggggtacatgtaccatattatgtctccctccccatacatacacagagtagtgttttcctgatttatgctttactttgatgccatcctcctgtattgaagtgtgctctaagaaaaagcatttcaaatgtagtgttgtggctgctaggaagatattaagtgatgttgtattatgtcatataaaatccgtatgatgaccttctggagagatttctttccggttcagggaaaggtgtgattctcctgtgcagtcagattcttctcgtggacacagtgagcaatataacccatcaactttcttttttctgtcggctgttagaaagccagattcaaatgcatgttttgtagtagctggaacttttatattgaactgaaaacctcagtcaaagctggcctgcatcaaacagggaattttttggctcttgtaacaggtaacagagaaggccaaaggtgggcacgggattccaagtcttccttgctaagcatcttttctctctatgtgatgtttctaaggagttacaggctaaatccctctggctccaagcctagtggaaagagaaattctcttccctcatggtacaactcactcctgtgattgggctccaag

SEQ ID NO: 182111 - DNA, 750 bp, Homo sapiens
ggcatttgtgatgtctcaatacatcctggagaatctagaaggtcacctccacacacctgcaccacaggtggcatcctataggtatttgctaaaggaagcaatgaaagggtaagataaataaccaagaggtgcccgccactgtgttcacccaattttacatactccaagttatcactagtgtcaaaatcagaagaaataactccaatgccagaaaaagccagctggctgtgcccttcaatatcctgagaatgatgggatgtgaaaaggtgtcgaatcctcaacagcagggagactgcttggatgactcccacccagaactgaaattgaaggcggagtttctgagcttagaaaggggaaagacccagcatttatgactgactccttcatccaacctctttccccaaatcagacgatttttgacatgggtatggtaacaccatacgtttgcatagagagattcatgggaagcctagctgctgtgacgtgcagcagtcagtttttaacaccatcatcagtggcgaaatgaaacattcccttgaaatcgcctttctctggatgactatttaaacagcttcacgttagcctgcctgtgcgactgaggacgtactgatgatatcctcattttccggtggaggaaagtttatgacgtcaatcccattccgaatatcaggactttaaatctctatgatgttagcacaaaatgcaagtggagccctctccaagctttcatagagccatgtattttggaag

SEQ ID NO: 182112 - DNA, 215 bp, Homo sapiens
ctatttacagttattccatcagatctattataacacccaccagtagttttttatttcacatgttcaatcatatcagaaaattcatcaatttgtttttaaattggatgcctcccttctggagtgtttctttttgttccacctgatatcaagttgtctttgggatcctgtgcagagcttcacctaaagcttctcctcaccataattttggacttctc

SEQ ID NO: 182113 - DNA, 888 bp, Homo sapiens
gtccctctatacgttaattataggaaagccttatgttctgaaagcttcaaagtttattctttctgtctcctcctctgcctgaagatacacttaagtcttgctcatctcaaaaccctttcttcacatctgctagttctctgaactgtcttattgaaaagctttgagaagttgctaaagggcagtgggtatccactgctcttcaggattctttctcttcttttttttctttttttaatagaaaccatgttgagatataactcacctaacatgcaattcacccatttaaagtgtgcaagtcaatgatttttttggaaacagagtctctactccttgcctggggcgacagcgagaattccatttaaaaaaaaaacaaagacagtgggtttagggtcaagatgtcgttggaacaaaaaaggttgggagggggagaaccagtttgggaccatttagtggtttcttggcttggggccggggccccatgggtcaatttttggtaaccccaagtggtttgggaaggcgggtgggaaaaatcgtttggagggcagagaattttaagcaagttggaggcagataagaaaggacttcttcttctattaaagatttaacaaggggccggggggtggggcacaggctgggtaatccccagcttggggcggcgccaagacggaaatacccctcgaggggggatccgaacaaagccccatgaaatggggcaaactggtctcttaaaaaaataacaattcgcccgtgtgggggtttggtcggacccttctcgggaggcaccacgggtgtcgactcggagaccagtgcagcgggtacaagccacccggaaggaattctcacaaaaaaaacgcggggctcaccacgcacacgagcaccgtgttcccc

SEQ ID NO: 182114 - DNA, 340 bp, Homo sapiens
caaaccaaaacaaaacaaacaaaaaaaacacttccctgagccataaaggaaaaggtagttttgactggaaccttgaaggatgggtaaactttcagcagataaagattgagagaagaccttccaggtagagaaagcagtgtgggcacaggcaaagatggaagaacacacgtggctgtgggaaacacagctagaagccagtgcggatagagagtaggctatgatgtgcagaggttagacactgggagagacaggtccatgagagtagcttggactaacacagggagggtttggaatcccaagctggggaacctagaaatcaggcattgcccacagagcacca

SEQ ID NO: 182115 - DNA, 434 bp, Homo sapiens
actgggccagttcagtttcaatgctgatgggcagtgttaaggtatgttgagttgcctattagtcatccatacccacgcttattaaaaatacatatccccctccacactagctttttcttttaataaaaaaaaattgaactcttccaacaaagcgccagttacttattccacagacagatgaacttagtattttgtttttgatttttcattacaagaacaaatatcttttggttattttgagtatttatgtggcatttatttggaaacagaacatgttctcgtgacaatgaaaatattttgtatatgatacaaaagaaatttaaatgttaatatgaaacttgttctagcataatatactaactatactcatttgggagttaaggttagagcatcttttgagaatgaactgaaatgaggccgggaccgagctcgaa

SEQ ID NO: 182116 - DNA, 1303 bp, Homo sapiens
  misc_feature (4)..(4): n is a, c, g, or t
  misc_feature (6)..(6): n is a, c, g, or t
  misc_feature (1303)..(1303): n is a, c, g, or t
aacngnagtgatgaagacgacctccctccagacctggccgaggcagtgggagtgaccacatctacaaccacaaacaccacaacggccgccacacaagtctccgtgccgctgccgtcccccaaggtccagaatgtcagctcgcctcacaagtcagaaggcaaaggcctgctgtcccctggggccaagagcccctctgaccgaggaggtgcctttaccctggagccgggtgatcttctgatggatttcacagaagccactcctctggcagagcccgccagcaacccccactgtgcccactctcgctgttctcctccactctctctccccatgaaggaagagaccactggagtttgcatgtaccctccaatcaaaacgaggctgataaaaacattcccggttgatacaatgaacccgtttcctgatactttcaccacagggccacagtttactgcagacttcagagacagtaaattacagtgctgtcctggcccgacttccccgctgatcccagcagcgaccctgaggcctttgacagagaccgtctccacagtgcagaccatttacaccacccggaaacctgtttctctggcagccagtgcagagacactccggcaggaactggagagagagaagatgatgaaaagactgttgatgaccgaactgtgaaattctccccttgtcacctggaagatggcatggtgccttctgtccgtcttctttcttcgggctttgtgtgctcactctagcacagcatacaagtgtgtgctctgttcgcccaggtctccatggttagttgaagccaatttctggcttgacttttatgggaaaagttattttatgtctcctaagcattagagtttttctattactctatgtagttgagacaggatttgataagtctaggaaaagaaagatgggaaaacgggattccttttcagaagtacctgtgtgtatctgttaataaccacaggggttaatatgatgtaggatcttttactatcaatttcaaccatttgattttgtatgattgaaacttgcaccgagctttgactgtttgttaaagagtcatttttaatgaaagaataattctttattgctggtttttcatttacactgataaatacacagatcttataaagtctttaacattcatttgtattcagatgtgagtagaagaactaaaaaaagaaagttacatatcactatgactgaaggtacttcagcttaatctgaaatataatttaacttgtgaactccttggatatgatattatttggaataaacagaatttatcattgaaccn

SEQ ID NO: 182117 - DNA, 424 bp, Homo sapiens
caaaatgaaattttttgtttattcagcctccaccttccccagctatccacacctaggcccaagtccttctcactcaaaggctaccaactcacccagttcttgaagccacctggacactatcaggcataatttgagctgccagtcaggcctggggtctgatgcattagccaagcatgactgctgagtccccaagtcccagccctccttcctccctcttccccattacaggagtctcaagaccagctcctgggctggtttctgctcatctgcttccgcgttggatctcctctgtggacctagaactctgcttcacaatctctcctgcgggctgggccctgggctccataaagagaatcctggacgatgactaactggccactatcactccacccgtctgtccaatgcccctgtgtttctctgccag

SEQ ID NO: 182118 - DNA, 318 bp, Homo sapiens
ttgtaaacaacagagaagtttctttcttgtgtaacacttcaggttggcaggacctcagcaaccaaggttctttccaccttgctgccctgacatttctagaacactgctacagcagaaggttgacactggaccaaaaccatgtgaggttccagccagcagaacggggaaggaacatggagcctaactaacatcttaaagcacagatccagaagtgacacaaattgccaaatcactcacattctattcataagaactcagccacatggccacacctatctcaaatgggaactggaagtcatagtgcctagctggccagcc

SEQ ID NO: 182119 - DNA, 172 bp, Homo sapiens
ctctcacatcctggacttgagaacttggtagactggacccaagaatatcactttccactcaaatctgtgacagatcactctcgtagacatggcttcaacatttcaacgtctcttttgggatcccgaagctgttgtgatctgtattctatccaagccactcttcccccgaagt

SEQ ID NO: 182120 - DNA, 402 bp, Homo sapiens
tggagaagggatcttactctgtcacccaggctggagtgcagtgtggtgcaatcatagctcacggcagtctccaactcctgggatcaagcaatcctcctgcctcagtctctctgggagctgggactacaggccagtgccatcatgtctggctatttttcaaccaagaattctatatccagtaaaactatctttcaaaaatgaatgagatccccaaaaaatatattagaaagctcttagaagaaaacacaggaggtaaatctttaatgaccctgaatttggcaatggattcttagatacaacaacaaaagtataagcaacaaaataaaaaactagataaactgaacttcattcatcaaaatgaaaaacttttgagcaccaaatgagattatcaataaagtgaaa

SEQ ID NO: 182121 - DNA, 498 bp, Homo sapiens
gagaattacagttaacagataagcaaatgtatttatgagatctatctgagagtgataggttttttgatgaaaattaaaacgaggtaatgtgataatgaagaggttaatttctgaaaggatggtaaggtaaggcatcaagagatgacatttgaacagcaacattcttaaagtgaggcaggtaagttaatatgtggaaaaaaatgctctctgtcaattttggagaaaggatgttcagagtaaagaacaactcatatgtgctgatgcagagtcattgttgactcatttcagttaaactaaagaagacactgagacaggagaggaggaagccagaagggagtgatagggaatgcaatcagagttagttaaaggctgcagcatgcagggtctttgtaagcccatgataaggggttggaattttatgctaactcattgagaacctactgaggtattttcagaagagaagtaatgaaattcatgtgtttaaagggttacttttcc

SEQ ID NO: 182122 - DNA, 291 bp, Homo sapiens
caaataagtgggtgcttagagcacaatgtgtgtggtgtgccaagagcagctgggagccctgggacccccagggaaccccagccccacctgggcatggtgggcatggctggaggaggcctgctggctttgctggagagtgggacatgcatcaaggtggccagagactgggcttctgggtgtcgtgctgtgactgctgcaaagggctcattgacatatggtggggagggccagcgtattttctgcgggcaggacatttgggggatatggggtgtgaccctgtactatctaaaa

SEQ ID NO: 182123 - DNA, 469 bp, Homo sapiens
ggtccaggcctggagggacctttctcagcaaagctcctcagagggagagggaggaagagctgggagatagcggatcctgaagggctgcggcacccgcttccttttaggagccttctacgacctgacacttgtttcaagtttgggcccttacactggagagctagccggattcacttgacaccaagagcctcacatttccaaacctctgctttgttgaaaatgtggtaggaaaggccatagggcatacaacctcaagaataaaataagaaatggagctgggacactaagagacggcttttccaggggtcactaagggggaaaggtgtttgggagagagatgtgtctgctgatggaagagtggtcacaggtgctctgtgccaagcctagggtacacagagggcaagggaaagaccattcggagggagaagcaaaggcaccaggcaacatggactggcaaggaggtaccagt

SEQ ID NO: 182124 - DNA, 289 bp, Homo sapiens
ttagccgtatttagagtacccccgcgggcactacccggtctaccttaggcacaacctgcgtcacaaccaccccaggtgatcttgtccttgtctctctctcacacacacacaccaccccagctgatcttgtcgcacacatacacacacacacaaccacaactgatcttgtctctctctcacacacacacacaccaccccagctgatcttgtgtcacacacgcacccacaaacacacatacccacaaacacacatacccaccacctcacctgatcttgtctcacacacaca

SEQ ID NO: 182125 - DNA, 138 bp, Homo sapiens
tcaaggtttcatgacctcagattctagttttaagaatctgggcagagtagtggcagcagttggggtggggtgggttatgtatagacgaagtacattaccaggaaattaactccaatctaacggtaggactcagttttg

SEQ ID NO: 182126 - DNA, 188 bp, Homo sapiens
ataaaggaagacaaaatgtagccaagaataaggctcatacaagtgaaaagtcctttacatttcttactgagaacttcaaatccagccaacattaaattttgattaattatacaagttataaaattcaaaagctagaaatccaatcattgttcaagagaatcttagccattaatgtcttaaagtacttg

SEQ ID NO: 182127 - DNA, 335 bp, Homo sapiens
tactgtttgcattaataaattacagctccatctcgatctcttctcttgtatacaagagaagagacgagatgacaatgactatgtttggctgaatgcagacaggtaatggaggctggcagtatagcctggattttagggctgatttgaagcctgtcctggggcttgccggggcatctccagttagcccaggggcccaaggcaactgtgaaccttgccttgttccagttggctttaattttttctttgaaatgttattaccatattttaaataaaaacataatgtgtccttgtcaaaagagaaaaccctgcagctgttccccatctcattcagagta

SEQ ID NO: 182128 - DNA, 1672 bp, Homo sapiens
  misc_feature (3)..(5): n is a, c, g, or t
  misc_feature (1230)..(1230): n is a, c, g, or t
ggnnngagggtgcaatttcagctcactgcaacctcagcctcctgagtagctggggggtcataggtgcatgccaccatgcccagctaattttttttctatttttagtcgagacagggttttatcacgtatgccaggctggtctcgaactcctgaccttaggtgatccacccgcctcagcctcccaaagtgcagggattacggcatgagccaccacgcctggcctattcaagaatattgagggacagaaaatatctatatatatccatcctcagaaccttaaatatacaggtcactacagtctttattattttaatttttgtttcttagggtttcttttggtggtggttttttgagatggagcatcattccgtctcccaggctgtagtgcagtggcacaatcttggctcactgcaagctccgcctcccgggttcacgccattctcctgcctcagcctcccgtcttaggtctttttgaaagaggttatgcctctgttgcctagtctggagtggtgcaatggtgtgatcttggctcactgcaacctccacctccaggtcttaagagatcctccctgctcagcctcgtgagtagctagaaccgcaggtgcatgccaccacagctaattcttgtattttttatagagagtgtttcgccatattgtccaggccgggctcaaacccctgatcttaagtgatctatctgccttagcctcccaatgtgctgggtttacaggcgtgagccactatgcccagcccctttttaattttttaaaaatgtttatttttgagatggagtttcgctcttgttgccccaactggagaccaatgacatgatctcagctcactgcaacctccgcctcccgggttcaactgattctcctccctcagcctccggaaaagctgggattacaagcatctaccatcatacctggctaattctgtatttttagtagagaaggggtttctctatgttggtcaggctggtctccacctcccgacctcaggtgatctgcctgccttggcctcccaaagtgctgagattacaggcttgagccactgtgcccggccaaatttttattatttttaaattagaggtggggtctcaccatgttgaccagtttggtctcgaacttctggcctcagtcccttgtcttggcctcccaaagtgttggggtttcaggtgttagaccccatgcccaaccactacagtttttgtttttgtttttgtttttntttcagacggagtcttgctctgtcgcccaggctggagtgcagtggcgcaatcttggctcacggcaagctccacctcccgggttcacgccattctcctgcctcagcctccccagtagctgggactaaaggtgcccgccaccatgcccggctaatttttttgtatttttagtagagacagggcttcaccatgttagccaggctggtctcaaactcctgacctcagttcatccacccgccttggccttccaaagtgctgggattacaggcatgatccactgcgcccggcctcactgccattttatagatgagaaagccaagttccagaaaagttgtgaaatagacggtgactataaaactgggactagagatagtatcctaatgcttgttgattgtttttgtccatactgattgtcaacctaccaatataatctaccatcaagtc

SEQ ID NO: 182129 - DNA, 436 bp, Homo sapiens
tcagcaagactgcagcagctgcacccagacctggggctctggtaggtactaatggtgattatgctccaatttacctaatgaatttggtgggacagcagaaaagaaagctgggaatgtaccaagagaaatttttgttcagggctgttggaagtagctgttagccttgcttccacaaggccattgctgctgtaataagaactgcaaatcagagtgctacaacataaaactgggaaatatggccctatctgaatgcctctgtcctattttccgctggtgtatcagttagtgcaggaagtaaagaatgctggaaagttgaatcagaaattgaaaaccttctaaaatcttacacagattagcagaagtcacttctcccagtctggtatattatttcataatggaccaggatcggcttcctgcctgttggtggctatctgta

SEQ ID NO: 182130 - DNA, 358 bp, Homo sapiens
gtttctccttcaggaaaataaagtcgataataggcttgcagatagacacttaagtttactggccctccctccaaggcttgcatagcacccaggacaaatgttagcgtgtaagccaggtcacaagtaacaagtgggtctttgcacaggtgggaagttaagttccaaaagccacgactactcccaagtcccaccttcaggccaacaattttcagatgacaactttgcagtgaggtatctgagaaaaatcggtgggttgccttgtatgttatactcagataggaatgttaacatctgctttagaagctggatgtcacagaggacatatattttttatttatttaatttaatttatttattt

SEQ ID NO: 182131 - DNA, 241 bp, Homo sapiens
ttttggcacccaacattacttagtattgcacatcaatggcagtttctctgaaacttttctcaatttcttactgaaatactgctacactttggtgattttaaaactccaatatgtacttcatgtcaaattatatcaatgcaatgaagttagacacattcatcaaaagttttaagaatatcaacacagtaaagataagtcatgaatttaaatttgtgattaaatattatcagaggagccaaat

SEQ ID NO: 182132 - DNA, 454 bp, Homo sapiens
ccttactgtatttgtagccagaattgggaaagatgttaacagtgtttcacatagcttcatactccataagtcagtttatccaagtattacttcttggctagcattctgtctgttaccactttctgaatcctattgttccttcaagtactactgaatagcatactctggtatattggacattactgaaaaagaaggattccgtagatagacatttttaaaataggagcttctttttagtaattatctatggtaatgagagcttgtataggaatgcaaacttctagtgagtggaatttttttccccatacattctagctcattgagaaggaattttgttaattgagagaatatacttttgtaatagtttttattgcttctttctctcctaaaatttgaacactgctgcctcatgctgtaacaaaagagttgtcagatgaatcaatgatcaacgact

SEQ ID NO: 182133 - DNA, 225 bp, Homo sapiens
agtctttaacccttttgaggatgtaatgaaaactgtgaactctctacttggaaaaaatatatataagaacacctacaaaattcacatttattttcttagtttacagactctctgaattcaaaacccatgtattaaaagatggaagtgttcagggggtaaaagggaaatctaggaagaatcgacttaatagagccaggaggcaagaaagcacaggctgtgtccata

SEQ ID NO: 182134 - DNA, 111 bp, Homo sapiens
tgcccacccctctaaccaagtaactggatgtagggagagttagtagctcaagttcgaatcagcttccttagcgggctgttgaagagcctctgttgggagagtgatgtcagc

SEQ ID NO: 182135 - DNA, 233 bp, Homo sapiens
acagccaggaaaaagagactcaagctgcaatagggtctgtggcctgtgcttttttccagagttttgaggactttggtatttaaaggggaaagagggcctgggtacggtggctcacagcactttgggaggccaagccaggtggatcacctgaggtcaggagttcgagactggcctgggcagcataacaaaaccccatctctactaaaaatacaaaaaattagccaggtgtggtg

SEQ ID NO: 182136 - DNA, 495 bp, Homo sapiens
actgttcctagaggatccggtattggtggcatgtgacttcactgagtaggtgtctttgtatgtctgaaatccagcgagtgtgtgggactgcccgtgtcagttacatgtgtgcatgtggagacgtagatgttctggagccatgttgtcgctttgtgagtgctgagtggctccgctgtgctcccgtgctgtctcaagagtgtggaccagaatggcccaacgctgggccatgtgtctcccatcgcgtgggtgctcctctctaactgtgtctgtgcatggctgtcggccggtgtcggtgtgtgtgcctgtgttgagtaaatgaggccagagggcagcttagcagaagacctagggcccaggtcacatattctcctggaaaagggatcatggaaggacagtgaccagaaggacagaacaggggaggagagggcccggccccttgaactttggtctctggtattctccctccctgcatcagcccagatgggaaagtcaggc

SEQ ID NO: 182137 - DNA, 544 bp, Homo sapiens
tgggcgtggctgccagctgtggtaaatgaggcaggtctgttcacaggcctcatatcagcgtgctcaagtgcctgttgcagtaggccaggtaggcctgttatcaggcctcttgatggttgcacaggcaccaggagtggtggacagggatgggttgatacccattctccctggcagtgcacttgggctctggtggctgtgctagtagtcggagtagggtaggcctttcctcaggccccccgatagctcctgcagcctctggctgcagcagacaaggcggtctgatccccacgtcctcgtattgtgcatttacacagtggtggcgggtggggtaggcctgtcttcaggcttccagatggcgcttgtgggcaccagtggcagtcagagtggatctatctgtaagccctgggacaaccccccagtgggccactcctcaggcctcctgaagccacatgcaagtgcatgacgacgctggtgctgggcagggtttgaaacacacagaaactgtgggacagggtttctgccagtgacagaggccccaggcagg

SEQ ID NO: 182138 - DNA, 417 bp, Homo sapiens
tgtgtgaaatgttataggaggtagattcagcaggactcctgtttggtttcagtttgatttttggttgtggttgggaggaaggaggaggaattgaggatgttcggggtcactagttagatggtgcggccattcagagcaagagagggaatacaggaagaggaacaaatttgaaggattaagcaatgttataatttcttcaccaatttgtcatcaactgggaaatgttacaccaattattttaactctcttgggaaagaaatgtatgtagtactgaatattgaaaaaagacttgaagtagctggaggagtaatcggaggcctcttgattgggaccgtgattgggaccactagtgatgatttattataatttaagaagtcagttaaagcaggggattctaaaaatgattaacgtcaaata

SEQ ID NO: 182139 - DNA, 399 bp, Homo sapiens
accaatgataaggcaggaggtcttgggaagagataaagaggtagcaaagggtcgccacgacccaccagaatccacagcccacttatgcactcatgacgccattgggacttacccagcatacgtttgttccatgtcgctgacatcccagccggggctaataaaccttaaggcaaacatcagcatgtctgggagaagagcctggcgctgagctggatcgtctagtcataaatgcctcatccagaaaccataaaactcaagtcaccatgtagtaagataaatagaagtctagaaagagcccatgtcagataaaggtaagtttggaaggcgaccaagccttgcttatgacaggagtggagagaggagccatctctaagttgggaacatcctgcagggaaacat

SEQ ID NO: 182140 - DNA, 681 bp, Homo sapiens
ctcaggcagtttggttctagaatatgtactctcttgaactttgtatttatttaacctttaggaacattaccaaaattaaccaccctgatggtgtagttatatggcttagtggaatgttggctgggacacctggagttcaaagataagtcctggatttataggcttagcaactaattcaaatcagccaacctcaaaagagctgagcttatcacacagaaagaccatttaatagtttccagtgggtggtcttttcctttcctgtgactggaatgagcagtggttaatagtatgggcattagcctgtattattttagccctagatttgaattaagatctaccacttactagctctgtaaccttggccaatatatttatcctcagtttccccatgtataaaatgaaggtaatagtcccatttcattaaattgtcatgacttaactcatataaaatgcttattatggggctagaatcataggtgacctttaataagtagttattaattaaagatcatgggaacacaatctgtttctgttatcctggtatctggaaaatcacataaataatcaatagatagaaagtcatatctgataaaaaagagttgctattcttatggaacattttattcaagcttggctaagtattcttccttctttcatcactgtgtctaccacattaggtac

SEQ ID NO: 182141 - DNA, 368 bp, Homo sapiens
aaatgaaatcatatatgactaagagcaaagtcaattaaaatactgtgtaatggtaaaaactgtgataaaccaactgagttatgagcatactcatgacttccacaactcatcccatgcttcctgtgtgcccatttggaagctcctactctattctaggttaaagggaaaaaatatttatgttattgttttatcgatatttaagttattatttttgaaaagtagaaacagaagccttatagcctttaacgtatatatcctgaaacaccttctggggcacctcgttgttcatcctcttccagactcttagtaacccaccataaggatctcagtttaaaaatctgaagaatgattcttctctgaggtcaagg

SEQ ID NO: 182142 - DNA, 168 bp, Homo sapiens
gttggtagtgttttttttttctttcagccctttgaatgtattatcccactctctcctggtctgcaaggtttcttctaagaaatcccttgtaatgttatggggattccctttatgtggtgagttgcttttctcttgctgcttacaaaattctccttgtcattgactttt

SEQ ID NO: 182143 - DNA, 756 bp, Homo sapiens
cgacctccagagctcgagctggctccattcatcacccacttttagtatcattttctggttatcaagaaatgagtagaagttttttttgagaccgagtctcactgtgacccccaggctggtacaatggctcgatctcagctcattgcaacctccacctcccgggttcaagctattctcctgctccagcctcccaagtagctgggactataggcgcccgccaccacgcccggctaatttttgtatttttagtagagacagggtttcaccatgttggccaggctggtcttgaactcctgacctcaagtgatctgcctgcctcggccttccaaagtgctgggattacaggtgcgagccactgcgcccacccagaatttttttaataactgaaagaaagaaggagattaaggaagatggagacaaatatgcaggagaaacaccctctgagggcgatttaacagagcagcgaatgtggaaaggggaaggggaggtgcttcttgggtgcccagtttccttgggaggaacttgggtacgtggtcaggggttgtgggcagttattcccctcgctggccctcagggggctcacaggccaagagcagcttggttgtcgtacatgggttaggggaagacgggagagttagggtgcatgataagatagagaggcaatgtgcaactggatatttctatgtacttggcctttcaaaattcaaaatttgttaactcatgaatacttgtatactgacataatgtacagatgcc

SEQ ID NO: 182144 - DNA, 527 bp, Homo sapiens
gcctgcctcctctccctaccccacgaatgttcacatcctaattcttagaacgtgtgaatatggtgaatatgttgaatatgttacctaacatggtcaagaggtactttacagatattagtaattaaggaccttgagataggcacaatcatctagattactcaggtaagcccaaagtggccaccagggtccctgtaagaggaaggtaggagggttaagagacagcagataaagagcagagactagagtgatgcactttgaagatgaaagaaggtcatgagttaaggaatgctggtggcctctagaagctagaaaaggtaaggaaatgggttctcccctagagcttcccagatgaaatgactgccaacaccttaattttaccacagtaagaccaatttcagacttctgacttgtggaactgcaagactgtaaatatctgtcatcttaagctactaagtttacagtaatttgttacatcagcaataggacactaatacatttgcctttcacctttttcttattcatttgtg

SEQ ID NO: 182145 - DNA, 351 bp, Homo sapiens
ccccttattttacatctgaggctgctgaggatcagagaggttaagtgagatgcacagagccaagttcagccaagttcattgaggaatgctgaatcctgtataagtgtatttccactattctaagcaattctgctatcctgagagaaaaggaggcaaattctaagataggaagaaaagaataaaagaactaaggtgaatgagaatagatgataatacatatatttgtcagcagattgcatgttgatttttggttcccatttaccagtactcacttctcctcacctctatctgctttaacatccctttcttgtcaatgttataagaatatgtggaatggcgtgaacccgggag

SEQ ID NO: 182146 - DNA, 742 bp, Homo sapiens
aaaaaaaaaaaaaagggatcctatggaatacttaaagaaagaaaagaggggggtgggggaagggagagagggatcaagagaggcagagagaaaaagggagaggattttggtagtcaaatttgagaaagtttgcattccactcttgagaatgtcacattctattaactgttcgaagtttccaaaaagtccaggagtgaaaataaagctgcttaatcatttttcccaaacttggacatgagccctttgttttttttccataatgtatgtaatatgtatgagaatactcggccaggcgaggtggctcacgcctgtagtcccagcactttgggaggccagggcaggcaaatcacctgaggtcaggagttcaacaccagcctggccaacatggtgaaaccccgtctctactacaaacacaaaaactaaccgggcgtggtggcgcacacctgtagtcgcaggtactccagaggctgaggcaggagaatcgcttgaacctgggaggtgaaggttgcagtgagccaacattgcataactgcactccagcctggcaacagagcaagactccatctcaaaaaaaaaaaaaagaagagaccataaccaactgaacaaccatagaacaaattaaaatacaatgagggggctatttataatagacacaatggtagtttcctgtataaaagcaacaagcaattagacattgttttttattcacttcataagaacaattttttttgggcggggaggg

SEQ ID NO: 182147 - DNA, 348 bp, Homo sapiens
cgagtgtggatggttttaaccagttctctcgatttgcctccctgtgaggtgtgagttgttgccatcattaacccaggcctatctgcttttggggttcagagttggaaccatctgcagggagtgtagatagaatcatggggggggacagagcacaccctagtggagcctgccaagactcctcattgagcccagaaaactgagatacaggttagaattggccatttcatcgcagtgtttatttcatgttttctcatctcacaggtgagttttctagaggaaagatgatgaagtaaaattttacaacaatttttgaatacttttcctaactgtcaaatctccgtctggatc

SEQ ID NO: 182148 - DNA, 217 bp, Homo sapiens
cggattccagtctcctgtatgttgcatctgagacggtcataatttctataatgattctactttgtaattctatttcttgtctaaagtctgccagttcatatttcacttccttttgttctcttcctgtttccccttgaagaaggcacataccttcttatgtttctgctttgtattcatcttccacagtggcaaaggattatcttttaatgtgacacgt

SEQ ID NO: 182149 - DNA, 804 bp, Homo sapiens
gacaagacagaccacgcagtgatgagaaatacaaatcagaaagaaatgagcacatcttaaataaaaataagaatactaaaaaatactgaagaaatatgcaaggtaactttggaaataaaggctaattttattataaggtgaccaaagaagaagcagtatgactaaaatttctactgaggacagactctagaaaattaaaaaacaaagaaaatgaataaaataaacataactaaagaaatgcatatcaaagcataataacgaaaaagattaatagctaactacataaacataaaacctttcatttggcaaaaaaaatcctataagcaaggttaaaagacaaatgacaaactgggaaaaaatatttgcgaatttaccagcgttaaaggactaatctccttaacatataaagtttctaaaagtgaagaaaacgaccagctgagcagcaaaatgagcaaaagactatataaaactataaacagctctacaagaaaaaatgtccattatcattcataattgaggtaagctcaaaaattgtaactatagtaaaataccatttctcaattggcaaataagtaaacatccacatttaacaacacattctgtttggaaagttttaagaaaagagatactgttgtaaactgctggtgggaatgcaaaatgttatttttctgtgaaggaggatttggcagtatctagcaaaattacacatgcatctaccatttgatgcaacaatcccacttctaacaatttatcttaatgatactttacatatgtacggaataatgcatgaactataagaggatt

SEQ ID NO: 182150 - DNA, 328 bp, Homo sapiens
agaggccaacagtgacagtggaactctcaccacaacgaaatgccaaaaacccagagtacccaagtatcagccagtgatggtccccacactgaatgctgaaactgcaggggaggcaatggtgaaccccaaaggccaagttaggggccactgaacaatgtgactttggcatctcagggtcagcacagtaagggacttttcacgaccaagtgtcctgccttaaacagttcttgactctgtcctgtcctgtcctgtgttatatcatgtcctgtcccatcttgtcttgtctttgtggtcaccagatgatgcaaggaaggacaaccccaaaatt

SEQ ID NO: 182151 - DNA, 343 bp, Homo sapiens
ctctacatctttgcgtatacaggggcatagcatagtcatgcaaaaccgtcttccttcaactcatagttctctccttcctcaaccagaagccactctgctttgttgtgaaaacaaataaactactttcttacaaaagaaagaccaaataacctgaaaagctcaaataaaatccaccttatgatacaatattaagaaacagaaattttcaatggagaaaatcccacaccagactgaggaagacagatcagtttaactggagtctctgtttgttttatatttcttttctactctccactcccatttgccaacaaaactatgctctctcacaggggacaggttcacc

SEQ ID NO: 182152 - DNA, 319 bp, Homo sapiens
gagaagcagcccaatcagtcttcaaaaggataagaactggtagcaccaggtacatttctagaactagggcaaggggtgggacaggagagaaggtcgctaaaacaagaaagtaaaaactgataagcagttaaatcattagatcttctctacactagcagaaatattcagtttcctctcaggaaagggtaaaattcagaacttggactggaagacaacagacacagtcaacagtatcaaagatataggactatgtacacattagaatgctaaatgtagagcctcctctacatttaaaggaacaccagaagccagatcttta

SEQ ID NO: 182153 - DNA, 402 bp, Homo sapiens
ttacttaagaataaactatgacaattaaagttgcatactataaattctaactcactaaaataacaaaacagtgtgatagctaaaaacccaacaaaagacataaagtagaatcataaaaaattctcaactaatcaaaaggaaggaagacaaacagagacattttaaaaagaaacaaagaagatgagactaaaagaaagcaaagacaacggactataacctaactcgttttatcaataatcacattacatgtaaacggtttatacatccccaattatgagacagaaatagactgatgaaaacaagcaagatccaaattttgctgcctgtaagaaataatactttagatataaagatgcaaataggttaaaagtaaaaggatggaataagatataccatgcatgt

SEQ ID NO: 182154 - DNA, 471 bp, Homo sapiens
gttcacctttacactgagggtgtccagctttatgagggaacctactagatttctcatttcctgttgcccatactttgtgtaatcactaaaatagaaggttatggtctgctgaatttggcaaaaattctgaggaaaagctggctttggcagttacttcctaggattccagcttttgcttcattttgaagagccgtaggttccttactttcgtgcctgctcagcaatatgtttaaaagtattttttataaatatatttacccagtatcttggttgcttctgctgaaaggacttttcagaattatctaatccagcatactgccaaaaacagagccctgaattagtttcaaatacgcacaccaacgcactccccctgccccgattctgccaacgcgtgaactgtaagaccaaagctaagcctgcctttaaggtggaaggaaaagaagaattgaggtgagccaggcatggtggctc

SEQ ID NO: 182155 - DNA, 494 bp, Homo sapiens
gacaacagtgagaccccacctcttaaaaaaaaatagcctacatttgaatgcagtctttttctattgcacgttttattcaatgcaatttttttttcatggtggtaaaaaaaaaaaaaaaatagtgcctatgtaataggaactacctataattccctcagaagctacttgtggatttacaaatcaagtgttttagccgcagctctatcccagtgttactgaactaatcacctctgtcccccaaaccccagtttctctgtctgtaagattgtgtagtcaagtaaaatttaaactctttgtgctactgaatccaataaagaatgaaattcacctagccttgtaactgctgttgtgctgacaaatgagcccagctggtaaaattcttattggcagagatttctatttttccttttaatctggaaaattccacaagacctcacaaaatgcgcgagtgagaagataagaagagggaatcactgtgacatctgtcctctttt

SEQ ID NO: 182156 - DNA, 628 bp, Homo sapiens
tggctactcagtgtgctgttttcaaacttttggcaaataaaaggagtttcatgtcatgtctatttgaaaccctctaatggcttttttttgttgttttttgagatggagtctcactctgccacccaagctggagtgcagtggtgcaatctcagcttactgcagcctccacctcctgggttcaagcgattctcctgcttcagcctcccaagtagctgggattacaggcacatgccaccacgcccagctaattttttgtattttcagtagagacagggtttcaccatgttgcccaggctggtcttgaactcctgacctcaagtgatccacccaccttggcctcccaaagtgctaggattacaggcgtgagccaccacgcccagcccctctaatggcttctgaatacacttagaataaccatgggctccgagacctaggatagggccatggcccgggccagcctccctgcctcatgccatacttctttattccttgcttactatgtttggtcagccatactggcctttctagtcctggacctagtcattctagtccccacctcagggcctttgtaattcttgtctcaagcactgttcccccagtttctgagtagctggctgctgcttctcct

SEQ ID NO: 182157 - DNA, 155 bp, Homo sapiens
cagcttgcaggagcagagagtcttttttgcttctccaggaaccaagtcctgttctcccgtcttgcctgctctctgctgccctctggaggtctgcagtggagtcaggcagggagctgattcagggacgccacagattatgtatcctccacttccta

SEQ ID NO: 182158 - DNA, 718 bp, Homo sapiens
ggggcgggtgtgggtgtaggtgcagtagagatgggaacaaagtagccttgtttgaggcattcttctcttgccacttgcctttcagcatctgcattactaattccacaccttatttttccttctccaaaataatcactgtctgctcacagcatcgagtaaaaagatacattgtcatggtatatacctggagaaaccagttgattctttgttgaaccatttcttttaatttctgtaaataagtaattttatggtcacattgtaaagcagagaaactgttgatattttacctttatttagatttttgttttaacttgacctttttcctttggaaagcgttgaacttgtttagctaactactcctattaggggagcttaacttgggtaaagtcaaaggcccactggctgtttctcatggtggcctgaagccccgctgctttccagtgaggaaaagaaccctcagcacgttactgagctttcctcaggtatttttttctctgtcacctactttacaaatacagtcagactaaaacattaaacaagaagtttaagggggaataacattgggatttgaaaagttgtatgtgattaatttcttgcatgcaaatcaatttaagatttcttaaatatcttcatgcttttcttggctggaacttgggtaaattaacctgtaattatgaattatttagtttaactcaaggtgcatttttatttcacagat

SEQ ID NO: 182159 - DNA, 686 bp, Homo sapiens
agatttcctatctcaaaaggtagaaatcagaaggaaagtaggactgataggtcccaaataagtttaaaacttagcaaggcaaatccccttaggtcttaagacttgaaaataatccttcttggtttgatgctctgctctccagatgcacttgagtggcagcgtcaccctcattgcttcatgtggtggccctgccccttcagctcagtggagtgccatccacagggctctctgcaagagccctgcccacacaactctgcttgccagtggtcctagcctttgaaactgaagtgaagacagcctgctccctgatcgccacccatggtgggtgtgatgagagtagaagccctgatgatcatcactgaattgcctttggggggatccttcttcccctttcttgaaggataatgcgtagtcacagtcttcctttattccatttcattttctctgtttcccttagtcctagctggcagtatttctgtttgcataatcccttctctatcctggcttctattgagatggctgattaggcctgtggttcacaccaacactaccctccttatatggtcagtcagccacactgttggtgttcccttccaaacatgctttctcattttttgcaatatgcacaggcagagaatgttccaagtaagttctggttcccttttgcttaactattccttctgcaa

SEQ ID NO: 182160 - DNA, 740 bp, Homo sapiens
tgtcgattagaggatcccccgtggtgtgtcatgcagaagacactgctgatctggaggctcagaatcacttgtctataccacttgtctggaggaattggatcttgtgccactcacgtcccatgaggaccatgacttcttccagcatgtggaaatgcacctgcggtctgaacatccccctctctgtgggcgggaccacctcagctttcgctcctactacttccctgtgacgaatgtgattgatggagacctctgtgagcagttcaattccatggaacccaacaaacaaaggaacgtctctgaagaactggaccgaaccccacccgaagtgtccaagaaactcgaggatatccggacccgctacgccttctgagccctcctttcccggtggggcttgccagagactgtgtgttttgtttcccccaccaccatcactgtcacctggcttctgccatgtggcaggagggtgactcagtcttcctttattccatttcattttctctgtttcccttagtcctagctggcagtatttctgtttgcataatcccttctctatcctggcttctattgagatggctgattaggcctgtggttcacaccaacactaccctccttatatggtcagtcagccacactgttggtgttcccttccaaacatgctttctcattttttgcaatatgcacaggcagagaatgttccaagtaagttctggttcccttttgcttaactattccttctgcaa

SEQ ID NO: 182161 - DNA, 165 bp, Homo sapiens
atttaataatacaatttctaagacattcctaggaaataaggatgtaccctaaaatttagcaatacagattttttgtggatgagttgttaataataacaaaatatataactaagtaataactaaagaaactaacctatgttgagcacttcctaagttccctgcctt

SEQ ID NO: 182162 - DNA, 503 bp, Homo sapiens
gaagcctcctggctgtgtcagtgaatgtttacatgagccttttaaaagaggggaaaggtggggactgtatttagaaaaaaagtttttttgaactgagtttggatgttgatggtgataattacgtaggctgctcaacaccctgaaatattttgcctgcctgtctgagaaagcaaagttacgtctcagtcttttcaaaatgctgatcagattatgctttcagttgttaattggtgctgtttagcacatatttcatcatcagtctcactgactcaaaagcctgtgatgcactgacaacggtgtcagtgtaagaagacagccttggtaagcaccaggaggcctcatctttatagttttctgcatctagcaaattgtatacgattatttaaatagcgatagttctgacaccgtctatgtagatggcaatattgcagccttaatttgccctaacattttactgttgccaaagtgttatcacaatattatcatatctaattttacaaaaa

SEQ ID NO: 182163 - DNA, 532 bp, Homo sapiens
tctgtgatattctaatttcccacttttttcatattgtttgttttccacagtggactttgaggacagatctatcccagagtcctccactaaaaccaagaagatacatatatacttataaatgtagttaatttcttggaaacattgaagatttatatgttctagaaatcagaaggtgaaaaggaagagattgagatagaccagtgttttatccatgacaattccacctgctttctcagggaaggctttggactgctagcagacatgactcctgaaaagaaggcgaagcacctggaatatctcatatgcctattcgatcatttccaaactaaatgaagcaagtaaaacttttaaaaaaacaaagcttaggccgggagtggtggctcatacctaatccagcattttgagaggccaaggcatgaggatcacttgagaccaggagctcgagaccagactgggcaacatggtgagatcccctctctattaaaaatcatcatcatcatcatcatcattaaactagaaaaaaataaaactg

SEQ ID NO: 182164 - DNA, 139 bp, Homo sapiens
atagtggtgtgtgcctacagtcccagctaacctggaaggctcaggtgggagggtcactagagcctggaaagccatggctcaatgagctataatcatgccactgtgttccagcctgggcaacagactgagatcctgcctc

SEQ ID NO: 182165 - DNA, 324 bp, Homo sapiens
attatcttcagccagaaaaagagaaaagtgtatgtatcatatagtggttttcttttttggagaaatactatttgagatgtctttagtatttaggtaggatttcttattctctggcagcaacacaatactgatgataattgaattagtttgtatagcatgtcattatttttgtaaattttatttaagagattccttcaatatttaatgaataggtttgtttccttacagcagctctttttggatagataatatgttcttttcttcatagtagctctttttggatttcctgtgcattaagatgaatttaaaagaaatgctttatcg

SEQ ID NO: 182166 - DNA, 461 bp, Homo sapiens
gttttttcctaatacgtaatatctttcatttcatttttctgtattattttgctagatagattctttggaggttaattgaagccattatggtgggcatccttttcctttcatcctaactttaatgaaaatgatcctgtattttgctgttggatatggagttttctataggctggtggtagttgtgagttatgttgatttgtttattgttttcgttgttgtttttagattaaagaagttctatttctagtttgctaagaggttgtagggatgtgtgtgtgtgtgaatgctttcacttgcatctgtatagatgatcatatgggttttttttaatctattggtgtggtaaattacattcatagattttcagttgataaaacattgattatgagattaacgcaaattcagcgtatttttttaattactggatttgaattgtaatgattttatttagaattttggca

SEQ ID NO: 182167 - DNA, 547 bp, Homo sapiens
tcagccctcaacctcctcagaggcgccaatgctgactgctgtcagccagcccagaccctttctccatatgctgcccgggacgtggactctgtgactgtgaggcctgcccggctgctttctgcttcccagctctgacaacctcgccatgaaccctcctagaccctcagctcctgcaataggaagctggctgccaaaggccaggagggtccctgaaaacagacactgcattaaagaaaaagctcctggaggactcctgaagcctgaggcagccttggggcagcagtggctcatggtttacattggaaaggtaagggaggtttctggtttcctgttttataaatttatgtttttacttggtattttgacaaacatttgtatttgaagcacactaaacatctagtattgccgttttctacttggctttagcaaacaagcattaagtgaataaactgttccactttcttccttcccaggtttatcatgagtaaccgggtgctttgcttctgtgattcttggccagtgtcggtctgtttcctttgccattgag

SEQ ID NO: 182168 - DNA, 638 bp, Homo sapiens
gactaaccatagcaagatatcaaggattttgagtagctatgccgtctcctgaatacaagcatctcttcttaatttctcccgtttgagaaacagaacatcctgtgtttgtaagtttataatccaacccatcttttacttgctcagacctccactaacaggctgaacaaggtgcagactttacttttagaaaataaaacaaaacaaaaaaacacaaaaaaacccaatttctgctaaaagtagatttcatcttgctgacgattcttaagtaacttaaactgtccctctacagttcatctttgatacctcctactcatcgctattatcttgagttttactagcaatgaattctagcacacaagaaaaaaaaatcagaaatgcacccttcgtttactaattacaaaatcaacagacctcagaaagacgggacattcacttctatgcactcccctcaattcaggggtggaattgggttgcatttttgtatctgtgagtctcagcgtgtgtaaactcatgtcctcacagatgcctgaggttttctgctagcccagctgatcttgaccaggaatttatttaatgtaactgagtaagtatgaagtcttatcagggctattggagaaaactggtagataaatgttttt

SEQ ID NO: 182169 - DNA, 456 bp, Homo sapiens
cctcagcctcctgagtagctgggattacagctatgcaccaccacacctggctaatttttgtatttttagtagagctgcggtttcaccatgttggccaggctggtcttgaacacctgacctcaagtgatctgcctgccttggcctcccaaagtgctaggattacaggcatgagccaccacgtctggccatcagcatctttaaaagaaagggtatacaaagcacggagtgccagagcctgcaccccagtttccttattgtctttctcctggcactaaggcagcagtgacaggccaaattgtccatgatgcatttatcaggaggtaagtgtttcaaatactgtttggagggatttcaggggaaacattttcagggacttgacttgcaggaatgatttatgaagaaatatgaaaagagctaaatatatatgggctggcaagtatgaaaagagcaagaaag

SEQ ID NO: 182170 - DNA, 423 bp, Homo sapiens
tacaggatagaataggacttgagactaactcctaactcttagcagttacactggatgacattagagcgaatggttctttatgtctacattttcttcatctgttagatgtaataatttccatatcaactatgatgtaaagtggtaattccaatgaaatgttacatgtgggaagtctttgaaatgtaaaaaaaacactgcagatactgaagcagttcagagaattaaaaaacactatgaaaacacagcttggtaaataatttttttttcttttgagacagagtctggttctgtcatccaggctagaatgtagtggcacaatcttggctcactgcaacctccgcctcccgggctcaagcagttctcctgcctcagcctcctgagtagctgggatagccaccatgtccacttaatttttgtactttt

SEQ ID NO: 182171 - DNA, 520 bp, Homo sapiens
tcctcgacctgaataactcttctccatccacatcctgttttccaattctccttccaaatgcagcccaggaaggagcccactgtacttgccgggcagcctgtgcttctcactgctagagcactcatcgctgtataggaattgactttcccatcaccccactacactgaaactccttgggagcagggactgtgttttaatctacttttctttctccattttattcagcagcattagacatagttgaccactctgtccttcatggagctcgtttttctctaggcttccatgacaccatgttctcctgggttacctcctacttcactgactgttcctttttaataccttggatgactgctcctcctctgtttagcctcaacattttcatatccaaactccaccctgggcccttttctgtactttatttacatactctccctaggtaatctcccccattgttttcaatgccatctatatattgctggcccccagatttctatctgaatctaatctcctccttggg

SEQ ID NO: 182172 - DNA, 654 bp, Homo sapiens
ggtcctgagcgaagtgacaggtgcagttccctcttgtgaggctcggaggcagagggtcgttgcgagcgtccatcagacgcaaaaaatgaaaaataaaaatacaaaaatggtgtctgtgggagagtttttcaccggagaattggagtactccggtggtcgtctgactttctgttttggttcacgcgatgcaacagttgggaagtattttcttccgggcgtgcactgcatctgaagtccatttgtgggagaggccgaccagaaagccttggacaagaagcgcagggtcctgagtgtccattgcccacaggatactcggctcaggagctttgcggcgtttccttagaacaataatgcatcgaggccttggggactcaaagccatctgtagtgattgatggagcgtaactctttagaggaactgaaacatgggcaaaactttcatgagacatttaccagaagtgcttgaaagtttctaaacttttttttttcctgtttgatgaactcttcttgcgtgttagtcggcttcggcttgtctcattatttcttccattttgccttttgactttgaaccagcaaggatcttggtgtcccctctttttgcctttgtttttggcacaaaattagtggttctgtgcgcaaatggaaattttcgttt

SEQ ID NO: 182173 - DNA, 396 bp, Homo sapiens
tattcagtgattcatttactcatttggcaagtatctatttagggcccacaaagggagaggctgtgttgggttctgggagtagacgctgggagtagaggggtaccctgctccctgctggggctctttctatgttgggccttgggcaactcacttgacccttctcttatctgttttctcatctgtggaatagggataacactagtagctgtgtcataaggcatggagatttgacaagaaagggcaggtaggatgctcatgatattgcgtggcccaggtcaaagcttagtaatgttggcttttgtcatgtaggggaggaatatcttttcttctaccctgttaggttctgtgatagagcctatgaattaaactgacaaaagacagattaataggagaaaa

SEQ ID NO: 182174 - DNA, 500 bp, Homo sapiens
ctgtcctgcccccacaactggcgagtggagcctccatcttcgaatccaaacaattcgatctcactctattagagataatagaaaggtcatgagttttgacatcagaaactcacaagtcttaatcacacattgcctgtgtattaggtggattgtaaactccctgagggcaaagtctgtttaaacactgcgtatctcagaacccagcacagtgcccaacatttagtaggcactccacaaatatttgatgttgaacacataaaattagctgtaatcctagcaaagttaacttctgagtccagcgttcctcttggtgaaacaggaggaatcacacctgctttaaaggagctgagaggttgactagaacggagggtgaggaggaagactccagactttccttgcctgggcccaaattctggcctggcaatcattagctctgtgattttgagcaaataacttgtctttgcctctgtttcccacaccagcaaataaggacaataata

SEQ ID NO: 182175 - DNA, 295 bp, Homo sapiens
ggaatatttacccaacacctgtactgcattgaatattggaagcaaataacttggctttgatcttataggctcacagatggaggaacgtaccttgaagttcagatgagatttcggacttttgagttgatgctgaaacagcttgagatttttggggactactgagagatgataattgtattgtgcaatatgagaaggacatgagatttggtgggcataggtgtgaaatgacattgtttggatgtgtttaccctccaaatctcttgttgaatgtgatcttaaacgttggtgggcctag

SEQ ID NO: 182176 - DNA, 559 bp, Homo sapiens
acatcttagagtacattaggcgcgtctgcgtgcatgtgtcgcctttttgtaacccaaatccagcattcttcagcttacctttttcatgtagcactatgtcttgtatctcagtccctatcaggatataaaaagcatgcttctgttttattggcggcgtcctgtcatgtggattctctgtgcttgctaatctgtgttgtaaacaaaacacagcaggcctcagggatggggctgataacaggatcaaagcaggagtttataacagcattttgtttttgttgatttattttcatgggaaaattcaatttatgcttagtgaggctggcttttcacttgtggagcagatataaagttttcttgatagaatgaagagcgttaagtaattggaatgtatacaggtgctatgtggttgttgggaaaactaaacccaggtcactcccactcctgcttacaccctcacaggatgaagctcctgctcggtccactggcctcatgccccacagcgcacccatccccacacttcatgccccatgtagacgcagacgcgccttatggtaccaag

SEQ ID NO: 182177 - DNA, 475 bp, Homo sapiens
cttggatctcagataaatctttgcattttagacatttaagttgattctaaacctgataaggctttagagactcttgaggtaaactgattggattttgtatgtaagaaagacctgaaatttatgtctgcagctttttctcctttatatcctcaactaacaatattttggggtttctatgattctttgctaaaatttggattcccgtttcaatttctcttgtgcataatctgtaattattttctctgtagttaccattggaatgacatactgcatcctatagttataccatccactttgaaatcaatgtgaatttaacttcaattccatacaaaaacttcttttccacaggtacctttctgcttcacattattgatgtcactaattgcaactttatacatggtgtacatgttaacagaaaggtattcttattgtaatgtaaatcttgaagaaaatgagagtaaaaaacaaatttcac

SEQ ID NO: 182178 - DNA, 266 bp, Homo sapiens
cttttgaaacttaatgaacataatcacaatttatgtcgacttcatttctatcaggtagcttgaagtggtgccgaagttaatttaataaaatcactcagttttacagataaagtaattgtggcctaaagggacttggcaagagtatcactgagtagaatttacaatccagaactaacagacttcttcatgatacgttaagtgggtgttttgtgtcctttataattccattttctattgtatctaacaatcccttcatattacaaact

SEQ ID NO: 182179 - DNA, 229 bp, Homo sapiens
gaaagatagagaagatgaaagtgttgaaaggacctgccattactgactcaaagctgaaaccacctcaatagaaatagagaaaataaatttagtttcttaaaaggcagccctgaaaaccacaacagaaaaagaatgtatcctacgaaacagatgattctaaattattctaaatcattccaggttgataaacatacccaatgagactaagttgtcatagttctccatcatc

SEQ ID NO: 182180 - DNA, 261 bp, Homo sapiens
aaatagaaaacaaaaaggaaaagaaagagcagaaattcaaatgaaaaagcatcatcaggagcgatgaagcagatttgaaacggaaccaaatgaaagctgtagaaatgagcaatataattattgaacgaagaaagtggatgaatgaacagcgcattagatacagctgaagaaagaatttgtgtaatagaagctacatttgaagaaattatctagaatgtagcacagagaagagcacatggaaaatgtgaaagcaagggtaag

SEQ ID NO: 182181 - DNA, 202 bp, Homo sapiens
acttaaagcaaaagccacctccaatctcatggtagagctgagaggaaaaaagatacaaaaacaaatttagcctatatcacagtctcacctgaagtgagtctagaggggaacgataggaattcagtatcttgcattacaaattaataacttcaccttaccaaccagtctgaactactttttcatctgagtgatttaagagaga

SEQ ID NO: 182182 - DNA, 577 bp, Homo sapiens
atgcaggtttttaaaaaaattccttctagaaaggggctctgaaaggtactctcctcaatttggacaaaaggcagtgtctcataaccaacaaaatcagctacacgggaagtcaggagagctgggaagtctggggtgtggggcaggtgctgcaaatgtactgcatggcccttggcttccaggtcactgcttaaagatctgctgggggctctgggtgactgaagaaggcacaggccccattggaggcccactcagtgctcacccaggacccctccgcactgtccaaccacgggtatcttttgcaccagcttgagtatgacggaccgccatccccccagaattcctccatatcaaagtccagccccagggccaatatttcactgcccagactcggtgacatactgactgtggccgtcacacagttcaatgcagacctttaacatatccgaccctccactttcaccatttttataggggactttgaaccgcactgtgaaaaattatctttgcatggacttaaaaacaactaatcacttcccttctttcttaccatcaaaagcttatagaatcaaaatcaggg

SEQ ID NO: 182183 - DNA, 591 bp, Homo sapiens
gtcctgctccagcagagtagtagttgattgctcacttgtagcacctgttccatcctttactgtagggtttatctcaaaagagaaaagtgtaataattaccctaggaaagaatactagtaactggggctgggcttaaataagtgcctcccagtataaatggacaccttcttttcaaaaaagattttatactcggcctggagaacaacctcagcttatctctgaaagtattatgtgttctctctctccctctctctcaaaatattagcagcggcttcagaatttctatttacgtgaggcgctctgccttaatctggttccgagagtggccgagggacttgtttgaagcaccctttgcactgcaagatgagatgtttttagagtgagcttatttggattggtttggagctgagggtaatgatgaggacagctgaggcctatcccagccactctggtgttctcaggactaaatatcaccttcagtatttttagatttcttgccagcagataaatttagaagcacttgcaatgtgcttttctgggtctgcagcatggaagtgttaagttcctgtccagcttcacctcacaggtggc

SEQ ID NO: 182184 - DNA, 427 bp, Homo sapiens
tttcattcccagttcttgatgctatcttcttcacgagaacagattcaaatttgggaccattttctgttcttattaagaggaaagtggtatcaattttaattaagtccaagaacactcattaatagaaggcatttttcatctacctacaaacatagtggaggccgtgtcggtgactcagaacatttaaataaagggccctccagctctgtgtcggctgatggaagatctgggaagggcactgcctgaacaatagcaaccattagaactttattcttcttctcatgtgcttcttcagatctcctaattcagatattatatcccatcaattttttattagagcataattcatttactgagattgcttcttttgaaagcatttggcgataggatctttcttattgaagatgcatggccaagaacatagaaa

SEQ ID NO: 182185 - DNA, 200 bp, Homo sapiens
gagggagatttgagacacagagatgatggaagcagagatgggagtaatgtggctacaaactgaggaatgtaacagtcaccaaaagctgggagaggcagggaagtatcctcccctagagcctttggaaggagtgtggccctgctgacaccttgatttgggacttctggcctccaggactgtgactgtgaaggaatactttt

SEQ ID NO: 182186 - DNA, 270 bp, Homo sapiens
aagtagagacgggggtctcactttgttgcccgggctggtctccaactcctgggctctagcaatcttccagcttcgcctcccaaagtgctgggattacaggcgtgagccactacgtgcacatttttgtgtgtgaccatttatggtacttcctctgtacagagagtctgtaacattttcaaagattctcaaaaggatctgcttgataaacaagattaagagcactcttcctagattatatccaatactaaacttttaatattccatgatttt

SEQ ID NO: 182187 - DNA, 571 bp, Homo sapiens
ataaggattttgatatttatactaaaagcaatgaaagtgattgcaggtttttaaacctaggactcacttgatatactagttaatctggaaacattgctctcaatgtaggtggagagaacactggagaggagcatgaatgaaggatggagagaacagtgaggaggccactgtggaatgtcaaggtggactgacaagtggggtagttgagaaagagaaaaatggatggatccaaaaatacaacaggacagaatgaatccagaagtactatttcagaacatagaacgggttagatatgggcaatgaggaagagggaggtaaaaaggatactgtctaagttccttgcttgcataactgggtgggtggtggtgacgttatttagactaaggaggtgatgcttttgtaatgcatttgacatatgtccccacgcaggactagtttcctgagtctcagcttgaggtattatgaggaataactatctgatccaaatctgtggtggacaattagatcattcctttgataatatccatatctgaaaatgccataattgtttatttaaaaaaacagtagtccc

SEQ ID NO: 182188 - DNA, 568 bp, Homo sapiens
ttacctgaacgaacgtgacatttttctctcccaacagaattcagcttagagaactatcatcactggacaatgcaagcccatgagctgttccggtattttcgaatgccagagctggttgacttacgacagtacgtgcgtgctgtacagactaacacgcttgtcgcctgtggaatgtcaaggtggactgacaagtggggtagttgagaaagagaaaaatggatggatccaaaaatacaacaggacagaatgaatccagaagtactatttcagaacatagaacgggttagatatgggcaatgaggaagagggaggtaaaaaggatactgtctaagttccttgcttgcataactgggtgggtggtggtgacgttatttagactaaggaggtgatgcttttgtaatgcatttgacatatgtccccacgcaggactagtttcctgagtctcagcttgaggtattatgaggaataactatctgatccaaatctgtggtggacaattagatcattcctttgataatatccatatctgaaaatgccataattgtttatttaaaaaaacagtagtccc

SEQ ID NO: 182189 - DNA, 394 bp, Homo sapiens
gaggacacaggtttcctctaggttgccaaaagtggatgatgaccccagctcagcccagctgtggatattcgctctctgaaaacccctgaactgtttgctctgtgcaatttgtcccaaacgtgatcaactgtctggctctaagacctggtcttggttggcacctcatgattattcccagatgttctgcggagttttgccttgttagagtctaacctgactagaaattcaggctccccttccagctgggctgtgagttgtgtgcacaactggggacaccatagagagagcttcacagccaggagccaaggatggtgtgaagaggctgtgctctttccacctgcatactgtctgctgcctgaggtctgatgcaccatgtgtgtgcctgtgcatgtgc

SEQ ID NO: 182190 - DNA, 544 bp, Homo sapiens
agtgattagaatgtactttccaaacataaaacattgtactgtaggagtttgtcaaaggggattaatattaccacatatctgtagaagaactttatgaagaccctgtgtatctctcaaccttaatgactaagattgtagatatgatagaaatctgtaaatagcatggaaaagcaaatttattgaagtctaggacaactgcattacccagctgtacatagtgtgttctttcttcagagattgcaataaatgaaaaagatggttgccatagagataaactgtgccctttggctagctgattagaagaccatttcaacctactataagagaatatattttgcctgtaagtggtatttacagataatttctatcacagttgtaacccaagtttttaaagctgaaatgttaaacctataaatgttgaattccataaaggcttttgttcctttagtaaaacttattttaacatttatgtgctttttgccttggaaaatgtgtttttaaagttcttccccctaggatactataaaagtcttccttgaaagct

SEQ ID NO: 182191 - DNA, 360 bp, Homo sapiens
ctcagttcctcacactggagtggtttcacaggatgattagaggtattaggccagcagtagagatgctagtttatatgtaatacctagcgagaggaatacgtttgctacacaatcaacacttgaagtcactaaaaaaaaatgactttaaaaatctcacaagaatgactaaatataccaaaaatcagcccagaaacatggcacagtatcatggtaagtcactgcactgaggagttggcagagcagggctggaacccactgcctgataccaagagaagacatcaaacaagggtttctcctttcaatgtcagccttttcctatgaaaatgacaaaaaacaatccgtgctctcctaaccatggtc

SEQ ID NO: 182192 - DNA, 806 bp, Homo sapiens
tgcagtggcaggatcatggctcgttgcagcctatacctcctaggctcaagcaatcctcctgcctcagcctcctgagtagctagggaccacaggcattcaccaccacacccagctgattttttgattttttgtagaaagggcacctccctatgttgccaggctggtctcaaactcctgggctcaagtgaccctccctccttggcctcccagccaccacatctttcaatctcctctatctttcttccctggccacactggcctttctgctggccctcaaattggtcagtcttgtaggccgggtgtgttggctcacacctgtaatcctagcaccctgggaggccaacgctggcggattacctgaggtctgcagtttaagaccagcctggcaaacatagtgaaaccccatctctactaaaaacacaaaaattagccgagtgtagtggcatgtgcctctagtcccagctactcaggaggctgaggcaggagaatcacttgaacctgagaggcagaggttgcaacgagccaaggtcgcaccattgtacgccatcctgggagacaaagtgagaccccacctcaaaaaaagaaaaaatggatcagtctcattcttaccattatacttgaaatttcctccagtaatgctctcccttctactcctcacgattccctcacatctcagccacaatgtcatcatctcagagaagccttccctaaccacctggtgtaacacagcacacctcattactgtattctcttatccagtttcatttttctttataccagttatagttatctaaaattatattgtt

SEQ ID NO: 182193 - DNA, 496 bp, Homo sapiens
catccaatccttcatcaaatcctgttggttctatctttgaaaatatgaaatatataaaaaccatatctcactactccacaactaacactatcctatctcagctggatgagcctcagctggataagcaagagcttcctacctggtctccccaccccacattgtcactctcaacagacatcagagtgacctcgataagttggattatatcactcatcagaatcctccagtgactttccatctctctgacgcaaaagctagtctttgcataaggccttacatgagggaccaggttacctcatcttctaccactcctcccccaacttactctgccctggccacactggtcttactgcttcttgaccaaggtaggcgcagcccaccttggagcatttccacacactgtgtcctcagcttggttcactcttcccgctgatagccgcgtgctaccacctcgatttcttcaagcctttgctcagatgttaccttctgaatgagg

SEQ ID NO: 182194 - DNA, 350 bp, Homo sapiens
ttcatttccactgagataagcattttggtattcagcttttatattcactaagaattaagaaatgctgttttaaaagcttaggaaatgtatatagaaaatatatcccatgttctcatatatgtgtttcagacataggggaggaattagaataaattttctaaataaacaaattatttgcctacttaaaattgcaattaaaaaatgaagctttccttcgttagctgtaaactacattgagaaattgtaacataaaaaagaatggatttttaaaacttcttgagtagatcaagtgtcttgtacaatatcattaaatttgtatcagaacacataaatggaaatgaggtggggaa

SEQ ID NO: 182195 - DNA, 285 bp, Homo sapiens
aataaatgcctgtatgactattctagtgagaaatgaatattttcagttttttaaaaagcactgtagtgcaatgacagcaaccatcataaccatcgtgcagatccttcaacatcatcatctgcgcagttcaacaaactatgagaaatatacttctttcacagacttatactaaaagtaaaatatagaaatagtaaggggccaggaatgatggttcatgcctgtactctgaggaggttgaagcaggaggactactagaggccagaagttcgagaccagcctgaataa

SEQ ID NO: 182196 - DNA, 451 bp, Homo sapiens
  misc_feature (281)..(281): n is a, c, g, or t
  misc_feature (283)..(283): n is a, c, g, or t
acttgtcaagcccagcttgtcccacttctccacatgagtcttccagtgacatctttgtgaccatctccaccccctgggtaaatgctccacgctgggagtccacaaaacacagtctgacttagagattctctggcatgactctcttccccactgtgtacactgactgccttagatgtaggcctcttgtttggggcccttcctggccagaccctgaagcagcctctgaggagggtggtaagaatggttccctagagcccagttacagagtccgcgtgtagaantngaacgttcaatttctacaaccatcccaatgcacaactgtcacctgtgcttatagaccacctccagacctgatgggagctgccacaccccttttaacttttgccaggctgtaaccatgccctctagtggtaggactaaggacatcacaattgtgtacgaatttgaacgg

SEQ ID NO: 182197 - DNA, 127 bp, Homo sapiens
tgatcacttctttctacctttctggtgtttgatatctttatcccaaatctctaaagccccaaccttcttgcccattagccacaactctcagaaatggacctcatagggcaggggacacagcctcttt

SEQ ID NO: 182198 - DNA, 101 bp, Homo sapiens
cttctggatcctttctgtgcttcgagttttttggagtaaaagctatttcttactggcaaaggtcgttcttatacctctctgctcaagctgttttaagactt

SEQ ID NO: 182199 - DNA, 452 bp, Homo sapiens
tgagggatacaagctgccttattaaaagcaggactgcttcagaggcattgaagtaatagaggacagttggcatggagaaatgattaatttggaggaaaatttttgatactatgtatttgtaatttggggcattttatgtgtactctagtaccatttgttcacagggaaccattccatgtaatgttatatgaacattataaaccctaagatacttaaaaacgacctagctttattgagatataattcacacgctgtatatttcactcatttaaagtgtacaatgtacttatattacagaggaatagtgttatatataacatggattcctataatgttgaaagtgcagggcctcctagtggtagggtttaaatgtactagagaagaaattaaattacttaataatatcataggggctctagtaattattttagctttcaaaatgtctgataaac

SEQ ID NO: 182200 - DNA, 415 bp, Homo sapiens
tgccaaaggatgtacccaagccttaattgtggcctttaccctcaaccatttccttgaaggcatcttgtgatgctgtaaaacttaaattttaacatccagcgtgaaaatttttattttttttgtgtgtgttaacttcaggactataacttgttggtcataatgatgcttataggtgaagctgatgcttatgggtcagcaccgaagcttatgggtagctctgcccatgctcacttttattagatgagagcataagataacgcttaagcattggcaaaatgtatagatatagatatacaaatgtatagatataattatgtatctatatatgtgtagtatgttgtaatgagtaatatagattcgtatatgtgcaaagtcacactgcacatactcatcaggttgggtttttttaatgaaa

SEQ ID NO: 182201 - DNA, 585 bp, Homo sapiens
attaatctttcaactgttaattttgttcattaactacatgaacaaaaattgaataccaaaactgtggtattcaattttggaaattttggctgcaggctaattttaagttgatatttttgtttcttccctctcttctctacccctcacttgttgtcctccttcttcctttgcgcaattttctctttgtctttgttttgtcatcttttttttgtttttttttcaggttgtctccagtgctctagtacaaaacaagatcatatgttggctttgaggagctcctgatctttatttctatgaggatactgctaattaacaatctggcagggggcttaactcagttactagtttagggatttctatctgtgttctctgaattttccaggagtgcagcctgatacaaggcataggccctggcagcatgaatagtagctgtctagtagctaaggcccctctgcaggagagatgggtgctggctgaaactacggcactaagcctagctataatctagggtgcatttattccctgatacctctcctagcaactaatctcatggaagtctctacctgcttttaaccactcagttga

SEQ ID NO: 182202 - DNA, 665 bp, Homo sapiens
actctaaagcttataactctgagttattgggaaggtaagaacatattttccccataaaaataagttctatatcatggttatgatccaaggtgaactcacagaaacctactttctttggttccttcaataaacattaaaagcctgttatttgtgaggcactatgccaaccattagggatataaaaccaaataggactcagtctctgcccacaggagcttaagagtctagtggaggaaactaaattaacatttgcaagaaatgctgtgtttcctaaaatatctacaaggtgttttggggagcaaagaaaacgggcaccttaatcagactacgaaagggagagtcacagaatgctttcccttaagaggtcatatttgagctgaatttgaaggctgatgaggaattacctacactaaaaaggaaatcacaggtaaaaaggtcgaacaaaccgtatttagtgatttgctgaatcatggaggtgggtgacacaaaggaccctagaatgactcaggtgtctggtttggataaacaatccaacgtaggcaccattcacaaagaaagggatgctaggaggtacgagggcaaagatgaaaaggtcatacgcagaccgcaaagcttaaaccttcgcctcacatctgtttggaacagcagtagctttttacttagcg

SEQ ID NO: 182203 - DNA, 412 bp, Homo sapiens
tgctgggattacaggcgtgagccaccgtgcccggctcctttgtcttttaacatggtgttttataatgaccattttatgtgcatttgctggtagattattccatgttcagcatagctagctagctctcatagagtccaacacatgaagtcttgctattttaaaatttatatagcaggtaaaggattcgttaaatgttgtaaggctcatagccttcccagttcttcttcctcttccttctcctcctcctccccctcttcttcttcttcttcttcttttttttttttttttgagacaagtctcactctgttacccaggctacagtataatggtatgatcacagcacactgcaaccttgaactcctttgctcagtgatcttcccaccttagcctcctgagtagctaagaccactgg

SEQ ID NO: 182204 - DNA, 407 bp, Homo sapiens
tggcagagaacagttgtaaagtaagagtaaacagttgatctttcttcctgttgtttgtgcatttgcataatctggagatggaatgtgactgactttatatgattttctaaatgctacacatacttaaacattaagtggagaaaaaactctaaaatgttctattttgcatatctaatctctatggaaatttgaaatgacctgtatttactttttagttcacagagcaaataataataatatctaaagggtaaaaaccagcataggcttgatattcaaaaataagtaatttattttcttcttaaagcttttgcttgggaaattgtatgtttgatatgtgaaaaatgcattatctaaaataaatctgatatttacgttgagacgaatatactgtcaatttagaggttttt

SEQ ID NO: 182205 - DNA, 338 bp, Homo sapiens
catgttggtcaggctggtctcaaactcctgaactcgtgacctgcccactttggcctcccacagtgctaggattataggtttgagccactgcacccggtttcattgtagcttttaatataaaagatatttttcaaaagtaccattagtgactcttttaagcaatgagaggagcagggttgttggaaaccatttaccaaccaaagtatttgtgttaggcttgttatgagtactttgtacccaaaatgaagttctccatactatttaggggtcaaaaaagttgttttaaaattctgcttcatttctactaaattagaaaattcaaagcaaaaatgttaaat

SEQ ID NO: 182206 - DNA, 254 bp, Homo sapiens
ctacagacagttggtaattttcaaggtgagtaattaatacagagatactttggcagtgaaaatattattagtgtgtttgtgcttatgtctacacagagaagagagaggaggcaaagataaaacctgtagctcccattttcttcttatatatttttacttattttttctgtcacagttataaccccttaagaaaaatttagatgagtactagaatctggcaaaattagttaaatcagactgagatgaataagata

SEQ ID NO: 182207 - DNA, 218 bp, Homo sapiens
ggtaacctactcttgtgccaatcatgcagttttggccaatcacaggcccaaaactgtttaaattgcatttaggcaaaggctgataaccaatacagctgtttctgtacctcacttctgttttctgtccataaatctcctttgaccatgaggtaggacaggagtctctcagaatctgctgtaattctgaggagtgcccaattcacaaattgttctttgct

SEQ ID NO: 182208 - DNA, 567 bp, Homo sapiens
cctggctttagcacaaccttccagatgtgatttggtatttcatactttgttgcttttgtaaatgctgtacccactgcctgagatattcttacctttttctttgtccccagcaaatgcccagtcaaaatttagcctttatttttttcccttggtgaagccatctcatacctcttaagtagagtaatcaccttctctttcacccacttttacttggtgttcgcattcacagctgttacccgctactattagagtttgggttctttgaggacagggaacttcatttctttatctcagtgtctgtagggctaagcctgccatgtcgaaggcatctaatccgtgtttgtggaatgactgatgcaactaaggagtgcaggatgaatcgctaagttgctgcttgatcctgccaatagaccaacctgcctcggttgacacgagtgaattgtgtagaaaaactttataactttcagaactcaagtcctgttgatcagacagggaccgatggcattaagactcagtttcaccagttacctctaaggaaacggaagggtgtctcccaggaccaaccag

SEQ ID NO: 182209 - DNA, 225 bp, Homo sapiens
tggaaccatcagaagtctttaaagactggctagccacaatctaaactgttttagaaggttcctttggtgcttctgtagatggacttggatgggaggtggttgggagaccgctaaggaggagggggaaaagctgctggagagagatgacaagagcaagaactgaaaggataaatgctccaggggtggatccacagggcttggtgactggtggaaggaagaacatgg

SEQ ID NO: 182210 - DNA, 311 bp, Homo sapiens
tatgttaatacatgttgtaaattgaaatattatacaaatgccaggggctattactatcattgataagtgttaattataagcaattactataacaaaagcgataatatccagtatccaactaattattaatgataatttgtaataattataatacataattaatgatatttaatagtaataattatatttaataataatacttcatagagctagttgctatgagaaaccaagaagaaaataatttgctgtctgccctcacaagacctaatgttcatttattgcatgtcagtagcttatacagtagctactgg

SEQ ID NO: 182211 - DNA, 396 bp, Homo sapiens
ttttacaagccaaccatatcacacatttacattgttaatatttgcattgttaattttcttagcaaatgacttttatttcttctctttactcccagagaaaatagataatggcaaaatcagttgaaaaactaaatactgatgaccttgttatgactgatcccaaatcaatctaatgaacatttcatggctccatggtggtcatcactaattgtaatatgacagatacaggaaagacagaactacttggtacataatgttaaaatagctgatgtcacagactagagttgacccactcctgtgttgtgtatagccttacgaagccagtaccagttaaagaaagcatccaatggccaaaagtcatttcaaaagcactcacactggtaatttgctttcttg

SEQ ID NO: 182212 - DNA, 167 bp, Homo sapiens
tcttttacttcacacactgaaggacacagttttcacccatctaaaactacggccctcattggtctgtctctgtagccctttcacacagattatcccattagatctcacaataacccaatgagaatgaatgtgtacggactgtcattccccactggagacatgaagaa

SEQ ID NO: 182213 - DNA, 474 bp, Homo sapiens
tggtggctgaatcctgactattgagctgcctagaattgaaataattaattttcctggagaaagtatattgtgttgtagttttttggatttgtgactataatctgtaatcaccagggaatttatttagatttgcaattatgctagagtttgtaatttatagtaaagagataggagtttgctaaataggaggcatggagctgtgagttttccattaatagttttgtgaaccttgtgtaatacccaaggtgttagtagggaactattagctaaatagtcagttcatgttcgtcttatctaatgaatgcagaacttaacatgttcacctagagagtttcccatttattttaaatatggttctcttttgcatgtaaaaagagtgttgctacaaaatcttatattttaaagaagtataactacaaataatagctttctattgttttaaaatagatattctagtaatataattcttattgt

SEQ ID NO: 182214 - DNA, 735 bp, Homo sapiens
atttagagactgattctcaaggtgaaagaaagctatcagaaagattttgggacaatgaataacattagcagactgtttgggaagatccacttggcaatgattatattcacttgcaaaatatggatgggtagatcttagaagtaggacgattataaagttggcttttggattagcccaggcttgaggcttccagatcctgaattagaataggaagtataaatttttaaaaaattatgcatttatttcaagtaaaccattttccagtgagttttaactatgtttaagacacgatccaagatacgaagatactataagttgtgctcttgatttcactcagatgaatatgtttatatctacaggtagtggtttatattgagaggtaatcatcttttaaaaaggatttagtgaacctttattcttcagtgggcaaaactaccacttaaattatatttagaggtaaatgcattattaccttcatctccaatttccccgcattcattctccaatcttgaagtagagccaaggcggtacttcaataccaagacctagagacttgggatacatttagaaggagaaaattcatgaagcatttgtatgctggtgcttatggtagtatatcaagtcaattttaaaggtcaccttttctgagaaggctattagttttaacctaagaaagaaaccattgggtggccaatgttaatcctgggtttctggagttccacttggcccaatttt

SEQ ID NO: 182215 - DNA, 562 bp, Homo sapiens
taaccaaagaccacctctccatcttcctgctggggccttgcaggtcagcctagagggagttttccagagcaggtggcttcctgagtggccaagatcatgtgagcaggataagttctcttctcgctgggcctttcctccctaagctggtgtcccaggcacctctctctgtttggaaatcagattctttatggtttatttttgacaccagataatcgctgcccaagtttcatcaatttgtcactgtttttattgtcagcaattgcccataactggagcacgtttaaaatgtcattgatcttggtattacagtgtcataatctgacagtaatatgtgtagccagcacaggaagcccaggctctgagattgatggggcacagcacaccaattatattctgtccatctaagtgataaaagagtacgtaggaggccttcaatagataaattagatatcactcccaattatgtcctttattttatggagtcatatgctccccttagaactttttttcttcatttggcttgtaaaggggaattacttgacccccctaaagactgggactg

SEQ ID NO: 182216 - DNA, 378 bp, Homo sapiens
tgctgggattacaagtgtgagccaccacacccagccctttctatatttttgtgtgtgtcatatttttgtacttaatttaaaaaaaagccttatatttatcagagggagaactgaggttgcctttgattattcatcatttgttccctagttccacctatattatatgaatagaaaatttattgcagtatgattgggaattaagaaatgggtaaccttcagcataagattccttgcaacttttctgggagttaaggattctggagtggttggatcattgtgaatctttctgatacgatttttctcactacattttgaagattttgtctgggagttgtatgcgggtctctaatattttggcatatcagctttattttttct

SEQ ID NO: 182217 - DNA, 431 bp, Homo sapiens
caatgatgattttactggcatacagatgaaaaagaaaaagatatttgaaataaaaataaaaatatagtgcacaatgaccaggcctgtgaatagccactgcactccagcctaggcagcatagcaagatcacatttctcatatgaaactttactagaatgaaacttatggtttattacatagatgttgcttattcgttgtaggaaaaattgaattacagatgatttttaaaactaccagagcaaaccatttaacctatttgtgtacatactcccagatttcttacacacgttgcaaaaaaaatagatcgtaccattctgctggttttctaagctgctttttgtaagtaatgtactgtgagcatcttttcatggccataactattacatacaaaagaaaaaaacaggcttcacaataaatagttaaaagacatt

SEQ ID NO: 182218 - DNA, 226 bp, Homo sapiens
ggacaaataaaaataaaaggacaggccagtacctccatgaacatacatgcaaaaatcataaatgtgagcacatcaaactgaggagggaagggattaaatacgtatatgttgattttcattaatccaggtgctcacagcgagcatgtaatcactgcaccaggggatatacagcattttcatcaagcaatcaatacataaacttgtttcaggtgtccacttaaagacg

SEQ ID NO: 182219 - DNA, 188 bp, Homo sapiens
ggcccggtcgttgcgtggccctttgtgcggctctttgcgcgctggagggaagggattaaatacgtatatgttgattttcattaatccaggtgctcacagcgagcatgtaatcactgcaccaggggatatacagcattttcatcaagcaatcaatacataaacttgtttcaggtgtccacttaaagacg

SEQ ID NO: 182220 - DNA, 206 bp, Homo sapiens
cacttagggtccagatctgtgggtggcattggaaaccttagctgtagccttgcctggggactttcttgccctgaagtgtggttttaggccagagatgctcaaacttttgtgcagagatactaatggagtaggtctgaagtggggccagaaaagtgatatttgaaaggctcatcagatgctgctgaattgcagacaaggatggattt

SEQ ID NO: 182221 - DNA, 163 bp, Homo sapiens
tggcctctctgaggtacatttgcaagaggtggcagtagaagtaatttaccagagcttgaatgtgcaggtcttcactctgaaatgtgcaggtatgaggcaaacagggactattcatgaaacaatagcttttcttctatttgttttctaattcttcttccaaggt

SEQ ID NO: 182222 - DNA, 332 bp, Homo sapiens
actaataatcaaatatcaattatccagaatattaaaaacttcagctatccagcacttttggagaataaggagccaagtattattccacctcccttaaagcaccgcctgccctctctaatctttccccaattgtttttaaccttcaatcatttgaaatgagatttttttctaacagcatcacacttttctgccttcttatacttcaaatacagtaatcataatttaacactatggctcagacatcactattatgctgatttagaatatccacagggtcttctaaaattagctattaatacaccaagtccatctcatttcttcacaagttctac

SEQ ID NO: 182223 - DNA, 364 bp, Homo sapiens
cagaactctctggggccgagaaacaaagttaaaacgttaaaagttactgccaaatgaaaaccaaaaaagcaaattaagcatctttgaagaataatagaagtcatgaagaaatagaatctatttgacaggaactcagattctcctggaaatatcagggccctagtcatcagccttaatgaatggcctttctcagtcacacagatagcagcactgtaactcctccagtcaccagggcttaaacttggatattatttgaaggttcctcctatgcctcattctctagagtttattcactaacaaggcttgttttatcttcctttgaaataactctaaaattctcgtcttctccattcagactgccacc

SEQ ID NO: 182224 - DNA, 474 bp, Homo sapiens
gctcacacctgtaatcccagaactttgggaggccgaggcaggaggattgcttgaggccagaagttagagaccagcctaggcaacatagcaagactccacttctataattttttttaactggctgtgctggtgcatgcctgtaatcccagctacttggaaggctaaaatgggaggattgcttgagcccaggagttcaaggcagcagtgagctatgattgtgccaccgcacttgattcagcctgggtaatggagcaagaccccatctctaaaaaaaatgaaaaattaaaaataaatcaaataaaaaaaaacaggagagggagttctgtaaggttacatttggtgaagtcaatgtgtaagctcaaatgatttaatatcaatttgttactcattaggtaagagcatccatgtcccctacggacaaaggcttctatgactacgggaaatttagtcaaggtaacaaatgtgaggcataac

SEQ ID NO: 182225 - DNA, 262 bp, Homo sapiens
cttcaatccttaaaattatatcctatgactgtatagaaatttcagtgcctttcacccgatctttctgtgacatgccatgtctacaaaaatttggagatctctcaagtctgacgttttaataactagcatttttgcaacgctggaagttcgcaaaaggcttttgcatattttcttctgacggcaattttgagagttaggtattattctcctcgttgtactggtaagatcaatagagttaagtgactaagttcaaggtcgcaaa

SEQ ID NO: 182226 - DNA, 257 bp, Homo sapiens
gaacgccaattatgaactgttcacagagaagtccagcccttcacggctcggggtgctccttggtgcccccgtaccgaaagtggtgcgtgccagctctgcaggaccttagcaagccccaccccaagtcttcatccacttccctaggccttaatatgaacatagcaggttagcagcattattacactccagtacaatagtagtagcaggggtatttctactcatccgcttctaccccttaatagaaactaacaaactag

SEQ ID NO: 182227 - DNA, 176 bp, Homo sapiens
aagctgggcctttaataagctattctgtgctgtgcacttttgtgactgtgtctagctagagatttattcattttttttttgatcttctcaaagaaccagcttttgatttcacaaatttcttctgtttttcttattttttcgtattttttcttttgccaaagccaaatatttctaat

SEQ ID NO: 182228 - DNA, 335 bp, Homo sapiens
cttcggcccctgaagatgacttaagtgtccctctctgctcccttgtcatccatcccctgtgtatctttttatcatagcacttttcataacacattgaacatactgatgtttttttgtctgtctctcctgtcctgtgtgattgtcaaggaaagggagtattttgtagcctcttgtacctaaatataatgtgtcagcccacatctgttggtgaatgaatggatgaacaaacaggccctctcttagccaagatgatttatatgttgaagaaaagaaaaagaatgaatatttttagtttctagttaccttcctgccattgggttgtaatactactccct

SEQ ID NO: 182229 - DNA, 530 bp, Homo sapiens
tgcttttcttgttataggcgatagtaggaagattactgaaagtaggtttagggtgtttgctttaatgatggtaggcagatagaaattgctacattcaattgataaaatttacatataatttttttttttacaacttttcatagaaaggatcaagttaatttttgccattaagaaagttattgaccgtgcatattaatacttttaagcaattaattattggtttagtatatctaccagtttttcaaatataacagatgctcagtaagtatttgttgatcaggataatagcatataattaggtttgtgtaaccttctccctcaatatttctgaatttgtaaatccagttgagtgtcctgctacattgatttcaaatttcaagtaagtgttatggctacctttgttctcactcagggcttttctattcctttctcacacaactgattcctctgagagtcaagaattgtgatgtgagtgtattcagatatattctgactttatttcttcccaatttattaaaaatgttcagttg

SEQ ID NO: 182230 - DNA, 503 bp, Homo sapiens
agtaaataatcatcttaaaatcctcccacataggtcgtggccattttcaaagccccaaattcatctctctattttgtatatttcctccctcagaattcatggcatcatagtacttgctgatattttaagtctttaggtaattacgcttggtgagagtaaaagaagttgaggataatagtcgctcaactgccttttttagtttaatccttactctttatagtttttcatgtttttggaatctttacatcaaatgttgtataatgttttagactgtaaaagccagtctaaacattaattttggcttgttacttaaattgaaaagtgaatctcaattatataagttgagttttaataatgaaaatatgtaaatattggctgggcacagtggctgacacctgtaatcccagcactttgggaggctaaggtgggtggatcacctgaggtcaggagttcaagacgcctggccaacatggtgaaaccccatctctacaaaaatacaaaaa

SEQ ID NO: 182231 - DNA, 405 bp, Homo sapiens
ctaggcaagcctattcttcctctcaagagtaggtgttccacttttgaacacctatgccaggcaccggctatagtgcctacaagaggatgatatgtggacatgaccactttccctgactacatcagtggttctcaactggggatgattttgcaatgtctgcttatgggacatttggtaatgtctagagacatttgtggttgtcacaactagtggaggggtactacctgcatgtagtgggtagagtccagagatgctactaagtatcctataatgcataggacagctgcccacaacaaagaattatctcactcaaaatgtcaatagggtcgaggttgagaaatcctggtctaggctgggtgtggtggctcatgactgtaatcccagcattttgggaggccaaggcag

SEQ ID NO: 182232 - DNA, 673 bp, Homo sapiens
aaatctaaagtaaatccatatctatccccctcccattaaatacaagaatcctaaaatgtttctgatttttttctcccatcttctaagtgttgctgtcatgtattttagttttagtttgttttaccttgctctaaactagtcaccattattacaatacttgcttttacagtcaatgctttagatttatcaacatgatttccctgttttgtcacaactttttctcactaccctctctttttttctacattcaattttcttcttgctgaagcacatccttaagtagacttcatggtaagggtccatgagtggcaaactgctaggccttagtttgtttgaaaatatctttattttattcctactttcaactaatactttaacaatacataaaatgctaagttgacaatgatttccctcagcactttgaggatattttcctactttcttctgatattttgttgcagatgagaaggtaattggtagtataactggcgttcctttgttttctctcaattggcttgaaagtctacattctagctacagtaatgaatatccaatattttttaaacattctctaacaaatctaaagtaaatccatatctatccccctcccataaaatacaagaatcctaaaatgtttctgattttttttgaggggaaaaggcctgggggtcca

SEQ ID NO: 182233 - DNA, 392 bp, Homo sapiens
gcctgctaccgctacagctacgttcacacctttgacacttacagtaagacacttccaacctggcaaattcctgcacattgttcaaaatgtggctttgatattttctttcctagaatctgtctgattcatttgcccaatctttcttctaaagatgtcttctctttgcctccttatcagagttcacattaaactcaccatattttattaaaacactccttgcagttgactttattcactacctagattataagttccttaaagcagcttgtctaatacatcttacaccctcaattattagacaaaagcctggtacacggtagctacttgacacatttttattgtccctatatgatacgttttattgcctgtactgaataaacttattattttaa

SEQ ID NO: 182234 - DNA, 308 bp, Homo sapiens
tttctatcatgaagggatgttgaattttatcaaatgctttttcagcatccattgaaatgatcataaggtttttatccttcattctgttgatattgatgtatcacattgatttgtgtatgttgaaccaccttgtgtctcaggaataaatcttacttgttcatgatgaatgacctttctaatgcattgttgaattcagtttgctagtattttgttgaggatttttgtattaatatccatcagagatattggactatattttccttccttccggagaggtcgagtaggattgatattagttctttaaatgt

SEQ ID NO: 182235 - DNA, 188 bp, Homo sapiens
aagacacaggtcagagctggaagcagccctgaaggaggcttcaatctgtggctaaaacagagctggtgctgaggctccagttagagctcaaactggacccttcaagcaacacagacagcactggaagcattcaccagagaagccccaggacacatctctggggtattcagctcaaaatgcaaaacctg

SEQ ID NO: 182236 - DNA, 870 bp, Homo sapiens
cacagacaattttctttggaggattatcctggggccacttgaatctcttctcccacaagtgctgaaagtcagaaattttgagagtgtctgttttcccggagtggtccttatccactggctgactacttgggaatctgaataccaagttccgtcactgtaaggccatgtgtattaaaggagacacagaagtgaccaagaagcctccttcaatcttcccaaagactcaatcaccctcttgaagaggacattgggacacagatatgcactgaggaaaggccatgtgaaaccacagggagaagaccgtcatctacaaataaggagagtgaccttagaagaatcctgccctgccaacaccttgatctcagacctctcgcctccagaactaccagaaaaccaacttctgtcaagccatccagtctgtgggacttgttatggaagctctagcaaaataatacattcactaacagagatattacaggaattaatagattattttaatattcatatgttacatatgttcactattggtaattaacataaatataatgatcctaccatacagtctccaaaatcttctccaaaagagagagagagagacaggaactaatatttaccaagcacttactaagttccggccttgcagtctctaatgggtaatacaatgtttatttcattgttaaagcgttgattgtgttacacccccggtgacatagcattggaatgaaggggccggaggacaggggttggtaatccgagatgattaggttcaagcataaatcctgggaaaatacgggaggtaaatagatgtcagggcgataataaaaatagccgtaatcaaaaaggcgcgggggggtatgcaacctcacagtt

SEQ ID NO: 182237 - DNA, 213 bp, Homo sapiens
ttgaaagcaggaaaaaaagagatttacattaaatagcggtcatcacggcgttcgtaagtttccaactatttatcaacatgcttggttcgcaactgcaattcacttaattggacttgcatcttcagtaacactgcagcttccatactggaggtggtagagttattctaagccatgggcaggctggtcaaatgtacatatggctgtgtaattgtc

SEQ ID NO: 182238 - DNA, 758 bp, Homo sapiens
ttggttcctttgctggctgtagcccactaaactgacttctcatggagcacagaggaaaaagaaaaaccaggctccaggaagggcagctcctcctgtcacagggtccccagtcccacctctccaggcaggaggggcgatggtctcacttgctgcagatgaccttgtaggtgaccccacccaatactccatagtccagttttactggcagttctgtggagggtggggagggggaggagtggagctatttaactgaaaaacaatagcatggatgggaatgaaaaatggtgcagctgctttggaaaacagttaggcagttacttaaaaagttaaacataaacttagcgtgtcgcccagttgttcctccgctacgaatctaccccagagcaacgaaaactcgcagcatccacatgagactacacagacgtccacagcagcatccacacgaggacgacgcagacgtccacagcagcatccacacgagactacgcagacgtccacagcagcatccacacgaggacgacgcagatgtccacagcagcatccacacgagactacgcagacgtccacagcagcatccacacgagactacgcagacgtccacagcagcatccacacgaggacgacgcagacgtccacagcagcatccacacgagactacgcagacgtccatagcagcatccacacgaggacgacgcagacgtccacagcagcatcgaggacgacgcagacgtccacagcagcatccacacgagactacg

SEQ ID NO: 182239 - DNA, 431 bp, Homo sapiens
ggagttggaggctgcgctgaggtatgattacaccattacactccaacctgggcaccagagcaagatcttttaaagctggtgttagaaattcaggccaggcctggtggctcatgcctgtaatcacaatgctttgggaggccaaagtgaaaggatcacttgaggccaactctttcttactgctcttggatgtttttcagggcataagcaggctgctattaaaattgactgatttaaaaaataaagctaacagcttatgctgaaattaacctcgtctttgtgagccaaagatcaaatgcgagacaaaagctggctagagtcatcatttcctcagctctgcaatcaccttacaacttaagaccattttcacagtggagacagttgttaaaagttctgacaagccctgcggtaacctttgattacaaagccactcc

SEQ ID NO: 182240 - DNA, 375 bp, Homo sapiens
cattgccagaggaggcaccctaacaagctctccttccaagacctagttcacgacattctacggtctctgcacacagtctgaggggcttccaaactctggagattaatgatgacacaaatcccacaactcagcttgaatacttctggtcctctttgctggccaccatgcaaagccatccagaggtcctgggaagctgagaggataacagggatttcctttccctggatcatgttcggtccgggcagcctcccaggagatctcatggagacaatgaagtagttctggatccagctcaggtggtggggaggtaggtaaatcaatcaagtgagtgaggtgtttcctcagagaaagcacacacactgttcatgtaacctt

SEQ ID NO: 182241 - DNA, 129 bp, Homo sapiens
ttctccacagtattgcaactgtcttccctgaaaaactcttcaacactttactctctccaagtacaattcagacatcactttctttctaaagccttctcagcaacggccccttgagcaattaacacatat

SEQ ID NO: 182242 - DNA, 401 bp, Homo sapiens
tcagcggtacattaagcgcgtctgcgtgggcgtctgcgtattaggcgcgtctgcgtcctgtgccctcccggagccgccctgccgctccaggccccgcagcccacaccggacgcagcctccaggctccagggcttcctttttcttgctcagcagtttgatcagatgtgcagtgctgggctgaaaacccttctcctgtggaaattccaaagcaggcgagtggggctgggctgagtcttgtgtcccggtgggtgacatcccccacccgtggtatcagtaaaatcccagtcctgaacctgaacactggggcgcctcccaggccccgacattcttcccgctcctcctgtgaccgcactgacggtatcacgttctctccctccacggcactcagacggcggcgacct

SEQ ID NO: 182243 - DNA, 786 bp, Homo sapiens
cacacatcccaccagcaacatcttggttccggaagtctggcccatctggtaaggctctccctcttcctgccacatccatgtcctgtccatccttgggccccacttcctccacggagcccttcctggtcacttcagcccacagcaaagtcccttctctggactctctagctctgacctgcacactgctatcacggcaccaatgactccacaccttgcaccaccagcagtcttcatgtgtgtatatcttagtttcttaaaagggaaggaccacctgctgtcatattttttggtccacataatgcctaccagtatgttttgcatataataatgtacagttgatgattaaaaaaataattctcctgatttggtgaaagagagaactgaggcctactgagattaagtaatttgcactgaaatcacaaagtgagaccttcaagggcagagatctagtacattattcactttgcaacactggagcccagcacacagtaagcacacaattctcttccgctgaatgaaggaacaaaagtccttcctctttccacacatctttcagtgaagatatattcctcagactgcctcagaaggaaagaaggggcaaaaagaaaaggcatccaatggcctagtcgattctgaagcggacctaggatgggacagcttcctgggataaacctgctgggcacagagtacacctccagacactcgggttcctgttatcccttccctgcctcaaaacccaagacccacagcattctgggtgagtctcccatcaccttccagagccag

SEQ ID NO: 182244 - DNA, 316 bp, Homo sapiens
tcccaagtagctgaggctaccagcatgcacaaccacaccaggctaatttttgtatttttagtagagacagggtttcaccatgtcggtcaggctggtcttgaactcctgacctcaggtgatccacccaccttgtcctcccaaagtgctgggattacaggcgtgagctaccgcgcacagcctgcagttgtaattttaacagatattgccaaattgctctattttctgtaagctttctgttcatattctttaaaaaaaattgttcaaatttttgcatgcacgtgtgtgtgtgtgtgtgtgtgtgtgtgtgttaggggat

SEQ ID NO: 182245 - DNA, 629 bp, Homo sapiens
atgtagctgtctctgatcatcctaaacaaaagttaccctgtcctcttctaaaatcttacaacagcatttatgccactttgatggcatatctgagtttattcaacaacttcattcatttacaatatactggctgagcgcgatggctcactcctgtaatctcagcactttggaaagcagaggcaggaggatcgcttgagcgcaggagttcgagaccagcctgggcaacatggcaaaaccccaactctacaaaaaatacaaaaattggccgggcatgatggcacaaacctgtattcccagctatttagaaggctgaggtgggagaattgcttgcgccaaggaggtcaaggctgcagtgagctaagatctcaccactgcactccagcctgggtgacagagtgagaccctgtctcacacacacacaaaaaagtacaatgtattgtgaacctaacaatgggccaggcaccctgtcattcataaagcttttattccatgaccaaatgattatgctcctttatccctcacagattctagcacaatgccttgtataaagaaagtactcaaacatttgccaaatgatatactatataactattaatagtatcataaggtacattcaaggacctgttatt

SEQ ID NO: 182246 - DNA, 731 bp, Homo sapiens
acaataagacctacttattttcctcctgagcagtttttagtgacatcaataacaatttttttaggctgggcacagtggctcatgcctgtaatcccagcactttaggaggccaaggtgggcagatcacttgagctcaggagtttgaggcaagccagggtaacatggcaaaacctcacctctataaaaaaaatacaaaaattaacagagcgtcgtggtgcatgcctgtattcccagctacttgggaggctgaggtaggaggatctcttgagcccgggaggtcaaggctgcagtgagccatcattgcaccatcgcactccagcctgggctacagagcaagaccctatcttaaaaaaaaccaaaaaaattataagcgagtcatacaagttcttcacagcttttcattatggtaaaccttgattaaaagccaaggttataaatgtaatttttgctaagtgcggatgtattgtatctgtagcaaactgtaattcaggcccctgaatgtaacatcctagctctcattccttttgctgtcagatttccctatagataacgtctacatctgctaccttatctactcgcaaatatttatgattttcttccatgaaatttacttttctcccctgaacctgtaagccaaatcaagtgaccttttgtgaatctcaaacctctgtgaattttaggtagatttaatattcttggccaccactttctattcagtcaaattcaagaat

SEQ ID NO: 182247 - DNA, 270 bp, Homo sapiens
agaatttacaaaaaaacaatggcgacattttcccttgactcatttggacctgtctgggtcttgttatgaatattggcctccatttgtgaactgtggatgaaaagggttagggttgggtcatggccttgggccacagttaaattaactggctcatagtgtgattgaactaatgaccttagcctcattaccactatgttttaaccagttgagtcaatcgaacattacagaaagggtaatcaaggtatctcttagaaagacagctgtatttct

SEQ ID NO: 182248 - DNA, 718 bp, Homo sapiens
ttcagaaaactgaagaaataaaactgaagcagaggtggttaggtgttgatgaaaaaggtttgcatagatgatgggtaaatatcattgatttatgttgggctttggagtcggtaagggtggagatgagtgtattaggtcaccagctgctcctccttctcccagagtcaggggaattgggtgagtgggtaaggaggccttgcttccggtaaacactccttgatgttcccttagagtcatccctttgaagactcccgtccctttgatgacaccagcaggggtgaccccttttaagccatcagagtagttcacccatgggagcacgtgtgaaacattagcctgcttctgcccctctcctgctgtttgctgctgcacaagtatattctgagcagaatgggggtccagagagggatggtttttagtcttccaataatgcatgggaaccaaaaagtcaatctgtaattgatccctaaactccaagcctactataatgacatgaatttctgcctagattcatggtattttgtattttacagtctttcattttctgatgaatgtttctcaatgcaattcttcaccattggaaaccccaaccaggagtgagaatatgggattttctagatagatatgtagatgaatgtataaagagatggataggtgagaatcagattgtggtttagcacaggtttcagagtcagtctgcctgcatataaaacccagt

SEQ ID NO: 182249 - DNA, 332 bp, Homo sapiens
tccaacaattccactcctacgtatacaccaagagaaataaaaccatgtctacccaaagacttgtatgcaaatattcacagaagtattactcacaacagccaaaaagtagaaatccagtaataaagagacaaaaataacaaagcagagtgtttttcctattctttcccttaacaatcaacacaggatacttatgtgaccacacatcatgcaatcagttctgcagcagacaccaggtgggtgtcctccaattcaattccaacaccatctacctggagatagagtcagatcccacagggtgaggactcagtcccacaagactgccctcgacttct

SEQ ID NO: 182250 - DNA, 570 bp, Homo sapiens
  misc_feature (497)..(497): n is a, c, g, or t
agatggctgaggtttcgctgaggattttgggtttacagacttccatggcattcccctcagactcctcagtttactcaaggtccctaaccaagaagacaaaatactgtagcctatgttattcattcattcattcattcatccatcattgcattcatcccaaaaatacttatcaaaatattactaagtggcaagcatgcagctacttctcccttttagctcttgggtcctttaattaatcaacataggtgggaaggagccaaggatggctgggtgctccgacactaatgactttgggccacgttttgagggggtggaaacgtgtttgatgcaactagcatttgaaatccagattcccattactgggtatatacccaaaggattatatatcatgctgctataaagacacatgcacatgtatgtttattgcggcactattcactatagcaaagacttggaaccaactcagatgttcatcaatgatagactggattaagaanatgtggcacatatacaccatggaatactacacagccataaaaaaaggatgagttcatgtctcttgtagggaca

SEQ ID NO: 182251 - DNA, 529 bp, Homo sapiens
tcttttggaaactggaaatcgattttaggaatatttctgggatagaacaaaacaagtcatctggagtcagaacccaggttctaaatgacgatccttcctaccccaccaaaggtatccatcacagcagcctacagattcatttattgaaatctcacatcttagaagtgttatcctcacagaatcattcatttacgcggggaaatcactcacttggagcttatgatgtttagtcacgaaagtatgtttttgcaaaacacctacaatgcattatctaaagctgctaagcaccactgttctatttgcagcaggcattaaggcattatcctttgtcccatgctgtggacaaatgaatggtgcaagaagtactggctccaaattaccgtgaaggggagaaatacctttctttaaaattttattttcatttttaattttttaatagggttgggatcttgctatatttcccaggccaatctcaaacttctcaagcaatccttctgcctcagtctcacagactgctgggattacaggg

SEQ ID NO: 182252 - DNA, 210 bp, Homo sapiens
tttgtaatgcatcaactttatataaatggaatatagaagtgagtataaatttataaacggattaccttgccaaaaatgtgatggttattgaaacatcatttaagatcacttatagcaaaactaaagtgatttttctggaggaaaacaaagtgacttggaagactttaatttttctcaaaggtggcgctgttactctttcaaaatggtttt

SEQ ID NO: 182253 - DNA, 181 bp, Homo sapiens
atagacgtacacatcgaatcccaaattcaaattaattgtagcacaaatctgaagttataataatgctgccagttacagtaaaagaaaagttgtcttgaaaagtatgaatttagatctctattaagtgtcacagtgctaaaacatggccaaaattattctactttatatagtttgcagtgac

SEQ ID NO: 182254 - DNA, 309 bp, Homo sapiens
tgccacttaaagctgctgatcgtagacgatttacttaacctgagttatatgaaaactaagaaggttaaagcaacacagaaggacaaatattgtatgataccacttacatgaggcacctggaataggcaacgtgaaattcatagagacagaaaatagaggttaccagggtctgaagggaggtagaaaggggggctatttatttaatgcatagtttctgtttcagttgatgagaagttctggaaatggctagtggtgacggttgctcaatactgtgaatgtacctaatggcactaagttgtacacataaaa

SEQ ID NO: 182255 - DNA, 447 bp, Homo sapiens
ggatgacagcacatgacagcatcttagccaaagtaaggagttgacacagcagtgagcaggaccgtaaatcaatgctgcagagccaggtgggtagatgcaaatgaatgctgtgggctgggtgaagacctaaggaagtaaacttcatgtgactcacacgaagagagcaccagctactgccccctcatctgctgccacagaaatcagaaatagagatttctatgtgaaatcgcccaatttttaaataatagaaagtaatatggatcatgtgttaaacctcaaactaagcagcggatcaattttgctgcaagtctgcaaacaaggactagcaatgtgcaagttgtcatagatattgagatcgtgcacggtgaaaccactggagaggtggctcagaccaccattcaggtgcttgctagttgtgtatgttctccaaagcttacttttctcatc

SEQ ID NO: 182256 - DNA, 595 bp, Homo sapiens
ctgcttttaggcagggcagagagcttttgttctgtttcttctcagttgtctcttattcaaaataatgcttttgctaaagtgacatattttgggctggcagattctgatctcctacaccttccaagttccaggaacatgttttggaggacttctatggttccttccaacttcgatattatgtgtttccaggaaacaggtgtgaggcattccatggtagccagaggtagcatggaagatgtttccttttgcctatgtctctgaaccccttactctgaaggggcgtgaccaccgactctcccagtttaaacagaggtgggagaaggtctttgtgatgactttccacttagtttatagaccagtcctataccagagctgaggccaggattattaggaaagagaagcatgaaccccaaactcctctccctcattgaaacatgaaagctaaacagggcttccatgcaatttcccaggacaaagagaaacaagcaagagagaaagcaaaaagccctcccgcagatgaacaaagagtgtttcaaagcacaatactactgttgttttagttcctctcgtaaaactcttcagtggtctctcacta

SEQ ID NO: 182257 - DNA, 175 bp, Homo sapiens
aacaggagatgtcaatgcccagagatctgaactaacagctcaaggaagacttcctcagataaaaaaataattgagtgctcataactacaccatccaagtggtgaatgtacaatcttaggaagtagaagaatgaagttaccagttgattataacacaaagggtctgtgaaaaatgt

SEQ ID NO: 182258 - DNA, 103 bp, Homo sapiens
ttgctgaagtgttagagctgggactggaacataggtctttggtccctcatgtgatagccacagtagtagtggtagctcctaccccaggccatgcatcttgaag

SEQ ID NO: 182259 - DNA, 131 bp, Homo sapiens
aaaatcacttgcaaccaggctaaattaagagccccttttatgggcttccataagtactttacatgtcaaaacactcatcacatttataattacttattcaatataaatttccaagaaacgcagatcacaaa

SEQ ID NO: 182260 - DNA, 745 bp, Homo sapiens
tagcctcacagccccggagctctgatgaccatcgtggccactcgctcctgctgtccactaccaggaggccacagtctggagcacttcagcacctggcctcccttcctcagagacaggaatcccccagtctggtccctaaacacactgactcacctccctgcccaccctcagcttcctcccacgagaccagccctctgacttcatggtcttggcttccagcgtccctgtggctctccttcttctcctgtcccgccaggaagctgggtggcctcaagcctctgcttgcaaacagtctccccgccccctggcctcctggtccttcctccccagctggatcctaacgcgcaccttggacagcgccaagcccttagctgctcagcacctgccccgcaggaggaaaccccatcacgaatgggttacacgggggtggtctcagcggcgcccttcgtgccctgcaagttagagacagggacaattgtctcccttccccaagcctcagggacccttccccaagctccaaccccatctccagtttgttttttctgtctctgtttctgtctctctctgtctcagcatatgaccccgctccttctcatccagccccaccaaggaacttgaagctccccctaggagtcttgcctactctaagccagcctcccctctcaggctccatcattttccctcctctctcttttggggctctctcctgacaatctacccctccttttccttgtatattcatctt

SEQ ID NO: 182261 - DNA, 136 bp, Homo sapiens
ctccatctaaaaacaaaaacaaaaacaaaaacaaaaaacctgtttctgatggtctcagaaatgagagagagaatgagaggaccctaaaggaagggagatcagaggtaacacattgattaagaatcctcctcagcta

SEQ ID NO: 182262 - DNA, 186 bp, Homo sapiens
gtctgcagaaattagtttagggaaggatagtgtgttacaagcaatgtctgtgttctttacccctgcaaaataggaatgagacagcttttggaatagggtctatgaagatatccttctttttttttttttcaaattgggttcccaccgggcaacttggtgggggtacccgagccctcaattcgatat

SEQ ID NO: 182263 - DNA, 619 bp, Homo sapiens
tcttcagagctagataacagacactatattaaagacttgcagaaatatggacgctgaccaagcagactggatggggatgtggtcctctgtaatgaggcaaaagtaagaaatagagatgtagactatgtggactctaagggctacaggaccaccccttgagaatcactctaaggagggctctgtatgttccatcaaggtcaccagcaacattcagtcatcctcctggcaaggaattgtcctggaaaggcatctctcaaattgttgggttgacacaatggtctccctggtgaatgttatgggctgaattgtgtctccccctccaaatttatatgttggagctcaaactccgagtatctcagaatgggacttattaggagataggtcctttatttattttttatttattttgagacagagtcttgctctgttgaccaggctggagtgcagtagcacaatcttggctcactgcaacctccgcctcctgggttcaagtggtcctcccacctcagcctcccaagtagctgggactacaggtgcatgccaccatgcctggctatttttgtatttttagtagtagatatggggttttactatgttggccaggctggtcttgaacttc

SEQ ID NO: 182264 - DNA, 303 bp, Homo sapiens
tcctatgttctctcaaagctgtgtaaatctaacttgaatggtaagcggctttattttaacaagtgtgagttatcagagttcgcatatcaaattaaacccaatgaattctggacttgttttaaatttcaagccagaggccctaactccctgcatttcacttggcggctggccagacttagtaataaagtgctaagcagaagacaggaaatactagagaagtcgaacaatgttatgacaatgtttataacttttacagtcaagcctggctgcacatctgcacaacatcagactctggtcagaccc

SEQ ID NO: 182265 - DNA, 641 bp, Homo sapiens
gcatttctcttatcctgccttttcttaaatctgcagtacttagtgggagaatagaactgaagaactctaaacaaatgtttcttgctggctgctgttttagtgtgaaccccttcttgtcttctttatgcttaattaaaaaaaaaatttttactttttcattttactcatgtaaaaagtcagcctagaggttaaaggatgtgagcctatgtgttctaggcaagtagcattaatctttcagagatgttttctgggttgaacaaaagggaatagatcaacccagggtgctcgccaactcgtaatcatcgtcctcattttgtgaggatttttttttttgtcttctaggggagaaaactaattatacagttatcagttaaaatctcaattaataccttaacagaatcagttggtagacagttaattggtacttgaggtcaagaggtcactagaaaggagttgggaaaaagccaaagaaactttatgtattaattgatttgctgctgtaatagatgtaaaagtctgaataggtggtaggactggtatctgaaactataatcaccaaggactcagattctttctgtcttgttgttctgccatccttaattaataagcagcctccattttgtggaccaaggtagccactt

SEQ ID NO: 182266 - DNA, 208 bp, Homo sapiens
tcttctttgcttatatatggctgccttctctctatgtgctcacatggtgtttcctcgatgcatgcgcatggaaagaaagagagcaagttctattgtatttcttcttacaggtggaaaaatcctattagattaggattcatacccctataacctcatttagccttagttacctcctaaaagccctatcttcaaatattgtcacattagg

SEQ ID NO: 182267 - DNA, 179 bp, Homo sapiens
catccctgcacaaacacaatatattgagattactatgatcattcaacctcttccatctatctcacatctctgtctttattcccaactatccatctttttaatttacaaattcatttacctatttcttttttttttttttttgggggtccgggggggagtagggttgcaaaaaccgggag

SEQ ID NO: 182268 - DNA, 487 bp, Homo sapiens
tgaatgggtgttcgatcttagaacagcattttctgtatcttttgagatctgtgatttttcttttttaattctgaaaatatggtgaaagtattaattttctaatctttaatcagtcttgcattcatttgatgaacttcactttgtcatgatatattatttgttttatatatggttggattacatttgctaaaatttgtttttacatctaagtttatgagagatattggcctgtaggccagtctggaagcaaagatagaataagtaatagccaaattcttggtttatgtctgagattgagaagatgtgatcagtatgtagatctttggggtattaagcaccaataggcagtacttgattctaacttgttattgttgtagataagggaggccctcaacatggagtaaatctttcttctccccactgcctgctttcattctcctctgaacagtgactagaggaatagaggagagccccatattaatttgag

SEQ ID NO: 182269 - DNA, 241 bp, Homo sapiens
ctctctccacactgggtatcttgcatttggaagtcacttgtgggactctcagtgaaggtagagttccatgcccaattggaagggtctaagagctgaggtggaagggagctgtagaaatctgaaaccacgggagaaaaagcataagcactgggggatgctgggtgaggactttatgggttctcacaaaatgacctttgcagcctgggttgtggttcagtccttggagccagtgtggagagag

SEQ ID NO: 182270 - DNA, 653 bp, Homo sapiens
tttggaggaaatgtgtgcccacaaggtaaatttttaaacttacagagaaagctaacaaagaggaaaatgggaaaggatagaaaatagaatggaaattaaaattaatattattttaaaaaatctatttggtaccagaaactagcatatacacatacatactatacacacacacacacaatcttatatatacatctatgtaatcatatatataaatctctaatcctcactacaatatttacttaatagaaagctattaatattccagtttcacagatgagggaactgaagctcagagaaactaaacaagctgatctcacgattaaaaaaataacagatttaagatttcaatgcaggtttgtctagccccaagccctattttctttttcctaaaacatcctgcacaagaagtgcaggaaaaaaggagggaggagaggagaccctcaggtctttcttgttgctgcatcctccactaaacttttcctggtggtcagatttgggttagactccctcttacttgctcctgacatgcttggcatttccgttatctcatggcttactgaactgattgtaatgaattgtctgcttttccagtttaccatcagatcatggcctgtgtgaaaacaaggaccatatcttatttattttggctgaaa

SEQ ID NO: 182271 - DNA, 269 bp, Homo sapiens
agctggaagtggtggtgtgtgtttgtagtcccagctacttgggaggctgaggcaggagaatcacttgaacctgggaggtgaaggttgcagtgagccgagatcgcaccactgcactccagcctgggcgacagagcgagaccccgtcttaaaaacaacaacaaacaaaaactttacatttaaaaataaaattgttatagaactgtttccaatgtagccaagagaatccaaatattacggtaatttgatacccaaacctttagtttaaaaaa

SEQ ID NO: 182272 - DNA, 478 bp, Homo sapiens
ctatgtctgaaggctgtgcatgaaatgacataatgtggtaataagtaaatattcagtgaatgaatgtaggcctcatatatctttttcccagtagagagattgaggttggtaatgtagataacagatctggtgacactgtcttctactttagagacctgatattggctagaggtggggtaggtaaaggggagggaataggcttttattatgttggtgagaatgtggagaaactggaacccttgtgcactgctggtgggaatgtataatggtgcagcttctgtgggaaaaagtatggtggtgcttcaaaaatataatcataataaacagaagtaccacatgagccagcagcttctcctgatgcacagtgcaagaaatgaacataagtggtaataataaatattcagtgaatgaatgtaggcctcacatatctttttcccatagagagattgaggttggtaagtaataacagatctggtga

SEQ ID NO: 182273 - DNA, 677 bp, Homo sapiens
aggtatcaaattatccttgcctaagcattacttcacaggctggtcctaacctagttttgcaaaacaaatcaaaacattttaaatccatggaacactttatttaaacagaattttctgtagaagcctggtacaaaaattaaatacggggctgctccattgcatcgaaaacggggaggcccactgaggcacagggatagttgcttttccaggaccacccccctcatgtcagtattattcagcagggaacacaacccgttcccccagccccacagggatttcagtaatctaagtcccctctgcataggtcactgtgacagtgtcattgtcattctctttggttttgttagtgaaagatttaggattcagtgtttatgaagacttgttttgtttttgtttgagacagggtctcattctgttggccaggttggagtgtggtggcatgatcctggctcactgtggccccacctctcaggctcaggtgatcttcccacctcagcctcctgaataacaggtgtgagccaccagtctggctaattttgtttattttttttgtagacatgggggtctcactatgttgcccaggctggtctcaaactcctaggctcaagtgatccactcgctttggcctcccaaagtgctgggattacaggtgtgagccactgtacttggcctatgaa

SEQ ID NO: 182274 - DNA, 242 bp, Homo sapiens
taccttagacttcacaaaatcataataatcaaatacataaaatcatattggaaactgtaagttgtcttgcaagtacaaagtattttatagtttagcttttagagagatgttgaagccattttacccaatcattttgaataagaaattggcaagaatgagaagaaataggttatagagtagataacagtctgggataaaggaaccaggaaggaaaaagtaaagttctcaaaatgagctgctaa

SEQ ID NO: 182275 - DNA, 188 bp, Homo sapiens
tcactcgctagcatcttctgtatttctgggttttctacctgatttccttctccccttacttccccttcctctgttttttccccacaatgcccagtggattcttgagcagtgctgctgtttgtctcttgctggtcaccacgctgagtgcccctgcggccaactgagaagtcctgctcgtggggtggggc

SEQ ID NO: 182276 - DNA, 393 bp, Homo sapiens
tttcgctatgttggccaggctggtctcgaactcctggcctcaagtgatctgcccacctcagcctcccaaaatgctaggattataggtgtgagccaccgtgcccggctgcatgctctggttttagagaaatcggcatacggaccaaaagtcctaaaactgcaaaagagcacaatctgtaagggtaaaaaatgaaaaacgccaaatacacactgcttcccataaatcatgtcaagactacaacaagccgtgtttgagaggaggaaaccccaacgaggaaataatagagtaatggcattcagcaggataccctaggacacaggcaatcgggatacccaacaaatggaaggacagaagaagccaaatgtcatttatgttcagctttgggccattact

SEQ ID NO: 182277 - DNA, 426 bp, Homo sapiens
tagatcgagctggcccactgaaatgaccagatccgcatgtcaaagttgtaaacctttatactcccctgaatgaatctgaagaacagattaaaacggcctttatatgaatgatccaagcacaactacaagagctgaatgagtctcagcaactgcttagaggcttcaagcacaagttgcctttttttctttccatttaattcatcttctgaccatgaattcaatccgcatccaagcttgtctcaatctggagtttcttaaagtctgaggatgcacatttccaacctaagacacaacagtgttcatatcttttgtacctactgttcagaataagaacaactgatacaataaaacccaaaacacctgaaacaaaaaaggcatgtcaagcaataatgagaagtaggtttggacaggtagagtgggacagga

SEQ ID NO: 182278 - DNA, 470 bp, Homo sapiens
gtaaaactgtaaaccctgtgcagtttaactgttggtagttatttttcatctggagctggcctcaaggagtcccattcctaggtagcccaagtaaatgtgcttatggctggggagaaaagcaccatcctactccccagagattcccagggtcttcgtcaccatggacccaggccagggattaagggaagccagaaagagccatcctgagcgtctggccagaggatgtcctctcccgagagctcaatatcaagctcctttggaggagcagttagacacaatagcaccatctcctttgggctttttgagtactttggggcttgcatggccatttcctgtcgcttttgctagggctgacctgggtaaactggagcagacatagaatccagaagtcccatggagctccaaaagggaggaagcctgcagggccacagggcagggttctaccttccaccagaggccactggtccagc

SEQ ID NO: 182279 - DNA, 558 bp, Homo sapiens
tcactatcttctgaaggtaccctctttacctttgtgcactttgccaaatagaacatatatatttcacaaaataaactatagcctgacttcttaaatgttctatccactggtcccaattttgctccttaggaacacagagactaaggctaaagtgtcttgcatttggtaaccgttcatttgaaaataatagctcttctaccgtatttctattttgtcttatccaatattagtattgctatttcctcaaatattccttttataaaatttgttgaatttaccttccaggtactgaaggctttgatgggagaaagcatctcatttcccatttctgaggtaaaaacaagacaaaaccaagagaacaaaaccaaaaaatagatgttggttgtcaaaatatacaaaagataaaaacatctgatcactagctttgactaaaagatagaagctatgatttatttaaatttacattgggcagtgtattgattagagtaacattttttttcttgtttatataacagtccaaagtgagtattcctggttgatatgtgtttttccatcacg

SEQ ID NO: 182280 - DNA, 279 bp, Homo sapiens
ttgataccacacccatcgtccacaaggaagttaagacgcttgtactgtatatgattagaatgcatcaaagccaggattcaaaaacaggtttctatgaacttaggagccctgtcattatgccaataagatacactgactttctccttttctattacaattgttcctttcttggtgtgtataatacacactaatacttcaggagggtaagcactgtggcttacccctttgcagccatcagagactctagaacagacctaaggaatctatatttgcttagca

SEQ ID NO: 182281 - DNA, 1378 bp, Homo sapiens
  misc_feature (595)..(595): n is a, c, g, or t
  misc_feature (751)..(751): n is a, c, g, or t
  misc_feature (981)..(981): n is a, c, g, or t
  misc_feature (989)..(989): n is a, c, g, or t
  misc_feature (1015)..(1015): n is a, c, g, or t
  misc_feature (1019)..(1019): n is a, c, g, or t
ggcacgagggccacatggacggagctgccggggcggcggcgccgggagcaggatgcggccgcccgtaattaaatagcatttactcttattattactaataataataacgtaatcatacctctagtcatagcataccatttatcgggctcggcgcaggcccgcggggagcgcagcccggcggaggtctccctctgatgccgagccgaagctggacggtactgctgccatctcggctcactgcaacctccctgcctgattctcctgcctcagcctgccgagtgcctgcgattgaaggcgtgcgccgccacgcctgactggttttcgtatttttttggtggagacggggtttcgctgtgttggccgggctggtctccagctcctaaccgcgagtgatgcaccagcctcggcctcccgaggtgccgggattgcagacggagtctcgttcactcagtgctcaatggtgccaaggctggagtgcagtggcgtgatctcggctcgctacaacctccacctcccagcagcctgccttggcctcccaaagtgccgagattgcagcctctgcccggccgccaccccgtctgggaagtgaggagcntctctgcctggccgcccatcgtctgggatgtgaggagcccctctgcctggctgcccagtctggaaagtgaggagcgtctctgcccagccgccatcccatctaggaagtgaggagcgcctcttcccggccgccatcccatctgggaagtgaggagcntctctgcccggccgcccatcgtctgagatgtggggagcacctctgccctgccaccccgtccgggatgtgaggagcgtctctgcccggccgccccatctgagaagtgaggagcccctccgcccggcagccgccccgtctgagaagtgaggagcccctccgcccagcagccaccccgtctgggaagtgaggagcgtctccgcccggcagccacctcgtccgggagggaggtnggggggtnagccccccgcccggccagccgccccntccnggaggaaactcttggatgatgtactgaccaaaacagggaataacctaacagagaggaagacagggattttaggaaaccggagatcacacaggaaggaggtaaagggaaatcccaggatgatggcaaagggaagtccccaaacaacagctgtgcaacaagaataaagaacaatcagaggacctcttgagcccagaggtcaaggctgcggtgagccaaggtcgtgccactacactgaagcctgggcaacagagtgagaccctgtctcaaaacagaaaaggacctatcagccccaagtggagcagaacagagggatttgggaggaatgtcctcagaaaaagatattaaaacacagttatctg

SEQ ID NO: 182282 - DNA, 329 bp, Homo sapiens
gtctccacccacgtttcaccttgaattgtaataatccccacgtgtcaaggataggtccaggtggagataattgaatcatggggcagtttcccccatactattcttgtgatagtgaataagtctcacgagactgatgattttataaatgggagtttccctgcacaagctctcttgcctgccaccacgtaagacatgactttgtttcttatttgccttctgccatgattgtgaggcctccccagccatgtggaactggagtccattaagccactttcctttataaattacccagtcttgggtatatgtctactagcggcatgagaacagac

SEQ ID NO: 182283 - DNA, 635 bp, Homo sapiens
gcctggtggggactaatctaaaccagttcaagatgcttttgcttaagcctgtttagaggaacggaaggtgctgcagaaatggaaatagagtggtatatgggcctctttgccaccccgctcctgagctcgctgcctcttttttgtttttgtgggtttcttggcacctacctagatttctgctgagatctctgtttcaggtcttttcagagatcatgtttcctaaaagatggttcctttctgctggacatcctgtctctgtcctatttggccagatagtacttcagttgggaaaagccatctttctcttcgtgcctggtgccctatttcagaaggaagcctgaaaagtcatttccatattctgtgtgtgattgcgtcctgcctagcttatcacagtggttgttccctctcggatgaacaattcctaccctcctctttgcccagcagatgaaggcaaggattgtaacccattattagagtattgaggacctgagttccccactcatgttgaacttgaggcaagactgggcggtttattcccctctggctactctcccacttgtaaaatgaggcgacatctctaatcattgacaccaaacaagaacatagcctaataataaaatgaatggtgttatatg

SEQ ID NO: 182284 - DNA, 409 bp, Homo sapiens
aggaaatctagaatttgcccctgccaacatgtgtgttgcctcttcttatcagccttctcattctgtcttgacttagggcctctcctatcagactaagctctcctgaaggcagggactttgttgtatctcaagcacctgtcatagtacctggctcacaggttgacaatgacatccttaacactcatcaatagctagtgtttactgagcacttactatgtgctaagcaatgccttaggggatcccatcacagcctatgagggtttgttatcctcattttacagaagagggaactgaggcatggctaggaattatgagacttgctctaggagacctagctggggaatggtttgacttcagacttgtctgacgtaaggcctttgcccagtgatcagcaaactacgacctgtgg

SEQ ID NO: 182285 - DNA, 194 bp, Homo sapiens
ggaaggaaattcagctgtgatagtaacctgagttctttcactctcagtggaaattttaactaaagaatttctggaaattaaattgaagtattttgttaaaaacgaatgactatgggaggactttaaagaaactacaatgtattaaaattgctgtcaccaatgcaaaccattgctttccatgatttgtaaatagt

SEQ ID NO: 182286 - DNA, 438 bp, Homo sapiens
cccaaggctgcctgctgagtataaaggcaatcaccaaagataataaaggaaggaaaatcttttcttgaacctgctttcatccttgattatccttaataataatcctcttgttaatcctatccctgcaaacatatatgaattcatgactttacaaataggaatactcactgcgcaaaagatattaagatatagcaaaaccaataactgtgcataatacaaccttaaatttggtaggttatgctgctttttcaacctacagccaagagttttgtatagaaaattccataccaatgctataccacatatttagatactactactgccttaaaaaatgtaccataggtgccaagttagccaataaaactgagacacaccttaccagtccagtagctggtattaaaagattaagactgcttaatgctacccacttaaatactg

SEQ ID NO: 182287 - DNA, 193 bp, Homo sapiens
tggatctagaggacaggctgccaacattggaactgctgagtgaaaagcggacctgcttgtgttttctctaaacttcacattataccattggcatttcccatgtcctgtggacccgtgagggtcatttcgaatggctccagcacgttcccttctatggctggatcctcacttacttctctgtcctcatcgagga

SEQ ID NO: 182288 - DNA, 392 bp, Homo sapiens
tcatctctttaggtgttaaaatagaaactgccaagacagctcaacaccaaggttgcaaaatgtggagaagccacaatccagaaaatgcagaagcgaaggcgtcggtgccacgcaggcggcagtgctgtggcaggcggcacgccgacgctaactcccgccactgcagcccgcactgagacaggtggagagatgctttgctagaaagagggtcttcccagcatttctaaaccagtcatttaaaaattttacaacttgtggccgggcacggtggctcacgcctgtaatcccagcactctgggaggccgaggcaggcggatcacgaggtcaggagatctagacaatcctggctaacacggtgaaacctcatctctactaaaaatacaaaaaattgg

SEQ ID NO: 182289 - DNA, 246 bp, Homo sapiens
cataagtgaagaaaggaaggtggaattgagcagaaggtacactctccctgcagcgtcacctttcctcggcttggcgtgtcctcagcctcctcctgatgggcagagacctgaagggcctgtggagtccagttggcagcaggatcctgcggtggttgggccaagaaggggctctggtgccatcatcttgtgattgaaatctgctctttatcagttttgcttccttgttcagggatgggactgatcaca

SEQ ID NO: 182290 - DNA, 316 bp, Homo sapiens
ttggataaaatgagtttatttgcttactatttccctactgcctgaaatagttccaggcatatcagtgttcataatgtatttattgaatgaatgaataaactcatttgtaaatccagtatttaatagctgtgtaaccttgggcacatcatttaacatttctaattactgtagcctcagttccttcagttggaaaatggtgaggaggagacaattcctcctacctcacagcattattgtatgaattaaatggaaatttatgtgcaaaaaatgaatcatagcaattgagttgaggtagaagagagcaggtggaccccaa

SEQ ID NO: 182291 - DNA, 656 bp, Homo sapiens
ggcctattttcagttcagaaagtatggttaatattgttttctattttagcataaagatatagttaagtggcttgttaaaaaccacctagagaatagtagtgatatcaagatttatattgtcagctacttgttaattctaatagtaatgccctagtctaattttctagactcttattttgttttctacgtagtagttttggattaaaatggactacttttttcttacctcctatattacttaagaaaggcgaaatgaataatttgtttatatttaactttaaaattttgggagcctagagtaagttgaaagcatagcttttgtgggactgcttcaggttccagaaactagttgtaaatgtcaccatctttaccttattttaattttttccctatgaaagcgcatattatagatttattctccctgcagttgaagtgttgatggaaaactaaatgcagaattcctttctcatttcgatttagatgaaaaaccctcacttttgccacttggtttgtagaaactcacaacttagtgcttctatattactattttaattttcataggtttatgtgattgtattcagtattttccatcttatatttaaaaatttaaagaattatctcaccaaaggtttctactgttaccttgggtggaagtg

SEQ ID NO: 182292 - DNA, 248 bp, Homo sapiens
ggcctattttcagttcagaaagtatggttaatattgttttctattttagcataaagatatagttaagtggcttgttaaaaaccacctagagaatagtagtgatatcaagatttatattgtcagctacttgttaattctaatagtaatgccctagtctaattttctagactcttattttgttttctacgtagtagttttggattaaaggcatgagcccccctgcctggcatcatatgtcatttttgaga

SEQ ID NO: 182293 - DNA, 215 bp, Homo sapiens
tcatcgagctcggccctcattagtgaggtgaattttctgttttcaagttacacatcttttttgtaaaaaaattataatacagaaaggtctaaagaaaccaagaactaggtaccaagcacattttagcaaacagcttttttcttttttttttttttttgagatggagttttgctcttgttgcccatgttcgagtgcaatggtgcgatcttggctca

SEQ ID NO: 182294 - DNA, 306 bp, Homo sapiens
ctatctgcaaggaaaccatgcgccatcattatttcatggacacttaaacaagtatcatttgaaggaagctaaagtaacttatctatatacaatgaccagcagctttcacaccagtttggacagtgaactcacatgtaagagataccagattaagtgccatgtgcccacttgactactttacataatgtttcactggtatttatattttagagctcataagaccacttcaagctgatatctaagtgagaacagttctagaatttcaacttattcatgaatcatttaagtatgaatgtacttagacta

SEQ ID NO: 182295 - DNA, 386 bp, Homo sapiens
agggagcacgagtgaaagaagctcaaacacagggcgtgaggtgcccctgccagcctcggtccctgaccacacggccccgcctttggctggagggagagccctggctgtcagccgcacggtgtggaaagcccagaaggaaagcagttttgaaattttacttgtgattgatacacttttggccacgttggctattttcagagcctagctcccccatcctctgtcacagacacctttgagttctttaaatggctgtatcttttgttgtcatatggacacatggtctttatagtacattcagacagaacaggttttgtgagcaaaggatatcgagcttttttccctgatatacaaattgcaagagttcgttctcctcataagcctgttac

SEQ ID NO: 182296 - DNA, 764 bp, Homo sapiens
gccagcaagcttccagtttgctagtattgtttcttatgacaattatgtaaaatgcctttttaaaaacgtgtaacacttacgatgccattcaatctatagctaagttttgtgggatgccacatcatttggatcaatggttccagtaaaatgttctgtaaacttaaatccagaagatcagtcatttgtggtgaagttatttatttgaagaagatacttctcagttttatatgaatattggcaaacacttttatacttccgatttttaaatgttgttcacatgaatagccagttctgccttattcctaatttcccggccagcaacccagtcatcctgaactgatggtgctgtcatgtgtgaccatttcctcacttccccctcagtgaaatgatgcgccatcattagtaatccattgtatagtggcgtgtaattttttttacccagtactctattggtggacatttaattcatttgtggtttttttgctgctgtgaatatcctttcatatgtatcttcttaaatttgtgtaagtataccttaagatcaattcttagcactgaaaatgcttgagatataatttttaacataatttagaatgcttaaattaaaaactttttgtaggaaaagaattattttacaaataaaaatatcttttccatttttttaaataatatttcttagaaattcattggtttcagtttttgacaaataaagacaaccagttcaggtacttcatctagcaaaataatcctttaataaaaatcac

SEQ ID NO: 182297 - DNA, 385 bp, Homo sapiens
agtaggaacagttgcttcgtgaacagaaacaagctcttgactaatttatatagccactttaggtgtgcgcccacccccacaagaaaaagcaaaacagaaggaaaaaaaatcactgaaatagtcttatattactttattgaatttgttttatataattagtacctagtcactgagagtgattaggctgcttgtctgcattatgggattcagtttttacttttttgaaaagtctataatactttggaatcactcaacacagagataagttgctgaagtacacagcccatgcccttattagagtatttacatttaaataaacatgtggagtgtatatacagaggattctaatactccctgatttaggatttgagaaattttcaactat

SEQ ID NO: 182298 - DNA, 559 bp, Homo sapiens
ttagagatggggtctccctatgttgctgaggtcggtctcaaaactcctgcagcccttttattttcaactgcattttctgaggcatgtaccttagactaccagaaagcaaaaacagaagactcttgctctggcttgttaggaaagagcactgtggtgtccctccatgcttaaagaaatgtttcggagtcaaaatgtctgatcttacaacactaacccgatttccttatggctgaatccagtttgatagaaattgctccgaaggccacactaatctctaggacacttagttccccttttggctaattttttaagaagccgtactaatttttaagaactatttctgtcctctcataagctaaaggatttgtactcaatggcgtgtttcaacatgcagcactatgtcatgctatgcatatttttgctcatattgaatactatttctggactgagatcctgagatgttaagctactacactttactagctttacatagtactgagtttggcattacacacttactgaaaataattggtggaaatatccctcctaggctttcttt

SEQ ID NO: 182299 - DNA, 306 bp, Homo sapiens
ttacaggcataagccatcatgcccagcctactattgtttaaagtcctaaaaaaagatttaaaagatttagatccatatactttttctccaatggaaaacaaaaatacatgcaaattcacacaattgcatattttaaactcacaaaataaaaccacgaaaatatgataaaacagtagaaaatgaacattgccttattaaattcttttcagacctactttctgatttgttaagttgttcacagaataactattttcagcccaactttccaataaacaatgtttacacatatggctgtgtcaagagagg

SEQ ID NO: 182300 - DNA, 307 bp, Homo sapiens
aaaatgacatataaaagtgtagatttctgtactttcttaaaaaatgggaataccaggttcctggatctcacactccctataagattaacaactctggtgctgggtgtgactactcccatagagaggccgcagtctccaccactcccagctgctcgtctccccgttttcacgcagcatgacatcagcatggccctggagacatttgagtttgccaccccggggcaggccagtatcctctatggggcctttacgtgttacagttactgttttcaggaatgtccctacactgtatgtgtttgttctaagg

SEQ ID NO: 182301 - DNA, 231 bp, Homo sapiens
ttctcagagttatgtagatatgtgttcatttctatttatgggaatcagaccaattctattaagctttgaaagaggtttttgtttttattttaaagaaaccagtaacgatttggaagctaaataagcagtgagggttaggggtggagatgtggccatacacctgtcttgtgtctcattaactatgaggtggctactactgtataggactgattaaaatgatggagggctctg

SEQ ID NO: 182302 - DNA, 128 bp, Homo sapiens
tgatcgagctcggaccattgcggtgagcatctgatttcattgttttagtggaatatctaggtagcagaactgctgagacatggggcatgtgcatgtttaactttataagaaactgcctggccaggcgt

SEQ ID NO: 182303 - DNA, 558 bp, Homo sapiens
tggatggaagctgtctgccctagcgccgtggcatattgatggggttggagttggaggggaaggcagctcagagaccaccacccctttcagggcattggcacttcatgaactttctgaatccaaatccctaatgccagttgatcacgtgtgtgtgctcacgcgtgtgcacaccacgtagattccattgagagagacacagcttgaggagtaacctgcctgactggggcagtgtggacaaggatcctgtggaacccggctgagcctggctcccaggtgaatgggtcagaggccccagcagaagttgctgtgcccactttttgggaacgcttggggtgactcgggggctccctgctggcttccgtgtgtattggtggatgtgtgcaagtgtagcagtgggaggagccgctggctgaggggtgctggagggtggccggggcccttctagcctgtgcgagtggccgggcagctcaggttcctgccggggtgcctctgtcctcctgggaagggagcgtgtagggtggtgggagcaggcggccctgtccgtctcgtcctggaatc

SEQ ID NO: 182304 - DNA, 691 bp, Homo sapiens
ggcctggaagaattgatagaatcatctatgtgcctttaccggatgcagcaacaagaagggaaatatttaagctgcagtttcactccatgcctgtcagtaatgaagttgacctggatgaactcatccttcaaaccgacgcatactcaggagcagagattgtagctgtctgcagagaggcagctcttctggctctggaagaagacattcaagccaatctcatcatgaaaagacatttcactcaggccttgagcactgtgacacctagaattcctgagtcattgagacgtttttatgaagattatcaagagaagagtgggctgcatacactctgagaaaatatatatattcaagatgctgaaaatcctttccagagaaaatttgtttctttttaaaattttttgagagtgttaaaaaaaattttactaggcaaaatgtttgaagtatgttcagtagaatttaggggctttggttcttacagattttcaagtcatgtaagtacagtgaaaatatctctgagcataagtttcaatcagttttacctggaaatttgtggtgtggtttaaaaaacaaatgtttagctttttcatttgcgacctagtctgttcatcccatgaagcgatttctttttccagaatctgtttgagtgtctttctaaaatgccaaacatgttggcatcaattttatacaggga

SEQ ID NO: 182305 - DNA, 883 bp, Homo sapiens
gaattagggagagatttctctttgtttccaatggatcctgaaggtgagctgccatcacctcatctctaggaggtgctgtagggagaaaaactggaggtagcagggtatttctctctcttttctcccctccgtctagccttaattaatagtttcatcttttgggtcatcgaaaaagtcagctctgattcatccatatccaataaattgcagggtcacatggatcgggtcttccgagccacctgccttctttttctcaagttccctggtggcgcctcttcaggtcctcacatctcttctgtcccgtcacagaggaacacctcagacccatcctctctaccttggcatatcaccccctggtcccttgatgcttcttccttctggtcctcggagtcttttctgagctccagcgtcaccggcgttggtggcctttccaccctcccctctcgcatgtgccttttccagtccattgggactactccctgctcccccgtcacacacgttccctaggccagttccttttcacctggctgtagtcctcatgaccagctaaaagtgcgcctgccccagatatttgtgatttccctctcttcagagaaagcagggagcccctggcatccctatctgtgacaggtgccacacccgccttacaatgcaggtctgtgtgcccttgttgtatccctaactgctctcaaatcccttagtgacggcctcatttctctgcctttgtgtagcatttaaacagtttaaatggctgggcacggtggctcacatctctaatcccagcactttggaaggccaaggcgggacggatcactggagctccggagttcgagaccagcctggccaacatggtgaaaccccctttctactaaaaatacaaaaa

SEQ ID NO: 182306 - DNA, 517 bp, Homo sapiens
taatccagatggcttaaaaatttaaatatgaaagatttttttaaaaaattttacagaagaaagcatgagaccatctttgtgtccttagagtagacgaagatcttaaagagtcaacaaaaagcacctattagaaagaagaaacctgataaattggactctattaacactgaaaactacagttaaacagagtggggaaaaaataatcaccatatctatatctgacaaaagactcaattccaaagtatacagagaagtctcacaaaaccaataggaaaaaagacaatacaatggaaaaatggttaacagacttaaacagatacttcacagaaaaagatatgctgaaatgaagtataaacaaatggaaaggtcttcaacttcattggttacagggaaatacaaattcaagccacaatgcaatcaatattagtgtttatttaccacaatggctaaaacataaaagacataaaaatagctagtgttggtgagaatgtaggagtatacattggtctaaatagtt

SEQ ID NO: 182307 - DNA, 967 bp, Homo sapiens
gctgggactacaggcacatgccccatgcccggctaatttttgtatttttagtagagatggggttttaccatgttggccaggatggtctcaattacaggcatgagccactgtgcccagcctcttctgtgtctttaaaaaggaaagtgtcagtcaacaaaagagcccctctgtcatacaaaccaaatcagttttcaccaaaatgtccttagtcctctcagaaaggcctggcctttaggaccttggaagcaggccctaaagcgcatcggcagggtcagagctttgtgttcaggaacactgggatctgctgagagctggtgtagccgctccaaaactgcacactgcttttcctgtctgctttagtttgtgttgtaaaaacataggaagttcgtgtgtgtgtgtgtgtgtgtgaattcaaggcataaggtgcagttgtgttatgtgggtatagtgcatggtggtgcagtctgggcttcttaccctcacacctcctgcctcccctcgttagagtcccccacatccgccttccactttctgagcccacattgcctgttgggcagctcctggttatgaggcaggacgtgtggtgtttgactgtctgtttctgagctgttttacttaacacagtgtatatggtgcatctttaggaaagcatgcttgtattttcctttcaaagccagatatgggcgggtgtggtggctcatgcctgtgatcccagcactttgggaggccgaggcaggaggattgcttgagcccaggagtttgagagcagcctgggcaacatatcaagactctgtctcttaaaaaaaaaaaaattagccaggcatggtggtccacacctgtggtcccacctattcgggaggctgaagtgcgaggatcacttgagcccaggaggttgaggctgcagtgagctgtgattgtgccactgcactccagcctgggcaacagagcaagaccctgtcttaaaaca

SEQ ID NO: 182308 - DNA, 507 bp, Homo sapiens
gctgggactacaggcacatgccccatgcccggctaatttttgtatttttagtagagatggggttttaccatgttggccaggatggtctcaattacaggcatgagccactgtgcccagcctcttctgtgtctttaaaaaggaaagtgtcagtcaacaaaagagcccctctgtcatacaaaccaaatcagttttcaccaaaatgtccttagtcctctcagaaaggcctggcctttaggaccttggaagcaggccctaaagcgcatcggcagggtcagagctttgtgttcaggaacactgggatctgctgagagctggtgtagccgctccaaaactgcacactgcttttcctgtctgctttagtttgtgttgtaaaaacataggaagttcgtgtgtgtgtgtgtgtgtgtgaattcaaggcatgagccactgtgcccagcctcttctgtgtctttaaaaaaggaaagtgtcagccaacatggtgaaattccgtctgtactgaatatacgg

SEQ ID NO: 182309 - DNA, 576 bp, Homo sapiens
ggtatgggcatcatgtgatataagtattacatgaatttcctactttttatccagttatggttatatcacctatcagtgatttaacttcagccaagacagaagtttatctcataataaccaagactgggccgggcacagaggctcacgcctgtaatcccagcactttgcgaggctgaggtgagtgtttcacttgaggtcatgagttcgacaccagcctgctcaacgtggtgaaaccctgtctctaccaaaaatttaaaaaattagctgaatatggtggcacgcacctgtaatcccagccattcgggaggctgaggcatgagaaccacttgaatccaggaagcggaagttgcagtgagccgagatcacgccattgcactccagcctgggcaacaggacaagactctgtctcaaaaaataaaaaagtaaaaacaatactggaggttgtcagtctagggtggcgttagggactttcatttccttccagaggacattctgctatccacagggtagaagcctaatcctcaaggttcaaggtgacaagaatagctccaaccatcatacgcttattccaggaag

SEQ ID NO: 182310 - DNA, 274 bp, Homo sapiens
cgacaacaacattcgggagtcagatggaaagcattcctatcattggttaatttcctccaaggaggcaacaggtgttggctccaaccactgcaattggatcacctccaactacccactagggggcgctgctatgctgcaagaagtggggcaggcttgcggaactcatccctgcaaaaccattaatacccccgggagactgaagtgtgaagttgtaaagcttggtgttaacaaacaaaataaactcactgactcatgcagttgttggctgaggagt

SEQ ID NO: 182311 - DNA, 510 bp, Homo sapiens
tattaaaattgcactgttctcaaaccacacaatttaatactgtgtgcaattcaaatttatatttgcacttataatgccactttattgcattgagagcacttccagcttgacattttaaggaggttttcacactggcctgcccaggttgtctgtacactgttgaactgatgggggtgaggggaatgaggaaagtagcaaagatagtgaagcttgattgacttatttaagaaaagacttattgccactaagagtgaggtgtgcctatgtgtgtggacctgtagttagaacaaacagtgacagagggacagagaaggagaaagagacccagagagaaagcagggtgtcaaggcaggagaatcacaaccacagcaggtgggctggagtcaaaaaagaatgaaggccagacacagtggctcacacctgtaatcccagtactttgggaaagtgaagcaggtggattgcctgagctcaggagtttgagaccgggctgggcaacacggtgaaacccgg

SEQ ID NO: 182312 - DNA, 206 bp, Homo sapiens
tatttttaaaaaccactatgagtgctttttaaaaagttctatctcatacttgagagaaaaagccttctcaacagtaatactctcattcattaaacaaatgtcagaaactgtttaccttagcaagccttaaattttaggagaaatggaattactttgcatgacagttataaatctcatggatttcaattccaaaaaaaaaaaatctg

SEQ ID NO: 182313 - DNA, 417 bp, Homo sapiens
gagtgtttattgggcagtgttgacagcagcttcagtctcagaaaaaggatgggaagttgctctcagactcggaaccctaaagcttggtcggaattaggtttctgccctgatcctgatgctctttctgcccggtggagagcacctttaaaagtagtcacctgagggtcaaggatgggtacaacagcttcccattttattctaggagatgtgtctggagataaaatgagcatgtgatgtttggcagggctgcatgcctcgagggtcatagccattgtccctgatgttcaggacctggtaactgggggagtaaggacttaaggtacatgttttcctgtttcctctttgctgtgagttgtatgtgagttgatttgggtggtaaatgaaatcatatcttttttttttttttttttttttttt

SEQ ID NO: 182314 - DNA, 523 bp, Homo sapiens
tgggggtactgtatcatgcagttttgatacatggatatactgcatagtggtgaggtcagtgcttttagtgtaagcattattttagtagtgtacattgcacccattgggtaatttctcatccctcacctccttcccaccttcctacccttctgagtctccaatgtctattatcaatctatatgtccttgtctagctcccatttataagtgagaacatgtggtatttgactttctgtttctgaattttttcacttaagataatggcctccagtcccaccaatgttacaaaagacacaatttcagtttttatggctaagtagtattccatggtatgtgtatgtgtttgtgtatgtatatatataaatatatatgtgtgtgtgtattttatggtatgtgtatgtgtgtgtttgtgtgtgtgcaataagtgcccattgatgggcacttaagttgattccatatctttttatgcaatagaatattatacagttattaaagtggttgtatatggtatagacaaatatgta

SEQ ID NO: 182315 - DNA, 253 bp, Homo sapiens
cccagggtgtggtagatgtggaggaaagtggtagacgaggaggatgttctggagggtattgagaggtaggatcaaacagggtcttcaaagctttggtaatgcacttagattggattggtaatataatataaagctacatgaggattttaattgggggtggttggtaataaaggctgattatattttttaaaaaataccattctggcttctttgaggagaaaagattggcagggagtgagagtgtcagagaaaa

SEQ ID NO: 182316 - DNA, 759 bp, Homo sapiens
aaaatatgcagagctattacagttcttggttttgtaatggtcacaaagttatggttgatatctatagcttccacctccaactacctctatatttccctttcccagtcagaatcagctgctctgggttctttgcctggtagagtgcttcaaaccttcctttttgaaaggtctgaatcctcaatcatcctgcccttttctgattcttgtggttttccattgaacctttacagttggacatggaagtattaagaggcactttagaaaaatctcctgggtaccagaaagtcctccttgcttccatttgcagaagcaaaccaatttaccttggaaattcagatcaatcactacagccaataaattaaccccctgtttttcatccgttggttaagtgttacaagaagtgcaaaatgaccaggtggcagtctgataagcagaattctgagatgaatgtcgtgactttccctctcttgtacacaccctgtgtaatctccccttgagcatggttgaaacctgtaaatataattggatagcacctccacgattatgctatatggcaaagggttcctaatcagttgactataatccaaagggagattatcctgcgtagatatgatctaattaggcaagttatttaaaagcagaagagttatcctgctggtctagaagaaaaacagcctgttgtgaaagtagggaccacagggacctgagggtgacctccaggagctgagagcagtcctcagctaacagtaaaaaaaaaaa

SEQ ID NO: 182317 - DNA, 666 bp, Homo sapiens
gggttgggatccttgggaccacctcgggatgcaactcaggtgcctctaagtcagcctttgaggcgaggaaaagtcctgaaggacactaggttaagtcagggaaaatgtgtgttgggagtagagtggggagtggttgccgtatgtgcaaaggacagggtattatgggagaactgcaagccacagattatcattattatggtttgttattaataagcttggtagggaagggagtggtgatagtgagaaaggattctaaatgtaggctcaggccagaccaaaaagcaccttgtataacatgttaagcactgtgcccttaatctaaaagtaacagggagctattatagggatttacatagaggagtgataagaagagctctccattttaaagtgatcactctggttttgttggagagaatcaaggtgagattataaactggaaatcacttataggaagccttttgcaatggtgttggtgagaggaaagagtagcttcaattaagacaatggcaatgggtaaagaaaaaagagtgataaattgggggtgatattgtataaaaaaatagcttggcacggtagctgacatctgtaaccccagcactttgggaggccaagaaaggcggattacttgagcccaggagttcaagaccagcctgggcaacatagtga

SEQ ID NO: 182318 - DNA, 346 bp, Homo sapiens
ttttaatcagctgggcatagtggcatgtgcctgtagtcccagccactctggaggctgaggtgggaggatggcttgagcccaggaatttgaggctgcaatgagctatgatcacaccacatctcaaaacaaaaacaaaacttatctagggactacacgtggagctttggatatgggcagctaatctgtctatgattaaaaacacgcaggtggcttactttattaatccaaaataaaagaatttgggaacacaagaaagggaaaaatgagcctccatgtcaagacctttcccagaaacctgatagcttatagttagaaattgttatagacagtccagtgcaaggaggac

SEQ ID NO: 182319 - DNA, 720 bp, Homo sapiens
ataatcatgaatagaatgttagaatggtagaaatatgtatgttaaaggccattctggtaagctctcagatgtaaaagaggaacaggtggcaatccttgttataaaggggcaaaaatcttgtttgaattatgttctagtattttgcagtaagtagaatttttaagccaggggtccccaacccctggctgcagattggtatgagcccatggcctattagtgttgcaggaagtcagggaccccaaacagaggaaccagctgaagccatggcagaagaacataaattgtgaagatttcatggacatttattagatccccaaattaatacttttataatttcttacacctgtctttactgcaatctctgaacataaattgtgaagatttcatggatacttatcacttccccaattaatacccttgtgatttcttatgcctgtctttattttaatctcttaatcctgtcatctcataagctgagaaggatgtatattgcctcaggaccctgtgatgattgcattaactgcaaaaattgtagagcatgtgtgtttgaacaatatgaaatctgggcaccctgaaaaaagaacaggataacagcaatgttcagggaacaagagagataaccttaaactctgactgccggtgagccaggcggaacagagccatatttctcttctttcaaaagcaaatgggagaaatatcacagaattctttttctcagca

SEQ ID NO: 182320 - DNA, 328 bp, Homo sapiens
cggaggggagccccagtccattctcatcacgaatttgctttgagcagtcctgcttctttccgggactcagtgtccgtgtctacagaatgagagagtgtgcccctgagcttcctctgctgcttgtgaatgcctggggcacctcacctacgtggcttcatcctggccctccctactgttgacataagctggcctggggagggaggacgagctcctcagccatccctgtgtggagaaaaccttcctgtttgtccagtaagccatgagcacgcgagacgcagctggagaggacacaggcactcagggcattcggctccaggcttgaatcctg

SEQ ID NO: 182321 - DNA, 141 bp, Homo sapiens
caattccacttcctccacagctcctggataatgactatactagatctactccaattctccacactgcacccagaggcatcattcgaaagtgcaaatctgatcatgtcatctcctggcttagtactctccaacatacaaagg

SEQ ID NO: 182322 - DNA, 115 bp, Homo sapiens
taaacagcttgaaaaaagagacatttattagctttcacagttgccaagcttcagaaattcaggaacggcttagctgggtggttctggttcaggatttctcatgaggtttcagtca

SEQ ID NO: 182323 - DNA, 231 bp, Homo sapiens
ttcgttagaaatagcccctggttttcatgccaagaagttcatcaatgtgccacttggtagccttctcgaaggtgatagaaatgtggccattgcagcctgattctgtacggtgactccagtccacgtattccaggtctccaggtgttggcaaacaagacctgggacccagggcccctccggagagctccctgtaacttcagtagcaggagacatgcgggatccctttacaaa

SEQ ID NO: 182324 - DNA, 495 bp, Homo sapiens
tttccccagggtcgtgctctctcgttgaccgagtgacgagagcggccacactgcatcctttccccagggtcgtgctctctcgttgaccgagtgacgagagcggccacactgcgtcctttccccagggtcgtgctctctcgttgaccgagtgacgagagcggccacactgcatcctttccccagggtcgtgctctctcgttgactgagtgacgagagcggccacactgcatcctttccccagggtcgtgctctctcgttgactgagtgacgagagcggccacactgcatcctttccccagggtcgtgctctctcgttgactgagtgacgagagcggccacactgcgtcctttccccagggtcgtgctctctcgttgactgagtgacgagagcggccacactgcatcctttccccagggtcgtgctctctcgttgaccgagtgatgagagcggccacactgcgtcctttccccagggttgtgctctctcgttgaccg

SEQ ID NO: 182325 - DNA, 242 bp, Homo sapiens
ggaggtcgaggtggcagtaagccaagattgcaccactgcactccgggctagactacagagtgagaccctgtctcaaaaacaagcaaaccagcaaacaaaaaacgaaacaaatgaattaccaagtcatgaaaagacatagaaaagacttagatgcatattactaagtgaaagatgccaatctgaagaggctagatattgtgtgattccatggaaacgtgaacagtcaacgattagtggttgct

SEQ ID NO: 182326 - DNA, 491 bp, Homo sapiens
atagcaggagaggcgcggaagcgctctgcccagagttttgaagtgctcagcgtttgcgatcggccacctctttatccagtactacttgggaccccgttccctcccacccgcctttgtagaacgggaaattgaggccccgaacgggaaaagagctcctagaatgttagaggctcttgcctcactataactcattccccatcaaagattccagtaaccggaaggctaaaatgtaaattaaaaggccgggcgcagcggctcacgcttgtaatcccagcactttgggggaccgagtagggaggatcgcttgaacccaggggttcgagatcaacctgggcagtatagccgaaccttgtctctataaaacataaaatgtaaattaaaatgtaattgtagtttttgttaaaatccttagtgggtttaatggcatttgtaggtaaaatcaaaccctccctatgccaaggtactgtgtgcttcgggcactcatctctgcc

SEQ ID NO: 182327 - DNA, 590 bp, Homo sapiens
tgtactctgtccctttatttctcaagccagccgacgcttaggaaaatagaaaagaacctatgtgattatcggggcaggtcccccgctagacgcgggcctccaggaaacacattctcatttcctaggggctgtttccaacctgcatccgctacctcccgcgcagcaagctgccagtgggtgccaaagaggtgctcccaagcccggacacacctgtgcaggctcccctgaggttgcctcatcccgggcacaacaaaaaggcccaaaacagctccgaggatcctgccaaggctacggatgatgtcctgcccgggacatcaatgtcctccttgggaaaatgggctcagccacaccctgtctcacatggggaaactgaggcccacagaggtcctcaaggaaatgcgttcattcattcattcattcatttgttcttacatgtagtaattataaagcaatgatcacgtgctggataaacaaaacagatgtggtttttgccctcgaggggactgacagtccaatgagggggaccaacatttaaaagtaggtgcacaaggccgggtgcggtggctcatgcctggaatcccagcactttg

SEQ ID NO: 182328 - DNA, 482 bp, Homo sapiens
tgaacagaactaatggcgacatttcaagattatgtgtttaaggccaggcgcagtggctcacacctgtaatcccagcacttggagaggttgaggcgggcggattgcctgaggtcaggagttcgagaccagcctggtcaacatggcaaaaccccatctctactaaaaatacaaatattagccgggcatggtggcacatgcctataatcccagctacttgggaggctgaggcaggagaatcgctcaagcccaggaggcagaggttgcagtgagctgagatcgtcccactgcactcaacctgggcaacagagcgagactcatctcaaaaaaaaataagtgtgtgtttagaaagtagatatgcttcctgcctttccctttcaccatccactggctggctgtagttgaaaagaaagccctaaggaattgctgagtcataaaatggaagaatccagagtgcctgaatcattgaaatggtcgccaatccg

SEQ ID NO: 182329 - DNA, 456 bp, Homo sapiens
cgcagcccgcgagcccgcatcaggcttccagtgggccccgtgggcagtgccagcctttcccacctccgcatctggcaaagcctggccttcgctgcgcttcggtgtcgccacatgccttctggaaatatcacacctccccacctgcgcatgcagccgtctggccctctgtgggcctcggttcccgcatgtgccccgtggaaagaacataccttccccaactatctggcagcgtctggccttctccgggcctcggcctccccatttgctgggtggagaatcacggcccggccacatcggagccaatggctggtctctggacctcggtctccacatttgctcagccggcaggaacatcccttctcccgccctctacctcggtgggtggccacggccgagcaggcagcgacggcccagtggaaagaggacaaacccttgtgggccttagggcgaagacgt

SEQ ID NO: 182330 - DNA, 313 bp, Homo sapiens
acccgggaacgaaattagcatctcttaatggtgggtaaaattagagtagactcagtgtttagttttcgttcatttcccaggccacttctttatgaagtaacctccatcacaatgtatagtttctagaaagtctgaaggagcactgatgttttccctcgaatgcagtttctatgtcaccgtggtaaagaagaattttcaggcttgcagtcaaggacagcctttcaaattctctttggatgaaactaatccccaaggctgcccaacctccctgtaactaagaagtttacaaggccaaatatttgatgcactggcc

SEQ ID NO: 182331 - DNA, 494 bp, Homo sapiens
aaagaggcaagggttggatttgaagaagataccagcactagatgagaaagaaccaaaataggatgccccaatagagagcagaaaaatcaaaggcaagtgaagggcaaaaagaattgtcatctcagcatgggaaaggagatgctcagctgttaatctcacaggcagaaacatgaaattactgagatattacctcagatactctgaaagccaccttttcagagcactactactacggacatctttgttttggaacccaagatcagtaacacagaaccccacgctcagaagaaaaagaactagtctgggataaattacaagggtatgtagtcaaaggacaaaagcataaatactcctctgtgaaggttattagaacattctacaatgtgtgcagaataaaactccattcaaactgggatcttaccacatcagtgttgtagctagaacgcataatacagccagcagtctacaatttgcccaattatattcaatgcctt

SEQ ID NO: 182332 - DNA, 604 bp, Homo sapiens
tttgttggtaaaggttgtgacttctcattcggagacttgataaccaggagtgaccatttaatgaaggttaagttagatttgaaaacagcccaaaagaaaagcaaccgtcagagaaagctgatatactattacaatagtgtcaaaaaccaagcaaacttcattcacacaatgtaaggctagcacaggacatggagaacatgtatcaggaatagccaaacatcttttctaaaatagcataaaagagttcacagacaagtttcagagtctgagaaaccttggcatagatgctgcctatctagtatgggattgtaacatgtaccagaaactaaccttcaatttcctattaaaatgaataagataaggcatcgaaaggacttagcacaatatctgaaaaactgtaagtgcaaaattaatcagaattccatttccttgccatccatgcacaggtcttaaatacaggcacaaattaatggataattcaggtttaggagtttgtccaatagtcatgaagaacattttacatggccatttatcactaatacccatttagtgagttgcaaatcattttttgtttaggactggacaaggtgctatgaaattacag

SEQ ID NO: 182333 - DNA, 166 bp, Homo sapiens
agtgactgttaatatggtttggtgccactgcccgtttccttgatttgtgcagtttcctgcactgttgcttttgtaccatgtgtgcaaatgtcgacacaggggaaaagcaatatgctcccattgctctctctctctctttttctctctctctcctttcctctatctg

SEQ ID NO: 182334 - DNA, 457 bp, Homo sapiens
tctgaaactatggtattcagagatgatccgtcaggttctgattaagtttcttagaagcccagtgcactgaaaagattatggtgtgtcttttctcttcctagcaaaatggaaaatgacaatactgaaatgcaaactaatagaataccagcaaaaattctcattgttactcatggcttcaaaaactacatcagatgccttaaaaaaaaatcctcttacttcttttggtacctcatttttgttggttttctaagcatgtagaaggggaccagagcatgccaccccaaaatatcccacttttagtgtaggtgttgttttaagctgaaggcatttagtttcctgccctccacctttctgtctaaaagcaggctatccatttacatttctgaaagtgttccgtactaaagaacccctatttattatacatttctagttatcttcccatgatttgtacctccct

SEQ ID NO: 182335 - DNA, 245 bp, Homo sapiens
tatggaaatgcagctacccaatctgcttattttaacatgtagaggatgttagccattgatttctcttgactgaggcccttcaatggcttccctgttctcttaggatatagtctaaactctttaacatgggttatgagaccttgtgtgctctgactcctgctgtcccctctagcctcatctaaaacaactctcacaatctcactatcttttttcaattttttttttttgggtactacgctttggca

SEQ ID NO: 182336 - DNA, 350 bp, Homo sapiens
ttgagaaccactgatacaaagcattgccaaccaaagcaaatggccatttcacagtgacattaattggagaattaaggaatcggagagagtgtataattttgcagataaatatggtcatagaaattattacttccaattggtaggtatacttttcctcaggctctgccctcaaaaattattaacctgtactggcagaaaagaacatatgactgatgaagttcaggaagcattaaccataaacccagtcatagaggttagcagatttatttttcccttagataagctctctccttcggttccacaagagaattaagctatacaccctaagacacttagcgtttatacagtgg

SEQ ID NO: 182337 - DNA, 289 bp, Homo sapiens
agagtagtaaaaacagctatgatgatccagccagaattagctagtggggataaaagaaaaagagcagaaaaagtggagaaacacttaagcattaaaagtattagaactatggatgggtagatatggaactgtgggagaggaaaaggattagacagcaattcaggaagaggagccatttagagggaagatgacacattcagatttcaaactattaggatcaacgtgatggtaagtggttgacggaagtttgaatatataaatctagagcatggggattaaggctgggctg

SEQ ID NO: 182338 - DNA, 319 bp, Homo sapiens
ctgccttacttgttgtaataaaacacttatattaaggtaacaaaaatcttaagatggtagacactcttatctccccctgccccaccatttacagatgagggaactcagcttgagagattaatttgctgagacatactagagctggaataggaagccatatgtatcagactttaaaattcatcagtttaataagttttttttcttgattattaggatagtagactaggtttcagaagtgaaatgctaagttacttttatgcatacaccagaatatatttttattgcagtttggagaaacatgaaataactgttttttccc

SEQ ID NO: 182339 - DNA, 324 bp, Homo sapiens
atcttagacgaaagcctataatcactgcgcccgctcataaggggatggccatggattaggttatacgatagttgagtggtaggtgtgaatgattgaggcaggagtccgaggaggttagtcgtgactgtgaaaatgcttacggatcgaggctatagtctatttgtgtcgaggtgttgacttagcctttctcttctgttcctagtgtgtccaagtcaacctgtggggactgaactggactatcccctgggtgagagtagtcccgagggagatgttgttgtattagctttatagaagcagtggaggcagggccacacttaatggcat

SEQ ID NO: 182340 - DNA, 309 bp, Homo sapiens
ttcttggctccagcaactcgaactgccattactatccaggatccctggttgattctggacgtagaaaggagaaaggtagacttccttctggacaccagagccagcctctctgttctcctctccagtcctgaccttctctcctcccatatcacaaccatggtgaatgtctaaggaaagtctttaacccaatatttttcatagcccctcggttgtagtaggggggaattgctatttactcatgcctttttaatcatgcctgagcatcccagtcttttactagagatattctagcccatatgggagccacca

SEQ ID NO: 182341 - DNA, 360 bp, Homo sapiens
gatgtgttaggataggaccaggagactgactttaggatcacagctacctccccggaacctctcctcatttctcccagctagaaagggttccttttaccctactttcgtgcctctgttgtactccttactggagtcttgccttatagttggttgtatccaatctgcctgccccactatgttatacattccttggggccagggactgccctacccatctttgctttgtccttgagttggaggccacagttgagaccacagcatatgccaattgagttgaactagtgggctgcctggttaatgttgagatgaaaggtgatgttttttacttgtgttgatgttgttgttattttactttctggg

SEQ ID NO: 182342 - DNA, 631 bp, Homo sapiens
ttcaactttaaccgtgcagtatcagggatctgttaaatgcagatcttctttagtaggtttgggtagggcttgggattctacgtttccatatgttcccaggtgataccaagtgctgctggtcctgcaaccacactttgagtagtaaggctctagacaggccagctacataatttgtggggcccagtgctaaatgacaacgcagaaatccttgttcaagaaacaagagaaaagctgtttttgggggggtctgtatttgtctgtggacctgtcattgtgctttttgttgggtatttaatgtcattctcccgtctaaatgcaatcatgattgcatttagaccttgtagtcccagctactcttgaggctgaggcacgagaatagcttgaaccctgggttgaggggtacggaggttgcagtgagcccagattgagccactgcattccagtctgggcagtctgggcaaccaaagggttgatttttatcctttgaaatttaatattactttagtgtcctgacttaaaggattaatttaattatgacagaatcaaaaagaataaaaaagttttctctttgataagatatgggagtttggaggaaatgtgataagactcttaaaatcctgtctaaatgaat

SEQ ID NO: 182343 - DNA, 514 bp, Homo sapiens
agacggggtttcaccatattagccaagatggtctcgatctcctgacctcgtgatccgcccgccttgacctcccaaagtgctgggattacaggcgtgagccactgtgtccggcccagattttattttagtctaccaggtagtagcaaactatccaaggacttgcccaggaccattcaggtcagtgagctacagaatctagttctggaaaggcagccattcttactattcacaaagtgtagaaaacgtgaattcagattccagcagcaacaaatgactggagcacaaaacgccagccacagttggtgctaacgcagctggctatcagctccacaggatgaagcactgtccaagggtctgatcagtgaagcatcacccaagactgatgaacacagctgatatgaggggacccaaagttccctgagtcaagacagaagagctgtgtcacggtttgcacagaaagagaaagagcaactattcttacccacggaaagaaaaagggagaaggccatcaata

SEQ ID NO: 182344 - DNA, 620 bp, Homo sapiens
gtgactacaaatacaaggaagcctatgagaaacagaaaggccaccacattggagcccagagcattgaagatgatcccaagattatgtgtgccatacatgcaggaaaaattcaaagtgaaagggagtacaagaaggaattccaaaagtggaaaaccaagttctctagcccagtggacatgttaagcatcttgctggccaagaaatgtcagactttggtcactgacattgattatcgcaattacctgcatgaatggacatgcatgccggatcaaaacgacattatccaagcaaaaaaggcctatgacctgcagagtgatagtgtgtataaggcagacctggagtggctgcgtggcatcggctggatgccagaaggctcagtggaaatgaacagagtgaaggttgctcaagacctcgtgaatgaaagactctataggacacgtccagaagctttgtcattcaccagcattgtcgacactccagaagttgtcttggcaaaagccaattctctgcaaataagtgagaaactgtatcaggaagcctggaataaagataaaagcaacatcaccattccttctgatactccggagatgctgcaggcccacatcaatgccttgcaaatc

SEQ ID NO: 182345 - DNA, 464 bp, Homo sapiens
attggcaaaagaaggctctttctattttaatcatgccagaatcagatcagtcctgagacctcggcttttgagaattagggtgcatccctgtggtaatgactcagtactatgattcataaaactgtagaaaatgaagaagttctgagatgtagatggctcaaaagctctctgcagaaccacaagaagaatttaaatgaagttcagtaagtaagcaatgctttaaggaaaagtattaatgtgtaagaaaattagtggaattatgaatatgtaaagactgacttcaatttttgaaggtctctcaccagacatctagaagaacagttgatacggtcactgaaatgttgaagtatttgtttaaactgatatatgtcacttggctgtaatagccaagctttccaattacaattttgcaacatttcatgaaaagtcctattttaaatactaaatgtttgcattaaaaatca

SEQ ID NO: 182346 - DNA, 560 bp, Homo sapiens
ggagtggctgtatgcaaagaagctggaggcatcctgcctcctgacctgtgactcacatgggatgctgcaggacctcattcctaacatctcacaggaagagatcagctgagaatggtacattcaggcaggagacattcttgggttttccagtgtaaaagacatttaaaaacaattgactaatgagaggaatgtgtagcaaatgttgaagctgccagtattcttgcaagtgagccaatgaccttttaagctacatctacaactgactagtttcttggccatcatcccaatgaaggctcctttcccagtttagactgtattgagatctggcttggcagtaagacttttagcatcctcagatacagatttatttcagcatgaaatcacattaaatcagctttctaataaaggcctcaaaaaaacaaaaaacattgctgggtgtggtggctcatgcctgtaatcccgacattttgggaggccgaggcaggtagatcacctgaggtcaggagttccagaccaacctaaaaccccacctctactaaaaaaaaaacccgcaaaaatta

SEQ ID NO: 182347 - DNA, 276 bp, Homo sapiens
atggtgaagatgtgacaggtggaatgggctgggagaagggagcaggctcatttcacaggagagcggaaagcactggaccagggcagaggaggggccacgtgagaaaggtatttagactgactgggcagagcctgggggagggctgcaggtgagggagacaaggcaggtgttgggactccagggtttctcgtttgaaagccaggaaggatatggagtgttgggacattattacccacccccaggctgatgcatactccctgggccatgctgtatctt

SEQ ID NO: 182348 - DNA, 153 bp, Homo sapiens
cccctctgaggccctctagtccacccgctctggagggcaggtccgtggtgtgtgctccccggtatacatcagccagattcctcgcagcaatggcttggtctagacaaaacaagacagcaataaaaaccagccaggaggtaatgactgcctctg

SEQ ID NO: 182349 - DNA, 148 bp, Homo sapiens
cccccagaatagcaaatacacagccaagccttgccagtgtttgatctattccctaattttaacaaatacttcaagtgacatataatgctaaggaccactgggggaaggagaagtcgagagctatgctggcctcagctcttaatctcaa

SEQ ID NO: 182350 - DNA, 391 bp, Homo sapiens
tagtagagatggggtttcacagtgttagccaggatggtctcgatctcctgacctcgtgatccacctgccccggcctcccaaagtgctgggattacaggtgtgagccatcgtgcctggccttaaaaacaaatttctattagcagatgcagggatacctgcatatagtgatggttcatgtttgtttcactgtagactgcatgctgatagaatctagtgtgcctttaaattatggaaaataaattttcttcatttcataataactaagtcacccaatgttttgggatcattttagtgtgtatgtatttttggagatagcgtgcattgaaaatagattagtaggaaatgcgtaaaaagtttacaattatttctgaaatggtaggattttgggtaa

SEQ ID NO: 182351 - DNA, 105 bp, Homo sapiens
attacccgcctcttactgttgaggctcggagagcagttaagtcacttgcccacgatcatgcagcaacaaagtggaaatgccctaattctaacccaagtcagcctg

SEQ ID NO: 182352 - DNA, 482 bp, Homo sapiens
gattcatgtaacttggtgcttacatttttatccactctaacagtttctgctttgtgattggagagtttagtttatatgcatttgatatacttattgatatgattgtatttaaagctctgccattttgctgtttattatctatttgtcttaccaaatttttttggttttttgttcctcattttcttccttttatgttaatcaaatattttttcatattccattttaatttctctgttgactttgtagctacatttttcattattttttactttttctagtgtttacaaagtggatccttagctaatcccagtctacctagttatatagaattagtccagatgaaatatagaaaactcacaagagcaaattccatttaccccttctccttagtgctattattgtcatatatattacatctacatttgttataaacccattaatattagtgaagtgtcatacttttatttttgtaaagagaattg

SEQ ID NO: 182353 - DNA, 241 bp, Homo sapiens
aggagctgggcagtgactccatgagcgaggccccgcaaggagctgctttccagtgggagcgaggggtagaccggaagagggttttacagaccaggggtaacgtccagccccacctcggagctgggcaaggggctgtcagtctgctaggcccgcaggaggaggcctgagttggcaggagatatggtctccagtagccaggcagaggccttgctctgtggtcctggggcaggccctgaatagg

SEQ ID NO: 182354 - DNA, 264 bp, Homo sapiens
tggtgttgtcctattatctcttcaaatcccaggtccctctaggcagtagctattatgcctacttcaaaggttattatgagactcaaatgagagagtgaatcggaagcattttgtacattattatccctcaacctatttgtgccccatacatagtaacttcaggccttatagtttgtccctactgctcctgtttccgtaaacctttgcagaaatctggtttttacgggcaaaaagaggttataattcaactttccatgctctaag

SEQ ID NO: 182355 - DNA, 1722 bp, Homo sapiens
cccgccccagagcacagcttcgccgagcccacctggtccccatcccggccttggcaatgaccctggcggcttcctcccagcgttcccaaatcattcgctccaagttccgatctgtcctccagcttcggatccacagacggaatcaggagcagaatccagttcaggcgcccatctcccagcaatcaagtcttgctccctggcctgccctccggcaccctggagccccgctttccacacagccttgctcctcccggcctggcttgctgcctgcaggcctctcagggtccttcaccgtctctccagtctcggatccggacccgtggatctcagcctcagaccctcctctggccccggccttgccctcgggcacggcccctttcctcttcagccctggggtcctgctccccgagccagaatattgtcctccttggaggtccccaaagaaggagtctcccaagatctcccaacgttggagggagtccaagcccagggggaacttgacataccaccagtacatgcccccagagccgagacagggatccagggcggacccccaagccgaggggtccgccctgggtcctcctgggccatctctgtgggaagggacagactcgcagcagccacatcctaggatgaagccctctcccctcactccctgcccaccaggagtccctagcccctcgccacccccacacaagttggaacttcagacccttaaactggaggagctgacggtctcagagctccggcagcagctgcgcctgcggggcctcccagtgtcggggaccaagtctatgctcctggagcgcatgcgcggcggcgcgccgccccgcgagcggccgaagccgcggcgcgaggacagtcccgcgggtgctccctggccgcgcctcaagcccaaggccctggcagccgcccggcgtcagggctcggtcaagcccagcgcagcatctcacaggccacctcttccacgcgccgcggataccccggggacggctccggctccaactcccactccggctcctgctgcagctccagccctgaccccttcctcagggccgggctcagcggctctgactctggaggaggagctgcaggaagcgatccggagggcgcagttgcttcctaaccggggcatcgatgacatcctggaggatcaggtggagcctgatgaccccctgccccctattcccctggacttccctggctccttcgacgtgctgtccccctccccggactctgaaggcctctcatctgttttctcctcttcactcccgtctcccacgaactcctcctccccttctcccagggaccccacggactccctggactggctggaggccctgagcgggggtcctcctctgggttctggtcccccaccccccagcatcttctccgctgacttatctgactccagcagcagccggctgtgggacctgctggaggatccatggtgatggattctaggatttacagagacagagaactgatgggggtggagagaagctccttgtgggaggagagggaactaccagcagagcccctcctaccgcagacacaggatcggagacaacctccaaccccacctgcctcctgaagtgctgctgacatgcaactgccttaactttgcctacctggcctccttatgatccccctccggcgtggtatggttggggggcttcttttgctgctggccacggcaaacaagctgcttgctgcttcctt

SEQ ID NO: 182356 - DNA, 456 bp, Homo sapiens
cccgagccagaatattgtcctccttggaggtccccaaagaaggtgagtctcgactggagggagaggtccctctgagagcctagtctttgtctcccttgttgctgctgccatttttgctcctcttcggtggcaccgagctgaccccatactttgcatgtagtcctggggccggaaggtgggagccgcgctgaagcctaaaacatcacacctgctctttcaggagtctcccaagatctcccaacgttggagggagtccaagcccagggggaacttgacataccaccagtacatgcccccagagccgagacagggatccagggcggacccccaagccgaggggtccgccctgggtcctcctgggccatctctgtgggaagggacagactcgcagcagccacatcctaggtatgacacccacttctgttctcccgggacccagaaattcaggtcccagca

SEQ ID NO: 182357 - DNA, 825 bp, Homo sapiens
cccgccccagagcacagcttcgccgagcccacctggtccccatcccggccttggcaatgaccctggcggcttcctcccagcgttcccaaatcattcgctccaagttccgatctgtcctccagcttcggatccacagacggaatcaggagcagaatccagttcaggcgcccatctcccagcaatcaagtcttgctccctggcctgccctccggcaccctggagccccgctttccacacagccttgctcctcccggcctggcttgctgcctgcaggcctctcagggtccttcaccgtctctccagtctcggatccggacccgtggatctcagcctcagaccctcctctggccccggccttgccctcgggcacggcccctttcctcttcagccctggggtcctgctccccgagccagaatattgtcctccttggaggtccccaaagaaggagtctcccaagatctcccaacgttggagggagtccaagcccagggggaacttgacataccaccagtacatgcccccagagccgagacagggatccagggcggacccccaagccgaggggtccgccctgggtcctcctgggccatctctgtgggaagggacagactcgcagcagccacatcctaggtatgacacccacttctgttctcccgggacccagaaattcaggtcccagcatcctcctccctcaaacctcgagtccaagattaggggattggggcccccaaccctctcttctcccagggtttaagagtccaggatcccagcccctcccttcgcccttcagacccgagtctgaacgcctagttcctcctccccca

SEQ ID NO: 182358 - DNA, 287 bp, Homo sapiens
atcatgccactgtactccagcctgggcagtagagcaagactccatctcaagaaaaaaaaaattaaaaaattatgaaacagaatttttgtatgtgattgaaaactcatcagtactttctttttttttttttttttttttttttttttacccaggcagttactgttacatcttggtatatttcatagccagtttctcacctgtgtatggatatttgctttatttacttattcaatctaacttaatgtgtgttttttcaaagtaatattttgaatattttaaattttcaa

SEQ ID NO: 182359 - DNA, 173 bp, Homo sapiens
ttagtctggaattcagaaagaagttgaggtaggatatttaatttatgggctggagaggttaaatgagaatttaaagccatggaatgaataagatactgctgaggctacgaaacagctgcccagtgatttggctaaattctctagcctcagtctaatgtgttagctctagaaag

SEQ ID NO: 182360 - DNA, 154 bp, Homo sapiens
aggtcagggtgggcatcctaccaggctcagggcagcccccacaatacagaagcatctggcccaagatgtcaacagtgccaaagctcagaaacacccatctatagtcgtcctcctgccaaacaaattctcagttgtaagggatagtctttccttt

SEQ ID NO: 182361 - DNA, 501 bp, Homo sapiens
aaactagacatctatccttaccctagaagaactgaagcagtctgtttatttacagtcatgtcacagaactttaatttacttgctcaatggaagaatgagttctatacctgggttaacaatactgaaaagtataaacaactctttttggttaaataagagatgatttgtgttcatttctttatactaacataatcatagtatttatttcacacagctataaggcagtttggcttctaggattaacatatttaacagtgataattacagatgatgggagaagaaacagaaatgaaaataaagtgtagtcttaaaggctacagataataggtaccacattacaaataataggtaccaaccaatattgaattagtgaatgcttactgaatgtcttatgaagataactacttctaatccatcagttagtcttaggatttaatttctatcatgggagtgatgtcataagcaatttctaaaactcagctgagtaactgtctttaattg

SEQ ID NO: 182362 - DNA, 494 bp, Homo sapiens
acatgctttcctccacatcttgtttgggatcaaacatcacccatctgctgctcctgcacaaaagccttgttaaacttgctcaactctgggatcctgtgtcaagctgcccgctgcaggagcaaccattcactgtgctcaggccctaatactccacaccaggctgccctcctgcctgatgccatccttaccagggtcagcctcagatatcctgatctggtccccttgggctccacccacttagtgaggatgtctccttgctcttccccaccaaataactataggacctatggagggaaagatgagaggtaggagggaagggaacgagggtgacagaagatgaggaagagtcagttgccctaattcttaacaaatgttttcaacatataatttttttgtgatgataaatttagggtaaaaatggtcatgcatcagaaacatcactattaaaagtaggcttaggctgggcaccgtagctctcgcctataatcccaaca

SEQ ID NO: 182363 - DNA, 502 bp, Homo sapiens
tgtacgtggctcataagctatttccattagacagcagtgctctggagcaaatggcctatgtgtgtgccccaggggactcaagggtgttcaccatctcacttttcctcctcatagtggagggactggtaacaaatgctcacaaacgggggaagccgcgcacacagccatgaacatggatgcacccgatttacacatagcattgctgacaagctccaaaacgaacatgggttgaactgtaaaatacgattgctgacaagctccaaaacgaacatgggttgaactgtaaaatatgatatatgtgtatacttatacacttttttttttttttttttttttgagacagagtctcgccctgttgcccaggctggagtgcaatggcgtgatcttggctcactgcaacctccgcctcccaggttcaagcgattctcctgccccagccttccaagtagctgggattacaggcacctgacaccacacctggctaatttttgtatttttagta

SEQ ID NO: 182364 - DNA, 107 bp, Homo sapiens
agaattgtgccagtatatttccttttccccacaaagcccattactctggctgttatcagacaagaagagctaggcagcccattacttccctgttggctctggcttcc

SEQ ID NO: 182365 - DNA, 477 bp, Homo sapiens
cgcagaccccggcagccgtgttctggaatgctatgattgggtctatactgtgaacctcagaagtgttcctctgtttaattaattttccaccttgggcggaacatgattagaatgggctgcagtggaaggggataattcccttcccctaggttatttagtctccgattatactagagcagattaggctgaagttaagtagtttctcctgtggacaagccttgttaagaaatgggtgctctgacatatttcaaaatggttttcctttttccttccgaaaggttgaagcaggaggggagttttgtcaggtgtttgtcacaggagcctggtgaagctccatgagacaattttacagtattgtgccccctccccgacaataactctatctctttgtagtttttaacacttagagttgtccacgcggatcctccagccgttcaccagttacggtttgagtttttctactccagcacgggttcc

SEQ ID NO: 182366 - DNA, 413 bp, Homo sapiens
tgtctcgatcgatatgaccttttggaaagggatactaaattttatatgtattactgtgttgggctaagtgattgtggtatgtgatttaaaaccaaacaaacaaatactggtttaggccaggcttcttttttagaaaatcttattcgggtatcagtgtggttttgatgtagcctagtgagttgctgtttagatgggaacttgagaactctgcattctgatggcacaggccactggctgggttgcctgacttgctgtagaagtgaaccctgagtgtcctaatttaagtttctaaagttgatgaactctgcctggggaaatctatataggctgaagttggtgaactctgcctggtgggagagtttgtaaaggcctacactaggaatatgactgtaagattaatgaaaccatttggt

SEQ ID NO: 182367 - DNA, 99 bp, Homo sapiens
actgatttggtgttctgagtaaatcaaagcggcttctgcctccaaggcccatgatgctgtgctgcctcctttacctcttcaacatcttgccagacaagt

SEQ ID NO: 182368 - DNA, 499 bp, Homo sapiens
ttttcccattgatagttctattttagtatgtctacttttaccagattcttgtaggtttctttgtccttcgcatgtgaattattaatgtttcttactttataaggaaagaatcattcccattcaatgtagtctgagagggtttctgttcatttaagttgcattacttttgttggcaatgattatctcgttgtcatcacctactgaggagaacaagtgtactctcaggattgccacttggagctccttgggttaagggagagcttagtgaagacaagtggtagttctgtatcattgggaggctatcttctattcattagccttttgatttttgttccccactttcagatattctcagttcatatctgttgcctgcaaatagctgaaatagcattgtacgagctagaaaggtgtcaaatgagctaatttcctgctcatgaattcagagaagtttctagaactgcaaaaaattatatagcggcaaaatgtactagccaaagat

SEQ ID NO: 182369 - DNA, 907 bp, Homo sapiens
cctgcacatgctctcatggccgagcacagtggtccatgcctgtaatcccagcactttgataggccgaggtgggaggattgcttgagcccaggagttctagaccggcctgggcaacatagcgagactccacctcccaaagtgctgtgattacaagtgtgagccaatacacgttttctggtctccagtttacattgtaattgctactctaaatggaaaaagtatgctgaagagcctagacactatacctccactagaaatcctaaggagagagagctgctgaaaacctagcgaaggttggctcactggtgccagcagcaggatgtcggagatgctgaacatcatgtcgagtgtggggatctcaggaacgcaggcctgcagagccaggctgatggctgaccaactcctgacccagaatccaatactaaagcaaatagtcttgtaggaatgctgcctgtggtctccttgggaaggaaaagcaggcaagaacaaagcaggggatcccctgtggcagctgagctctcccttgcctttcttaccaggagggcactcccacagcttcccagctggagtgctgcagccagctggcctgcagacagcaaaccaagtcccagggctgctgagggtggtgtttggctagcacgagctcctgcatgccaccatgcagaacatttgggaagtactgtcctgacagcagagcaagaggccaggctttgttccacagtgatcctgggggtctggcgaggactagggctgtgagcaggggttctcatggccaggtgggtcaggagccaccctgcatagggttatgcctcccgtgagcacttctacgctctgtctaggccctggtgatgtccacagaccaaatccgctgttgatccggccgcgaatttagtagtagtagtcgacc

SEQ ID NO: 182370 - DNA, 343 bp, Homo sapiens
gacaactatgagttcatactctcctctcaattcactgtttcaatcttctcattgacaaggatcaaacatttaggattttattcaggtctctttaaacacttaaattcaggatatgcataaacactcatggatatctttaggatttacttaaccttggttcttatgaatagttacagggtatcaggagaatgaattcaataatacttcttttgggtctgttttgttcagagattatcagtttctcagaatacagggaacacttgttttgaggttaaaaacctaacgtggctctaaatttggtaaaacagattttgttctgtcttgggttatgtttgctgacaaa

SEQ ID NO: 182371 - DNA, 147 bp, Homo sapiens
ccctgtacaaattcagagacagaaaaagttctagattcgggacaccttgaacctttcaggaaaattaactattatcatcaagaaaggaaagctgtaatagatgattaaggcaccttccctactccactggataaagaacagaaagtt

SEQ ID NO: 182372 - DNA, 667 bp, Homo sapiens
ctgtatgattttatccatctcagacatccttggcccctgcttcttaatttttctctctgctcctccaagcttgcctcaccatctgaaattccacctagtctaccccaacatatcctatcactattctctgtgtaagggtactaagatgtatgaatgtctaaccagccgatgtgtgtgtgtgtgtgtgtgtgtgtgtgtgtgtagtctcacaggccttacaacaatcaagcaaaataggtattagaaattccacattacagataaggaaatcaaactcacagaggtttagttaatagcctgaaatggaaagttggcaaaggtggacctttattttgaactgaggtctgttgaaattcaagggcagcctctccaactcctgtcgggctcttgcacagctgcttctcccacctgctggtggctccagatactccctgcttggtgtaccctcagtgggcctagttaccttttccagaaacgaatctgattatgtctctccttttctataagcccctgttgattacattccaggattaagaccttacgagctggtttggccagtggttaccaaactcatctgcacactggaatcgcctggggagccttgaaaattatcaatgccggctgggtgcagtggctcatcctataatcccagcactttgggaggctg

SEQ ID NO: 182373 - DNA, 525 bp, Homo sapiens
ctttatacccacgtaggtaattgtacagggaaattgtgttttgttttctttctaaaatgggtattttgtcatttttacctgatacttgaagtcttttcaaaattctgagttaaaaaacccatctgggtattgctttggataggtatatggcatggctggttactcctggactatagtccaaaattggttaacagttcaatattattataagaactattgtagtcaagaccctggattttgaataaacaaaattgacaaaaagatggaccgaaaactcagaccatctcctagttcttcaagctaagttagtttcctgatatgtccaactttctgccaacccataaaaggaagccacatataagggctgatattcttggcaattgctgaggaattgcctctccagtcttctccagaccaccaccactaccatttaatcctgacatatttgcttactttcatcccccagttccaaatcctagctacttagtttgtctttgaaatccacttctgcccctcactgagttg

SEQ ID NO: 182374 - DNA, 432 bp, Homo sapiens
cgctctagagtatcccctcgtcttttgataggatactaacatccttctgctagctaggggtggtgctcaaagggtaggatgctgttaaaacatcagtagatctgagacctcggctctccatcctgaagccccctgaagaaactgcaataagcctgtttgaccccaccacttgctcattgtggttatggtggaccttgctttttcctgtcctgtgcatcaccttagacaattgggaaattacttttaattcagagatggcctcagttatggatttacagcattgcaactatgtaacattgtaacattgtgactaagtaattttaacaatgtagctacagcattgccctgctttaccgcggagacagcgccacctaatggttaaacaagtgcccagccgttccctatcaaaagacgagtggatcctctagagcg

SEQ ID NO: 182375 - DNA, 448 bp, Homo sapiens
cccatttccttcccttgagcatctctggtagagaagagcatgtccttggattctatgacccaattcaggttctaggctctaggccatcgggggccaggcccaaggcacagactcagcgccccacttctttctcttcccttgttgggtgttcctgagaatgagagggatctaatgatgatgatggcaatgataatgacaacaataacaactaactcatgaaatgtgacactgcttatcatgtgtcaggcaccgtactcagctcttgccatgccttatctcattttaatcttcacagccagcctattatttttatccccattttacagatgaagaaacaggggctcagagagttaaacccaaggacacagtaagtgttaaagtgttagactccacagttctggcatgaactggattgttaagtaaacaatagtttaaatgacaataggaa

SEQ ID NO: 182376 - DNA, 153 bp, Homo sapiens
ccattgctaaactgtatttattttactctgaaatttaattaagttctttctaagctatcagattctaattctttcagcaacaattacatttcgtcttaagtgctcctattttctttctaattggttccatttcatttttattttagttttacc

SEQ ID NO: 182377 - DNA, 655 bp, Homo sapiens
cgaggctctagaggatcccgccatttactccatggcctgggactgcaggtactggaaggtccatgggaagatgtcgggacaccacagaagacaagaaccaattctgttagcctatcgaaaatgcaagatgcagttctttcatgggaacacttattagaacttaagaataatcattgtgaacaacttacagtaaatattaaacaaatggaaaatatggttggtgtactacaaaaggagctatgtgaagcaaaagaaacacaattacagttagagcatgaaaaaggtcaatgggaacaagaacgctacagtttgagaatgaccttaaaagaagaagaaaagggaagaaatgctgatatattgcctaaaaaagacagtgaacagttaaaaagaaaagaaaaggaatgtgggaaagaagttgaaacaacaactcaaacagactctgaaatcactggtcacagaattgaggacattaggaaagaatttggatcaggttgtgcagaagcgaagcgatacccacagcaactttctgaagagcagaatgccagaatattacaagatgagattctgaccagtaagcacaaggaggtcgaaggggctcaaaagcaaatgaattctgagatttctcaaagccatggataaatgcaggaccgcttga

SEQ ID NO: 182378 - DNA, 712 bp, Homo sapiens
cgaggctctagaggatcccgccatttactccatggcctgggactgcaggtactggaaggtccatgggaagatgtcgggacaccacagaagacaagaaccaattctgttagcctatcgaaaatgcaagatgcagttctttcatgggaacacttattagaacttaagaataatcattgtgaacaacttacagtaaatattaaacaaatggaaaatatggttggtgtactacaaaaggagctatgtgaagcaaaagaaacacaattacagttagagcatgaaaaaggtcaatgggaacaagaacgctacagtttgagatggagctgtctagttgaaggaaaacaagctcaggactttcactgattctacatcataatgaccttaaaagaagaagaaaagggaagaaatgctgatatattgcctaaaaaagacagtgaacagttaaaaagaaaagaaaaggaatgtgggaaagaagttgaaacaacaactcaaacagactctgaaatcactggtcacagaattgaggacattaggaaagaatttggatcaggttgtgcagaagcgaagcgatacccacagcaactttctgaagagcagaatgccagaatattacaagatgagattctgaccagtaagcacaaggaggtcgaaggggctcaaaagcaaatgaattctgagatttctcaaagccatggataaatgcaggaccgcttga

SEQ ID NO: 182379 - DNA, 524 bp, Homo sapiens
tggcagcgttcagaggatcctccaacgcgctcacaacgcctaactctgacagaaaaggccactttaagtgttccactacataagcacatttctcatgtaactgaggtttcttccttagatacaaaaggttatttaaaaattgattaaaatgttcctaaagtataagtctttcagattttctgacaatataatgaatataatctaacttgatgacttgggtcatcattatgaacgagttattttgttagttttaaactcctaagacctgcttttacttatttttttcaattgctttttaaaaaaattattcattagccgggcatgggggctcatgcttatagtcgcagcactttgggaggcagaggaaggtaaatcacttaagccaaagagttcgagaccagtctgggaaacatggcaaaaccctgtctctacaaaatatccaaagattagccggccatggtagtgtgcacccgtagtcccagctactggggaggccgaggcgggaggaccgcttgagcctggag

SEQ ID NO: 182380 - DNA, 352 bp, Homo sapiens
ttatggatgtaaattcaaacagtcatgctgagccatcccgggctgacagtcacgttaaagacactaggtcgggcgccacagtgccacccaaggagaagaaggtaacgtggcaactgcacatttgccacacggttgggagtccttccttccttgctctgacactaacacggctcttatactcgacctttgtcccctctgtcttttttctctctcttttttttaactaatggagacacaggcataggttaaaatcagagatatcttgctcaggttttcagagcaaacactgtgttccagcccacagcatacaatagtatatgcagaatttagacactatcttcccaaactaaag

SEQ ID NO: 182381 - DNA, 479 bp, Homo sapiens
tgcccactcttctttctccttatttattttttaaattaaaagccatttatggaaagccgctgataacatcataatcaatcggaaagcagaaatagccattcttctggtaccaggcaaggatgcctactcttaccacttctattaaacatgtaccagaagtactatcaaaagcatttagaaaagacacattcaacttggaaatgaagaagtaaaattacctctatttgcagatgaaatgattctacctgtaaaaaaccctaatgactccactgaaaaaccattaacactaacaaataagttcaataaagttgcaggatataaaatcaacatacaaaatctgtgacatttctatacacgaataacaacctagccaaaaatgaaatcaagaacaccattccatttataacataaataatacttgggaataaattttactaaggaggtgaaagacctgtataccgaagacaataaaacattaa

SEQ ID NO: 182382 - DNA, 711 bp, Homo sapiens
aatagagctcggtccgattacgctcctaacgggaggttgatttggtcttggttctttgatctttaggagcccttgtgccatcccagtagctattcatttacagacactcagctgccatttcccctgtgcctctcacatcgagagcaaatccccagacctgggtaaccccacctcttcacctacctgaacaggggaagaatgctgagtagaaaaacactgtcttgctgactggactcattttgaatttattaccccaatttaaaattaggatccttagtatcgccagtagtactgcatttcctcagtccactcacttgcccacactcttctaagatgatatagtctccttcctcccagacttctaacacaccgtcccccatactcatgttggtagcaaaattttattttttggagagaaaaaaaaagcaatcctactttgattctgcaaccaccaaatctcccatgctgcctgaatctataacacagtgctctactttctttcctggtgtcaagtactagctgtccatcatctaatcgaaggccagcttctcactgctgcacggagttcacttccttctcaaggatttagctgcgtcagttactcctgcctgttcactcactgatttctccctctctgttgggccatccccaccacctgaacagaacaagctcatgacacctctcattcccttctggccatcaccccattac

SEQ ID NO: 182383 - DNA, 398 bp, Homo sapiens
agcataaactattacagcatacactattacagcataagctattacaaacaagcaagtcgtccaagaagcttaacaaaaacagcatcagcgagattcacttactttcaaggcaggagatacttctgggaggctcaaatacagaatggacaaaaggacacccactcaacttgttagaaattatcctttaccatctgtactgcagtatgcattcaacaatgaaaaattgttatttgaggctttgaaattaatacaaatgtcaaaaattaacaccctttagttgctgtaccagcagctaccaccaaatcttaggaatatacttgagagatgacatttaaaatctgctttttcagaaaagaaaaagtcccactcaagactgactgccaagaacttgcaattca

SEQ ID NO: 182384 - DNA, 353 bp, Homo sapiens
ttacaaatatttaatttcaaaggatgccaaagcattggcaaatatatgtgtcagagcttagagttagttgcagccttcttaataatcattttactattttatttcagaaatataatctagcatttcagcgtcactggaaatcttggtaggtagtcagtatttttgtttggaagtacaggataccagcagtgaaacacttcattttattaacgtcaagcaagtaaggcattattttcctataaatgtgaggttgtttgaaatgaaaacaaacaaaaccaggtaagacgatagaagcagatgttttctctgtttaaaaatgcggttggtatgtgaggtatgtgtagggaatggct

SEQ ID NO: 182385 - DNA, 617 bp, Homo sapiens
aagctagttgaccggcatctaatcaccacacattgtatgtattgaaacatcactatgtaccccatgggtatgtgtcattatttgtccatttaaattgttttaaatttcactttctggttgttcatagctaatacataaaagtagatttgacattttcccttgagttcctgctaaattcacgtattaggtctagtagttgtcttatagattccttaggagtttccatgtccatgatcgtgtcatctacaattaaaaacaattgcgcttttctttcatatatatatgttcatttgtatatgacatttgcatattgatttacctataatgtacatatgatgtgtacacatatgcatacatatctatacaggattttttcgcctatgtcagtggccaggtccgtcagtgacaatgttcagtgaaagtggtgtgagtgggcgtccttgacgtgttcctgattttaagaaagcgtttggtctttcacaattaagtacagcgtaagctgtagatgtttctcctaaatgcctttttatcaggttgagtgagtttccttttcattttagttcctagagagttttattttttcgtaaatgggtgttgaattcggtcaaatgctcttt

SEQ ID NO: 182386 - DNA, 210 bp, Homo sapiens
cttttgatttaggttgtgttaaatttagagaataatttgaaagagtttacatattttcaatgattggatcttccttcacatagagattatgtctctcaaatcatgcaagctttgaaaagtatcttgcagcaatttcatttcctgagcatttcttctttttttctttttctttttctttcttttttttttttttttttttttttttttttt

SEQ ID NO: 182387 - DNA, 567 bp, Homo sapiens
aagagaaaggcttttcatcaaaaaagacctattcttaagtcaatgagtcgcttttctttaatcagtgagtttttactgtattatattttagtaactagcagctaaactacattcttggaaacataaatgactatcacaaagtgtatttcacatttataaataatgatctttaagaatgattagtcttcttttagtgggaatttaattttagtaattcttacagctctctgctgttaaattttggctgataaattagccagatgttatgagaattataaccatattcatcaaatgtaagttagtaagattctgtcattcatttagataaaggtggaaattaaatacatactttcatactagtaaatacatacactaaccccaagaaatgaccttcagtcgatgaaattcaggccaagaaggaaatgatttctttcatcagatcccctcacataataaaaaatcctgcaagactccagttagccaccaggaaaatctaaaactaactaaataaaaacctaatgattttgtttgctagtcttaaaattgttaacagcctaacttttcata

SEQ ID NO: 182388 - DNA, 340 bp, Homo sapiens
agcatctttgtcattgccatggacagaaaaattgaattagggctagtctatagaagttgttattgtagaacgaagttattaattctccaagtagtttgttatgtttaagtttcatacagctaaaataaatttttttagaaaggcatttccttttctttctatttttttttctttctagttgtttcatccttggtgtagctctggattaagtaatcaaattgtgaatattctgtatgctgatattaagtacattgtttaataatgtagttttatgttaaaaaaaaaggctcttccctttagtgggtcatgagatatggacaggggtgaagagagctggacc

SEQ ID NO: 182389 - DNA, 481 bp, Homo sapiens
gttatcttctatagcttcaacacattcctgaggaatagatattttcctgttttacattcagggaagcagacaaagaagttaagtaatttgcctaatccaggggtgtcaatcttttggcttccctggcccacactggaagaagaagtgtcctgggccacacataaaatacattaacgatagctgatgagctaaggaataaaaaacaaacaaactcataatgtcttaaaaaagtttacgaatttgtattgcgctgcattcaaagccgtcctgggctgcatgtgactcacgagcgacaggttggataagcttggcctaatgcttcctggttgcttactttagccattagatcacatgatcttccctgcacaaaattgtttgtgtgcatcttggccaaaagcttggggggaaatgacttaaatagtgttgcttctggggaatacctgtgtcacaggtttctacttgtttggtcgcagtagggatt

SEQ ID NO: 182390 - DNA, 589 bp, Homo sapiens
aattaagaacttaagccttagtcaaacagcagtgctccaaaagtgaaacccaaaggagctgaaaatgagttaacaataagagaaaatgaagagagagagagagagagagacacacacacatgccttctcttcttctgacatccttctgttccttttaaagagaaagagtagggattagatgactggaaccacaaagtgaagactaaaaaatagaaagtgaaaattgaggtttgcagttactcccactggtcctgacattctaagcagggcttcacaccagctacagccaaggtctttggcaacattgaaaggaaaactaaagtgtctttgttggccacccaccatcttgccccatctctgcccttcaggaagcaagggtactcaatatatcttctggctgtcttaaatctcatactgtatgatccactctacactcattctgtgtaaaatgccacagacaactaagtattgatgaaatagcattttaaagtaattctcacgcattaagaaggctcaataaaacttactgtatttgctgagcaactactatgtctctagcactgtgctaaatgcttgagggcagtgtttt

SEQ ID NO: 182391 - DNA, 203 bp, Homo sapiens
cagctgcagccctgttttgcagagggggaaactgaggacaaatgagcatgggagaaggttctctccctgctacagatgtcagggcagtgggtgtatgtaatagggggtgtgtaggtgttactgggtgtagctgtggctggggacgagggggcagcgcctttaccgagtgtgtgcaaaggtgtgtccccgtgcatatggggtgg

SEQ ID NO: 182392 - DNA, 376 bp, Homo sapiens
caccctcttaactactgcattatactgtcagtgcactgtcaacaactgagcactaccatttaataggagaaatggcatctcctacatttcaatgtacaactttactaataaaattgaacttttaaaaaatacatgtttatacacacaaactatgtaagtgtatattaaattaactacatcatttgtggtctgacttttggttagtcttggtgtttttccaaatggcttttatcatctattattatttctttttctaatacgttcaaaaagtttttctgttttaatgtgcctttcaaacaactggtttaaagcaatatgtttctgcctatttgtacaattccccattattttaatattgaggtgtttcaatttgcaa

SEQ ID NO: 182393 - DNA, 579 bp, Homo sapiens
gccatacactattgacagaagggagatatttgtaatatatttattaaacaagggatttgtatctagagtatatgtagaatgtctgcaatgcagtaagataagattaaagaatttggaaggaaacttagctgaaagagaaaacctaaatatataagcatgtacttaacctcactattgttcaagaaaagcctaggctgatctcaaactcctgggctcaagtgatcctcctgcctcagcctcctaaaatgctgggattacaggtgtgaggcactgtgcctgaccagttatgttaatcttgtaactaatgatgacaaacctctcttcatatatttgtcagtcatttctgttttgtgaattacctgtttatatcttttaactcttttaaattggtttcttgttcatgtacagggattgcttatataatctagatagtgattccatagatattgctgatatcatcttccattgtgttacccatctatgccttcctttgtttgaatagaactccttcattctgatgtagtcaaaggtgttctttaacaaatactgaacttttaaaatgttgttttaccccagatc

SEQ ID NO: 182394 - DNA, 220 bp, Homo sapiens
gctctgctctggggattaaggggctgactagaaggatttgagtctttccttctgtccactgccacagggttcttggagtaactgcagggtttaaactgcagggtctaacttccagaggctggggttccctgccccccagcttagagacattcctgaggtggctgaagagcaggaaggagaatgaatgcacttccagactggcccagagtctcagcccctc

SEQ ID NO: 182395 - DNA, 455 bp, Homo sapiens
gcgtggtggctcacccttataatcccagcactttgggaggaggatcacttaacctcaggagtttgagaccagcctgagatagtgagatctagtctccagaaaaaaaataaaaaattagccaggtgtggtggtgtatgcctataatctcagctactctggaggctgaggtgggaggatggctgcagcccaggagatcaaggccgcagtctgggtgagagcgagaacctgtctcaaaaaatagaaaagcaaaaaataaaacttatgctgcaataaaaagcatgacattatttaacagttatccgttactggacatttatgttgttcccaatttttaatttccttaacccatactgaaaaacatatttttacactatttccttgaatattagtaaataaaaattgttaaatcaaaggatatgacaaaatttcgaacttttcaatcatactgcaatata

SEQ ID NO: 182396 - DNA, 261 bp, Homo sapiens
cccatgattaaattacctcccaccgggtccctccccaagacacatgaggattatgggaactaaaattcaagatgagatttaggtagggacacagccaaaccatatcctatggatacagtacattttgtccattgaaggatatacttgaaatgggtaaattttatgatatacaatacataacttaattagcttgtcagaaaattaaaaataaatcaataaataaaaccattgcaaaagccagcacccctctagttgcataca

SEQ ID NO: 182397 - DNA, 334 bp, Homo sapiens
  misc_feature (200)..(200): n is a, c, g, or t
ttttagtccacataaattagaatcacagaactataggctttgagaaattataaaagccttggaaggggtgaacgtgaattagtgcatatggtgtgcaggctttgtgccatacgtgctagatatgggatcccaggaaatggttgcatacaccttgttgggtagatgatattaaccctgcttttgcagatcagagaaacctngagctttgagaaaatcctttacacaagtccaatatcaaagtctggaactgtcaaactgcactcctgatggcttctagaaatcctttccatttacagatatgacaagacttgctttcacattgtggattcgtttt

SEQ ID NO: 182398 - DNA, 186 bp, Homo sapiens
agcagtcatccagaaatatctctgataaaacatactataagctttgcttcacaatcttgtaatatggtattgagtggccatgggatgagtgtttacaccacagaaattggcaaacactacaggtcagttttttttttttccttgagaactggttgttaaacgttggccagcacaccactgcactta

SEQ ID NO: 182399 - DNA, 268 bp, Homo sapiens
ggttcaggcacaacacccagagaaggaaatggcagccacctggctcggttgaaatactcatttcaagggaattccttgtccattcaaatgactgaacaacagcttgatttcatggaataatggcttttattaagaagccaacaggaatgatcatagtggggagtcttgtgtcctggcagtgggtgtttgtagagcacccggtggtcaccagcaactctgtgcaaggctcagtgggagggtgattggtgtgttggaggatgtgggtaca

SEQ ID NO: 182400 - DNA, 116 bp, Homo sapiens
ttttaccatggaaacttttgctcactctggacaattgcctttagtgataataaagaatttgtcttgcctagggtgaaacaactctgttcctagagaccaagaggctgggacagtgt

SEQ ID NO: 182401 - DNA, 284 bp, Homo sapiens
ggaaactgattttggttattagtggtcccatattgcaatttttggagcttgcacctgatgtccagagtggactggctgataaaatgctgtgccattagcacaatacccttgggagaggaagggtctaaatttgtatattttctgaaggcctcttccaacctgccataaaacatagctgggtttttctccttcccttatgtgacttccctgaccttataatttatggtcttggttatcccctttttcatccctccaaggagtgcctcaagaaactttgcttgcct

SEQ ID NO: 182402 - DNA, 519 bp, Homo sapiens
ctctttttctaaaagtaaattataatgttaaaattccagtttaattaaggtatgtttactgatgttatgggatggcttactttagactcatcaaattctgtaaaactggaaaagaaattgaaaggccttaattcttacagcttttactcaaggaaatgagcaaatctagcaccatttacatttgagttcaaataggaataaggtactaactttaacctcaattgttgaattataccattgatttgttggaatcatggatcagtgggaacttttcaaattaagagggaattcttttctgttcccatctatgtcaaaacttgtatatatttctatgcattcagaccctgcttctcaattcacagagaaatgaacttaaagtttggaaaggaagcatgagcatgcttcacagttgttttctttgtaaagcacttagtacaagaccagaactaaggggtgctcaatgctttcttattaaatgtatcttattggtatggaaaaaggtgtcctagcaaacctatt

SEQ ID NO: 182403 - DNA, 147 bp, Homo sapiens
tacacccagctgagccattgcccccatgaagccctcctagactttccacctctccctactcaagtggagtcattctccgtctgctttgcatcagtcctgccccttgggtaaaacctcaattgtagttggttgcttttgtttatgctt

SEQ ID NO: 182404 - DNA, 493 bp, Homo sapiens
atactagcagttctctggaatgcactgttgatagccacttgacctctttgagcctcagactctgaaagaagcaggtactgctacctgcttcacaggtacctgtgggggtaaatgagaatggagatacacaaggacatcatatgttcctggcacagagtgggacatggacgagtgtcagttttctcttctctcccttccccatcatctactagtaccctgaactattgcaggatctggccagcagcccgcaatgcaacagggctctttctttgttcccaggtggatcggcaggtcgagaaataatagacacacgcaagataatgaaagctgggtccaggggagtcaccgccttctggtcctgcgatgctgccaatgtgctggatataccagcatttattattaagtttagtgagggcgggggtaggttagtgagggatttagggtcatttgattatgaggtgagatggtcacatggggatgaagtaattcttta

SEQ ID NO: 182405 - DNA, 363 bp, Homo sapiens
aactgattacagacataaactattacagcataaactattacagcataaactattacagaaatcttgtgtgaaaggtgtgttgactagttgagtcatttgtaatttgctttctctaagtttttcttggtgcagttacagtagttcaagattcttagtcttcggaataaagacattttacacatcagttattcgtatgcatttttttcaggttgcaagttagaaaatgtcttggaattacacgaaatgctaataaacaatttcattttgaaatattacaagtgaatttcatatgtaaatttacagtttggagacactctgtgggctcgttttaagagatcatttcaactaattgaattttttacg

SEQ ID NO: 182406 - DNA, 384 bp, Homo sapiens
aaaaagatgatgtgaatgataaacgatatgattagtggctacttggtaaggcaaggaaatcattaaatcttggttctcatcaagttcattttctgaaaagatagcactgtattgggaccagaattctacaaaacattctttttatgtaggaccaagattttcaacaaatatttttcaatgcaattctcagcgctccataactaatagtagcttgttcaacacagattttttcggatggttcacacctgtagttcttacccagggatagttcaccacccctcccttccctcccatcatcgttggtgaacggtggcaatgtttggaacaatttttggttgtcacaacaggggtttcttctgatattcaatgagtagaagccaggga

SEQ ID NO: 182407 - DNA, 575 bp, Homo sapiens
caagacctcatctcaatttaataaaataatccaccttggattaacacgtataatttccttttctaatattcactgggcacctgttttacgccatgtgcggtatgttccacgatcagcaaaacagatgcagcagtccctgcagtggggaaaactcagtccatgaacattcacaccagcagggggtgctgtctcgccttttaaccagggagcccctctgtgtccttctcaaggctgcccttgtccatttcaccttcttccaattcaaatcttgaaaactcacctctaaggcgaatgggggtgaggagatacagaagaaaaacagtatgttctctcttcaactctgccccatgggctatgaataaagtcagaagacaaaatcccctgcttggtttttggcgtttttttcctattctaaatcaaagaccacagcagaccagaatcctgtggcttctcaaatgaccaagcctgacatattgaaaagcagatcgtcttgctttgaaaaaccttctccacccacccccgcaaccaatttcagctgattaaattcaatcactcatgccttaagactggcaatg

SEQ ID NO: 182408 - DNA, 548 bp, Homo sapiens
acatggtacacatatatagagcaattatgatgaatggagcttatagaactggaatttgcttggactggaagttgctccaagtcagtgagtgagtgagcagtgagtgaatgtgaaggcctaggacatgattgcatgctattgatgactttataaacactgtacgctgaggctacactaaatttataaaaagaaagtaattatgctacaacagctatgatgtcaccagatgacagcaatatttgagctctattataatcttctaggaccactgtcatatgctgtctatcgttgaccgaaacattatgcagcacatgactgtactataatttccgtttatctgttgatagatacttaagttgtttctaactcttggctactaatggccacttcttaaaggatgttcactaagcatgtttttcatttcctctctgattttgatttctcatacatttctttaaagcaaatatggtgaaaattaaaatcagagtttagacccaatgactgctagtttcctttattctagtaaatattataagtctatttgtatg

SEQ ID NO: 182409 - DNA, 103 bp, Homo sapiens
ccattaaaatggagatgaaccataagatactgcaaagcccagaaggtcatgtgtaattaagcacatattctccggcttcttttatcatatattcatattaaaa

SEQ ID NO: 182410 - DNA, 162 bp, Homo sapiens
cccactgcccaactaccagaaattgctactactgaaatgaaactattttctctccattttaacaaaaaaggttcttactgtacctgcagatttatgcttttatcaatgagcaatatattgagaatactttttcttatcagtaagtgttcttttacaagaaca

SEQ ID NO: 182411 - DNA, 681 bp, Homo sapiens
gggaggctgaggcgagaggagcactggagcccaggagtttgaggtcactctgagcacatagggagacccccatctgtaccaaaaaaaacacaaaaattcaaaaaggtgtactgagaactacaaggacaactgccatttagcttaatctaggggttgggttgggggatagcagaggaacggccaatccaatttcaaaagacaagtagacttaagcaaaagagaaagtactggagaagagatttcaggaagaaagtacaaactgggtgtggcagtacaaaggacaaagggtgtgattgtgcaaatgagtatggtagtacaaagcactttgttgttacttaagaatgataggagatggagtagaagtaggccacagggccttgtatgcaggctaaataacatggaatttatcccctatattggaaccactggataattttaaccagggcactgataagcatttaatatccatcactaaggaggataaatttaagggcaaggagtctagttaggaggctattgaagcagtcgatatgaagaggatatgagtttgtgctgtagtagtaaagatgggaaggattaattaaaaaaaaaagggggcagtcagcaggatttggagactggataatagaggtgagggagagaggagatataattctcaggtttctggcttggttgcctgga

SEQ ID NO: 182412 - DNA, 754 bp, Homo sapiens
aaattcttagatattacattaatctaaaagagaaatgcattccaaggacttacaaagaaatttttcaagtagaacaaaagacaaaaacttggctacacgaaaagatcaagctgcaaacaatttaataatctggactattcattatttgaggctatgtgaatgagatagacccaaaataagtctactgtgggtcaggttcaccaaccactaccaggttcagagataaaatatggaaaatatcatcaccatctgataaaggctgctagaggaaggatacagatcctacaactgatctgtcaatgcggttctattgaaaaaagcaaacattttcaaaattctaattataaaaaacattatttccagaaacatttttgtggacagacggagacaacaaaaagtttgagagacagcattttctgaccacagtggtcttcaaagcgaagttggactaacatataatgcagatggagcaatttttttgtttgtttgagacggagtcttgctctgtcaccctggctggagagcagtggcgcaatctcggctcactaaaacctccacctccctggctcaagtgattctcctgcctcagcctcccaagtagctaggattataggcgcacgcctgactaatttttgtatttttagtagagacaggattttatcatcttggccaggctggtctcaaactcctgactttgtgatccacccgccttggcctcccaaagtgctgggattacaggcatgagccaccgcac

SEQ ID NO: 182413 - DNA, 511 bp, Homo sapiens
ctagaggatccccatacattgactgatgacattagtttggattcttcccccaggcttctctgcatgttgattcccaagtagggctaccagatttagtaaataaaaatacaagatgctcagatagatttgaatttcacataaacaatgaatatgtttttagtagaaatatgtcccatgcaatatttgggacgtatttacactaaaaagttattcaatttttatctgcaattaaaagtcagctgggcatggtaaatatttttcatctggcaaccctacccccaaacaaccctcaaacctatcttcttgtaccaacattctcttctgggtgagcagccggcccttccaactcaaaatctctaaaaccagctcatccttttaatgtaggtgtcatctttcaggttctccttcatatcggtcagctgttaagcattctggatgctggttcccaaatgtctctacccttcccctatagaagagtctcattccaactgttgagtttcacctacagctg

SEQ ID NO: 182414 - DNA, 617 bp, Homo sapiens
tagatttattttctatggcatttaaaaaccctcctggggccaaggtagcacttttagtcaacagccttccaagcagacacttgcctttgaaaccatagcagtcccagggcaggttggaggtggctgatgccggacacggtgctccagactgaaaggtggtcatttgctgtgaacttccctctagattgtgtagactaggatgaggatgatgggatgtttcttgagctctgacccaaggcagcatcctctgttgacataattctccctccctactgccccttcctcgggcagcttgcctgaaagttgagaattcttaggttatttcttccaaagggaggaccctccccgagcctggccagcagagaatgagtgccactttgcactggcctagttgcacctctgctgggaagatgtgaatcgggggcgagtcgcccagtgagtcagggttaggcttctgggtaagacaccgtgctgacaggcctggcttcccctctgcttcatgagcccctgtgctccccttcacccattcaaaccattgacttcatccctacccagaaggtcacctggactcccagtgtcatagctggaagggggtgagatggtgatgatgatgggaa

SEQ ID NO: 182415 - DNA, 1871 bp, Homo sapiens
gctcctgaattctgtggtcccagcttagtgaccccagaggaaaacaggtttctcccagctttggcctgaataaacctacaagacctggcctggcccatgagccagacactcccactggagagatggaggatcgtgatggacaggccagggtcactgccctctccagggcctgggggcagagtattggaattggcagcccccgagaaccaagtgtacacggggagggcatttctccagagcaagggaacagatgctgggccagccagagcaacagctattccccagtgccttgatggttgagcctgggggtgtgtaagcccagagaacccagccagggtgtcaggaaaatcttttctgggtcatgaaggatgaatacacatttcccaagcatacaggggcaatatgggcatttgaaagataatgtacagcttcagcaaagggctggaggcaggaaggtgcatggaggggcctgggagcagagaatcagggagtgggcatagctgagttcagggaaaagaggctggaaagaggtgggcagaggccagatttgggaagccaaggatgccactctaaggagcttggacactgccccgtaggccactggaagactccgagcagggaagtggtgctgtcatatttggtttctgatacttagggtctggttttctgggctagggagaagacccactgccttctactgctaggactagtgctcagtggcagaaaggcagaacagtgaagtgctcatatgctgacatcaggctgcctggacttgaatctcagctctgccacttgctgaccgtgtggccttggggagaagacttgtcctctctgagccctggtttctagaactgtaaaatggtgacaatagtctctgccactcaaaattgaatggtaccaggattgagagagaaaatctgtaaatcactgcgttgtacattcaaggcaggaagaggcaggcagggcaagggtacctatccatgtattagggaagcacaagcttattcagaatccctgtgcacgcacctctgtgtacctgttgttggccagatgaaggttgcagtgagccaagatcacaccactgcactccagcctgggtgacagagtaagactccgtctcaaatatatatgtatatatgtataaagaaataaaaattaaatggccaggcgtggtggcttacgcctgtaatcccagcactttgggaagctgaggtgggcagatcacaaggtcaggaattcgagaccagcctgaccaacatggtgaaaccctgtctctactaaaaatacaaaaattagccaggcatggtggcgcatgcctgtaatttcagctactcagggggctgaggcaggagaatcacttgaacccgggaggcagaggttgcagtgagccgatattgcgccactggactccagcctgggcaacagagcgagactccatctcaaaaaaaaaaaaaaaaaaatgttggccagagctgaccccctacctgcaagtaaggaattcaaggaacaggattttcctgattggcttagtcttgcaccacacttatcacctgggaaggctgcctaacacaaaaccaggactggattagtaaagaaggcatgaggtagcagttaactgtgtacaaatcatctaatcttcactatcaccctgaggggtcagttctgttgtctacccgtttcacaggtgacaaaactaaggcaggtaagtaacctgtgcagagcacagaactaggattcagacctacagacccacaagtcagcctctaaggcccacttataactgctcttctgcttgcaaggccctatggatgaaatccagttataacctccttttgctataactagacacagagggaggcgtttctccctaa

SEQ ID NO: 182416 - DNA, 508 bp, Homo sapiens
cagcaggtctcagcctcattttacccagcccctattcaagataaagtcactctggtttgaatgcctctgacatactgatgcaaagatactcaacaaaatacttgcgaatcatattcaactattaaaagagagattacaccatgatcaagtgggatttattcctggaatgtaaggatggttcaacattcaaaaatctatcaatgtaatataccacattaacacgatgaaaggagataaaaaaaaactacgtgatcatctcagttaaagcagaaaaagcatttggcacagttaaacaccacttcatgagaaatactcaacaaacaaaatagaagaaaacaacctcaacatatataaaggtcatatattaaaatgccatatattgggccaggcgcagtggctcacgcctgtaatctcagcactttgggaggccgaggcgggcggatcacaaggtcaggagatcgagaccatcctggctaacacagtgaaatcccatctttactaaaaatac

SEQ ID NO: 182417 - DNA, 376 bp, Homo sapiens
taaccaaaatgaagcctggaaaagatctctccactcgctgatcagcctaagactcttagcagggatggcatgctaacaagggcaaccctagcgctgcccgggatgttttcagcaccacggccagcggcaaagaggcacaagtttaatttcacttgcacccagggatgggaatccccggggagagaaaacaaaaccagcagcaactattaacactctctgagacatctgcaaagacctacatttcacatacagggtagaggcaaaaaagattaatcatgtcatcaggaaaatcaaatgaagagaaaattaaaaacagtatcaaataggtttgtgtgtcatttgtttttcatattatccaacaatgtccaacactttg

SEQ ID NO: 182418 - DNA, 563 bp, Homo sapiens
ctgtgttacttgtgtgaggcaactaattaagttatagtagacttgagttaatagtaattcatatgaaaaagactaagggttttattacccacaagctcagtttgagtcaggagtgaaatgtgcgtgtcaggaaaacaaaggctatagtaacagatacatagtgttaaataactttgacagtttggagcatcagacagaaatacccaagatccagcattactaggcctcaataagtgtcactgggtgtggctagatctgttgactctggctggattcattattttcttttgggaatctctgtatttggtggaaatttttagttattagaaatctgttaaagaaatggtattaaatcattacatgttgaaaagtgatgatttccttcctattcaccctacccaaaacacaatatatgtgttgtggttttcatcataatatatcatatttctgggcactcatcaattcgcggggcctctgcatggcattatgttggcaacagaaactatttgttgaagactttgctgtaggaactgattgttctacacacagctttaaaatgtatc

SEQ ID NO: 182419 - DNA, 392 bp, Homo sapiens
acatatgctcaatctggatctgaagggagtggtggaagggccagttctggaaatccaattttctccatttcacaggtcctcatccagaagtcacatggattgactgagagtcacccatcctctttcattttcctttttcagaagagtgcagattatatttgcaggaacataaaatcacgagcaactgggaagatctagaccaaacatctgactatcccatcattttaagaattgtatattaattaatacaaattggaatgcaagatgtgatctcttaccgcggttaaactgcccttagagaacttcaacacaagccccaaacatgtacttgagacaggatttggtctttatcagaactcacactagcaaacaaatggcttttttgagcaaag

SEQ ID NO: 182420 - DNA, 275 bp, Homo sapiens
tttcacacaagtctggtgtcaaacattctgatcttgtcagtcttgattctctgagttttgttttgcatttctcttattgtgagcgaagtcgaacatattttcctatgattaggagccatgtgtaattccttttatgtgaactttttgcccatctctgtccattttctttacttattttttctattgggttatcagtctcattgatttgagaagttcttcgcatgttaaggaaagcagccctttgtctgaaatatacttgaaatatatatacatat

SEQ ID NO: 182421 - DNA, 406 bp, Homo sapiens
atccaacgaacacgtcgtggctcacccttgtaataccagcacttagggaggcagaggttagaggtttgctcgagccccggagttcaagaccagcctgggcaatatagcgagatctccacaaaaacaaaaacaaaaaaaaaacaaaacaaagaaatagaaatccagaataactcaaagtcaaaactaaatatcctaactgctgcaaattttaattacttttttttctgagacagggtctaactctgtcacccaggttggagtgcaatggcacaatcacaactcactacagcctctacctacccatgctcaggtgatcctcccatctcagccttccaagtagctggaaccacaggcatgcaccaccatgctcggctaatgtttgtattttattttttgtagaaatggg

SEQ ID NO: 182422 - DNA, 204 bp, Homo sapiens
acgttgacacttcagtagaggacaattcctgttgagatttactttagtgatttaaagatcaaatgcaaaaaataatccaaattacaacaaattggtacaaacaggaattctagaagaaaaggaatggtgaaggagatggaagtctgaattttaaaaataaggacttatggccaggtgcagtggttcacgcctgtaatcccagca

SEQ ID NO: 182423 - DNA, 339 bp, Homo sapiens
agaggtctctgagtccaaaatctaggttttgcagaggacgaagttgaggcatgtggaaatgaagtgactgacccaggcagcaaggtgagtcactactggagacaagagaaagcccagaccacctgctctccagcccaccgtccaccacctctgatactgtttggatatttgtccctgcccaaatctcatgttgaattgtaatcccccgtgccggaggtagggcctggtgggagatgatcggatctttggggtggatccctcatggcttggtgctgtcttcgttatgagtcttgtgagatctgatcatttaaaagtgtgtggcaccatgccccaactctc

SEQ ID NO: 182424 - DNA, 446 bp, Homo sapiens
tcgctcatacctagtcagggatgagcaatggactgggagcacataggaaaaggaatctgagccttacctgaaggcttccccaaggaagggactgaccactaagcaggctcctaaagaataaggaggagatgttagccagacagagagtagggcagaaagggcatcttagcctgaaagcctgtcctgtgcagagccctggaaggacaggcagtggagctagagccaggcaggggtcgttaagtgggttgctgagaccaggtcaagcttccccacttagggtaagggaaaggatacaatactccttatcagggtagaaaattaccaagaagtgatgtgggcctcagttcagtgaatctttactaagtgaaggctctgagtctttggtctgaggaggctttggggaacatgtggatattctactaggcccagaaaatgagaaggatacc

SEQ ID NO: 182425 - DNA, 195 bp, Homo sapiens
aatataaaaggacaaagaaaaaatgtgaatgataagcttaagatacaaggaaaatgggttaagaaattttaatatgcactcagaaaaatcagacagagaaaatggaaagtacaggagcatctatatgttcagctagaaatagacactgaacatcaattcctccttcttttgccaacggcatacttcagtttctct

SEQ ID NO: 182426 - DNA, 320 bp, Homo sapiens
atccagtgccacagagacatgaggtactgcctccccatcccatgggccaaccaagtatttcgtatggctttcagttcaccaactgcagggaactacgtggtcagagcttcagatactcagaatgtcctgccaggccctcagtgtgggataattcggtcagacctgagcgtttcataaacctagaaaaggggattaggtcaaccgccacctcgaatgttccctgtgccccatgcagggagcatttcataccagggccaggagaaagtactgctcttaaagggctttatccaaggcatcctggttcacattgagctgtagga

SEQ ID NO: 182427 - DNA, 305 bp, Homo sapiens
ttgttagtttataatttgtcctctttgacatgtattgactcttctttggtggtccaatgtgtggtcaaatgtgtaagttccaggtgttttggttttgttgttgtttgacataaggtctcactctatcacccaggctggagtgcagtggcatgatctcggctcactgcagcctcgaccacctggacccaggcaatcctcccacctcagcatcccaaagtgctgggattacaggcgtgagccactgcacctggcctttgtttgtgttttaagagatagagccttgctatgttgcccaggctgggctt

SEQ ID NO: 182428 - DNA, 350 bp, Homo sapiens
gatcactggcacgactgtacatggcatagctgttcttgagtaacctggtcatccgctataccatacagctctgtctgtcatgatcctgtcttttctcctaacctagctaactgcagctgcatctattccacaggtgactcaaagacagcaccaggctgtcgggctggaaggctcataggcagggcagagccagaagcttctgtggcccttctctcccattccattccagccaggaggggccctggctctggggtccttatttgcccctcttcaccactatggtgctccaatgcacacacataccaacaggcttcagtggacgctggttgagctgaatcctgactagagct

SEQ ID NO: 182429 - DNA, 353 bp, Homo sapiens
caaccaggccagagcaccatggaaaaccattaagtggtctaaacggtggcttgactgaaatttcacactctaggtccttcttctggtcctgtcttttctcctaacctagctaactgcagctgcatctattccacaggtgactcaaagacagcaccaggctgtcgggctggaaggctcataggcagggcagagccagaagcttctgtggcccttctctcccattccattccagccaggaggggccctggctctggggtccttatttgcccctcttcaccactatggtgctccaatgcacacacataccaacaggcttcagtggacgctggttgagctgaatcctgactagagct

SEQ ID NO: 182430 - DNA, 305 bp, Homo sapiens
caattatcaaaaacccattcacaactcaggaactctcaagaggttgctcccttgtctattgccacttacagaccatcttgctcaaagtgatgctagaagtgctggcaaagagaacatcttcactggagtgtcttgggagaaaaatttctttgctgcacatttcttaataaaattcaattatgtaaaatgaggagagagctgactaaagaagatagaatgaaaaggaaacattgcacaaagatatgtttttatttgaccaacaggctttattttgattccccaatcttctggaactcagactttct

SEQ ID NO: 182431 - DNA, 615 bp, Homo sapiens
agaagttctgttggacagtgctgctttagactttcctctctgcctctgccacaatactgccaggagagagctttccaaaatatagccctggccatagctctttttaaaactctgtgttattccttattggctatgtgataaagtccaaattcctatgtttgccaaaacagtctgcctagctttccagcctcatgtctaaccacttcctcttgggccctatattccagctgtattgaactgtttcccagacacatcattttgtttcatgcctctgtgttttacacatgtgcactttctatatggagtagacttttccccaatctatgtacgcccaaataacatctctgaaaagcttaatgttactgttcaagttgagctaactgctcattctttggtgtcccttccccttatgattttactttccacagtgaatggcatttatgtgattacatgtttctctctagtactagaccttgattttgagagcagggccattatgcattctttttcttgctttgctttttttttttttttaatatccctaggtcctagcacagtatctggccaatattaggttctcacaaattgagcaaatatggaggtgaattgatgtgt

SEQ ID NO: 182432 - DNA, 252 bp, Homo sapiens
acaatgctggcctcggggactttagtccatccatggagaacagacaaaggtgaaggttgggacaaaactcatctaaagacctgctttcagcagcagtcttctttatttgtaaataattaatgtacaaagtaagtcactcttttttttgttgttgttgttgaaacaggatctggctctattgcccaggctggagtccagtggcccagtctcggttcactgcaacctctacctcttgggctcaagccatcctcc

SEQ ID NO: 182433 - DNA, 330 bp, Homo sapiens
taaaattgtaggagtagatttctcttttggagctagctccctgaccaatataggcactaaagaagtcttctcagataactaactttaagcctatatctaaagagtaatagttgtctgtagaatagtgataggcagtagattttagataacaggaaatatttaggtatgctgctaagtaagagtgaatgctggttacaggagccaaaagagttatgtatggttagaatagcaaggaaatggtgagatcaacctgaattcgatgactctagctcaatgcattgaaagccacctcacaaaatgagcaattcactgacaaggaacaaatcacca

SEQ ID NO: 182434 - DNA, 203 bp, Homo sapiens
gagaaaatctgagttctggatggaagcattgggaacccaatgttgtatccaagcatgtttctttggaatggcaccagagagcaaattgcccatctgacctccatgttaaatatttggccttgatggaaaacagcaggcctatgcagtgggcaagacaattttcagctacttaagtctacgttaatgatatacactcaaaatga

SEQ ID NO: 182435 - DNA, 480 bp, Homo sapiens
ccaaaaagctggaggcaggggtatgacgtaatctgatttaagtactagaatgatcccactggctgaatggaagctagggatcctgagaaggcttctgttgcaatcttgggagatctgggagaggagatctcggatctcagtattttctggaggccaagcaggctggtgggtgtggaagcagggtgaaaagttttaagaatgattccaaagtgctgagtggctgctgctgtgggggaccctgactactgagatgggggtgggggcagcctatgctcccaccatgccaaggctcagggatttcaacttgctcttcaggacacagctctggtgccaagccaaggtgggagggcagcgaggcctccctctttgcgggggtggtgtgataaataagaatgtctccatctcactcctcatagctgagtggcacttccaggggcagtcaggggagacacagccaaggggtggatgctgccttcagca

SEQ ID NO: 182436 - DNA, 833 bp, Homo sapiens
ccgggtacggtggctcacctctgtaatcccagcactttgggaggccaaggcgggcggatcacctgaggtcaggagttcgagaccagcctgacgaacatggagaaaccccgtctctacttttaaaaaatacaaaattacctgggtgtggtggtgcatgcctgtaatcccagctactcgggaggctgaggcaggagaatcacttgaacctgggaagcagaggttgcagtgagccgagatcgcgctattgcactccagcctgggcaacaagagtgaaactccgtctcaaaaaaaagaaaaacaacatcatgggagaagacctaccttagcctgccctcagcagctcagctccgaggtccagcttgcagccgtcgtggttttgtgcaaagcagctgagtgtccctctgttaatgtgtgcaaaccatggtgagagctgagcctggatctcaagaccttgcgtaggccaaacatgctcaacacatgcagagagctcatctctcactatctgtcctgaagtcacagcgtcgctatggatctagccacctcaccagtgtctcttaaggctagggtcctgtcactagtcttgtggtgggttggctctcccatcctacccttgtcccttcaaaattcacatcctcagccctgagaggggacagccactttagacaaaagaaggcatgtttcagggcctggcacggtggctcttgcctgtaatcccagcactttcggaggccgaggcaggcagatcacttgaggtcagaagttcaagaccagcttggccaacatagtgaaaccctgtctctactataaacacacacacaaaaaaatggccgggc

SEQ ID NO: 182437 - DNA, 147 bp, Homo sapiens
tgagaaaatttaagaccagcaagatggggcacccctccacagctaccctgctagccagcagcagagaaggacccacctctaacccatcttctgagacccagtctttctcccagcacctccccacaacatgcacagtgctgacgggat

SEQ ID NO: 182438 - DNA, 624 bp, Homo sapiens
cattgatacaatgctattattatctggtctgagatcttattccaacttcactattgtctagtaatgtcctttgtagcaaaagacagttctgagttgggatagtttcatgcctctttcgtctcctttcacctggagcagtagttctttgtttcctgatattgacgtttttgaagagcacaggtcagttattttgcagactgtcctcaatttgggtttgtcccgtttcctcatgaagagactcaggtcatgcgattatgtccgggtgccacagacatgatggcgtgtccttagtgtcacatcggcaggtacatgatgccattttgtcccataatgcatgatgtagagaattctttttttaagttaaatttattcatacagctatctaaaatcgtttccatggttccaaagtcaaggtatattcagagaagtcgagtttgtctccttgcaccccgcccccatttcctctcttcccctgtagataaccagttttcttctaattttacactgtattcttccaactgaaattttttataaacatgagcatctatattggttcttaccttcctgcttaggtaaatgttaaggtgctcacactttctgcatactcacattatatcctgtagg

SEQ ID NO: 182439 - DNA, 498 bp, Homo sapiens
gctgctctgtggcacatgcatctctgtccagggcacttccaagaccaggctgggacacactgaccttgaggactgctgtgcaggagaaactaagcatgtattccctaatggcgggcagtggttcctgccactgttgctctgagagtggagtggagccccaggctgctctactcctcagacctatgcctgtttttccaattctcttccccactcataattgcagcctcacctttcccacctgcttctcacaaaataaagcatacttcttgccatctgccttgaccccaacaccccactgcctgagttgggaggaaggttttagagaatcctagagagaagggtgcctgtaaggcccttgagaacagaaagaacccctctggttcatttcagtgcccccatggatcactacaagagagtgaatgccaattacctcacggttaccagaatcaggcacaagcagagactcagaaaggaaaatgcctccttggcttagtaaaa

SEQ ID NO: 182440 - DNA, 567 bp, Homo sapiens
attaatattttagattacaattgtgctaatagagtcatttgcctgtatttttaaatgctctaaagataacaaagacattctattttggaagaaccaaacatgggtatgctgatgttttgccgagggtttatacacactgtgactaacgacacttctgtttaataggactgtaccatgccctgttccatggctccaaccagagccgcccagagatgtgggtgacagctcccacccctttcacatccttgggagggcattcctactccctgagaaagcaggtcacagcaatatcctcctctgatcttcaaggagctgaggcgcttggcgtccctgctgaaggcatatctctaactatggcctgcagaggtcctgcctgccaccccctccttctgctggttccagcaccccaactgtccttggcaagccatcttccctacacccctgacccagacccggccagtcacccttgctggtgcccccaccccctagccagagtgactggttctgggtgggcatggacatcattcaggtcggtcccatcaggactctcgctaagaagctagcaca

SEQ ID NO: 182441 - DNA, 134 bp, Homo sapiens
agagctgtcgggaatgatggaggctagtttgctaaatggggattttttttaaagatgggagtatcttggctcagcacagtggctcatgcctgtaatccagcactttgggaggccaaggtgggtggactacttga

SEQ ID NO: 182442 - DNA, 492 bp, Homo sapiens
atcaagatgttattaaattcatcttgtgcacataattgtttctttaaatttatgtttcttgcaaaacttgcggtaatgctcatgcacaaaataattttctaaataaaaaataaaaacattttctcagtcattaattcttaaaaagtatttctccccagtaattaatgtgaattaattcttaattcttaattatagaataatgttgcccttcagagttctgaatcttttgcacgttgtatacatttcactgactggaacatcttctggaatattggcattaattaatctcactcagcaattaatgatttcaaagaaattaaataccattcatattctgaatcacaagggtactttggcacctaatttaatcaagctctttgtatcatcatctacagtttaattacttaacaaacatttctttgtgtgagaaagattgagcaggttattgtgcttttcgttgtatacatttcactaagtagaacatcttctgga

SEQ ID NO: 182443 - DNA, 475 bp, Homo sapiens
ttgccttaatgaacataagaagtaaatattgactgatttttaatgactcatccttttatagccttcttcataactttgatgagaagcataattgcaactggttttatgtgaaataccttaaggagctgcattatgcatgccattcactgccctctaggagcttaccatgtaagaaatatacacatgtagaatacacgcatatatgatcaccatatagatgcattaaaatgcaaatattaaccacaaatatacaagcaacttgcagagttttttttttttcctaaaaaggacacaatatgagtatttttcaaaggttgtgggagagagtgaaaaatggatagaaaaaaagttaaggtcagtgttcagcaagtttgagtaatgatgagatatttattgcaagctctaatgcattaaacctctttaatcttgtcacaatagaaattaattgcatcaggtagttttgagatcaggtaaa

SEQ ID NO: 182444 - DNA, 362 bp, Homo sapiens
cctcattactccctttccccaaattattattcctagaattccagtttcatcaagtcattctcttgctctaaactacccagtaatttcttacagcctagtactgtaaactctctgtctctaacaatctccccaatcttaaacattattgcaccctatacaaatgtcagtcttctcatcacagtctgtcagacacagcttgcctgcctacccactcatttattcatctgtgcacatgctcatccatctacactgtcacttgacaatgcacactgaacacccactatccatagaatactatccaggaaaaccgtagaaaataagtcacacacggtccatgatatcacgtgggggaagggagagca

SEQ ID NO: 182445 - DNA, 124 bp, Homo sapiens
ctttccactttgcatctgaaattcatttcactggtagcagaggagagacagaacccaagtctgatcagcagcgcactgtccctttcaccacaccatgatgtcttcccagatcaggaaaacaaca

SEQ ID NO: 182446 - DNA, 244 bp, Homo sapiens
agggtggatcccaagttgtgcagctttcactgtaccatgtggcagcagactctactagatcagggttgttggtcctaaaagctgttcagtgtgactgtgcccttacaccgtgcaccaagaagccttctagaagccgtttggcttcctctgacagacttttgtggtggttttactagtggagggtgtccaggttcttagcgtcttgaacaaaaattggacaaaatgcacaaacaaaacaaagaat

SEQ ID NO: 182447 - DNA, 186 bp, Homo sapiens
taggggataagaggggctggggatacgtggaaagggtgaggtgagggacgcagttcattcattcgagggtatgggacctggttccgtgctgcacacaggggagactggactggccaaccggacagacgggagcttacactcttgtgggagctcacgggcgggccagtctgagagaatgcgggtttt

SEQ ID NO: 182448 - DNA, 220 bp, Homo sapiens
ggaatatggtatgtcaaaagcagcaggcttccatggaaatgtctggcatctcagctacatcgctgggcacagggatggatttggggtgagagctgagatttttaaaaaactctcagcagcacacgaggctgttcacagtaatacttaataaacgtctgttgaatgagtgaatgaaatgtggcctcagcaagccaccctagtgtctggctgggttctcagc

SEQ ID NO: 182449 - DNA, 609 bp, Homo sapiens
caagtgtaacaaaacacatagtaatcttttgaagcggttgtgacttctggccttcaagcgggagctttaggaggaatttcagtgttaaaaaggagaggcttgaactttgacatctttctctcgtgatttaagattctaaaagtagtgttaggcaaattcttatattccagcacaggagaaacaccagctttccaagaggatttagcatttcttcatccctttagcaatacaagagggcaactgtgctcagaggttggctacatttgtgaagtgggaagtatagaaagatctggaagtatgttttcagggtcacgagcccagtgggcagccatatgctgtggaagtaccttggcctggaaaccctccagctaaatgatgagtgtgtctttctacacaaaccctatttgaaggcatgttgctgcagtgttgtttttacccctcaggtaaaatgttattttctaccccatatccgaggcagataagccctgaaattggccagcatgtggattccacatgttttctcccactcttccaactggatgtgctcttgaaaacattgactttcttggtccttgtcatatgatatgttttcttattgccatacttcct

SEQ ID NO: 182450 - DNA, 154 bp, Homo sapiens
accagagcaatgcagagataagagaaagtaggggcctccagatcccagatagggtgaccaatcatcctgactgtctgaaactgagatgtttctttaggatactggactttcagtgcgaaaactggaagagtcccacacaaaccaggacaaattg

SEQ ID NO: 182451 - DNA, 429 bp, Homo sapiens
cctgctcggtgctgagagggtagaatggaggatgcgggtcctgcctttcaggcacccctggtgtaactgagaaccctgccatcctgaagtagggtaaggtgcagaagaggtcaagacagccgcacaccaccctcatcactcctccatgtgttcattcctggccccatggccagatcggctgggaaggaaactgccgcggtgagctctaattactagagatggagacgctcaggtgcaagctgcctaattacaaaagcccagaacacacatgctctcagggggcccaccagggttaaagagactgaaaaaataattttggctgcaaatttaagtgaggatgaacaccacgaggagcttcatatgcagaaatgaagtcctggctttcttaaaaaaataaaaacactaatgcctcaacaacaactacaacag

SEQ ID NO: 182452 - DNA, 375 bp, Homo sapiens
atgagattctctgcctatggaagtaaaggcttgcacaatcctctggaaaagtaaaagtgcaagaatgtgtcccaagtggacacaggttgtaccaggaacctccagggtcccagatcagtccacccagagtgagtccttgtgtctccggctctggggtcagaaagggcaggttgacttagttcctgaaggaaaccatgtagccctcacatatgtcacaagcatagaggaaacgtgctacctttattgctcaggttcaccagggagctttgcaatgctgagaccattcctaggcccaggacaatctgccattagctctgcccatggtaactttatgccacagagcaccaggtcaaggacataccaaacttccctctt

SEQ ID NO: 182453 - DNA, 552 bp, Homo sapiens
aataaaaaagaaaagaaagaaaatgtggtatatatatacagtggaatactattcagccttttaaaaagaaggaaagcctatcatttgtagcaatttgggtgaacttggaggacatggtaagtgaaataagtgaaataaaccaggcccagaaagacaaataccacatgatctcacataaatgttaatgttttagatttttaacattgaactcacgcaagtagtgaatagaatgtcagttaccaggggctggaggggtgagggttgaggcgggagattcaagagatatgagtcaaaggaaacaaaatttcaatcagacaggaggaataagttccagagatacattgtacaacatggagactatagtaaatacaatgtattacatacttgaaaattgctaagagtgtagattttaagtgttctcagtacaaaaataagtatgtgaagtaatgcatgtcagttagcttgattttgctattccacagtatataaacatcatgttgtataccataaatataatttttgtcaattaaattaattttttaaaaagttaaa

SEQ ID NO: 182454 - DNA, 417 bp, Homo sapiens
cactgaaggcagggctgactgcagactctgcactgtgaccagagtgtggctaactagcaggcttctgtagggttggcatgggtcttccctctaaatcttcccctaaggctctgaactgggaatctgaggcaactgggcactcttgctgttataacaaagatgcttctcttttaaaataagcctcacacctcctgttgcttcattctttcattcctttccttctgaacagacatgtgaggtctgagatagtatctcctaagtggtgcaagaaggcagtgtgcttgaccaagcctagggggcagaggaggcatccagaggagctggtagcaggatcaagatcccaagtgaagaaccacaaacagaggatagagacccagtgaggagaacctcctctcagtatggtgtctgaagcattgg

SEQ ID NO: 182455 - DNA, 332 bp, Homo sapiens
acgggaggagagaaacagtgagtagagtggggaggcagtgctgaaggacagcagaggagagagaggaggccagacagccagaggaggcaggtggctccaggtctcccagggaggaagggagctggagaaactactcctctcacattcagctgctcatttggcgtgtgaagaactagatgggccatttttaatatgctatgttagtttctctactctttttttgaaaaatcaaatatgctctttctttgtcttgacacatacacacgacgttaagatgtcatcagggaagaatcattttttccacttacaacatgaaaatgccttctcaaatt

SEQ ID NO: 182456 - DNA, 233 bp, Homo sapiens
taggtagaaaaatccatttatgacaaaaacagtcgtcttcattttgtgggaaggacacagaccttcaaagatttatatgcagcacccatagtaaaaacaaaaaacaagaactaccagaaattatactgatattgtgactaaagacctaaaatagcataagggaaagagactacctaacattgtgatttagcgatatcagatacagggaaatgtctataatataataataacga

SEQ ID NO: 182457 - DNA, 229 bp, Homo sapiens
tcaaacagtgctcagagtgcatacagtgccgaggagtcgaaagtcgttcctcggtcttgtgtagtggaaaccctggtggcatgccctgtggtaatgtatgccattagttgccaaaggctgcttccttcaagggctttctctcacagaagggttctaaggctgaagagacatgagcctctaccaccactaggagtccccagagggacatattctgaataggaatctgtca

SEQ ID NO: 182458 - DNA, 101 bp, Homo sapiens
taaatccccacatgaaaataccatatttgatcaccccagactaagtggaattatcaaaaaccagaaacaagagacagattacctgaaattaagtcataaca

SEQ ID NO: 182459 - DNA, 221 bp, Homo sapiens
aggcctcacagaactagcatagccaagatttacacttcaaaggtaatatatgaagcagtaatatgtcacctgatgataatgcatattcctttgtgtacttgatcttagtgatattaaatccttttttatatacacatgcaaataaactatgccatggttaaattttgctgtaaaatgtccaattgttcaagtgattaggaaaaggttataatttcttaaga

SEQ ID NO: 182460 - DNA, 427 bp, Homo sapiens
atgaacagaaacggattggcttgcagttctggaggctggcaagggccttcttcctgtgtgctcacgtggtgatggggtgaaggcatattcacccttttagaatgaactcactcctggaatcatgagcctgtcccttggtgacagcattaagctgttagtgagggcaaagccttcatggtcaagtcaccttctgaagatgccacctcctaattaggctgcgtgggcaagtgagtttcagcatttcaggagacagatgcccacaccatagcagtgacctcatctcattcagggtattggtgcttgtcagacactggctgtgactcgcatctgggtgcgtgtgcctctctctgtgggggccaccctgccgtcaggcgccaggaaaccgacgtcagggaatgtgggggtctccctgagagggtgccgacct

SEQ ID NO: 182461 - DNA, 449 bp, Homo sapiens
gtatggggacaagaggttcaattggcaggactcttggtaacacaaggaagggtggaaatgcagagggaacaagccatgactgtctgctctgcaaacataacttgtcacattaaaatcacccactctctgcctgggcgcggtggctcgtgcctgtaatcccagcactttgggaggccagggcaggtggatcacaaggtcaggagattgagaccatcctggccaacatggtggaacctcgtctctactgaagatacaaaggttggctgggcatggtggtgtgcgcctgcgatcccagctacttgggaggctgaggcggaagaatcgcttgaacccgggaggcggaggttgcggtgagccaagattgcactactgcattctagcctggtgacagagcaagactccatcgcaagaaaaaaaaaagaggcacctgaaagatgcttcgctatgac

SEQ ID NO: 182462 - DNA, 493 bp, Homo sapiens
tcgaactcattggcgtgggtgtggcatgctgtgctcctgactcgtccctgctcatctctggccaggcttggggcagtccggatcacttgagcccaggagttaaaagttggggcatcagaaattttagacacttaagctgatttctttgatgtatttaacaacatacatccagaaaagtggatcatttgggtgctgagggaacatctagaatctgctttagtcataatttttttttagatggaattattttgatctagaatattaacagtggagaaaaagctaatataaatgggatggttttgagacaggcaatgaaggttaaggaaaaacaatctgtagataagttagatttccaaggcatttgttgaaatgaatggctaaagtagcttgagatgaaggggtgatagatgggagaaaggaggaggttgctggaatgacaagtttttggtgaagtattactccttggtttattggcagtagaagggacataagg

SEQ ID NO: 182463 - DNA, 318 bp, Homo sapiens
tacaacaattgcttcaatctaggaggcagacgctgcagtgagcaaagatcatgccactgcactccagccgtgtgttgatttttgcatcctgaaacttagtttgtttattaaattaagagttttttggaagagtcttcaggattttctatacataagatcatatatcatcagcaaacagatacactgatatcctatttcccttttctttctctctcttgcttgattgctgtggcctccaggatatatagtagtatgttgaatagaagtggtgaaagtgggcatctttgttttgttcaagttcttagaggggattctttc

SEQ ID NO: 182464 - DNA, 505 bp, Homo sapiens
gaccaggacctgcccgacgcccccggtccgccgggcgaacgggtcgtcactttctgtgatcagtttgggaaaaggcttgggggccctgccacgggccagtgtgggaacccagggttcgaattcccgccccgacgctgcttccggaccgaaagccccctgaacgccttgccccaagtgccctgggccttggtttctccatcagtgaaacaatgatgggaatcgcttgacgtgaagtgagtggaggtgctggcacacttcgagtgattgctaaggggaagcctttggtactagttaggataattattttaattacagtatagttagggtaatgaattccaaataccagtgtagcatcatgtgctttatatacaataggtaatcgataagtaataaatattaaatttatataacagaaacaatggataaatttatgtgcatacaaaatatatttacctaatacatttagaagtatataatatataataaacatgtaaaaaagtacaat

SEQ ID NO: 182465 - DNA, 346 bp, Homo sapiens
aaaatgagatcaatcacccaggccctaaagaatcaatgcagtctctggggttggtgtattcattggggtaatagcccttcagtaggatagttaattacagccttatatgggtcagtttctttcagaatagtttatagtctctactgcatggaagcagaaccccggaaaaaccttggtcatttgcctgagtctttatttttcgagctcccatgtaattgaatgcagtgaaatatctttctatgttttaatgctagttaccagctgagctaaggcgaggcccagcgtaaactgatgccctctgtgataaacgcaggtggggaaataggctttgttttgatttctctgt

SEQ ID NO: 182466 - DNA, 729 bp, Homo sapiens
cctccagacctgccaggtgttccctggggggcaaaatcaccccccagttgagaactgctttagtacctcagaagcagggagtacaagacagacttttcgctaattggaagttgaagtctaaataaagttacatgatatatatgcaagagctttcaaaaaattaaaatgccctatgtgaaggaactattaagaagtctaatacctgttttttgtgttttgttttgttttaccatggccttctaccattctgattattcagaacttattgaaatgttaagatctaggtttttgtcctccctggctcttcttttctttccctatacaatatattaggagataatcagaaaagttaagttaatcaatgcattagagagggaggaggagagaggatgaagaaatgaggcatgacaggggaaatgcctgtccttcctatctcatctcagtgaaacaacacttttcatttccacccacacattttttgctcccaatgatagcaaaaggttttgttgttggtattgtttttagagagagagggtcttactctgtcacccaggctggagtgcagtggcacaagcatagctaactgcagcttcgaactcctggacttaagagatcctcctgcctcagcttcccaaagtgctgggactataggcgtgagccaccacaccactttagaaaaagtcttgattccatatttacattcctttgatttcaatatttactcaacaa

SEQ ID NO: 182467 - DNA, 493 bp, Homo sapiens
ctgcattagacttgttaggctggtctaaacagctgttagtctagatttttcttttcttttcttttctttttgcctctggttccagttcttgtgatagaattaatttgatcccattactgtggactctattcaatgcctgtcatgttaagaggtatttccatacagactggtctaaatgctgattgcatttagaccctgaaaagtactttaaggaaagataaagaggtactggtttagaccatttatagataaatatgcatggctaaaacccctgaatgtaatccttccaggcagaagataaaacctgaaatctaacgtataaattgtcatgggtacaatattataaaagagaccataagttaccgagaacatgactggaattcaggaaatgctaaaggtcctgtcttatctctgtaactcatttacaaagaaatcatgtatgattttctcaactgcaatcttttttgtttctgaattagactgacaaaaatta

SEQ ID NO: 182468 - DNA, 227 bp, Homo sapiens
gggtgaatgaatacatgaatgagtattgaatacatgaatgagtatgaattcagtcataaatgtctaaagacaaaatgactctgtagacatgagaatttcaattgaaacatacgcttttccatagactgtaacagcagtaacttaaaacaactcatgagcagagtaattttctaatattaacctgtttgttttcacacttttgctacatgaatggtactgcagaattg

SEQ ID NO: 182469 - DNA, 194 bp, Homo sapiens
gaaaaaagaaaagctaacccagacgagaaggacgttcaagggaggttgtcagagaaaatagtagctatataaacaaggaaagtacattagccaagaagaatggagcaaggtatgctggccaagtgaaacaacctgtgcaaaagctactgtcagaaaaagtgtagtacattgagggtctgagagtgtaagtgtgg

SEQ ID NO: 182470 - DNA, 282 bp, Homo sapiens
gggagctagccctagaaaggtgagttggggaggtgggagatgaaacacagcaggctgttggagttggctggtaccagcttgcaagagccagttgctagattttcctattgtttaaatattgtcatcattaaatgttaagttgtagaatgataaaaatttactaatgtaatatcaattatttatattaatctcctagatgtatgcctgtaataaacatgttctgttgttttcctatgctgtttgttgtgataacatttattaaaacataattttatatctgta

SEQ ID NO: 182471 - DNA, 624 bp, Homo sapiens
agctttgaaggtacttacttcattttattgcttattgttgaagttgaatcatgtgttatttttaggggtttttttttgttattagtttttcagaggacagagtctgactctgtcacccaggctggagtacagtggttccatcatagcttactgcagcctcaaactcctgtgctcaagagatcctcccacttaagccttctgagtaactgggactgcaggcatacctggccaattttttaaaaacaattttgtagagacagggtctcactgtgttgctcaggctagtctcaaaactcttatcctcaacctatcctccctctgtggcctcccaaagtgctgggattacagacatgagccaccacacccagcctatttttagttatgctctttgtagtgttcttgggtttaccatctttaacaattaatttaacttagcacattacaatacctcatataagttatgtttcatctttgctgatatatcaatgtaagatggtaactaaattagacctcataatcagtagctagttcttccaccaccagaccatactaattatgctgtgacactgtcagaagtgcatgatgatgtccacactgtacctgtttttaatcatttcctcactt

SEQ ID NO: 182472 - DNA, 556 bp, Homo sapiens
cgggcacctgtagtcccagttactggggaggctgaggcaggagaatggcgtgaacccgggaggccgagcttgtagtgagccaagatcgtgccactgcactccagcctgggcgacagagcaagactctgtctcaaaaaaaaaaaaaaaatagtttccatatttgatcagtgtttgcttccaattagctgtttgatcaattttcttttctttttttttttttttttttagtatttattgatcattcttgggtgtttcttggagagggggatgtggcagggtcataggataatagtggagagaaggtcagcagataaacacgtgaacaaaggtctctggttttcctaggcagaggtccctgtggccttccgcagtgtttgtgtccctgggtacttgagattagggagtggtgatgactcttaatgagcatgctgccttcaagcatctgtttaacaaagcacatcttgcaccgcccttaatccatttaaccctgagttgacacagcacatgtttcagagagcagggggttgggagtaaggttatagattaacagcatccc

SEQ ID NO: 182473 - DNA, 476 bp, Homo sapiens
gtagagacaaaaataaactgtgttgctcaggccagtctcaaactcctgagcttaagtgatccttctgcctcgacttcccaaagtgttgggattacagaacagagggaatttcctggaaggcagggtctgtgttcatctcccacagagcatagagcacagtggatgctgaggaaatggtgaatgctggaaaggagcaacagaaggagctccagttctccctgagaagtgtccccattggggaagtgacccaaagtctcatgtgtctctgggagataaatcaagatcaaggctagggccttgggactcagcctagccctgtgaacaatatctcacctggactttcaaaagatggggtgaaggtggaccacaccgggtgttctcagtggcttcccagggcagctgcctcaattagaggatttgctagtacgtagcagagtgtgcaataaatcttattgtttcattaggagcactgtgtt

SEQ ID NO: 182474 - DNA, 126 bp, Homo sapiens
tggttttcataatcagttaactttcaattacttgtgcttgtatgcttagatagggggacagttgtgtttgtaatccaaactcacatgtgttgcttgaagtacattctgtagtttgtctttgtgttg

SEQ ID NO: 182475 - DNA, 543 bp, Homo sapiens
ctttaaaataataatttatcagtaattttaacatagtaatatacattagcaactcctgaaggggtcagatgtgtgtattttctgaacatattgattagaaaatatatgatgtgttttttctttggttactttgccagttttagatgatttctatttttttgcatgcctgcgtgggcacatttgtgtgtgtgttctccactaatctcagaagcaagtgattatgtaaagtaaaaatagatctggcatttgattctgcaaataagtgtaagagacattattttaattcacaccttgcatcgtgtatgggcagccaactcaccagtcatcatgattaacaactgtgttattaccaaaagagaacaataatataaaatattctccacttattgtgtgcctaccatgaggcaagctctgtgctgggctctatgaaaacatgattcatgaacctaataccaactttcccaatgcctccatattgtaattggttaaaatccacaattatagctgtaaataagctgtaaataacagccttggccacgtact

SEQ ID NO: 182476 - DNA, 1101 bp, Homo sapiens
aggagatgaggccttgggcccacagaaagcagggagctgaaactgagacctctatttaaagctgggatccttacaggactactccttaagacaaaggcaggttagaacaaacccactcactggcaaaggaggaagacaaagacagttgtctccttggccagcactttcaatgagaagaaaaaagaattccttaggaaatcaataaccaataggcctgcccacattgaatgtgcaattcaaatttacattgtctaaatgatccaagaagtaagcaatgaaattaacatgaaagaggccctgggcagaaaaaacctttagggtacctgacagaaataaaatgcaaaatcactgtagagcaactcttcttcagtatagcctcatgggaatctcaagaaaaaactccaatgaaggtgagttcacaatccacaattataaagcacatgagcaaacaattcactatgagattcacatacaaaaaaacagcacaataggtcatccttttgatcatccttttaatccttatagaaacactaataaaatagaattcaatagatatttctttaacatgtttactaattacagaatattactaaagacagtacatttgggaagtagatattttctctttattcttacaggggcacaagtcctcctatattcccatcaatactgtcaggaagaaggggatcaggtggccacggatggaaaggcacatgacacagagcacaggatgtccaccagcagtctatagctgtgattgttttggcttgcagaatattttcaaaaaatttgagccaatattttaaaatcaggtgattttacataatatccagattccaggcttctcgtgaaaaatggtagggattattgctattgggcccacactgtgcaaagcaataatcaaatagagctgaggagtgtggctacactcttcagagaaaacaccctgacctatagagcctaccaatcctattcctgccaccactcagccggccttattaagtaaggttacatatctggcccctgtaaatactgcatttgtgatacagagaaaagggccaggcatcagtaccctgattcaactctatggttagtaatgga

SEQ ID NO: 182477 - DNA, 379 bp, Homo sapiens
gtgttctacattcctatcatcacctgattgattggaatgatattgctatataataaggatttcgaacatacataagcattctgaggaaacatgaggttagattgaactgcagtggatgctctaccacagttcaagggcaagattattacagttgccttgacaaccatagctctgcactctctgttttattacatactcttttcctatttgggaatccttttgagaagaaacaaaagaaagaatgtcagtaaggtctcattttcaatttatgaggcttctggaaataatagagtcttatatagctacaaaaacgtctccatttcttaaaatttccccaaacattggaaagtccaggcatatgaaatgaactgaaatgagc

SEQ ID NO: 182478 - DNA, 274 bp, Homo sapiens
ctgcaatacactattaattccccacaacaatgatgctcttttactgaaacaaacctgaagttcagacaggtcaggcttccatcaagacttgtgtatttgagccagcatttgaattcaggcctgactcaaaagcctgtgatttctctgacatcccaagaataaaacttgattattaaagcatgaataataaaaataatttcatatggtatgaaattattttaatatatgtatatagcttacttctgaaaagttgattcaggatgtagttacctat

SEQ ID NO: 182479 - DNA, 203 bp, Homo sapiens
tgaatttggttgcaataatacagaaatgcaagcacactgagaaaagataatacataactaaggctaaaaatgaatggtgtgatagaacttcacttgcttcctggctgatttcagagaaccttatttgcagagcacagttggatctataaatatattatgaatgtaaattaaaatgacaggagatattatctcaccccagttaa

SEQ ID NO: 182480 - DNA, 224 bp, Homo sapiens
atggaagccaagtgaacaagcctcagtgacacaagtcaaattcatagtttcactctgggttttttgttgttgtgtggttattattctcactacagaaagactgagtttcatgctcctggctatgtcagatgtgaattttcatgggaataataatcaaccttgcagcaagccaaagcaatgcctcgcttgggttcttcatgttcttactacccagcgttttttac

SEQ ID NO: 182481 - DNA, 493 bp, Homo sapiens
acaaatttgtaaactttcttaaaacattatgagattctttttttttgcaattttttaaaagctcatcagctatcgttagtgttaatgtattccaagacaattcttcttcttccattgtagcccttgccaaaagatttagagcattaagagatccaaaaagtaggtattgctagtgcaatctggagtttttcgtcagttctacagacgtgtgagtgatgtgaacccaaatggggcaccttccttaaagaattaacatactatcaaaaagggaaaaacttatatgtccacaatctgccctatgatacttccttttaacctcatttttattaattgccactcccctcttgacccatactattctaaaacatacagtgcagaaacaaactgtaatgattagggaaatagaagttaaaaaaatgcaggaattttaagtacacaggtatcaaggaaaagagagactaaatggactgaagaaatattttatttttatttt

SEQ ID NO: 182482 - DNA, 388 bp, Homo sapiens
actttttagactcctgggttccatttctcatttgatttttcattttgttatctcagcaccatcaggcccatcaaagagagtaatgcagcaattagcccagggagtcactcactgagaggggactttttcatctacaggggcttctcctttctgctgccactaccacagcccagcgagaagggccttcctttctattcaagactctctatctcatacctctggcaccacctccccttctcacctttccccagagcttttgcctcagcctggggagtctgaacatttgcaagggcatggatgaccttacaacatctcctcttctattggcttattttaaattttgtgttgctatttaccttttcaccagtataacaaccttaaagattca

SEQ ID NO: 182483 - DNA, 615 bp, Homo sapiens
tgagggaggggcttccaaaggcagtgaaagccatatgaatgctaggggtaaaggaagacaccagaggggacacctgcccacctgcctgtacaaatcccaggcaaagcgagcacttctccagggaaggcaacatatcctcaggccaaaacccggaaatgccttgtttagaggaaagggaaaagggtgggtcgcctggtggtggaacttgcctgaagctagtttgacgtggagagaaatagtgggagtttgagtggatggagacacattgtatatgcagtcagcagcctgttgtcaaggtggggtaaggagagagactgcactatgagcagccggcaggagctggcctctgcaaaggaaaggaactaagtgaatgctgaaacagcccccatccccagtgtctcacctcatatgaccttgtgaacagagagggggtctgccaacctccagtgaggccccagccctcatccccaaaccttcagtgaataacttttctcaaggagtaagttcttatttgttcacagtcaggaggcaccactgtaaaacatcccttctgagttaaaggcttcagatatgcaggccaggcgtggtggctcacgcctgtaatcccagcacttt

SEQ ID NO: 182484 - DNA, 184 bp, Homo sapiens
agggtcagtgaccatgtgcagcgagcccgtttaacatcccaacaggcgatcttgagctgagcggctggtaacccagctctggcctagggcactgagagattgaacaaacagaggatgtgttttgctagcctgaaaaacgccacccgtttgcataacctgaagagtcattgagtggagaatcagg

SEQ ID NO: 182485 - DNA, 245 bp, Homo sapiens
acatttcaacagaatgtcttaattctagcaaataaggactatattgtgtatttgagtaaagcaaacacatatttgtaatatcgtcaacaaatacagttattactattttttattgtttttcatgaacttgtcctaaaatatctttaccctttgaccattaatattgctatttcaggcacataatgtagtctctaaaaagcagtgttttttttttttttttttttttttcctactcttacttgaaa

SEQ ID NO: 182486 - DNA, 1114 bp, Homo sapiens
  misc_feature (723)..(723): n is a, c, g, or t
  misc_feature (841)..(843): n is a, c, g, or t
  misc_feature (870)..(871): n is a, c, g, or t
  misc_feature (1028)..(1028): n is a, c, g, or t
  misc_feature (1101)..(1101): n is a, c, g, or t
  misc_feature (1105)..(1105): n is a, c, g, or t
  misc_feature (1109)..(1109): n is a, c, g, or t
  misc_feature (1111)..(1111): n is a, c, g, or t
catgttattctttgactttttagtaatagccattccgactggtgtgaggtggtatcccattgtggttttgatttgcatttcactcatgatttgtgacggtgagcatttgttcatacgtttgttggatgcttgtatgtctgttaacggctttttgagaaacgtctgttaacggctttgcccacttttcaatggggttgttttttgcttgttaatttgtttaagttctttgcagatcctagatagtagaccattgttggatgcataatctgcaaatatttctccaattctgtaggttgtctgtttactctgttgatagtttctttttctgtgcagaagctctttagtttaattaggccccaattgtcaattttcctttttttttttttttaggtggagggggcctcaaacagcactatctctcttggaaatgacaaaagtgaaaacaggaagcttccaagtgccccagtggactcccagggctcccagatcccccagtgcaatgcccaccagagaaaacagcaggtatccaaaatcaacaagtacttatgcggcacctgttgtgtgtcaagcatggcaagagtccctgggacagctacaaaagctccatgacactcaacaccactgagcctcagcccagcctggaccaaacatcactaagtgatcacagaggttcttcctcaagggcctggtgacctcaggggtctttgctacagtgcccaggcngcacaacccatttgcaattcctctaacggggaggcttggaaagggtctccccagagtggacaagtggagaggcagcacctggaactgggaggccgccgaaggaaaggtggcctggatnnnctgcaggagagccaaggccaagtctcnnatctgccaccagcttttgtggggcttgggacagggcatggccctctctgggcctcactgtccccatctgcgaatgaggtgattggaccagtgtccccacggcccctcccaggcctcaagtcttggcacatgggtcaccagagagctctcagaaggtngggccaggcactgccaggagcagcccgagaagccaccaaggcctggactgggccaggctgggcagactgcagncctncccngncgg

SEQ ID NO: 182487 - DNA, 635 bp, Homo sapiens
cagtcttggctggatctccacggtgtccaagggtgctgaaggaccccaaaagctcaggagaaatggggaggggctagacaaggtgctgtcctgggcttctttttcaaaatgggcaaaaagtatggctctgaaaatttggaggtttaaaagtttaccatatctagaaatacatgggaaaaaagtcactattcatttgtgaaattaggccccaggaaagcaatcagcagtgtgactctgaaagtaacaatatctcatcaatttaatctcttcctgcaatagaatgactacactggcaaactgaggtagagatcaaagtaatgatcttgattttagtacagatcccagttcttttctgcacgatgcattcaccaatgggctgatgaagtaaaatctacactgtgtagctcttagatgggcgtgcaattggctgccagtttgaaatgaaaccaagaaggaaattaatggtgggccagagggattagttgtgggaaatccatttctcccaacaacaacaacaacaacaaaaatctttatcagtaacttcaatgatagaatagataaaatgctcataggtctacaggtgatatcagctgctgctagtaggagaatggaaatcaaagcaaattttcttaaga

SEQ ID NO: 182488 - DNA, 250 bp, Homo sapiens
cagtcttggctggatctccacggtgtccaagggtgctgaaggaccccaaaagctcaggagaaatggggaggggctagacaaggtgctgtcctgggcttctttttcaaaatgggcaaaaagtatggctctgaaaatttggaggtttaaaagtttaccatatctagaaatacatgggaaaaaagtcactattcatttgtgaaattaggccccagacagaaccacacgccagcacaagaagggatcctgtaga

SEQ ID NO: 182489 - DNA, 282 bp, Homo sapiens
cattaagtccgagagaaattaggatatcagagacagtgctcaaaataggaagatgatatttatctagagaagggcttcatctattgcagagcagctaaagtagaagattatttgaaatgccgccttcaacatcataatcaatatttaatagcaatctctgaatgtctaaaatgacaggccttcaagttcttatttcaaatacctcttcctctccaaaatatttttcaaattgccaagtaggaaataatatttcccttttctaatttctctcgaccaatgctt

SEQ ID NO: 182490 - DNA, 686 bp, Homo sapiens
tacccatggtcataaacatggtctcactgcaattctgggaaatacaaaatttttaaatgaagtatttttatggtggtccaaccccccatcatctgtttgtctgaattactgcaatagcctcttaactagtctccctgcttccttcatcgcttccttatagtctgttctcaacacaacagccagggtgattcttacaaaacagtcaaatcatgccatttctctgaatcaaatcctccaatagcttttcatgtcacttcaagccaaagttatgacaacggtgccacatgcatcctctgcacaccatgacctttttcacctcattacctactactcttttccagttcttgacacatactaagttctcaataaatattggtagaattcataaataaattttatccccattcatttcgggtaaaaagtattgaaaatgttggcattgatatggggaagctcccatacactgctggtagcagtgtaaatttgtacaaacctttacaatttataaatacttgaggatgagcagatccttcccctaggcaatgctccttctaagtatacactctagagaggttattttatgtgtgcataaagagactgtaggaaaatacttattatagccttgcttttaatggtagatgggaggaaggaaacaaagaatgaatgaatgaagaaatggtcagagg

SEQ ID NO: 182491 - DNA, 518 bp, Homo sapiens
agcatccttgttaagctaaaggagcagcaggaggagaagagtaagggtagaggggaagagtaggtagcagtcatgaggtttctgcaagagtcctggagagagatgatggtaatgaaattgatgaactttatgtctttctttgttatatcctgttctttgactaaaagtaataaaaataggtaatacttctatagctcttaatgtgcatcaggcactattttaagtgctttacatatattagtcatcagatctttccaagaaagtatacctagcctcagaaaatgaagatttgtcactctttaggatatacagtggaatgtgctgctggttcagagagcactttctcaagcagtactgaaatcagcagtgaattcactgcctctgttcacatactggttaggttgcaaaggcaagcctaaagtgtcgataacagaccacccaaccagtatgtatgcattgggttaagttcagtttcatggaagaactgtagaaggccatggcattttttattactcttc

SEQ ID NO: 182492 - DNA, 381 bp, Homo sapiens
tgctactgctgtactcccaggaccaagcttgacagtaggtatttgtaatagtaagtctgtctcagtgaatgaatgcaaagcacttagtaggtgcttattaaatgggagcccctgttattcaaaatcctagggagctagcaagaaaccctggcctcctgactcctgccccacccgcatggcttctccccatccctgcaccgcagccccaacctttttttttttttttttttgagatagagtctcactctgtcacccaggctggagtgcagtggcacaatcttggctcactgcaacgtctgcctcctgggttcaagtgattctcccacctcagccttccgagtggctgggattacaggcacacgccaccacaccagctaattt

SEQ ID NO: 182493 - DNA, 510 bp, Homo sapiens
atgaagactgtttcaagttcgaggatgggcaaaaataatgactaggacttggctcaagattcctcaaacagccaataaacaatgcaaagaataaatgagagagtaattggagacaagctttcccttggcttcccttcttttctcacagaggcttttccagaaggtggtcatttccatagcccatgtggaatgagatgtccactagggcagagaagcacagaaccgtgggcactgcttcccttcctttaaccctatcatattgctgcccagtgagcaatatggtcattggtcaagaaggcttatgcccaggtatccctgtggctatgagcattgctccttatctatgcctctgctcttagacttttccattctgccctcttaggggccttcctggccatgaccacactaccttatttttctctatagtacttatcaccatctgacatgtatttatgtttgtatttgtttattgtctgtctctacaaataaaatgtaaattccctaaaaaca

SEQ ID NO: 182494 - DNA, 228 bp, Homo sapiens
attggtgctgaaaattagtaaggctcttaagtaacataaaagaaaactcagtggcaactggatcggacagctcaaattgggaaactttaaactagatgtttatttagggcatgccatgcaccaccgacgtcactaggttctgtggttactctaaacgtaactacaccaggtgtacaagcctgcacatttgatctctgctgtctcttccctaatttctcttgtcttctc

SEQ ID NO: 182495 - DNA, 362 bp, Homo sapiens
tggcggggagaagaccggtgcaaacgctttcgactttgctgttcgccaaagcgatgcaaaatctcgcaccgaaaatgctaaacgttgaccacatgctttaattaggttagcattgtggccagagccaggaaatttaaatttaacgctgatacaccgtcattcatttgcgccgcagcgttgcaaatgagaagggcatagccagaactgtaagttctggtcgatgggtttaaaccagcttcaagtttgagagttaccaatttggatctttagacatgttttgtatgtctccatgtaacttcttttgacgtatttcaaagtagacttcctgggagtacagaagtttggaaggctttctgttcttc

SEQ ID NO: 182496 - DNA, 403 bp, Homo sapiens
tctcatgaagagggtgcattcttcacttggaggatggaaaataacaaacctacttcctgacgctttcagccttgggctgactgcagtgacagcatcacactgcacacagagcagaggtggggcacatgtggaaaagtagcagagcctttctggcctgaaaaccagaaaagagaagttgagaatccataaactctgaaaatagtggaggaatcccagaagagaaagagtcagagaaaggaatccttaaactctgccagtccacatctttgactaaaccttgaaccacacatctgcagaacaaactttaaacagcctggctaaaaacaaaagatcaaaatacagagttttcagttctagcccagacaagaatctctacagctcccctctcccctctcccctctcc

SEQ ID NO: 182497 - DNA, 209 bp, Homo sapiens
gcgtatagagtggcatgtgagaaggaaagtaacagagactaaagtgttcctacattttccacccttctttcataccattcttccccgcaaagagacttttgatctaactagacaatgttgagacattttctcaatgatctacactttttttttttttttttttttttgaaaaagaatattcccctttgtgccccaaagggaaggcaaag

SEQ ID NO: 182498 - DNA, 188 bp, Homo sapiens
ctgggcccaaacccagatgttgtgattcctagtctgttagacattctgttccatcacagcccctctcccaccctagtaatcctggattcacaaacctctccgcctgaccaggatacctgtggaatacttttgagagctgcatttggaaccttcttgcccacggtatctccatgtcagtccctcatcct

SEQ ID NO: 182499 - DNA, 509 bp, Homo sapiens
ccgcgggaactgcaaagagatgtgattgagagtggtgacctctggggtggcaggacccagttttaatgtcatacaaatgattgtttaaaaggaatgagaaaaaagttttattgaccagcagcaaaatttgttcaaaggagcaacatgacaattacatatcccagtggcttctagctgtttagttttagaaatcttaggcaaagaagcacttcagtgatgggaaaatactaactgtaattgcagatattttattacctgaatgttaaatgtagcctgtaactgttttaaatcttcctaaacttgcccttatataggagaaggggggaggattgctcaatgctggtataaacttgattgcctttctctttaagatcttagatttttttgagttaaaaaaaagtgaacttctgtggggttctccgcaaagacttaagatccctggaataatctagagcttactctatttaatacagtagttaaactcttatgcaaaaatttcactttttcca

SEQ ID NO: 182500 - DNA, 192 bp, Homo sapiens
ggattctagatgccattaagaacattcatgagaggaggtaaaagtatcagcatgaacaggagtttgaaagaagttaactccaactctcatggatgaccttgagggcgttcaagacttcagtggaggaaatcactacaaatatggtgaaaatagcaagacaattggagttagaaacagagtctgaagagttga

SEQ ID NO: 182501 - DNA, 224 bp, Homo sapiens
ctggaggactgcttcaggccaggagtttgagaccagcctgggcaacacagcaagacttcatcctacaaaaacttttaaaagttggtcaggcatggtggcatatacctgtagtctcaactagttgggaggcggcagaggctgcagtgggccatgattgtgccactgaattccagcctgggcaagaaggagtgagaccctgtcaagaaagaaagagaaatgcagaa

SEQ ID NO: 182502 - DNA, 633 bp, Homo sapiens
acagacacttttcaaactcatccccccaagagttcagaggctagagttttttaactactactttggcaggcagggggctggagaactgaaacaacggattggctggggatgaaattgcaggggtgtctaaaaccattttcacacagccaggtcatttcctgggaagcggtctcaggacgaagtggcatctcttggtctcctgaaatgctaaatctgaaaaatgtctcaaagaccagttcttcaggttttacaatagtaatattacctacaggagaagttggagaagctctaaatcttgcgaccccagatacaagactctggggcagtaagcaacttatataacaaaaacaagctaagtaatggcgggtcattgttcaactatgtctattcttcagcaaagttcaagcccctaccataattttaactttgttttatgaatgtggttttaactgtaaactaaattcctcttatagttatcttggcccccacattagaatggacaaaaaaacaatttaacttgagaggttggaagcaagatggagtcaaccatattagacttctctcattacttatagttctgcaaaggtggtttcatattcatgaattataagactcaacattaagatgtcaatt

SEQ ID NO: 182503 - DNA, 634 bp, Homo sapiens
tcacaaagtcaggagatcgagaccatcctggctaacacggtgaaaccccatctctactaaaaatacaaaaaaaaaaaaaaattagccaggcgtggtggtgggcgactgtagtcccagctactcgggaggctgtggcaggagaatggtgtgaacccaggaggcagagctggcagtgagccgagatcgcgccaatgcactccagcctgggcaacagaacgagactctgtctcaaaaaaaaaaaaaaaaaaaagaaataaaagaaaagaaaagaaaatgtgtgtcttgctcttattctgcagtctctgccatggctttctgcagtcttgtttcataaaaacaaaatgtcttgtgatcactactgaataatctcctgaagcacaatatttattaatctcttgagcacatattaattatgcattaaatactaactatataagcaagtgaagctgaccatctcgaaccatagaaattacactgagtttcctatgaacctaggaataaataactcatattggagatggaaaagatatggaaaaaaggaattcaggctgggcgcagtggctcacgcttgtaatcccagcactttgggaggccgaggcgggcagatcactttagctcaggacttcaagaccag

SEQ ID NO: 182504 - DNA, 103 bp, Homo sapiens
catttgggtcgagctgacagagctgtcatggacacagcaggttaccctgtactcgggaatgcttcatgaagcttcccactcactgccgtcagtccaaggctgg

SEQ ID NO: 182505 - DNA, 388 bp, Homo sapiens
agaatgtgaaccaaagcagtccatgacatgggcctctgttcaaactattattgggagacttccattccagcaaatctctggtttggaactgatagctgcaagagctggaatgctgaccatgaagtctgtcagcaacaggtcagggaccacaacaaaccacgcatggaatttcagcttacccaccctgcagtgctgtagcaaagcctcgggaagcagggcgactctttccaggaaggcagtacttacttctctgttctagaaaatgcccagcattcccctcgtgtttggacacaccacacttgcacctatgagtagcctgggcttcaaagaatattgaccctagggaggacaatgaaggatgaactgcttgggctgttcattctcagat

SEQ ID NO: 182506 - DNA, 187 bp, Homo sapiens
taactgaattagaacttagcttctagagtcagactgcctttattccactttcagtttggctactccagctgtgtgccctctctcctttgagtatgataggtgtgataatttaatactcaaagggctatttgagtattaaataagataatataactaaagaggctattataatgcctgatacattagt

SEQ ID NO: 182507 - DNA, 187 bp, Homo sapiens
taggcaccctcattgcccacttaaatccagcatcttcctcatctcttgtcccagtgaacagtaccccccgaccctgcactgtttggtctgtgcctgccctcactccatcctgggtagggtccctcctgtggccccagtggagttggatgggagcaggcctgtggccagtgtcctgttaagcccttag

SEQ ID NO: 182508 - DNA, 1601 bp, Homo sapiens
gagaatttagactctgtcttcagccaggcactccctccctccctcccagcactatgccctacaacttctgcctgcccagcctgagctgccgcaccagctgctcctcccggccctgcgtgccccccagctgccacagctgcaccctgcccggggcctgcaacatccccgccaatgtgagcaactgcaactggttctgcgagggctccttcaatggtagcgagaaggagactatgcagttcctgaacgaccgcctggccagctacctggagaaagtgcgtcagctggagcgggacaacgcggagctggagaacctcatccgggagcggtctcagcagcaggagcccttgctgtgccccagttaccagtcctattttaagaccattgaggagctccagcagaagatcctgtgtaccaagtctgagaatgccaggcttgtggtgcagatcgacaacgccaagctggctgcggatgatttcagaaccaagtaccagaccgagctgtccctgcggcagctggtggagtcggacatcaacggtctgcgcaggatcctggatgagctgaccctgtgcaagtccgacctggaggcccaggtggagtccctgaaggaggagctgctctgcctcaagagcaaccatgagcaggaggtcaataccctgcgctgccagcttggagaccgcctcaatgtggaggtggatgctgctcccactgtggacctgaatcgggtgctgaacgagaccaggagtcagtatgaggccctggtggaaaccaaccgcagggaagtggagcaatggttcaccacgcagaccgaggagctgaacaagcaggtggtatccagctcagagcagctgcagtcctaccaggcggagatcatcgagctgagacgcacagtcaacgccctggagatcgagctgcaggcccagcacaacctgcgagactctctggaaaacacgctgacagagagtgaggcccgctacagctcccagctgtcccaggtgcagagcctgatcaccaacgtggagtcccagctggcggagatccgcagtgacctggagcggcagaaccaggagtaccaggtgctgctggatgtgcgtgcccggctggagtgtgagatcaacacataccggagcctgctggagagcgaggactgcaatctgcccagcaatccctgtgccacgaccaacgcgtgcagcaagcccatcggaccctgtctctccaatccctgtacctcttgtgtccctcctgccccctgcacaccctgtgccccacgcccccgctgtgggccctgcaattccttcgtgcgctagaacctagggaatgccagaggagcaaggatgcagggcccaggactccagagctgtgacctggctctggttcaacaaaaggggcctgaaaacatcatttgcatggctggagttgcccgcgtaaggcagccaagaaactcacccaaagcctgtagcctccccaactactccagactgtcctgctcaccctttccttcctgggggtctgttccttcctatgctcacccagagaactctctgatgtgccagtggccctcccttttaacctcctaataaatatcatttccttggcaaagcaga

SEQ ID NO: 182509 - DNA, 1214 bp, Homo sapiens
cttgcttcctcttttatttcaaaatggcttaagtcatttttaaaaaagttgatgatttcatatttattttcagtcctcactaagccacctctcactccccagatcctgtgtaccaagtctgagaatgccaggcttgtggtgcagatcgacaacgccaagctggctgcggatgatttcagaaccaagtaccagaccgagctgtccctgcggcagctggtggagtcggacatcaacggtctgcgcaggatcctggatgagctgaccctgtgcaagtccgacctggaggcccaggtggagtccctgaaggaggagctgctctgcctcaagagcaaccatgagcaggaggtcaataccctgcgctgccagcttggagaccgcctcaatgtggaggtggatgctgctcccactgtggacctgaatcgggtgctgaacgagaccaggagtcagtatgaggccctggtggaaaccaaccgcagggaagtggagcaatggttcaccacgcagaccgaggagctgaacaagcaggtggtatccagctcagagcagctgcagtcctaccaggcggagatcatcgagctgagacgcacagtcaacgccctggagatcgagctgcaggcccagcacaacctgcgagactctctggaaaacacgctgacagagagtgaggcccgctacagctcccagctgtcccaggtgcagagcctgatcaccaacgtggagtcccagctggcggagatccgcagtgacctggagcggcagaaccaggagtaccaggtgctgctggatgtgcgtgcccggctggagtgtgagatcaacacataccggagcctgctggagagcgaggactgcaatctgcccagcaatccctgtgccacgaccaacgcgtgcagcaagcccatcggaccctgtctctccaatccctgtacctcttgtgtccctcctgccccctgcacaccctgtgccccacgcccccgctgtgggccctgcaattccttcgtgcgctagaacctagggaatgccagaggagcaaggatgcagggcccaggactccagagctgtgacctggctctggttcaacaaaaggggcctgaaaacatcatttgcatggctggagttgcccgcgtaaggcagccaagaaactcacccaaagcctgtagcctccccaactactccagactgtcctgcgaacctatgagggatcctctagacgacct

SEQ ID NO: 182510 - DNA, 1302 bp, Homo sapiens
cttgcttcctcttttatttcaaaatggcttaagtcatttttaaaaaagttgatgatttcatatttattttcagtcctcactaagccacctctcactccccagatcctgtgtaccaagtctgagaatgccaggcttgtggtgcagatcgacaacgccaagctggctgcggatgatttcagaaccaagtaccagaccgagctgtccctgcggcagctggtggagtcggacatcaacggtctgcgcaggatcctggatgagctgaccctgtgcaagtccgacctggaggcccaggtggagtccctgaaggaggagctgctctgcctcaagagcaaccatgagcaggaggtcaataccctgcgctgccagcttggagaccgcctcaatgtggaggtggatgctgctcccactgtggacctgaatcgggtgctgaacgagaccaggagtcagtatgaggccctggtggaaaccaaccgcagggaagtggagcaatggttcaccacgcagaccgaggagctgaacaagcaggtggtatccagctcagagcagctgcagtcctaccaggcggagatcatcgagctgagacgcacagtcaacgccctggagatcgagctgcaggcccagcacaacctgcgagactctctggaaaacacgctgacagagagtgaggcccgctacagctcccagctgtcccaggtgcagagcctgatcaccaacgtggagtcccagctggcggagatccgcagtgacctggagcggcagaaccaggagtaccaggtgctgctggatgtgcgtgcccggctggagtgtgagatcaacacataccggagcctgctggagagcgaggactgcaatctgcccagcaatccctgtgccacgaccaacgcgtgcagcaagcccatcggaccctgtctctccaatccctgtacctcttgtgtccctcctgccccctgcacaccctgtgccccacgcccccgctgtgggccctgcaattccttcgtgcgctagaacctagggaatgccagaggagcaaggatgcagggcccaggactccagagctgtgacctggctctggttcaacaaaaggggcctgaaaacatcatttgcatggctggagttgcccgcgtaaggcagccaagaaactcacccaaagcctgtagcctccccaactactccagactgtcctgctcaccctttccttcctgggggtctgttccttcctatgctcacccagagaactctctgatgtgccagtggccctcccttttaacctcctaataaatatcatttccttggcaaagcaga

SEQ ID NO: 182511 - DNA, 747 bp, Homo sapiens
gtaacatctaagtttcttccagtaagtggattttgtttttatcctacctgtgtcagaaagaaaaatggcccctaccccagatatccacatcaaattcataaaacctgtgaatgtgtcttgtaagatgaaaggtgtgattaggttaaaagtctgaggagagagctattttgggaggccgaagtgggcagatcacttcagtccagggatgtgagatcagcctgagaaatatggtgaaaccccatctctacaaaaattacagaagttagctggacatgacagctggcacctgtagacccaactactcaggaggctgaggtgggaggatcacttcaccctgggaggtggaggttgcaatgagccaagattgtgccattgcacttccggctgggtgacagagcaagattccatctcataaaagaaattaaaaaaaatgaaaaataaataaactaaacagaaagagctagatcctggagtatcctggattatcgaggtagatcctaaatggcatcacaagtgtgtttataaggtgaagggtgatttcatgcagacacacacagagaaggcaatgtgaagatggtgtcagagattggagcgatgaggctacaagcccaagaatgccagggcaaccactagaatctaaaaggagcaaaaaataaataaaaaacaaacaaacaaaaaatcagattcttccctggatccgctagagaggacctgggcatgctggatttcatggcctccagaactgta

SEQ ID NO: 182512 - DNA, 282 bp, Homo sapiens
atttcatatatcttcccatacattaaatacaaaatgttgttttgaatatttttgctaacactaatagatttcttgtgggaaagactgtactcaacattatattaattttgaaattgactaaatattgagagcaaatgacataactttatttgtatcttttggtgtgaatataaaaacagtttctgctttttaaaattagaattaatcagttctatcttaggtcattaaatacatttttaaatttaaaatatccttataagtttattttaagtttatttttgt

SEQ ID NO: 182513 - DNA, 425 bp, Homo sapiens
aacacaaccgggcttctgaggcactattcaaataaaacacagaattaatgaggagaaaatttcagagaaacaaagaacagaattagaagcaaaagctcagcagaatcacctgatttcacttggctttatcctctctggagggaagaagcagccttggagagatggcaaggtgtggctgtgttgctgtcaacttctactttgccctcttgaactgtctccttcatctttccattctccaccctcttctttcccccctctcttttcctctctctctctcttttgtttctgcaaccgccttttttcagtcttcttattttctttggctatgttttattgcccgctcataagctggcacacagacttatttgcttctgctatgttcttattatacattagctcaattaaagtaattgaagagaaaccat

SEQ ID NO: 182514 - DNA, 662 bp, Homo sapiens
ccttgggggctatgactcagcctaccacattcaccaaccccctattatgggccaagcattggacgacatatggttgcacagtggtaaaaaaactggatatgctctctgctctcaagaaatgtatggtctagtggaagagtcagatatcaatcccaaagtcatacaaataatcaccccaatacaatcattacaagttgagatgagggcactgaaagcctgggaaacatgggagtcccaagggtctctttgaggaagtagcatccaatctgaggttggcagggcagggtgataaggcacccctggatggggaatcagaagaagaccttccaggcagaggcatcagcaagtgcaaaggccctgaagaaaaagagtttgggggatgagggaggtggaaacggcaaaacaagatgaggctgtaaagatgagaaggaccagatcccttgggaacttctggagcatggtggggactttagcttttattcaaaacataacaggaagaggttgaagaggttttttgcttaataaaaaattttttgttggtttttgtttgtttgtttgtttgcttgtttttgagatagggtgtcactctgtagcccaggctggagtgcagtgacgtgatcacagatcacttcagctcctcctgtgctcaagtgatcctccca

SEQ ID NO: 182515 - DNA, 229 bp, Homo sapiens
gacctatgatcatgccactgccctccatcctgggtgatggagcaagacagaacaaaaaaccaaatcactttttattttatggatgtagcatattttgtttatctgttcacccattgatggacatttatattgtttccagaatttgactttctgaataaagctacgaacattcccatgcaagtctgtatggacataagttttcatttttgagggatagaaatctaggagt

SEQ ID NO: 182516 - DNA, 253 bp, Homo sapiens
ccttatacaaaatcagtggaggaaagtcagttactttgagaaagagtaagaaaaacaaacaaacaaacaaaacaagaaaaaataaggccgagctcccctttcatacagtaccagctatttacaattatgtttaatttttcaatgtacaaaacagaagtgactacttacttcagtatacattcataagacttagtccttacaaaaaaagatactgtttcttccatagacatacggaagaaaatcatacttcctg

SEQ ID NO: 182517 - DNA, 392 bp, Homo sapiens
tgatacagagtctcactctgtcacccggactgtagtgcagtggcaaaatcatggctcattgctccctgcagcctcaacctcccaggctcaagcaatcctcctgccttagcctcctgaacagccgaactacaggcccatgcaccaccacgcctaatttttgtatgtttttgtagagatgcagtcttgccatgttgcccaggctggtctcaaactcctgggctccagcaacccacccaccttggcctcccaaagtgctgagtgacaggcaaaccaccaagatcagtccaaagcaacatatatctttgatgtctgatagttatagaaaggagatatgaatcactgtagtttaccccaattctagcatgccctcctgcttgcaataatctctggag

SEQ ID NO: 182518 - DNA, 265 bp, Homo sapiens
tggttgtgtgcgtccataaggtatatgtgttgacaggtgaaaagatttcgtctatgctggtagtacttgctagatgtgccagtgagttaaccacgaatctatcagcaaggatgtcatggtttgtgggagttcagtagacaggcccagtggcgatgagacattgcactttgggatataatctacaatgatatgatttcttcaagggtatcaattaggaacactgggggagttctgagagactatcaacctcaatcctgtcatatta

SEQ ID NO: 182519 - DNA, 186 bp, Homo sapiens
aaatatccatcaataaatcaaatatggtatatacatatatattactaagccataaaatggtatgaagtactgaaaacatgttaagtgaaagaagacagagaggaccatctttttatgattccgtttgtatgaaggctcagagcaggcaaatccacagagacagaaagtacattggtggtgactgag

SEQ ID NO: 182520 - DNA, 426 bp, Homo sapiens
gttggctttagggagcgcgaggccgaggccaagaaaagctacgcattgggaggtcttgacccagtgtgcgcccggctgtaggcatggaacgtgcgccaaaggtctcctggcacccactccgctggactcagcaccattgtcctaagtctccgattgagaagtatctgccccaggtcctctgcgggccccactgaacagtgtggagcgttcacaggttgggggtcaccatttcagaatccagtttgttgagacgtggagggtacaggaggagggatctgcatatgcgaagacttggacttgaccctgacctgagcgttcaggcaggctctcatgcccccttggcagcgagtggagagcgtaagaggagtcctgcctctcctggcacaccgagggcgcctgggagccatgaaaggtgttgaacagaaa

SEQ ID NO: 182521 - DNA, 249 bp, Homo sapiens
tcagctcggatccaagtgagccgcctctgagaagttacaacttctgccagcagaatatgccctgggtgcttgctgtttccagaaaaaagaaacatggaacagatctggaccaaacctgtagcctagctccaaaccctgctgagatcatcagagctgtcctagccaacccaccaacatatatgtaagaaatatttgcttattgttgaatatgactgagattttatagttatatagccatcttttttaaag

SEQ ID NO: 182522 - DNA, 135 bp, Homo sapiens
gacttcttgttcctgtttatgccggacttcttgttcctgtttatgccgtgccagtcacccccaaattgcaggtgtgggtctgcactgccttgctgcccggccattgggcatcaaagctgcccatgctggggctcc

SEQ ID NO: 182523 - DNA, 185 bp, Homo sapiens
ctgctgggaacgggtcccagcagggcgggaggaggctcttttttgcctctgcagccacacgcccatagctggtccagcagccgtttcgctcagcccagggcctgggctctcaaccagggtctgattctgggctcctcagagagcttttgcccagaacgctccttacctcgaagactggagaggag

SEQ ID NO: 182524 - DNA, 715 bp, Homo sapiens
caattacggctaggtacgaggctgggtgttagtagaagtgctttgcctcccaccattattctgaggcctcctcagccatgtggaactgatgacacatctagaagaccctcaccttatgcttatgctggccccttgatcttggcctccagaaataacccagaacagcaagattttaggaattattggaaaagcattttttgaactgtgtgttcatcttaaaagccaaattctccctcccttcaaaggacagcatgaggtataatgaagaatcttgaggtcctcctggattaccaaagtgggccctaaatccagtggcagaagacacagacacagagaggagaccaggtgaagacaaaagaagaggctggagtgatgcaaccatcagagagtgaaaatactcagttacctcctggtttatgaggcaatgaagtattccagcacataaatattgacgctgagacccatgggatgtaggagtgctgagcacatttgcaagacataaagaccgaagggaagtttaccaaccctggagaacatcagctctccctttcttccctctttgcaattgaatcttgaaagaagctaaacaaatggacatggatgtgtttcaataaaactttatttacaaaaaccagctgcgggctagatttggcttagaggctttagtttgctgactcttctagagcagagtatgtaggtaataaatatttactga

SEQ ID NO: 182525 - DNA, 278 bp, Homo sapiens
ccaggctgatcttaaactcctggcctcaagcaatcttcccaccttggcctccctaagtgctgggctgacaggcatgagccactatgccttgctaagtgtttaatagaagagtgtgaatggcagaggcagaaggtttggtggatcatacagccttacagtctcttcagaaacatcactgatatttgctgttgagtcaacctagcaaccaattcttgtcccaaagatatgacactgttcaaaaggcacctcagagatgccagtttcatctcttttcaatg

SEQ ID NO: 182526 - DNA, 286 bp, Homo sapiens
atacactagcattaaacatatgctgaatatgatttaagtgttctctgataaatcagaagctacttcactactctgtaatgtaacagagttcttatatgaacagcaatttatgtggtcagtaatttcagttaaaagttaattcatcagctgggtgccatggctcacgcctgtaatcccaaaactttgggaggccgaggcgggtggatcaaaagctcaggagttcaagaccagcctggccaagatggccatctccactaaaaatacaaaaattagccgggcgtggtgg

SEQ ID NO: 182527 - DNA, 605 bp, Homo sapiens
attgtcctgcctcagcctcctgactaagtgggactacaggtgcctgccaccacgcctggctaatttttgtatttttagtagagaccgggtttcaccatgttggccaggttggtctcgaactcctgacctcagatgatccacccgccttggcctcccaaaatgcttggattacaggcgtgagccactgcacccagcctaattagtcttttgctcctatttgtctttatttgggataaaagttatagccttgttggggtcttcttacacagtagttctgactcacagccatcatctgaacctttcctctggttcacaaccaaaattaaacatccatttatggggattgagatagttttcatagtaaaggaagttttgtttgtaatgaccttcctgtttgatgggtctaagtatatggctggcccttctggctaaagcaggctttaaactggtcctgcctagaatgtgtacctcccactccttatcatctctcttctaggtcccttcccctttccctttcccttccccttccccttcgcttcttccttccctttgttccttttcctttcctttttttcttctttttttttttttttttttgacagggt

SEQ ID NO: 182528 - DNA, 521 bp, Homo sapiens
aaaataagtggctcataaacataatttcatatgttccagcttcatttataatgaaagttatggaggttaagactaaaattacagaccctttttaagttattttacttaggctggtaaatatttaaaaactgataatacacactgctggtgggaatgttggaaaacaatttgtcaataggtattaacattgtaaacgtatgttcccattcctctaggaatttcactgctaggactgtatcctaacaatatgttcatgcatgcatagaaaaagtatgaattagaatgttctcagcaggactgtttgttgtagcaaaaagccagaaatagcctgaatattctcagcagaaaactgcttaagttataacacagtcgtacaaacaatgacataaaaactctaaaaagtgcaataactatacctatgttgacagggcaggatctcttaggtggattgttaggtgaataaattaaagtgtggttcagtttacacattggtattaaaaattttaaatgatatgcatttc

SEQ ID NO: 182529 - DNA, 181 bp, Homo sapiens
aataatagctcttcccaagtataacactttaaaaaatatgaatcttaatatgatcccaaagaacttatcagactactgagagaggaaaatggcagatagaaggcaggactaaattgcagctcccactgggacagatagagcaacatgtggaaacacatacatctagaacttttactccagg

SEQ ID NO: 182530 - DNA, 270 bp, Homo sapiens
ctttgaaactcaggggaatggaaggctcagggggcgctgtcactgggcatttcagatagagtttgcagtgagaatctcagttgacagccagggcggctcacgccaagagtagatgtcaggaagctctggacagccgctctcttcacatcttgtggctgattagaagttcattttgaattttttcccagaagcagcctatgccccaagaggcaaccagaagaaagcaattttagaaaatgcaatttcatttgcagggcaagatgtgggaat

SEQ ID NO: 182531 - DNA, 206 bp, Homo sapiens
gttcaaattctgactgtgacactcattggtagggtgatcttggacaagttatccaattttggaaagtgtccttttccttctctcccacatcaaccagaacacccactaagtctgacctgtgcgtggctgtcatgaaacggactggagactccgcactggaggaggatgctgcctgctgtagtcatctctctcatctcccccaccaa

SEQ ID NO: 182532 - DNA, 479 bp, Homo sapiens
tgatcctgcaggttcgactctaagaccccctcagacagtgacctacacgtgttgtctacgtctgctgatgaggacttccgagagttggacactgcatgatctttcatacatggtagacacagtcttattgatgcattctttattggaaaaaccctagtgtgagcaaatggctccacttctctgagccacctctgccatttataaaatcagaagcgatacccccaaggtcaaagggagctgcgggaactcagtgagttcccaatccctgagtgttcactctgtaaaccagctactttgtgaagcaacttataggcattatctcatctcacgtcacatctaccctctgcagtaggttctatcatccccttgccaaatgagaaaaccctacctcagatttaaatctgtgacagtgccaggattcagccctggaccatcagcctgcaaagttagctctaatatatttatgtaatgcttggctc

SEQ ID NO: 182533 - DNA, 282 bp, Homo sapiens
catagaggacccgctggagtggcatataactcgatgagaaactgccaattactagaacagctgttgggctaagttgcagtctaacatcacacagcaatatcatacacactctgtatgaagaagcaggagaggcaacaactttcataatcagtttttctgtttcccttcattttcttgtgaacccttaatggcatctttgaaggtgactgtggtcacaccaagtgtcaccaccagcctattcgagtcttgctgcagagccatggagttatatgccactccagc

SEQ ID NO: 182534 - DNA, 679 bp, Homo sapiens
ggaagacctggacaacaaccctaagatccagcaggcactgaatatacaacaggtgctgctggagggcgtgctgtgcaaggtgcaggaattctgcagggaacatcattggataacaggcatttatgaattcctgcaatcctgggggcctcagaagctggaagacatgagaggtggtcccatcaagaactacgtgacgctggtgagccgcctgaatgtttggcaggcccgtgtctccagtatgcctatcgagttgctcacaaaaggcgggttgctgctacttagctgccatgatgtacaggcagagatggaatccaagctgaacagcataaggaaggacattcttgcgcacgtgcaaaatgagtgctggaacctcagtcaacaactcatgacagagctcacagatttcatgcatatcttccgaaccatcaactcagatattcatgccattgcacagtgcacccagaagttgaatgaagccaatgaacagtacgtcgagctggaggagcgaatggaatacgtacgggcactccacgaactcatccgcaaccactttagcctctttagtgctgagaatgaagcactggacatctcggtgagaaggcaattcggggagtcacccatccctccctgccctcctcccccacaaccacatctactccactgccctctgcttgcccca

SEQ ID NO: 182535 - DNA, 467 bp, Homo sapiens
gggatccccgactctgagcactgggaaggaaggacattcttgcgcacgtgcaaaatgagtgctggaacctcagtcaacaactcatgacagagctcacagatttcatgcatatcttccgaaccatcaactcagatattcatgccattgcacagtgcacccagaagttgaatgaagccaatgaacagtacgtcgagctggaggagcgaatggaatacgtacgggcactccacgaactcatccgcaaccactttagcctctttagtgctgagaatgaagcactggacatctcgttcagcccagctatggcccaggagaagacagagggctggctgacagaggcagcacggatgagcacaaccctggagctgcacagccccgtgctgcagcactgcatgcgcatcctgggggagtttcgcagctacctgcccctgctcactaagctgggcagcctccacccacagagcctc

SEQ ID NO: 182536 - DNA, 576 bp, Homo sapiens
ctgtgatcggagaaggcggctgggtggcagcgggggaatttaggacactggggttctgtttcctggtttgtgtgggagtctgtgtgagcgctgggtagtggaggaaaatggataaacttatctgcttcacacctgcaaactgccatccagagctccactaagactggatgggaatggccaaaggaaagtggggaaggaaggctaaagggagactgttggctcagattttaggcttctgtccttccttggatcacaaactgcttccgtgggcaaattaaccctgctgaaaggagttattacagcagcagataacagagagagaggggattttcctgggttgggcaggagaggaaaccttggcctctttatcaccctccttcaataagatgcttgtcagccctggtttttgtttttgtcatctactaaacttgggagagcattagtcatagttgtccatagcacccaggaagtaagcaacacaccaaatactggggatgcaagtttcccacaccagcagttttccaggccccaaaataccagtcacgctttaagaaagccacagaagtggagataggc

SEQ ID NO: 182537 - DNA, 259 bp, Homo sapiens
ttgtgttgtcaccaaagctatccctgaacaatagcagcccaagacaggggtggggggacttaggaatatttccattgctggtccaagcccttaaacaccagaacacctctggatgaaagggagggaagactctgaagggggcgggccatgggctggggctcaggttgctccagtgggccactcactggctctgggatcaagtccccatctaaacagtaaggacagcagggtgtagtgactcacacttgcaatcccaaca

SEQ ID NO: 182538 - DNA, 383 bp, Homo sapiens
caacccttctgctagtaaaatcaggcaaagctcccaccggcacggagcgtcctctcagcaggtccagccagcaaaagccagaagcctcttggctgtcctgtctcagggacccctccagccttggccacagctggctgtacccgacaggacagtggagttcaccctttggagccgaggtctgaagccagctcccatttcagcccctcgctgtggacaaaaaggaaatgaaagtcgctcccatgcctggctgagtatggagccccctatgtcaggcagggagggggattcactgcagagaagccaagcaagggctgcactcggcgctcaggatgctgctgatcacgcccccagcaccgctgacatgcggggcaggtttcacactc

SEQ ID NO: 182539 - DNA, 468 bp, Homo sapiens
tgaggaaactggggcagatagaagtgaggtgacttgcacaaggtcacacagtgagtgagtgatagagtaaggatttgaactcaagcattctggcactttttcttttttgagactgagtctcgctgtatcgcccaggctggaatgcagtggtacgatctcaggtcactgcaaccttcacctcctaggttcaagcaattctggcactttttctttttttgagactgagtctcgctgtatcgcccaggctataatggcaattcttccacttcagcctcccaagtagctaggactacaagcatgcaccaccaaacacagctaatgttttgttttgttttgctttgttttgttggcagagatgggagtcttgctatgttgcccaggctggtcttgaacttctggcctcaagcagtcctcctccttgatctcccaaagtgctcggattacaggcaagagccacaatgcctggct

SEQ ID NO: 182540 - DNA, 960 bp, Homo sapiens
gggcgacagcggagaccctgtctcaaaaacaaaaaatgattgtcccaccttaggtaagtagatgcccccaggttgcaaatctgtactaaggatcttcctctagatatgcttcccatgactgtcatggccttgtaggttacaattgctggaggtccatccctctccagaaaggaggtagagatgccccattttgggataagggtgcaggagggataatgggtctgctgcggaagaagatggcaccctcacctggaagcactgctcaatcccacacacctgcacacccatgagtctgctgcctttggtggtctggggctgactgtgggaaatgagggggcggctgtacttctcaccccagtccttacctctctcacgatccttgcccccaccctcacgtctaacatggagtcagcactgctgaaattcttatctcccctaagtctagcaagttatttaaatttttctgttaccctttagttcttaataagtgagacagttttctataaacatgtctgtaattcagcacacatgtgatttttccattgtcatctcttaggagaaagggtgtatatatatatataatctggtttctactgaacactgtgttcagtaaacttgtccagatgaccaaagtatctgttcctttagcaaatgctgggtaagtctcaggtaccacgtgctggagtgtaatggtggtgcagtgtgaagaccttgactgcggagggttcccaggcagaggcatcctgatcaggagcagataccctgactcctgggcaatgaggctggtgtttaggctggggcatacccttgggcaggaaatctctaagagaaagaagtgatgaaaccctgagttcaacctctgggaatggagaagaaaggagttctagaaaacaacagacacatagctagagttaggctctgagggaacagtagcatattggtggtggtctgggggaactg

SEQ ID NO: 182541 - DNA, 204 bp, Homo sapiens
cattttgctgtcctcctaaaaccctctgcttctaaggcaaagatggtgccttgtttctctgttccatcccagcaattaacacaaacgtttgttgaaagatagatacaaggggcatggttcagagatacaaattcaatgttatctattctcttctagtcctcctttaaggaggctgcagaaagaggcgttttatctattcacaaa

SEQ ID NO: 182542 - DNA, 382 bp, Homo sapiens
ctttctaggatagagatgatcactgaggtccctccaggctactcagttctgcaatctgtgatttaagtaaatcagaagttatttagcatggcttcactaatcagaaacctgaaagaccagaggcctgttttcagatgatcccttgaaaatgagattcaaatgaccaaccactaaaagaatcaagtgctaaatcacgagatcgagaccctgaaacatagtctccagctattacgtgtttttttgaagaatggctatcatacaaacacaatttcagcgggtctttatattaaagacaccatttaaatgggaactgcatccggtgttctttgtatggtaataaactgagcacataaaatgaatgtgtagcagaatagaagttatc

SEQ ID NO: 182543 - DNA, 356 bp, Homo sapiens
gaacttttgaataacttcacttagctagcttgttagtgctaggaacccaaagatgacaaacagcccattcctctgaaaaactgtgactctggtgaggtgcatagttatttagacctgccggatgagaataccacttttccccgcaccaaatctacctgctggagtgaatttatttcatgtagactctgaggtccctctgttgcttttgataacgtgctctcatctgaggccagctccgttacttgtatactcatcctgtctcccccgccaaggtcattgctcctgcagttttctgctttctctgttggatcattttccttctttgctggatcattcctatcatcaaacattctgtg

SEQ ID NO: 182544 - DNA, 715 bp, Homo sapiens
tcattgcactccagtctggatgacagagcaagactccatctctaaataaataaagttactttcttagtggttgttctagaggttatataacactatacttgagattaatattaccttaatgctggcaacacatagacttggttttcatgttgtttcatttttacccccttctttgtgtgactgtcatacatattacggttctatatgctataaaccccaaaatacagtggtatacttattgtttaatgcaactttatgtcttttaatgaagttaaagagaacacagttttttatatttacctaggtactgtttaccttttcatttctttgagtagatttgaactactatctggaattatttcttttcagcctcaactattgcttttagtatttcttataaagctggtctgctaacaatgaattctctttttttgtggagtgtctttatttcacctgtacttgttttaaggacagtgttgctggatataggattcttgtttgacagcatttttttttttcttcttgtggcactctgacaatactgccccactgcctcctggggtccattgtttctgattagaaggcagctgtgatttattttgttattcttctgtaagtgataacttgtacttctctagcttcctttaagatttttctttgtctttcaacagtttggccatgaggtatctaggtgtaagtatctttgtttatccta

SEQ ID NO: 182545 - DNA, 293 bp, Homo sapiens
caagatcatctttggcatcatttctactggattccatttctgaaggcattgacctatccattttatccaaagaagtcattttaaaacttctgggttctgctggtccagacagtctttcagaattagaataaaatctgtcttccctttgtggaggaagagttgaatcaggatatgattgccctggtggaggaaacatcatcctacggtcctgttccaccggagatgacagggacccagtgtcagaaggagccctgtgaggatcgattaacctgtcatagcttggttctcctctt

SEQ ID NO: 182546 - DNA, 1280 bp, Homo sapiens
caattgtgccaggttcccaattcccagagcagcatcccggagtcttgtttagtcatgatcttcagcctcttgacagcatttggttagcagacactatagcttggactccttggatgtgttcataggcattttatcttgactctgttctctaaacatggcacactctgtaagtttcattgtaatgtggctattaaacatgtccactgtacattaagatttactgggaaagaaaacctacctagaattcagtaaaattctaactaatgaaagagtaaatacaccagctgttcaggcccaacactgatttttaaaagggcagattgggcctgggctacagctcagaatgttgaagaggctggattggagcagagctgagggaaaaagagaaaaagacaccttacgccatgggctttcacacacgcaggagaaacaaacgctgtctcctaagttacaggaacttgggtgtactttttcagagactgcaagtaaagggtgtgatcaaatgctgccctttaaacactgacatgccccgagttctgttttcactgctttcttctcacgccgcgtgatttctttaggtcccagtgatcccaggcttccgctacctctacaggctgctgccagccaaatgtttatctgaaaatcgggcttctctgctaaaccccagacttagatacccagtatctgctattgaacagatccattcaaatggtctacaggaaattccagtactaaaattactattaaccaggtcttcctcctgtattgcccatcttaagtgaattggtgggtcagccaaagccaaacgcaagaaatggtcttcctcatctcctcttcctacatacacttcacctttctaacccccaacctccaacagtgaagataccgggatgctaccttaatggcacctctagaattgctccgtctttatcaagttgggactcaccagttgtcattaggggtaataaaggcacagcaagggtgaggggatttgggaggttatccctgtaatccccatgcttcctagtattctagatgctctctagaatgggagaggtgggtgtgccagagttgtacatcaccccctacacccacaggcatatgtgaacattgctgcatcttgtatcagaaaaatcagatgtgactgctgagtttgaagggtgagatccacgctctatactgtgcccctacctttttcttcagcttctgggacatttttgctcatgtgctgtgtcccagctgtatgatacgagacacacatttggtgtcttatcctggga

SEQ ID NO: 182547 - DNA, 994 bp, Homo sapiens
atatgatagcacacaaaagtgtacatttctggcaacactggcctggaatatttgcatggccacagcgtatggagcagggttgtaagtgcccctttgagaggaagaatgcatatcactgtgtgcctcagttctctcccagcctctcacatacatgtatgtcacctgcctggccctaaggacatttgagacctccctgtgttcttctctttgtcttgggatagcctggcttttaggaagtgttctcaaagaggcaagtgacatttgagcccctacagtggctcaggtgtgaagtcttgggcttttcccctgtggacttggagtgaagccttgtcagtgactgtaatgaccaaatgaggagttattttagcttgtgtttgttactatcttctgtcatgttaagggcatcttcgttgctagagtaatttcttctaaaatatggaaggtcaacacttttccctttagacttgtggatagtgatggataaaaataactctcttactctatagtaaacttgctcaagtgcaaaagttatatttagcttcagcaataggagtctataaaactgtgagagaaaagccttactaactgaagtcatccttcaaacctttctaccaggggttccaatagcaattgctaagaatacggcagcttaaaaaaattttttttcaattgacagatattaagaatgcctgatatttactgacttgaacattagttaaattcagttagggtgaccagagtgttgctatttgtagaactgttgcttggtagagtcatccaaagtgtcttcctaagctgtaataaatatgcttactaatgtttgactgcttaattaatggtcagtaagcattcagtcagagttcgtttaatacatggagaaagatatatgctttagatcaagggttagcaaaccactgcttgtttgggccacggcctgtttttgtatagtgtgggagctaagagtgggtggtgtacatttttaaagggttatgac

SEQ ID NO: 182548 - DNA, 213 bp, Homo sapiens
taagtgccccggagcgcaactgctgggtcatgtggtactgcatgtttagtttttttttttttaacaaactgacagttttccagagtggctgtaacacgtgacattacctccagaaatgcatgggtgctatgtacagagtggtaaaaaaaaatctctgtcgccaaaccatctgaactctagtgaaagtggggtgggtgtgaacaaatgaacaaa

SEQ ID NO: 182549 - DNA, 760 bp, Homo sapiens
ctctagaggatccccaggacagtcttaacaaaaacaagcagctctagtaactggtctaaagattcgcctctcaggtaacaatgcattctctccttagcaaaactaccaatcatcaagtccttgtgggtattttgtttgtccctctattctgtgcaattaatggctcattcagattttcagttaggccacaatataagtttcatccaatcaaatcatgacttgattttctcatataactagtatgcataaatcaagatgttagacaaaatccattttaatattttatatctacaaatagttttagttataacagtgtaattcacggaagtatgtggttatctaattattttaacatgcaaaatccaatttggatagctaatccctttctacatggataaataccctcataaattagatttgagaaataatttgcatgcagtagccactttactgaacctcccacttcaacaaatgtaactgttaaactctatttttaagactggtccttccactagtgtaggcatctgaggtatttgatgctctctgcttttttctttcacaccccactttcagtctctcagtatgtactgtgagctctgctttcagactagattcgtaactcagtgatttcctactcctccacaaacaccaccctggtccaggccatcatcatttttcatctgggctactgtagtcacttcctaactggactccccacttccactcttgctgcttgccccttattgtgcccatagcagcc

SEQ ID NO: 182550 - DNA, 652 bp, Homo sapiens
atggggagagattgctccagacctaaccccacagcatacacctgccacagcgaaatccagggtgttggcacctgtgtgtccgtgatgagcctaggaaaccagagcaggggcagaggggcgtcatcctcccaccggacgctgggagctcagaccccaaaactgaaacaccgtggcttcggcggggggtgtgcctcctgatgtcaggagccccatccacgtgtgtccacacagatctcgtcgcagcacggcaggaaggggtgctgcttagggctcattgttggggacatgaccgggttcagcggctagaacatctgccccacagcagcctcctcctccaccgaagagggtagttgtctccctgaagcagtcacagcaggcgtctctgccgctccgtcaccacagtggggttaggtctggggatcgcgctggggttctgcacctgcagaaggagaggggtctgttgtcgctggctttcccccaagcaggctcttgcacactctagaaaaaacaccttgtaagtctgtgcatttttattgtcttgataaattgtatttttttctaatggggattgggagatggacttcgtttttaaaaatatgtggattttggttaccaagtttagtgttaatatattccatatacatacaaaact

SEQ ID NO: 182551 - DNA, 909 bp, Homo sapiens
atgaacccacaagcttatctgaggtacacttcccacagaagctactagtccatggagctgcaggcagcagaaggccaggaacacatgcaggcatgacatcggataggcgacactttcaaaacctttaccacattgagttcattccttacttttcactctttctctgcctggagtgttctgccccatctttacgtggccagctgctcctcctctgatgaaatgtctcttcctcacaggccttccctgaccacccactagagtagcacatcttctacctcataaacttgtttattagtatttcttactctaaattttcttttaaattgcttaattccctaacagtagaatataagcttcactgtatgtatgatcttgctgactctcttactcattgttattgtaataccagtaacaaagggtgtttaaaatttgttcagtgggtgaatatatgttccatttaatggataaattattttttattcagtctcctgttgatggacatttgaataatttccatctttttctctatgaatgcctcacttggcatgcttctgacagtattgccacagaatacatttctgttataaaaattgaatttttaagtcaaagggtagttacactttaatggatagtggcagcttactatcaaaagtttctgctagtttcaccatatccttattagcagtagatattatcaatcttttcaatctttgccaatctgataagcaaaaagtaaatgggtttaaacatcctttgtatatattcattgctcactttatgtttttcctttgaaatgttatttcttgttctttccctgcagtatgattctttctttttttgacttgttcccagttttttgtgtactatggatattagcctttaattatgttacggatgttctagtatgtt

SEQ ID NO: 182552 - DNA, 174 bp, Homo sapiens
tgaattttagaaagcctaagtcatacatcacattgcttcatgggcatcccagtacactttggattttattttacatccttactgatctgattctcatctctgtctcttcatggttctctgccttctagttacactggtgacctttcaaaacctttaccacattgagttcattcc

SEQ ID NO: 182553 - DNA, 203 bp, Homo sapiens
gaaaaaaagaaaaagctagacttacatgtgtcacttaaccccttttctcaacctctttctcttccaggaatagtcaaccctggatggcttcaggggaagggggatcctgaagcccagggcagcctccaactctaccccttcctcctttgaaggatactaaggggtccagaaaggaggggcaggacactgttacccaccccaca

SEQ ID NO: 182554 - DNA, 449 bp, Homo sapiens
agcacatgcttgtagtcccagttactggggaggctaaggcaagaggttcacttgagaccaggagtctgggcagcagtgagctataatcactcaactgcactccagcctgggaaacagagcaagaccaccttttcctcaagtgtgggtgtgtctcaaaaaatatgtattacaataaaaatttggtttatgttttctagcttagtttttagaaatagtaaattctaaattaaaggcaaatgtataaagttattatgagaaatttattgttaaaaagaatcatgtggtaatatttcatttcattttttgtttgtctgtttatttgtccggagattcagggatcctttgaatactttaatcagagcctaacacagtctaagagtctgaagtctctaagagaaatatatgttcaagaaagaaaaaaataaaacatgaatgagataaaagtagca

SEQ ID NO: 182555 - DNA, 155 bp, Homo sapiens
cttttacacactgatttttttcaaaatttaagatactgacagaaactgaatatttagttcctctagatattgatccaagcctcgtatagaaacaaaataagactttctataaatgctcattaatgaacagatttttgggccccagtgtggcattt

SEQ ID NO: 182556 - DNA, 702 bp, Homo sapiens
gataactttcaataacgaatgctaaactataaagcatatcagataattgtttgacattgtaaatgcttttattctctagcttaatggtttaagaattaattatgtctttaaatgaaagtgcaagtctatatcccgaatattttaagtgtctttttcaatttaaatttgaaggacacttataatgtgtgaaattaaatgggaatttggataaatattaattgcatcactaactcaatgttataattaaacacaaacttttccatgggccatatttgaacccaactcataaaagaggatattaatatatattttgcaatttccataaaagggctctcaatgcatagtagtgaacttgagtcatatatacagaaatgaataattgtcatctaatagcatatttcttctgctctgtgaatcccaattatattcgtttgtaaccatagggtttatgattgcacttcttaaataaatctcattgcacatgtatgccagctaagattacacaaacataaattgcactttgtggttctctttctgtaaatacttttcaattgctgattttgacatttgtgagctttgaagcttactatcagtgaatattgtaataattattgttctttgtgtaagccatttgaaaggtgtagctaatgaataatgcccaaggacaggctttttaatcatgggaaagccaagagatatttc

SEQ ID NO: 182557 - DNA, 220 bp, Homo sapiens
aatctatccatccctcccttcctcctgctctcccttccttcatccaaacatccacctacctactagtaagctacatatggtgctgcattcctctaagtaatagtgctgaggtggaggtcagtatcccttgtgcaccgcagagctactgttttactgaatcgatagtgctctgaaaatcaaactataaaaccatttaggatacagtagggagaggggatca

SEQ ID NO: 182558 - DNA, 648 bp, Homo sapiens
atcaatctcctttttgtgtgtttgtcaaagggcagcccccaaacccccaaatgggacataaatagaactgaagtacaacaagctactatattctcagcacagggagtgtgaagcccttagtcttaaagtgacaaatgggtaggaaattatttcttgctaaagaataatgaggagcataaattgcttctgtgtgcggatgattcactagaaggtaggcacctccggctgcaagaggaaggcaccaccacttcaagcctcagggccacgcttcatggctttccccctacatcaagcaccaccacccagctgcatcctggccaggctggcctgataacccttgcccttccttctccccagcctctggggaagaggcactgagaaaggcgtggggaagggcagtctgctcagtctgaaagctcctttactcctagaaaagggttttcaggacccagaactgtgccctgggtaatggtaagcatggctgtggcaggctctccttagaaggctgagggccccaggcaggagacctttcccctgcttggttaagacccaaggttggggctgggcgcggtggctcacgcctgtaatcccagcactttgggaggccaaggagggtggatcatgaggtcaggagatcgagaccatcct

SEQ ID NO: 182559 - DNA, 494 bp, Homo sapiens
atcaatctcctttttgtgtgtttgtcaaagggcagcccccaaacccccaaatgggacataaatagaactgaagtacaacaagctactatattctcagcacagggagtgtgaagcccttagtcttaaagtgacaaatgggtaggaaattatttcttgctaaagaataatgaggagcataaattgcttctgtgtgcggatgattcactagaaggtaggcacctccggctgcaagaggaaggcaccaccacttcaagcctcagggccacgcttcatggctttccccctacatcaagcaccaccacccagctgcatcctggccaggctggcctgataacccttgctgctgctggccaggactgaaaaatgcagactgcaggcaacataagcaagcaggacaaccccgctcagattgtgtgtgtgtgtaaagtttgatggaactgctcgggctgggggcgtctggggaagtatctataagtggcaatcggctgccattg

SEQ ID NO: 182560 - DNA, 137 bp, Homo sapiens
attagttgcttacatagctcatgcctaccaaaagtggatggaaagggaaagagaaaagtgtacagcaaagaaaacccaggagctgagatggcaggagaagtaagtgattgctccaggtgtaattgcttgcatagtaa

SEQ ID NO: 182561 - DNA, 237 bp, Homo sapiens
tcttagtcaatccccacccctacatcctgaggcaaatttgggcttttatcactatagctttgtttcacttgttctagaacttcatataagtagaatcatatgatatctaatcttttgtgtctggtttctttaaccttaataattttgaaatgcattcactgttggtgaggagtgttccatattataattgtttgtttatccattttctgttcttaagtattctgggttttggctagg

SEQ ID NO: 182562 - DNA, 281 bp, Homo sapiens
atcgctctcctcgatcctcaggacctttctttatcatcaaccaccccatctccgaactccagtctctctttcacctgggtcctgctagtcagcatacgagccagtttaagtctcttatctattaaagcatcccacttccacatcacatctgaaatcctcagccccgccatctctagctaccatacaccactgtctcacctgccattccctcttctgtccccaccatccccttgaaactcctctcacctatgaccctctagttgccaagtccaatggactcc

SEQ ID NO: 182563 - DNA, 393 bp, Homo sapiens
agcatacagaagtagccctgcaaagttatatcttgtgggggaaatttgcatctgtagaaaatctgcattgatgaagccaggccttcccttgtctagatctgggaaagattaactgagagtctgaaacacctttaaaggtctgaaagaaacatttgccatctattctctaacaggactgctacctgtgaagtttcaactatgtaatgagaacacctttgctagccaagcctcctcttttctccctttggtaatctgttttgccacagccgaagccctcattctttttgtaacctcaagatggcatttaagcttctgcattccattgcggggttgggtaatcactcagtaatgttccccatgtgtatgctaataaaatgtgtatgctttttctcc

SEQ ID NO: 182564 - DNA, 357 bp, Homo sapiens
cttcttgattgtgtgttattatgaagagcttgatcctacagctgtgtgatccacaagttactcaacctctcttcagtttcctcttcactaagatgagagtaataattagccgggcgtggtggcgggtgactgtaatcccagctacttgggaggctgaggcaggagaattgcttgaacccgggaggtggagttgcagtgagccaaaattgcatcactgcactccagcctgggtgatagagcaagacactgtctcaaaaaaaaaaagccacaaaaccaaaaaaaccaagatgagagtaataatagcacctatcccatggaatggttttggggattaaatgagtcgattagtgtgaaagg

SEQ ID NO: 182565 - DNA, 446 bp, Homo sapiens
tagaacagctggttccagataacatggtatgtctcattagagagatactagatctaattatgcaacatataagcgggatcattatagaaacattatctcgatgaggtaagtaaagtacatgtgaaatctaactctgctgtttgaaagaatttttgaaagcaaatgtaaggaattaataattacttaagtgtatgaagaaagctgttgcaaactacttatgaatctttgacatgtaatgaaaaaatataatagaatgataagtaccctgattatttgtgctagagataaaaatgaacttctgggcaaatatcttttgctaccgacaaatttttttcctaaacagtaaaaatgagtgccttttcatagcatttctactgtgtcagaaattctcaaactttagagtgtaactgaaacacagagagggcttattaaaacaaagattgccg

SEQ ID NO: 182566 - DNA, 463 bp, Homo sapiens
tttttttttaaactaaatgtcaggaaggcaagaaaaagcatcaactcacctcagccatggcttctagtattgcagatggttagtcttccttgaggccgttctcctgaaaaaggacagtgttctgaggttgcatgactggggaagtaaaaccctctagaaatcacactagaggtcagataaaaccacctccatatttcttggtcttgagatacaactccagttagtaggaatatggaacaaatcctactccttcctcaatcctacaaacctcaggctttagctgcagcaagacaaggactcagattcattctccctcatgcaaacaacctaagttcctgccttagccaacggattcgggccagaccttgtcccacctcagtgatgttgctctgaacccatgattgagctattatggtctgccctgagctaatgacctactatgacccaagactgagctaccatg

SEQ ID NO: 182567 - DNA, 379 bp, Homo sapiens
  misc_feature (15)..(15): n is a, c, g, or t
  misc_feature (19)..(19): n is a, c, g, or t
  misc_feature (23)..(23): n is a, c, g, or t
actctagagtatccncggntcanttgagatctacaagtttattatttttaaattttatgtttttatttatttatttatttaagtccaagttgttctgacagaactacaaatttaaatgttataaagaagattcattctctttttctataagttacttattgaactgtatagattggtattatatatattatatatataatatatatattatatataaaatataaataatatatatgaaacaattattatttatatatatatatatatagagagagagagagagagagagagaatccttatcatcttatttactgaaatgttgtagatctgaaacccccactcttcttgttggagggaggacagtggggatgagagcgtt

SEQ ID NO: 182568 - DNA, 649 bp, Homo sapiens
atctgtaatcccaacacccagagataaagccatcgtgaatgcgtaacatatgtgaaattaatgctgagtaaccagccctgccacaggcagcagcagcaaggtgtgtggctccgacctctgtggtcattgcctttggctgtgctcagctgctggttctccgtcccagccgggctcccttagtgccttcagtcacttgatggttaggtggagccttgcttcggggccctggctgaaggcaggagtagtggaggctctgttctgtcatgatccagccttggttccaaaaatgatagcagtgtcagcctaggaacaggcacagagtctcagaccctattccttgacccaagtcccaagccagccgcgattcaaggactggggcccagactcagtgagagggtgtggaaacaggcaggggatacttatggacacttttgtattctattacagtgtatttctttccagtattctttctaagcttattttaattagatatgatcctatcagatgcaattcatacccaatgttctccaagtatcctggtataggtattttaaaagcgttattacagtgctccatggcacagctttaaaggattgtctaacatgccattaggtgaccatattagtcttttggactttacactgctcca

SEQ ID NO: 182569 - DNA, 535 bp, Homo sapiens
ctcaaacttagcataacatattaccaattcttgcactcccattaactgatgggtcctaagcctggcaggtgtcaatgtcctcgcaaaggtttaagcaaaagccttagctttgccactagcattcctacaaagtgttaaaagcacacttcatgccgggcgtagcagctcacaactgtaatcccggctactcgggaggctgaagcgggggaattgcttgaatctagtaggcggaggttgctgtgagccgagacaccagcctgggcaacaagagcaaaactctgtctcagaaaaaaaaaaaaaaaaaagaatctgttagacatggagatgtgtacatgcgtgattgacaaagctacagagcaagagagaggataatagtggtaatgagaaggatgagctcttggatgacttctagttttctgggttccatgctaaggtggatagtgacttccatttataaattagggaatataggaagatgcacgtttgggaacaaaagatgagatgtttggtttttgaatggttgaatttgaggtac

SEQ ID NO: 182570 - DNA, 346 bp, Homo sapiens
caggagaatcgcttggacccaggagtcggaggttgcggtgagccaagatcgcgccattgcacaccagcctgggcaacaagagcaaaactctgtctcagaaaaaaaaaaaaaaaaaagaatctgttagacatggagatgtgtacatgcgtgattgacaaagctacagagcaagagagaggataatagtggtaatgagaaggatgagctcttggatgacttctagttttctgggttccatgctaaggtggatagtgacttccatttataaattagggaatataggaagatgcacgtttgggaacaaaagatgagatgtttggtttttgaatggttgaatttgaggtac

SEQ ID NO: 182571 - DNA, 518 bp, Homo sapiens
tacaatctatttattttttgggtaattgtgaaactaggaacaggaaggatattatagtaattcaagtaagtagcaataatttggctactctattttgatttaaaaatatttgggcatggaacaagtcgttatttaactgaacttctagttttgagatcttattgttaggatattactagctacaataagttttatgagagaattttctcccttgaacatctccacatcctaccttttattaaagtaatccactgatgccctttactatagaggctttgggtcttttcattgttttccggtcagcaggttggtacagctgaactctcagtacctagtgcctgagtgttaaatctgttcgacagccctctgctttatctaattttgatactatgacatttatattgttttaaaggaatcttctgtggatggttttaggagttctgtgggaattaataccatttagaggatcatataactatggcagatgatgtttgtgataaaattggtacctatcttgt

SEQ ID NO: 182572 - DNA, 576 bp, Homo sapiens
tactaagtttctttcatgtgtaactataaaatttcagggaatttcaaatatccttgaaatgctctttgaattgccattagatatattcctggaagccatcccaacaccatgatggctggcaatattttaacctgtgtgatagttaacacatggccccccaaatgctttgatactccccccattgagaggtgggtctacctctcccttctcttgaatccaggtgggattgtgacttggttgtaaccaacagaatgcaagatcacaaaggtgaggtggctatggctttggtccctggaatactcatctttggtgtcctgactcatcatgtaagaagtctaacttctctgcagcccccaagctttgaggaagcctgggctatgtttaggggatgcagctgacagccctagctacaatcgccactggcagccagcgtcaaccaccagacatgagtgtggatgcctccatttgattccagcccctgtcagtagggtcactcccaccatggagtcttcccagctccccagaagttgctgagcacggacaagctgtggcctgtccaaatttctgtcccgcaaa

SEQ ID NO: 182573 - DNA, 354 bp, Homo sapiens
ttgatggcaggtccctgagaagagagaacacagagcacagtgttttccaacccttccttctcctgagtatcacattttatggaaaaactggtccagtccagtttcctcatgatgtgcctacagaaaccaaggtccagaaaggcaaatgacatgcccaaggacaatcagctatgaggagcagggccaaaactggaatctgtctcctggtttccagtcaaaagctgtttccactttcccaccatgccaaataattaacagtgcaggtgcctccttgcacagaacagagtaatatcgataaatcaaaatgtcggttgcagactggttgttggaataagtaatctgaatgggcaagaa

SEQ ID NO: 182574 - DNA, 495 bp, Homo sapiens
tgagaatgaaaattattaacttttaaatgtttttagatatataacacttctctgatatttattcacatatcatatatcttttctgatatatctctctttccagaagtatctatagagaaattaacagttatctgctttaagcattctttcttatgttgcagtgttttcactgatgatgaaaatctggtctattttttaatattgatattaagttttaacttggtagatactttggaactttcttaccttacctagaaatattgcttttattagatgtgcgattatacatactaaagataagtgaggatcatacatactacagataagtgtgaaagagggagcaagattgagcagtcattattttttctgagttccagttctgattatgctttcagtgatggatattctctttgctgacatttgccttgttgatatagctttgaaatcttaaatttcaaacattaaatgatgaattgtttgagatttgaccctttt

SEQ ID NO: 182575 - DNA, 523 bp, Homo sapiens
ttgatttgagtctattcctgctcacacaaacaagctcacccgggaaagatcggctgaaagtgactttgaccctaagatctgacagttaacactggaggtcagagggcagcttttaggctctccttcaagtatccaagctgggtggaccttccacaaaccacttgggtacctcattaggctgggagcatttctgctgagctcttggagacaaagtttgctctgaaggcaggtaggtaggtgtgcatttgtgcctgtgtccagctttccatgttagctgagaagtcagaaaatgctagctttcttgttggtaagaagtaggccaggtatgccatagcatactttaaaaatgcaatgagaattcgttccagcatagaatgatttcaagaggccaaccacaaggtaacagcaaaggacatcctcctttctcgaaggactaaagtacctggagctatgaagagccccatgttaatcccaagatagagggattacatccttggttcttcttcttctttttttttttttt

SEQ ID NO: 182576 - DNA, 636 bp, Homo sapiens
ggactacattattttcactctaagattgatccacatttttactgtaagcagaaacttaggacccaagattataatgctgcagaggatgctgatcgatgtgttcttcttcctgttcctctttgcggtgtggatggtggcctttgcgtggccaggcaagggatccttaggcagaatgagcagcgctggaggtggatattccgttcggtcatctacgagccctacctggccatgttcggccaggtgcccagtgacgtggatggtaagcctgacttggctcagatggaaacagcttggaggaggcatttgctccctgaaccaacccccagggctgccccggagaccgcacttcagaagcacgcgcgtgaaacggagtccaacataacagagtaccacgtatgactttgcccactgcaccttcactgggaatgagtccaagccactgtgtgtggagctggatgagcacaacctgccccggttccccgagtggatcaccatccccctggtgtgcatctacatgttatccaccaacatcctgctggtcaacctgctggtcgccatgtttggctacacggtgggcaccgtccaggagaacaatgaccaggtctggaagttccagaggtacttcctggtgcagga

SEQ ID NO: 182577 - DNA, 121 bp, Homo sapiens
tatggacaagaaatgaaggctcaatggcacatctaaatccacacaaatagtaagtagagagctgtgatacaaaccctaacctctgatcccaatgcctgaggcttccactagacccctgagg

SEQ ID NO: 182578 - DNA, 164 bp, Homo sapiens
cgagagccggtccatttccaactttaagtacttgagaccgtttgagaaagacttaccctaaggatgcagtggcttaggcaatttacttggttttctcatttgaagatttgctagcttgcagatttgttcagataagtaaatgagattatgtatgtaaagtccag

SEQ ID NO: 182579 - DNA, 155 bp, Homo sapiens
aggggaaccacttagcccagcctcatccgacatgggcatgaaatatctgacatgtttaagaaaaagggagaaatttggtgtggctgcagtggaggatttcagagagagcacagcaacatacgaggatggggatgaaagctgggctcagatcaaca

SEQ ID NO: 182580 - DNA, 273 bp, Homo sapiens
aaaggatggagcattaggtaagcatttgcaatgagcataatttgtgacaggtggggattagaggagtataaaggtaattccaaacagaaagaacccaaggagcaaagctgcaaagggtagaaaataaggatgtgttaaagaaacgtcaggtagtctaattcaacgggcaaagagaggtcttctcagagactaaggaatgacaattctataggagatattgtagaggcattaaaagggtcttcatatgctgggctaactagttggagggcaatg

SEQ ID NO: 182581 - DNA, 294 bp, Homo sapiens
gtcttcttttgcattaataaatccctatttgaacaataaactataggctgaccttttgtaacagcagctaacatttaaaaaacacttacctcaagtcattatagacattaactcatttaatcctcacaaggctgggaagtcataggggacccagtatcattcctatttgttcttgagaaaacagagctttgcagcagcgaagtgggggagccataagcggtacatggatccgtctcactctgcaccctatatatactcttaactcttttatggtactggtcacagcctgaagac

SEQ ID NO: 182582 - DNA, 272 bp, Homo sapiens
ggaaataatgcctaactatatacaccagtaggagtacttgagagtttataacaataccatgtaatgtaatgtgatgattatttataaagttcatatgaaaatccaaagctgaaaagggtgcttttaaagttcaatgaaaacacgaagagcctgttagcagtcaatatccactgacggaatttctctgatgataaaaaggcacagttggccgggcgtggtggctcacgcctgtaatcccagcactttgggaggccgaggcaggtgggcggatt

SEQ ID NO: 182583 - DNA, 515 bp, Homo sapiens
aacttttattctttctttatttactttttgagacggagtctcgctctgtcgcccaggctggagtgcagtgtcgtgatcttggctcactgcaagctccgcctcccgggttcatgccattctcctgcctcagcctcccaagtagctgagactacaggcgcccgccaccacgcccagctaatttttttgtatttttagtagagatggggtttcaccgtgttagccaggatggtctggatctcctgacctcatgatccgcccacctcgcctcccaaaggctgggattacaggcgtaagccaccacgcctggccgaaaacttgttcttttaacaagatgccttccggaatgcagaacaaagctgagaagccttcttttaacaacctgatgatttccaaactctagattcttggtcatctcaccctggactattagaaccatcctgatgaaaatagcaccaggtatagtttctgcacagctgcttgtccagaaatgtgtgaccttgggaaggtcatcctca

SEQ ID NO: 182584 - DNA, 1233 bp, Homo sapiens
gaactgggagagctgatggtagtgtgggtgggttgtggctgcgtctcagcgtgcaccagcgcctgagtcggtcggggttgttggagtcagtttcctaattaagactagcggagtggtcagatgccacccccactgtaacgagcaagcacttcaggaattgtctttggaaattcacggactttttctggagatttaagaatctagcatcgaaatatctagtatctcagaatgatttctgtcctggtactgtggtcctttctcaagtctatcattctttactccagttctagtcttaaacctccaccaccttagcataagacaaaaccagtcctgcatcgctgcttcctgtaaccccggggagaggccctcctgccccatgagcttcctcctccaccctctctctagatggaatgttctcaaactcccaggggagtattaaacaccactgatgcctgagtcctacccccagaggttctgatctaaaagtgggggtgtggcctgggcagtggggctttgaaaagctccctgggtgactctaaggtacagctagggtgagaggcacggcactgtgctagatcctgggcagcaggtagatatccttctagataaatatcctgggggtcacttcacctgtctgctgagggaaagaggtgatggggaaggcagaccctgggctggggagagctgaaaggcaggtggctgtgcggggaaatgaaagagcagcggcaaatgtccctacccccaaacccaaacaccagtgcttccaggatatttgtgagaccatagccagttgtaaaagtgactcaagtactgatttttaaaatgagaacgtatcaagaacgtatcatagtcacttaaatttggctgactagagcctaatagaccaggagaattaaaataaaaaagtaattatgatctagttcttagagcagtggttctcaaactcaagtgtgcagcagaatcacctgcaggctttgttaaaacacggatcgcgggtcctaccccagactgtctcatttagtaggtcagggtggggcccaagaacgtgcattgctaacaagttcccaggcttgttgatgctgcttgttgaaggaccacactttgaaaactactgcattagagtacttcacaatgaacccaatgaaatgatgtttccacctgaagccatttctgtttagttgtgtgaggtctgcctcagctactcttaaaagtgctacaacacaaaactgaatg

SEQ ID NO: 182585 - DNA, 250 bp, Homo sapiens
tagagcctccagttccctgccatagacagggaatcctgtgatttgagaatcttgggccctgaaacttgggagaaagctggggggccatgggattggtggcaaagtaattctatcagttcaaaacaatgattgtggaagccagttatgcaattcacacacagtctcacatttcttttgttaataatgaatgcaatgagacacacatgacaaaatgttaccaggagtgttcattccggatgtttggaatttg

SEQ ID NO: 182586 - DNA, 482 bp, Homo sapiens
gattgaaacttacattctttaaaataaaagcttgcaaataactttgtaatacagttaaggtaacctagcatgggttaatttttaattcattgatgactctaattataaaaatgtcacatggcttaaaaaaatttttgctttttaaaaataccctgagtaaccaacatgatggggctgggcacaatagctcatgcctgtaagcccagcactttgggaggctgaggcgggcagatcacctgaggacaagagttcgagaccggcctggccaacatggtctctactaaaatacaaaatctactaaaagtctctactaaaaatacaaaaattagccggtgtggtggtgggcacctgtaatcctatctacttgggaggctaagacaggagaatcacttgaacccgggacacagaggttgcagtgagccgagatcacgccattgcactccagcctgggtgacaagagtgaaactccatctaaaaaaaaa

SEQ ID NO: 182587 - DNA, 276 bp, Homo sapiens
aacgtaggctgtcaggtctccccctgtgcaaatgggacatccacttgagagtcaagggtctgtttgggtggcagggatagccacttctgaaggtagaaagaaaaataagccaccaaattggtatctttctgtgaaatggacatcgtgcttagagtctccattttccccacaacctggaggaataagtattgtcatctgcattttatagctgaggaatctgactcaacaaaattaaattactcacctaagcaattagcaattaaccaagtctttctg

SEQ ID NO: 182588 - DNA, 469 bp, Homo sapiens
cccttgttttacaaaggaggaggtcgaggctctgaaagcctaacagctcgtcagggccaccagctagtcagaacttgtttcctgagcctcagcctccaaatccaggctcctcccttccctctgcagcgcctcagttagccaggagagcatggccagttccttcctgtctccgccctagccctgggggcagccccaagccctaccggctccccgcttgccccctccccgctcggtagcctggggctgagcaggtagctgagcaggctcctctgaatgatcattttgtgtctggttcacgtgccccctcccctcagaatcctctcttctcctctagcctggcaggatgctttcctggaaccccagtaaccttgcccttgtagaacttctcggaggtactgagtggaggtgtggggcaccgggtggtattgttttcaaaatgaaacgattataggatttgggtggaagccaa

SEQ ID NO: 182589 - DNA, 392 bp, Homo sapiens
actgagaagggacatgaggggactttttgcggtgatgatagtgctctatcttgatgggtgtttttattatacaggtacatgcatttttcaaagcacatcaaaccatatagttatgatttatgcattttattctatgtcaattttaccttgaaaacataaagattcaattttaggtaatgatattgatattcaagtgtctgggggtgaaatgtactggtgtctgccatttctatcaagaagcatcagaaaaataggcgaggtgcagtggctcatgcctgtaatcccaacactttgggaggccaaggtgggaggatcacttgaggtcaggagttcgagaccagcctggccaacaagatgaatcccgtttctaccaaaaaatacaaaaattagcc

SEQ ID NO: 182590 - DNA, 273 bp, Homo sapiens
catgaatataagaaattaaatctcccaagttaggtaagaaataccataaatgatgtctccaaagaccatctgtgttgtcaaaattaagggggatatgttacacctacttagatttctgtcatttaacctgccccatgaaccttccatttgaccttttttacacaccacattagaatctttgggtatcattttatgctgttctcccatattttaacgtgaacttgactttagtggaggaaaaattaaggaactatttcattgtattacttgagc

SEQ ID NO: 182591 - DNA, 257 bp, Homo sapiens
atttctgttagtgctcctaaaagtccatacaggcttctccaggcctgcacttctaccactcagagaaagtctaaggaaccaaacaaataaataggaaaacactttggcacaaataaataaatctcccaacaatctatctcacccaaatacctggcaaatttatgtgctgtcaaaaaagtttggtaactaaacttaaatttaccccaaggcgtgcgcagtggctcacggaatgtaactgagagaacagaaataaaact

SEQ ID NO: 182592 - DNA, 367 bp, Homo sapiens
cgtctatgtctcgatcgttaaaatataccttcctcccaaagtgctgggatataggtgtgagccacagtgcccagccttgttttgttttggttttgttttgacagtctgtcactctgtcacccaggctggagtgcagtggtgcgatctcacctcacttcagcctattcctccttgttctgcatccaaacacacagaccatttattttattttattttacttgaacagacagggtctcactatgttgcccaggctggtctctaactcctgggctcaagcaatccatctgcctcggccttccaaagtgctggaattacgggcatgagccaccatgtctggcccatacagatcatttatagactgcatatt

SEQ ID NO: 182593 - DNA, 98 bp, Homo sapiens
attagtagcttattagggatatgggcagatctgtcagattgccctgtctttgccagctgctgtgtgagggtcatgagtagtgacactaagtggccagg

SEQ ID NO: 182594 - DNA, 359 bp, Homo sapiens
ctctggagacaaccaagaggagaagttcaggaggtggccggctgtcttctaggcaacagggcatatctccctcacctaccagagtgcctggcaggtgctcaatcatacgtactgtagcaaattagcatatgtagcatttttttccatagttgtggggaatacatattgatgcagctccattcttatctaattacccttgtgacagagaacataatgacaaattgttagctgaggttaaaattgaagtctagctatgccatgtgcccataagatcatatccataactttagcttcatgaacaccaaaatctagtcaattaagtagcatctagagtagccgaaattcttgaataatgtatt

SEQ ID NO: 182595 - DNA, 726 bp, Homo sapiens
ggaagatttcaatcctagcattaaatgtaacactgtcttttttaaaataaaacctccatttctaagaagttatttgatgagaaaatatttgagaggttatctgatgagaaaatttgaagaaaaaaattttaactgtacaaccagttaattagaactttgtcaaataacattgcctttaattcccagaaatccaatacattatgctcagtgaactgtaacacctgagtttttaaagtggaatacttaaaaaaaaaaaaaaacaaaaaaaaccagccttctggggtaatatctcctctttggaagtttctttttttccaaaattatacttaaaggacgattcttttaatgaataaattttagagttatctcaaggaataaatagaggaaatattattttatttcaaagagaagaatgtctattgtggcaaacaacaaacctgaaataaataaaacgtgacagtctatgaagtccgtgagcctaaagaacaatggttattttactgtcttagaaaagtttaggaagtttggatttgaattcaaactttaatttgaacttataacgtcaacttgaaatcatttggaataaacattgaaaaccttctttgaaagttttatcaaaggagaaagaatttgaataccaagaggatggaaaggttaacttctgttatctgaaatatcttcaattgccttgagccagtttaaaaataaacaagcttactgatatag

SEQ ID NO: 182596 - DNA, 811 bp, Homo sapiens
aactgctctaaaccataaagtttattaaataatagtaacaattgaaaaatagtagagggaatgtggaaggatcaactcaatcagaatttggtgagggcataggaactgaagtcacgctgttccacatttaagcaatgccacatcctgtattttattaccaatgataatttttattttcttattgtctttgaatgcttttaatctttccctttgttgacaaataagaccaatacagttttggtgtttgccatggtttgcatatttgccccctccaaacctcgtgttgaaatttcatccccactgttggaagtggggcctgatgggaaacgtttgggtcatgtgggtggatcccttatgaatgacttaatgccatccttgcggtaatgagtgtgttctctctgtattagttcctgggggagctgattctttaaaagagtctgacacctctctccctgctctcttgctccctcttaccatatgatctgcacacgctggtcccctttcaccttctgccatgagtagaagcagtcaatggccctcaccagaagcagatgctggtgtcatgcttcttgcatagactgcagaattgtaagccaaataaacctcttttctttatagattactcagccttaggtattcctttatagcaacacaaaatggactaagacagtgttcctctaattactgatgaaggagttgagagaatgcctaggtcatattctgggtccaggttatgatcccgaattcaacttggggggggtcaaattctattaggttttcgccaagagagcgaaggcatgctctcgtgact

SEQ ID NO: 182597 - DNA, 221 bp, Homo sapiens
tccaaattgactcaaaaaaaaggagaaaagatacacagaagattatttcccatgccctatggccttgggaaaaaactatttgataacaatttccagcatagtttctgtctccacttcatggggccccagtccagcaaagtcttcctctcaccaccaaccaaaatgatgtctgtagcaaaaaattagttattttaacacctttaagttaatagtttatgctg

SEQ ID NO: 182598 - DNA, 375 bp, Homo sapiens
aaggggaatgaatggcaggggccaggggcaggggagagggaaaaggggagtgagtgctgagtggggacagagtttcagtttgggagatgaagaagttctagagatggatggtggtgatggttgcacaacaatgtgaatatatgtaatgcccttgaattgtacacttacaaaatggcttgcgcctgtcgtctgggctacccaggtggctaaagtgggaggatctcttgaggcgtggagtcggaggctgcagtgagctatgatcagacctgtgaatagtcactagacgccagtggagttcagtgtctctgggagaaacatagcgagaccctgtctttaaaaaataaataaataaataaaataaacataaaaaataat

SEQ ID NO: 182599 - DNA, 161 bp, Homo sapiens
gagctgagatcgtgccattgcactccagcctgggcaacaagagtgaagctccatctcaagaacagttttgatgaaattgtccctagatttgcatctggcatctagctcatatctcagagccagaatgaaggatgcttacctctgggtttggtaaattttag

SEQ ID NO: 182600 - DNA, 443 bp, Homo sapiens
ggcgaggccagggcagggcctgggagccaaggctcctgaagtgctcccaggctactgggcaccaagggcctgggggaccagaagtgtaggtgttgccggctagtggccccaaccaactggcagggggcagggggccagggcatggggggcagaggaagacaagaaaccagaaaacaaaaggatcattttgttcacactgattattttaattttacttttttaaaaaagcatccaagcaattgttatgagaaaaataagtttgttggccttccttgcagtttagtttttaggttggttttgttttgttttgttttgttttgtttttgttttttggtgagacagagtttcactcttgttacccaggctggagtgcaacggtgtgatctcggctcactgcaacctctacctcccaggttcaagcaattctcctgcctcagcctcct

SEQ ID NO: 182601 - DNA, 580 bp, Homo sapiens
aattttaataactgggcattatactgaatcttatgaatttaagcagaattacttgattcttttcacattgctggacctctaggttgcttgtaaattttccgttttccaaatagcactgtgacagactttcttatcataatcttcgtatttctatctacttcttaaaagaagcttaaaagcctatcagtatttcacattcaaatttaaatcacttagtataccagtaaattcaccattggaaatctctgaggacaaaatgcaaataatgcatatgagacaaacaatactattttacgatcacttgaaatctatatttatccttctagaatagtcatctttcagggagcacattatttcctctaggcaaatggactattactaggttaatctaaatgcaataacatgaaacttggctgacccagatttctccaatatcggtatgcatgcaattacaatattctgcagaatgacaaatactcaaggctctcaaaaacacatattttatcatcctttcatttaaaacgatgtacaatggacgctaaaataaaacaaataaagtttatagccaatgaaggttgat

SEQ ID NO: 182602 - DNA, 450 bp, Homo sapiens
tcttggattgcagtgagttgaacccctgtacagaagtgtagaagaaggaaacatcttctagttgagttttagcttctgtctgttttgagctggtgaactcaaattgttcactgaatatttaaattctttgactttcacctgtgaaaatctcctgaatgaaatgagatatttgatcctatttagtgggtcactgaacatgcttctaacatgaaaacattcagctttgagctaggaaggtgagctgtgctcacaatctcaaacagggtaggggagagaagatttacatgttctgtgccctgtgccctttcttggggcctagaggacacattgacttatcttttctggggatagtataaaggaacatcaacttgctcctattttgtgctggagaagcttagagaatcagatgctagttttatactacatccctcagtattaaaagctttaatt

SEQ ID NO: 182603 - DNA, 548 bp, Homo sapiens
ttaatgttctctctgcaacatggttaggtaagaattctggtttcagccgggcgtggtggctcatgcctgtaatcccagcactttgggaggccgaggcgggcagatcacagggtcaggagatcgagaccatcctggctaacacggtgaaaccctgtctctactaaaaaatacaaaaaatgagccgggcgtggtggcgggcgcctgtaggcccaactactctggaggctgaggcaggagaatggcatgaacccgggaggcagagcttgcagtgagtggagatcacgccactgcactccagctgggctacagagtgagactccgtctagaaaaaaaaaaaaaaaaagatttctggtttcttcaacctcttaccatctgcatacagtctttcctacttgtgtttgaggtgatgacaaaataccaataactctagttgtcactattctgtttcctaaattaagaaacaagtcaactttctcccaaatgccctatcctgctgtcttttcccaaagacctgtcatttctcccttctcgcactataggaagatccc

SEQ ID NO: 182604 - DNA, 278 bp, Homo sapiens
gctcagcacccaaaaccatcatttaaaatgcgaccctgcctgggggctgttcgaatcctctattgagataaagtagcaatcatacattcatcagtcactactccctgctggaggcctcttccccagcacagagccttccctctctcagctgagaccccaggcaagggtagggagaagagggtgctgtctccctccccctcctcccctctctctcctctgttcctccctttctctctgtgtctctctctccttctctccctctctttgtgtttctccct

SEQ ID NO: 182605 - DNA, 451 bp, Homo sapiens
tgctcaacagggcttcactgaccccgatgcttatcaaatagctttcagtctaatatcgacacctctgcccctgggctccagggagagatggccagacagccatctgggattccattggccacccccagacgggatgtgtctcagccttggggagggctgcctggctctgccagtggctccagcatgtcccctctcctgggtgctattatgcagacactgctggcagccacaccgaggttccatcctgctgccgccagggtggtgatagcaagctctttaggtggtggccaagactgtcacagtggattatagtcctggccatgtcctaaatctttcataagctctattgcaggcaccagaaaccattcaggaggtggggtgggggagcgaaacaccaataaaagtcacacagatcaaaccgggcaacatctgttaaggcaggaggcaccag

SEQ ID NO: 182606 - DNA, 129 bp, Homo sapiens
cagaaaatacattacaatcctttagtgtttggttatgtccatctatatttatcttacatcatttttaatggctaaaatgactatttttgaagtcaataaataaaaattaaaaaccaaaaaaaggtcaga

SEQ ID NO: 182607 - DNA, 386 bp, Homo sapiens
agttcattgggatttactatctgtaggatcatggtcatctgtgaattgaattgattttacttcttcctttccaatttggatgtcttttatttctttttcctgcctaactgctcttgctagaacttccagtacagtttcaaatagtagtggtgaaagtgggcatctttgtcttactccttatcttaggggcaaagctttcagtctttcaccattgagtgtgatgttagctgtgactttttcataaatgccctttatcatgttgaggaaattctcttctatttttagtatgagcataagtcctttcactctattaatgtgatatgttacattaattgattgattttcttatgctgaaccatccttgcatttctgggataaagtctacc

SEQ ID NO: 182608 - DNA, 199 bp, Homo sapiens
gcgcctctgcattccagcctgggtgacagagcaaggctctgtcaaaaaaaaaaaagaagaaaagaaaatgaattcactattgtactctttctacagtgtctttatgcgtgagctttatctttaattgtgtatgagtttcagctgctctaaaggatgctgtttgtttgaagtgtcttccctccaatccactaaagtaaat

SEQ ID NO: 182609 - DNA, 118 bp, Homo sapiens
gatatgtctgcacagtctccagctctggccactctaccaagctacgcatctcattccagttgccccctagtgccatcacaggaatgctcacattctccacaacccgcactttcctcct

SEQ ID NO: 182610 - DNA, 454 bp, Homo sapiens
agaaataaaggcccagtttccttgagagggtagatgaagtaagatgttggggcctattactgagatgagagattacaggaagagagggtccttccacctggtcaaagtgaatacctcctttgatactatgggttctaatccccacatctcttcagggaccttcttaaagcacgaatttttcctcttcttgtatcttcagcctcacccttttttgcctcccaagtctctgctgctccatgttcactaccatccctcctccagctgctgccttttcctgcagcctcactctgctccaccctggacatcatccttctttcttcatttctccaaagttccactgacaacagattggggcctgctacagacattttcagaaagattggagtattatatgttaattgctactcaaggaaggaagcaacaattgaacctcagacattactattgcaagatt

SEQ ID NO: 182611 - DNA, 581 bp, Homo sapiens
gctagagattggcgcccaatgaatgctagtattaatgaatctgttaacaaaggaaagcttaggacactttgtgtttccccaaaagaatgttttaacttcagacacagaggccacgcagtggggatgtggactggaatggtattgcctgtgaactatgacctggcacaaagtagcttatcagtaatgtttgccaatactgtttttaaagttccagcagccagtcttcagaattgtcctctttcctgtggccatggccatgatgacattttgttcatgaattcatgcatgatttatttattgagcatctacctctgggaacatgagatttgtttgttttctccaagagtgagtgacccatggggagccatgggttcctgtgtccaagaccagacattctcagggagcatctgcttcccccatcaggaaggaacgagctttcatacctagtttaagttaacgaacccagtgagctatgaacagcctccttgccggctgttgttcctccctccagcctgtcctgcccactgcagctagacagagcttcctaaaagcttgctttcatcctgtcacttcttactcga

SEQ ID NO: 182612 - DNA, 316 bp, Homo sapiens
taggactgcttttcctgcatcacatggttttggaatgttgcattttcacatttatttgtcttactccctaatttccttattgaattcttccttgactcgttggtgttcaaaggtgtgttgtttaatttccacatacttgtgaattttagttttccttttgttattaatttctagtttcattgtgttttggtcagaaaaaatatttggtatggtttcaatcttaagtttattgggtcctgttttgtgatctatcatgtgatccatcctaaagaatgttccatgtgtgcttgagaagaatgtatcttctcctgatgtt

SEQ ID NO: 182613 - DNA, 408 bp, Homo sapiens
cgtgagaggcccggagggagcaggggaggtggagaggagctttccccagtggagctggcaggaagagtcccaggtgcaaggagcgcattttagaattccaggactcgggaggaaacctgcaggatgagggctccccttgggggcggcctgcatttctcagcgggaaggtgggtgtgggtgcccctcacatcacctggcgtttatttttgcatgtgtgaaatataacaacaatttcctaggggaaaacaccctagggtgcacaaaagttgtaaaaatgggaacatatggtccgaaactcactgctgaataatgtgctgtcatgaaatttacttcaaaaaccccctcacggagtacaatcttgggtagatgaaggagaaaaaaagtaaaaatgaatttaaaaatctctta

SEQ ID NO: 182614 - DNA, 368 bp, Homo sapiens
ctggagtggcatataactctacattagggctgtcctctctgagtccctgaccttagatggtctttctctattttggcacatatttgcatatcagttacggtgacatatttgataaataatgggcctcactgttttttggccagtgaaaaactattttgctattatcctaactcttagtttctgttattgtcttcgtgtctcaaaatggtgtgcttttactctttttttcttgatttgtcgattgtattatcttctattatggtaggtaaaaatcatgctgtcttaacattcccacatcatttttctcccatcctttcaacagttatataacccaattttttgataattcactgtttacactatttaac

SEQ ID NO: 182615 - DNA, 209 bp, Homo sapiens
actaaatgagataattcatataaaacacttagcacagtgtctggcccgtagcaagacctcagcaaatattagctattattattgttgttaacactgtaccagatggcccacaatactcaaaattaactagaattaaggaagatggggtcataagaggagataaggaattagaaacagaagaagagggcagaggtgggtctgagagagaa

SEQ ID NO: 182616 - DNA, 358 bp, Homo sapiens
agatgtgccacggaaataaccttccaaatactggactctgtcatctgtctgaatcaattcccaaggacggtgaggtcagggcattgttccttcctaccaatgagtgggctgcggaaatgatgtgcagagaacagactcccgggtctcatgatggggacaaaggtctcatgaaatgaggtctgacttgcattggagaatgagaagctcagcaattctgggctcataaataaaccccctatttactgtcaatttttttaaaaagaattcagtctagcattctagtaatgtaacagaacacactagtcttggcaggaacagaagacttcattaagatcaatgttccccactggctgacaga

SEQ ID NO: 182617 - DNA, 356 bp, Homo sapiens
gggggttggtcatataggcatggagcatccacatggctgactttactcagtccccagcctctccagaagtcaaactgatactatgtggcccaaggctgcaccgtaactcacattgttagcataaactatttggaatggcccaaggccccagataaagaaagacactcttatcaggcagactattctacatgtgtaccctttgtttaactcccacttataagtgagaacatcagtatttgactttctgtttctgagttattttacttaggataatggcctcaaattccatcaatgttgttgcaattgatagaatttcatactcgttatagctgagtagcattccatggtccatatat

SEQ ID NO: 182618 - DNA, 220 bp, Homo sapiens
ctgtaagacctatattcacctcatggtgtcatatcccaattacagtttcagttgttttcaattgttcagctcagtataagatcagagagaagacaccataaataagtgcacaatatactgagtttgatagaattcctcatggtccagagaagccaaaaatcagagattattcattttttttatttctaagataaataatatatgtgcttttttttttttt

SEQ ID NO: 182619 - DNA, 593 bp, Homo sapiens
tagagacagcagacccaggttttctgactcacgtcacatagaactacccctagagaagaaaactggatcctaggcatgagtcctctaaggcttgcagaaacactgagccagtcaggtacggtggggagaggggccaaggggactttggctgaattgccttctagccctgggttagtcagagaccctggcaaccggtagatactggctctcagccagggacacacatcagagtctcctgtgacacttgctaaaaatacagaccccccacctgggatctgctgaatcagcgcatgggcaggtgggtcaggcatgcatgtgttccaaatgctccttgtggctctgacaggtgcccctggagaagagccaggtaggcacagcagtggccccaactgcctgttttgccccgagcaggaaaattcctcttggtggtcccgttttactgtatgttaaagatctgtggctcttcaaggggagtcctaaagttttcagagtaaatggacagagtaatgatccatccttgtttacccagtaatggttacagccaatatttatagagtacttgccataggcaaggtactattcctagcatttta

SEQ ID NO: 182620 - DNA, 128 bp, Homo sapiens
tcatgcaaggtttaggagcatggggcctgggtcagacagaactcatagtcttctttctgtgtgacctgttaaggtgattaattccctaagcgtcatttttctcatctgtaaaatgaagtacctaaaag

SEQ ID NO: 182621 - DNA, 706 bp, Homo sapiens
atatcttacttagctagagttgttggatcttgagtgtgatctgtgatttctttttttttcttttgacattaccagggcctgctaattttgtatttttaatcctccagcattcatcttgctttttcattccttccgatgaaaccattcctaatcattatgacccctaaattgtaatcctaagtagcctccccggccccagtgtttcctacttgcagggcatcctttcagagcgttttgagagcttattctcaaaatcggctcttctccaatgctgctgtcccatgtcagcagtgcccagcgtatgacagatgcagctcccttaacacacacaccagacccttgcccagctcacgctaatctgcttccctgatgccgatgcttgctggctcctggtacggacctcccggggctcttctcacccagctctgtgtcacccactctgctgctgcctctttcaggcccctgagcacgttctggctcattgttttatttggcaggtttttattaaattcttctgtgctaggtactgttctaggctctggtgatgagagtcactgcccccggcggctaacaccgcagtgacatcttcatggaaagtttcctcatctccatcctgcctctcactgcgctctgcgttggtctgaatttgctgattactgtctgctgcctggcatgctgtcctttcaacagtgtgtgtcttcctctt

SEQ ID NO: 182622 - DNA, 518 bp, Homo sapiens
gttggaggcagggggtcttgctggggatggtgtgcagagggtggttggtgcaggtaggaagaggttccaagcaccttgttaggcttagtttctgtgctattatcttagggctagacttttgggaggggttgtacttgtacttcagtttgtatgtgggtcatgtttgcaccatagcgggtgtggttattgacaactgtgtttcccggtggttccccttccagcccatgctcaccagatgccattagcaagttgtaccttctctaataccctgaggtttttctgagaaggctgcagaaataccccctagaacaaagaagtcagcaaaaacaaaacaaaacaaaaaacaccacttaagggtaagcacacaaacacatacaaatataaggacatacatcataggtattgtaatgttccaatcccataattttggaatgattacataggtggaatacagaagtatccctgcttttcagcatgactgcccttgatgactcatcaaaaaacagcagtgctagtca

SEQ ID NO: 182623 - DNA, 388 bp, Homo sapiens
agtaccagatactgctaatttcaatttaaacaggagacacaggggaagcttttgtgagagtggctaggaatcacacagcaaaactaccaccgatgatgtgtctatttatgtaccttcatggtcttaactgaatgagagcaccattggttacaataccccatgataactctccctacttaggtttcagacctcttaggttaagccttactctttttcttttgttttgttttgttttgctttgcttttgagacagagtctctctgtcatccaggctgaagtgtaatcgttccatctcagctcactgcaacctccccctcctgggttcaagcaaatctcccacctcagcctcccaagtacctgggattacaggcacccaccatcatgccca

SEQ ID NO: 182624 - DNA, 490 bp, Homo sapiens
tcacgcctgtaatcccagcactttgggaggtcaaggtgagaggatcacttgaggccagttcaagattagcctgggcaacatagtgagaccctggtccctatgaaagaaaaatgtttttaatttagccaggcaagatggcatgggcttgtagttccagttacttgggaggctgaggtgggaggatcacttgagcccaggattttgaggtggcaattagccatgatcatgctactgcactccagcctgggtaacagagcaagactctgtttctaaaataaaattaaaagtaaacaaataaaagtaggtgcaaaaaggtcatgaaaaaatttctccagaaggctgggcatggtggctcatgcctgtaattccaacactttgggagggtgagttgggagaatcacttgacaccagcagttcttacctgcctggacaacatagtgagactctgtctctattttaaaaaaaataaatacataataaaaaatataaa

SEQ ID NO: 182625 - DNA, 175 bp, Homo sapiens
acttgtgaggagaacatccaaaagaaagagctgcaatgctgcctgtgatccttcttctatgtacacatgagcaacgtcatactacaaaagaccatccatttggtcaaactatcttttttacacacattttgataatacaatatcttaggccttctagatatgctcagattcaaat

SEQ ID NO: 182626 - DNA, 262 bp, Homo sapiens
agctgggactacagacacctgccaccatgcccagctaatttttctatttttagtagagacggggtttcaccatgttggccaggctggtctcctgccctttggtgatcaacctgccttggcctcccaaagtgctgggattacaggcatcagctaccacacccagccgttgcaccttgcctgattaattccacttggctctagctagtatctggaaggacacctgggaggaacacttcaaacagctgtcagtgcagtgttgttg

SEQ ID NO: 182627 - DNA, 304 bp, Homo sapiens
gggtctcgctgtgttgcccaggccagtccgggcaatatcttgtgtgtcaggcccctgtgtagtgggtgtgctgacatacaattctggcagcattcactgcaacctggacgtgggggctgctcactgggaccccacgcagtcctccctcctttcccaaggggtggtgttcactcagagacactcagctgatagaaagagagctctgttgtctagacacaggctgtgccccaaaactgaggaactaggccgggtgtggtggctaacacctgtaattccagcactttgggaggccaaggcgggcgga

SEQ ID NO: 182628 - DNA, 338 bp, Homo sapiens
agataaggttaaatcttagaggtcaacagtcatggtttcaaatctcaagttcatcatttatcaactatgtgattgtgggcaagtcacctaaaatatctgagcttcattttcctcatctataaaatgggaatcaaaacagaacccacctaatgggtttgttatgggaattaaaagagagaatgtatgaaaagcgacaatatagtgacagaaagtgggtcagtaggtagttactatggttagtaaaccagtgtgagtcatctgcttttgttgaaaggtagatgagatgcttgtggccatgtgggaagaattaatttaagaatctggtcattttactaagg

SEQ ID NO: 182629 - DNA, 501 bp, Homo sapiens
acctatcacctaggtattaagccctacatgcgttagctccctcccactgcccctgcagcagatcccagtgtttgttgttccctccctgtgtccatgtgttctcattgtccagctcccacttgtaaataagaacctacggtgtttggttttctgttcctgttttagtttgttgaggataatgacttccatgaagcttgagttttcattctacaatttactgaatgacatttgagcagctagctgactttttaatgccttgattttaataattcaatgagttattgggtgagataatttagaacagcatacatgatatcgttattattagtcaataaaatgctatttatcttatttattactcataacaaaaatatgtatatgacccttcgctatgtttgaatatgtgatatattgaattgaattcactgtgaggcttcagtaggtacctataatattcaaatatgttacctgaaagctgtgaaaaatatatttttaaaaatt

SEQ ID NO: 182630 - DNA, 386 bp, Homo sapiens
tgtggacctctactactgtatctagggtgcaatatggactgcttgtggaacatgtggaaaagaagtagttcttgacttgtgaaggatttcggtagggagagagaaacaggaaatgcatgcctggcaggggggcatctcaagggttattgtggatgcagaatgagtgtagcatttggcatttcagcatggctcaatggatgggttggttagagaggcaagcaggcccggattatcaaggaccaggagtgccaggccaagtttgtatcaactctgcgaatactgggaaacacttaacatttcttagcaactaagtgattcatgaagaaagcctgttttatagaaacttagtcatctgacccactgctgttaagattttagaagggaga

SEQ ID NO: 182631 - DNA, 635 bp, Homo sapiens
ggtgggcggtcctccatacggggtgccggcatgacgttgacaatttcttactttactgagtcaagacacttttaaaaaagcaattaacatctgttatcacagtaatttcatgtacaaacaaacaaagtttctacacctaaaaatcaaaaaagcccaggaggggaaaaataactcatgtaaaaggaatgcttttagctagctttaggaaaagctaattacattatttgggacaggggtaatagatgaaaagggttaccagaccactatcaattttatctcagaccatcatcagtccaaagacctgaatttgggaaacattgctttgtgttttaaagaaccagcatttgtactgtgttctatggttgacaaaaaaaatattgcacagatattttatttaactctaagaaaaaaaaaactgcccagagaggatgatactgtctatttaatccaaaaaaaatttaagcttagcccaaatgcctggaaaatgacaaagccaaaccttaaatcagaatctctggccccaaatatcaaggtctttccactacttaagccaccattcccttctgacaaccaacagggcctattcaaccagctctgggcatacacactaatgatgctctttcacgcctgttcaa

SEQ ID NO: 182632 - DNA, 535 bp, Homo sapiens
ctaatggttctcaaagtgcggtccaaggtcctcaagaggtgaggtgaggtgctaggattttcatgctttcagcaaacagcacatcctaacagattgaatgcagaagaagagaatccagctgtcttcatttaagccaaacattaaagagatctgaaaaacaatatcgtacttccacattttttgggaaaaaataagttatttttctttaaaatgtgttctgttactagatagtgggtttattactgtttttaagtgactacgtttttgtttgtttgtttgtttgtttgagacagtctcattctgccacccaggctggatggagggaggagggaaggtgctcagaataaacattcaatgtccctgagcattcctagatcaaccggatcaggatctctgaaggatggggctcaaagattggcatttgaaagaacacccgtggggatcctgatggtgcaataaagttgtagaaccacctcactaagtgctcccaattccttttacaattctctattattgcaatttaatcctttcactt

SEQ ID NO: 182633 - DNA, 300 bp, Homo sapiens
cagacccctgcctttgtgaaccttttcttgaaggaaagagtgtgggttggggccacttccagtggaatcaccaggaggggagtggagggaggagggaaggtgctcagaataaacattcaatgtccctgagcattcctagatcaaccggatcaggatctctgaaggatggggctcaaagattggcatttgaaagaacacccgtggggatcctgatggtgcaataaagttgtagaaccacctcactaagtgctcccaattccttttacaattctctattattgcaatttaatcctttcactt

SEQ ID NO: 182634 - DNA, 499 bp, Homo sapiens
atggtgggagttcagctcattgcaacctccgcctcctgggttcaagtgcttctcctgcctcaacctcccaagtagctggaattacaggcacccaccaccatgcccggctaatttttgtatttttagtagagatggagtttcgccatgttggccaggctggtctcgaactcctgaccaggtgatccacccactttggcctcccgatgtgctgggattacaggcatgagccaccatgcctggcttctttttccttttcataaagtatgggacatttaaaatttgccaagttttgcttgaggaagttagatgttgtgcagtggttttgcagcatgtattttggctcttgggcaatgacgtttcatttgcagaagtttagatgttgattgaaaatcaacagctgacgttaaacaaactggtttgagtaagatacaagcaaggagctcctttcacagaaagggacagttctgattcaagcttggagctctcagctgtacctcag

SEQ ID NO: 182635 - DNA, 387 bp, Homo sapiens
tcatctattaaagccatcttttatattaagaaatgttctcttttctctggatgaacgacctctaatgaaaattccaaaagtaagcacactgctggtatgtgtgtgtgtgtgtgtgttagtattttatttagcattttttaatttgagcattttactagattggtctgtattatattttcttattttgtccatgcctgtttttggttgtaaaaatttatactagcctaaaaaaaatgaatcatgttgtagtttatagagtttttacaagatcagaattatctctttcataaggtagagcagatactgttaatgtctcactaataagcattctcccctcatttctcagcaatagatatctatctagacatatgatcactcagtataaag

SEQ ID NO: 182636 - DNA, 306 bp, Homo sapiens
cagatttgaggataagaagcatacctctgccatattctaatgagatgatactgaatagttatttaatcttagagtgattatactatctgttgtccagtttgggacatagtcacttaagttcttaagtaagaggagaggggctgctaatattaagtattccaggccaaaaatataaactgggactgccctagacaaggatcacctttctttttaaatttaaaatatatataacaaaaatttcctcttgtaatcatttttcagttaagtggtacagtttggtggcattgagtacgttcatattttttg

SEQ ID NO: 182637 - DNA, 278 bp, Homo sapiens
gaagggtcaaggctgaaagaatatttacacaagaactccagcagggaattaaaatgtaccgtatgtttttgcctttcaaagcatgattccctttcctgtttttgttattctgaaattaaaaacatttggccggtgtgccaggcagcaaaagcagcagacagcctaggtcaccaacacccctcatgccatgccagcagaaggcaatcaaaacatctctgacttcagatcatggctaggctttgggcttgacaacaaattaatgtatcaccattacatat

SEQ ID NO: 182638 - DNA, 480 bp, Homo sapiens
tcccagaaacatcaaggtttgctaaaaacagaaaatcggaagtagaacaaaaaaagcggtgggaaaagcatttaagacattgaggcaagccgtgaggagtttgtcagtctaaaggttgagtagaggacctttaagaagagggagacaaacattaaattttcaactttctgtagtttgatataatactttccaagttctagggtttcattaaaacttcacaagcttttggattttttaacaaatattagggctgtgcttcatgcttgggttaatatggggtgaatagaaggaacagctggggaagaagagataagagacagattctctagtagaaattaggagaaacgtaagaatcctatacatctgcgtatatttgaggagtctttagagttcactgaagttcatggatcggacgttatagccattttaatgtattttcattgtgacaggattgactttagaaggcttaagaattttgac

SEQ ID NO: 182639 - DNA, 436 bp, Homo sapiens
cagtggtaacaacgcagagtacgcgggtagttttcctattgatttccaaaccctctttgtaagacaaggacatcacagtgatttaagatttctttggcagagttcttcacactggactgaagctgagagccttttggcagggatatcggctgagaggaggctgttttaaatcaatcgcaagttgagaagggctccaaatagggtcatatcagaggaataagaaatacattcaaggactctggtgagagacttgagataaattgggatgaaggaaagaaaggacaaagatgaactcaaagtttctaacaggaaacagaaagactggaggtaaccctgatagactggaaagaagggccaatttggaagggaagatcacaactcaatgttgtagatggtgactctgaaatagtagtgcatcttcaaaagaagatgattt

SEQ ID NO: 182640 - DNA, 472 bp, Homo sapiens
gacacacagaggcagttgctgaggccacagggagctctggggctgggaccgcctttcagagctatcctgaaaaaggcaagggatggccctttaaactatcaccccagccagggattggctagagactccttctcctgtcttccctgggaggggccataaccttgggccacgcggtacctgcagcagagagtggttctcagtgagggacagcgtcagcagcagctggtaccccagccctgaagagggggcctgccaggactgtgtgaagcattcgagaactaatggagaaccaaacagaattgcagcccacatggggctttggggctatatttggtctctgtttacctatttggtctctctagccagcttggcagcttccttgggtcagaatgttctcattagaagagctcatagttggtgcttaataagagtctatcggatttcatgaccagtaatgcacccaggtcccttt

SEQ ID NO: 182641 - DNA, 544 bp, Homo sapiens
tcaaagtgtgagatactggcccaggcacagtggctcatgcctgtaagcctagcactttgggaggctgaggcaggaggatcgcttgaggccaggagtctgagaccagcctgggcaacatagcgagaccctgtctttatgaaagaatttaaaaaggaaaagaaagaaagtgggaggtattggtgttaagtccattctttatcaaggaggcgaaattgtacatttgaatgtcagaaatccacaattgtctctttttctttgtgttccctctgtagcaaatcgcagtcttctccaggctgacaaggcgaagggcatggcttcgaagtgcaaaagagtcatcatgaaacatcatgaatcatgaatcattaggcgtcttcccttcgctccccacttttttttttttttttttgagactgagtctcgctctgttgcccaggctggagtacagtggtgcgatcttggctcactgcaacctctgcctcctgggttcaagcgattctcctgccgtagcctcctgagtagctgggattacaggtccccgccacca

SEQ ID NO: 182642 - DNA, 472 bp, Homo sapiens
tcgggggtctttttgggggtcccccccaaaatggggttccaggggggaattccttttcccaaaaaaaaaaaaaaaaaaaagcaagaagtaatgctgtcttacattaacttataagtatttaccttatctcattcaacccttatagcagttcattgagatagatattatttgtgttaaactgtactgccacattaaaagcatgtgctcagtgtctggctgctgggtttttttaaatcttgactctgccacttgcactaactgtatgacctttggtaagttcctgacacattctgtgcctcaatttcaccattcttccaagtgggaataataatagtacctaccaccacaacagtatgaatgatgcatgtaactagtttaaagcagtggcacaggccaggtgtggaggctcatgcctgtaatcctagcacattgggaggccaaagcaggcagatcgcttgagcttacgagttcg

SEQ ID NO: 182643 - DNA, 864 bp, Homo sapiens
cagttattagagtaatacctttaaagtgattgtggcatattgaaagtcctcaataaatgccagtttcctttctttccttaaaaatgaaaccgtggaatttcatgctcattgaggcatcctgaaccatagaaaagcgctcaaaagcctaacaaatgaaagagcaagaagtggccgggcgtggtggctcacgcctgttatcccagcacttcgggaggccaaggtgggtgggtcgcttgaggtcgggagttcgaaaccagcctgaccaatgtgctgaaaccccctcctctgctaaaaatacaaaattagccgggtgtggtggctcatgcctgtaatcccagctacttgggaggctgaggcaggagaatcacttggacttgggaggtgcaggtggcagtgagccaagatcccaccattgcactccagcctggacaacaagagcgaaattccatctcaaaaaaaaaaaaaaaaaaaagcaagaagtaatgctgtcttacattaacttataagtatttaccttatctcattcaacccttatagcagttcattgagatagatattatttgtgttaaactgtactgccacattaaaagcatgtgctcagtgtctggctgctgggtttttttaaatcttgactctgccacttgcactaactgtatgacctttggtaagttcctgacacattctgtgcctcaatttcaccattcttccaagtgggaataataatagtacctaccaccacaacagtatgaatgatgcatgtaactagtttaaagcagtggcacaggccaggtgtggaggctcatgcctgtaatcctagcacattgggaggccaaagcaggcagatcgcttgagcttacgagttcg

SEQ ID NO: 182644 - DNA, 357 bp, Homo sapiens
gaaaccaatccatgtgagcaatatttactgaattatcttcaacaggtaaggctacaatcaagacactatgggcagaacaaagatatatcagacattcagtccttagaaggcaagcattttcatgatcagatatgtatactttttaccttttccccatttcaggtacatgacaaagaaccacagatccaatcctattcgctccacttcctcacttaagatcacaaaactagagaaagacagaatgggtctttctaaaattcaaagcatcattctaaaaggagagaattttgacgaaggcccttcaagccctttcagaaagtgaatatggagaaattaatttactgtgtgattggtgga

SEQ ID NO: 182645 - DNA, 194 bp, Homo sapiens
gacaggaacatccctctctttagctagactgaggtgccgggcactgtcctgtgggctgcccatggaagaacacaggatttctgttaatcccacaatacctgtgatgtccaaatgatggtccccacctgacagcccaggaaaccaaggctcacgctgagtaagaaacaagaccagatccaaatatacacaaaggg

SEQ ID NO: 182646 - DNA, 387 bp, Homo sapiens
gaaagtgaaaatacggtttttagttggggtgggatggaattgtgatactgtagttggtagagctgaaaatgggtttgagaggaatggagaagaaaatgactttgagtttaaaccatgtttgagattccttcagaagatctactagtagcagtctactaggtgattgagtttgtggatattggccccagagttagactgctagagataagtagacttgttttatatattgggttatgggagtttaactctggaagatgatgatgttggggctggggtgctaagagtatagaaatcagtagtagagaattagtagagtaggatttgtggaagccaagggaaaaggggacatttctaggtgactagagtgattgccagatttatatactg

SEQ ID NO: 182647 - DNA, 244 bp, Homo sapiens
acacacatacacgcacatgggtgcacacgtgtacgcacccacattcacacatgcacacacatgcatacatgtgcacacattcacacgtgcgcacatacacacattcacccacacatacatgcgcacacatgcacacatacacatgcatacatgtgcacacacatgcacacacatctacttccaaatacgctgtgtatcaccttccgtgatctgggcaagggaattaaactcatgggctctgggt

SEQ ID NO: 182648 - DNA, 114 bp, Homo sapiens
gaggcctgagggcaggtcgggaggctgcagctggcccacggggcaggggctttcctcccagaccaccctcctgctgacctgcagcaggagctgacctgcagtggggagattgct

SEQ ID NO: 182649 - DNA, 379 bp, Homo sapiens
cagtcataaattaaatattgctcaagatgagagtggacttaagacaatcacactgacaagaaaatactaaaaagctaataacttaatcattgaaccaggagtcagaaaatctctgaaaaaccctaaacatcagttgcagcaaaggagcaacatgaggccatttagcacgggaacactcactctgtattagcctgtgcaagcatcgattcacagaagagcataacagatacatatgaagatgtccctgagtcagccagaaaatgtttgttacgctcaataccagtctggttaagtaagaaatgaggtaatgcattttagaaatatttctgtcaaaatggttaaagttaaaaattggggtgtacataaaggagacaagcct

SEQ ID NO: 182650 - DNA, 451 bp, Homo sapiens
tgacttctcaaatctgtaaaagaccgatcgaactccccactttgtcttgcattctttacctccctgcaaaatgtttcctatagaaatcctttcaccaaaagcctaggcagtcaatcaaaaaagctttggaagaaaagcaaaaatagatggtgaattgtctatgaattctaatcactgcaaacatttgagaaagagggactgtggattctgtgaaaaaaactggtatacaattatatcatgtttcttacaaaaaaaaatgaacatacaaaatccaagttgttctttatgcttttagcatagttgatggagctaagatggctgtgcgggctatagtgggtcatctgtttctgcattctctgcaccggccttcatggctggaatgttcattttccttcatcttccccacagctcatgactcccccaagacttggaatcatgtgttcccctctca

SEQ ID NO: 182651 - DNA, 687 bp, Homo sapiens
gcgatcctcccacctcagcctcccatagtgctgtgattacacacatgagccactgcacccagccattttatgacctttacaatgctggccacccttggaaattctattttatttctctggcgtttctctactggaggtccattcatgagagcaggggcacagtctgtcctgctcagagattttctttagcacccacagcagtggcgtgtagtagaaatagattgagtaaatgaatggatttcgagtgtttggtgcttgtagaatgaatgaatgagttatacatgactgggaaatggtgaataaatgaatatgtttttagggctttgttggctggaagaacttttttgagggatttataagaacatggtaggtgtttgttgtgtgagtgaatggatgaatggatgcattttaaggactaactagttcttcctggataaacaaatgacttgtacgtgcccagaaactgctgagtcactggatgcatgcctggaggagtcctcattccacctgggccttagagaggaaccctcggacttgatgccacatccctgagccctccagagtgcttgagccccacttagcctccatggccgtgactagatcatgtttccctgaaagggagatgcttggagcacatcagggcagccctgaacacccagggggtccctctacctctaagcaaaggcc

SEQ ID NO: 182652 - DNA, 375 bp, Homo sapiens
aactgagtgaggtcctgtctcttaacacaaacaaacaaaaacctttggacagcaaaagcccatctcctcttctcctcaggcacatggctgcctggctggggactacatttcccagcctcccttgaggttggctgcagccacatgactgggtcctccccagtggcttgcagttggacatgacttgcgcaatttccactttacctgctttcaaggaaatgtcttgctctgaactttctcttttttccctttcaccaagtcactcagaggtggcacattcaattatgcaaatgctgacagagcatgaggtcagtggctctcaaagtgggcatcagaattccctggagagtttgttagggcacagttttctgggtcctg

SEQ ID NO: 182653 - DNA, 401 bp, Homo sapiens
tgctgattgacattatgacaaaacaatattagcataaactgaggacttctgtttagctaatgacttaaattgaatacttcaactcagcaaatcaagaaacaaatgctttacagtacagaaaatgatgtctgtgaacatgcatggaattcttgaaactggaaactgccaaaaagatttaattaagtacaagaatgaattctagcagaaaggtaatacaatttttaaaaagcagttttatatcaatttaagcaattcaaatgttaaataaaatattaatttgcaaaatttaaaaccagttctcatatcacaatgctacaatttattgcagactgcttcacacatatgttgcttttatttataagtttgaacaaaaatcttcaagttaaatatgtataaatctg

SEQ ID NO: 182654 - DNA, 539 bp, Homo sapiens
catattcattgatcagcaaaaacagtagagctttatgtttgtccagtgacttaggaaattgtggcaattatattatactccgctgataaaattgaggatgttaccagcttgaatataaattactaaagtgagagcaaaccattttcaatgttctgtaaaacagagtaatactgatctgcctaggtaaatttttttccctaggagcttctgatgaaaaattgtagcaaaggcagagagtagcaatgaaatgatagagcggatgctgggattgaaatgtgtttcctctttcagtctactttttaaaaaggggtttatttttcaataaaagaagtttgcattgggggaaggggacaaaaacaattattttcagtttctgtactaagttaactgtgattaacattttggggtatagatgaacatttttttctttggatacacatggaaatgtatatacttttaaatgttttttccctaactgtgatgatacaacgtatgctcctctgtttaaagttctgtttatttttatttggcatttattg

SEQ ID NO: 182655 - DNA, 594 bp, Homo sapiens
agttcaaataagcctgaactcagcatattgaaatgattacaacttaaaaagttgtggtctttatatgggcacttgcttctattttaagaatggatatccattaggcaaatttaaaaaattgaaaggcttcatttgaaaatcagacttacacatgtgtcccatatactagtaattttttattttaaagtcaaatcatattttaaaatagctattgggtcttattaatttatttaataaatcaagtccaaaactgttataaaaatagcagtatctttgaaatagtactttaaggtaatgtatgttttggttttgagttgcaaccaactttttcttgtactgataatttagtcatgaaaagaaaaagctcaattttctaacgtttctaggcatccttgacattttaaatgtaatgaaatattcttgcaatccatttccaattacagaaaaatgtagaaaaacatatagataaaatatggaaacagtaattttatgtaagtaacatgatattgtaaatgaaaagttgttagaaaagaaacttatatttatgttttctttactatttctacaagacactttaggaaagcttacaataaa

SEQ ID NO: 182656 - DNA, 519 bp, Homo sapiens
ctcggaaccttggggtcaccacctattgtcccttggagaatccacaggtctccagcccaggatgagggctcatgagggccacaccacccagcctccagggcagctgtcttcatcctcaaagcatttcaacccagggtcctgggactgtcattctatttctaattctacaatggagctaagtcagaaagcgtgctctgtttgaagggcagcttagcattacagatgtattatatgatctgaaccctggggaacatctataaagtggggacgtcccagagacctgcggccttttccacctgagaaggtgcctcagccgattcaaataagaggatgttcctgtgttcccttcccaagaggatctaccaggaacttcagcgacagctgttcccaggacaccctttattttatgctgggaggcatcgtcctccgtggaccactcatttggggttagctgcctgtagaaccgattcctgggacaaacccgttgtcacgtatccacagaatggaatgctgcatgag

SEQ ID NO: 182657 - DNA, 915 bp, Homo sapiens
ggcctatgcatatattgttttctatttttaccatctgtggtttagattactggaagtaatattactaagtcaaagagtagatagtgtatttttgctgggtattgctaaatgaacctgcatagaaggtataccatgtgttagaaatgcttgttcctcggtgctgtaaagaaatagcacttgaacattaatttcctcagcaaggccatttttactttctgcagaaagggtacacttaccagcagttttgccatgagagtacaccgaacaaaggagacagggtcatttataacctgacgcatccaccctactgctgtgtctggtttccattggctggaacgggacctcacattctgtatttgtcccgattggctagcaacttagaactttttaaaagaggcaaaggcagaggagaacaaaggaaagaggaagtaacttgtggaatgctgagaaaggtaaaaaccttcaaataaggaagaggaacgggctatgacctaatgcttgcttggactagtaaaagcatgccagggcagatatttaggctaaagtgtgggagctaagaacataaagtacattgatttctttattatggctagcagatatttaagaatgttagcacaggtctttgaataaattttgctgctaagagaagttactatttattcctaattagatggggaggaaagtttttgaagaggaaactctcctttggtttttacacatgtatgaaagcttccctacagcctcactctcagaatatgttgtcaagcttttggattttttcagtttgatcgggtgggaaatgatatttcaatgtaatttaaatttgcacttctcttagtataagcaggtttgagcattttttcatatagctaagaactatttgtgtttctgttctgtgaatggtttgtaaggttg

SEQ ID NO: 182658 - DNA, 384 bp, Homo sapiens
tttatgggctcccatcactaaaaagtctagaggtagtcagtttcaggcaagctggatccagaggcttaattgatatcatcagaactaggtctctctccctcaatctcccctcagctctgcttttatgtgtgggcctcacagttaggtgggattcctccacatggtggtgcccagactctcttaagtttataccctcctggtttaagcccagaagaaagacgaatgctcctttccagttattcaaacaaaagtcccacaaatgtatttcactggatcaaattggatcacacgccaccccagaaccacttactgtggcagtgattgtagtgcactgattggctaagcctgagtcacatgtccctccccttcccgtggagccaggaa

SEQ ID NO: 182659 - DNA, 555 bp, Homo sapiens
tggaaaacagtattgcggttcctcaaaaaattaaaaatagaattaccatatgatccagcaattctacttctaggtatatacccgaaagaattcattggccaggtgcagtggctcactcctgtaatccagcacttgagaggctgaggtggctggatcacctgaggtcaggagttcgaaaccagcctggccaacatggcgaaaccccacctctaataaaaatacaaaaattagctgggtgcggtggcacgtgcctgtaatcgcagctactctggaggctagggtgggaggatcgcttggacacaggaggcagaggttgctgtgagccaagatcacacctctgcaatcctgcctgggggcgacagagcgagactcaatctccaaaaaaaaagaattcgtaactccattattcacaatagaaaaaaggtagaagctatccaagtgtccaccaacagataaatgagataaggccaaagagatcaggcaagtggcctttaagtgcaatggaaagccactgaagaattttaagagggaacataatccccgtaagtcatattt

SEQ ID NO: 182660 - DNA, 276 bp, Homo sapiens
ctacaaaaaatacaaaaaagctgggcatagtggtgtgcatttctggtcttagctactcgggaggctggggtgggaggatcgtttaaagccagaagtttgaggctacactgagctatgatggcactgcacgctagccagggtgacagagtaagaccctgtttcttatttaaaaaaaaaacaaagggagaggggcaaagtgctgggattacaggtgtgagctcctgtgcccagcccagatgcttggtttacggtttggtataaatgtacccacagtaa

SEQ ID NO: 182661 - DNA, 540 bp, Homo sapiens
tatacttcaagcttctaaacggtgagacatttctgacaaaacactgccccctttggccacagtgcccttccttcgggtcccccttggccaaacacttccaaaggtcaatatcctcagtgttatcaccagaaccagcacaacttccaaatcatgaattcaaatatcccactatccaaccacactctccctttcccactcatttgtttaaatgcctccttgaaactcagactaccaattcacagatcctcccaacttggccttccctctctgcatctgcccccactggcttgactttgtttttttttaaattcagcttagattccatcatgacaacagcttcctttcgaataacctcaagtcccttgtcactctctgagcaacagacaaaccgaaccatataccctcaggcctgtgctcatacagcttagtattgctaaagagaaaaaagatatgggagcaaatcggagtcattacccactgattattcccaacctcaaatgggcctttgccacctggccatcctactactctccagcaagc

SEQ ID NO: 182662 - DNA, 228 bp, Homo sapiens
ccactctagtcattagtccagtgattaatgttaaacagttttacttataggatgatcttaatagattttcctttcaaagataatatggggagaattattttaccgtgtgtcttttgttcagaattgtatctgacacatttattttatcttatttttacttttgtcttaaaaatgcatacttagtcttcatttttacaataaagttatttttattaaatggaagagtgg

SEQ ID NO: 182663 - DNA, 287 bp, Homo sapiens
gaacaatttccaggagagcccacactaacatcagtggtcagaatgagggagggtctgcaatgtagaaagaagagcatggagggatctggaactgtcattctggattcttctatagtacttgaagtgttcacagtatgtgagtattcatgctttaattatgttatttacttaataaaagttgtttgactcttcttgttaattcgtatttagatatctctggactttatgacgttttgaaagattgttacgtcaaagtttatcatttcattgttgaagaaagataacta

SEQ ID NO: 182664 - DNA, 395 bp, Homo sapiens
ttgagggcagtatttggactttgatcctgccttggcagcagctacagtgtgtgtgtaaaagaatcaaaggtataactaggaacagtggccagaaaactggccatgctgcagtaaaagtgattctggtccttgtgcaagtgatgagctccttcaacagacatacacgcagcacactaggaatttggaggtcccattcaacactagcacaaggcattctaagaactgccaggaagactctaatgtatctccttaagctgctgtcgacagcttgcactgtctgaccccaaaatattaaaaggaactaaggtcctttctgctaggtagtttatcaactatggttcccttcttttccatcctcaaagccacagcttctgagctgttttcttttattcact

SEQ ID NO: 182665 - DNA, 283 bp, Homo sapiens
ccctattaaaaaaagactaacagtagttaataaatcactaaaagaaaagagaaactatagtactgggattctgatagctcatgggtcacaactgggagaaaaataaaagtagattcattcagcccttaagaaggactgagtagagcaacaaattccctgtgatactccccaaactctaaggcacaatcctattcatcctaaatatacttataatagtaaatagatactcacagaaaaagtccacattttctccaactcctagtattagagtttcagaacctga

SEQ ID NO: 182666 - DNA, 526 bp, Homo sapiens
tctcattgatctaaggtaggtacggttgttattcccttcttataggttaggaaactgaggctcagagagattaagtaacttgcccaatgttacacagcttgtaagtggcatttctgtttaaagcttcccattttataaagttttgtgtttttaaatatgctttagaattttaagtttttactctgttattatttcgcgaagtcctatgtctacatacacatcaaagcaattctgtggttcttagggaattatttaataaatgaaatagccatagactgtaattacattatgagtggcatcttttagctgtgcccagcggtagcccagttgctaatctttatcccttgagtagtcaagtagataagaagtggataagcaagtggagtggtggccactcaagcaggcctccaccagaataattccaaataacttcacacagtgaattgcaacccactcaatccacttcactggatagcattgctcaaaagatattcttttactcttttatctaccttgttggcaagca

SEQ ID NO: 182667 - DNA, 438 bp, Homo sapiens
caagaggtaaaatatctaatcccaaattaacttgtgtagcaaggaagctacaggatagagagcagagtttctatactcttccattaactcctctggaaatacaaaagacaggacacctggaacctcccagaatgaactaggtactgtcttgggggagtttgggggctttccatgcccacgacaaaatgtaacatctggatcaggagacaggaaaccaaataacaggttctcctctcagccccaaatgagttataactgtaagcccgtgcatacaactttagagtttgctcagcagaactgcccctagcagttggcactcatacatagaaattactttatagagattttggctaaggcctgacggtgttcagagctcctgattgaggttgcgtaaacccaccgagtgtccaagaagcacaacagaacaggccctcacat

SEQ ID NO: 182668 - DNA, 381 bp, Homo sapiens
gttcgagcaggagggagctgttgcgggcagaaggcagccggctcagggagatggggagtggccccagagcaggcgggggcctggtgttttgggctctggcataagcatgtttgggaatcacctggtgtctgcacagagaggtccctctggcacagcccactatggggcagatcagagcactcatccaggccctgaggctttggaggtggccaatgtgatgtattctaatgatgggggccttttcccagaccggtgctaggagggaagaaaatgtcaattaagtgccactgccattgggtgaggcggtgctggaggctggtagcattgtatcttcaagcggggtacaaggcattggaggtgtggcagctggaagggggctgg

SEQ ID NO: 182669 - DNA, 297 bp, Homo sapiens
aggaaatccttaaataacttttctttgacccaggggagataaacatttttataaattgaccattatggccattagtttaagatgttagttcttttcattagcagtagctttttatagattacttattttccttgttcttaaaacaggtatttttaaaaatgtaattgtaaagctgggcacagtagcatgtgcctgttgtcccagctactcaggaggccggggcaaggaggatcgcttgagcccagggcaacatagccagacttgggcaacaacctgggcaacacaacaagacctatg

SEQ ID NO: 182670 - DNA, 136 bp, Homo sapiens
taatgcatgtggatgtgctgtttttcaaatgcagacttactcagacattgccaccatctccagcctctgtaacctttaaagggcttgcagataatgccacgtttcaggatgttgattgctggtcttgtcttcggat

SEQ ID NO: 182671 - DNA, 528 bp, Homo sapiens
gcccaacacaatccacaggcctgtcttctacagctctaaagaagcacttactatagcaaaagagagaaccaagcagcagcaggaaaacaacactcttctttttggaaacctatatttcctaatgactaagaattgcttctccctacttacaggataaaaatagaccttacaccttagcacaaacttcctcctgtcacatttttaccacatattttatcaccaaaggattcatcagcacaaaaaaaaaagatttcatgattctttttcctttgattctattggcctttctcacacacccagtggataattatttctggacatcacacttgagaaagtacatttcatttttactaaagataacaaaagaattttttaatgtactttataaaggtgaacacaacattttaaccatatgcttacatttttattccatttcccagtaatcaaagaaaagactgcaacaaaacaggaaatgcaaagctggttatctaaccttcctcatccagagcagttacacctaatatagta

SEQ ID NO: 182672 - DNA, 346 bp, Homo sapiens
cgactctgaggatcccgctctctgggcagttcctacagatgaagcagagagcttgcagaaaagaatggtatacagtaagtactcaaaaggtgtcatcagcctccgtttctaaaaaaaaatcagcaggtacagaaaagagtagtctagcactaccagaagacttcgcttaaagatatgattaaacttgctcaaacttcctgcagcgctgctaattagtgataccctggggcctccccagctgaggagatagcagctaatccagggcttcagtgagacaagaacacatctgaccagaaaccgggtagcagtctcctaatggctactgtcaagttctaggcacctggaa

SEQ ID NO: 182673 - DNA, 446 bp, Homo sapiens
ctaaagttttaaatgcatccttgttcactgtttagacttaatcctgagattttaatgtaagagataagcttctttaggagccaggcccgcttcttaaacttctctaaattttctgccgaccccaacccagtgcacatttctggagactcatgccttctctctgcagaataccatcccacacggccccacaggacctggcctgggcctgcttctgacctcagctgcagtcacaccttcttctcctttcctggctcaacaagcccagccccatgggccaccctctctgtttctccagcatagcaagctgatttccacctgctcctctgtcattgctggttggtggatacctgcctcattggtcaagtgtcaccccaaatgaggtactgtcgagtagtcatccaaaacactgcttctagcatcccagggcctgggttcacatcccggct

SEQ ID NO: 182674 - DNA, 501 bp, Homo sapiens
cacatgtctcgccaacactgttcattaagcaggatgtacctgcccatatgcaaatatcaagccccattaaacatgcaggaagtaacctttactctcttagtcaggcaccttgttgcaagagagaaactcaaacacaagtctgaagaccactgagaacctttacattttcaccaattcttccatggtagggctgcacaaagtgcttattatcacaccagtatttcataagatgtgtcatgacgtagtaaggccaagagtaaagataagtaggaggaagtaatgaaggaatgttcttgctttcaagccttacattaaaagaaaaaaaaaaggctagtgtgtggggcgataacatcacggatgtcataggcccaatacgcatgcaaggactgagtcgggtactgatgcttgtacagactcttcaaactgcatagtctgccttagaagtatgcttggtaattatctgttgataggtagccatgatacactgggtaaaaggaattg

SEQ ID NO: 182675 - DNA, 399 bp, Homo sapiens
cacatgtctcgccaacactgttcattaagcaggatgtacctgcccatatgcaaatatcaagccccattaaacatgcaggaagtaacctttactctcttagtcaggcaccttgttgcaagagagaaactcaaacacaagtctgaagaccactgagaacctttacattttcaccaattcttccatggtagggctgcacaaagtgcttattatcacaccagtatttcataagatgtgtcatgacgtagtaaggccaagagtaaagataagtaggaggaagtaatgaaggaatgttcttgctttcaagccttacattaaaagaaaaaaaaaaggcttttagaggttaaaagtttaattactagtggaagaataacttggtataatgtgtgtagggcaacaggg

SEQ ID NO: 182676 - DNA, 210 bp, Homo sapiens
cataaataataaatcatagtatgctccagtatgggaaaccattaatatataacacagcctgaatgattttgcctagagttatgcaaaatggtgaccccagaaagaatccattggaaaaaaaaaaatcaaaagagattctgcaatagataagaatgacaagttaagggtggccatgaatgccaggctgaagagtttgttctaaactgaaat

SEQ ID NO: 182677 - DNA, 507 bp, Homo sapiens
taacatatacgaaccgagctgtgaccctatgcatgtaccaagattttcaattttaaatgctttttggtgttcacagttagctataattggtcaattttaccctccttatgcataaaaagaatgataggcaaagaatgagccttgaaaagaattgggatcagaattctggtcccctgttctttgcttcttaactttcttgactgtttagaaaaatgtacagcttttcttccaaaaaccaaagcaataatacttttatttttgaaaataatggaaaacagagaccgctgaagttctatgaatgaggttttctgttttagaaatcacaggttgaggaggaaagaattgtgttttccttcctgttctgtttcgagtctcagtatttctgacttagaaacctcctggagaagagggagataccagctctcctttgtttcaagtaaaataccatcttaggtcataaaatagtttgcttggagaataattcatggcttatatctgaatttttgg

SEQ ID NO: 182678 - DNA, 825 bp, Homo sapiens
atctacccacaaaatctgttggttctaccctcaaaacatatttagaatataaccacttttactctacccttagtctaaactatcattatttctttttgtttggattattgcagtgatgtcctaaccaatctccctgaaaaattatctgtgaaatttatttctatacatccaacaagcacaatgaactctaggtagaataaattcagtgaggtccacatcaagaacattgtaatcaaactgttgaatgtcaaagacagagaatcttgaaagcaacaagaaagaatcaactatcatgtacaagggaaccttagtaagatgaacagttggctatttatcaggaactatggaagccagaaaacagtgggcatatttaaagtgctgaaagaaaagaacctatcaaccaagaattctgtatctggcaaaattgcccttcaaaagtgaggaagaaattgagatattcccaataaacaaaagctgaggggttcactacaagtagacctgccctgcaagaaatgctacaagatgtcctcaagttgaaatgaaaggacactaaatggtaacttgaagctgtatgaagaaataaaggtctacagtaaagtgggtcctagaggtgttgacagtgtgtttccatggacttaaaatcaaccaaacctgtgagcacagaatttagcaccagagtcaggatttccaaaatggtattttgaaggtaaggcagatccagatctggtaagaaacggttttggagtgtgaaaccatttcttggtggggcccgaggttgggggaagggttaaggggggccccggggcatttcacggggggaaaatg

SEQ ID NO: 182679 - DNA, 304 bp, Homo sapiens
ccacttaaatacttcatcagagatatgggaaattgtcccatcacacacccatcatattcaaaaccttcagttagctctcctactggacgtatttctattgaaaagaatttagaacaaatctctcttaaatttagtttacattctttcacagtatgaaagagctgttgaaaacaaattttcttctgttggaaatatgttaagatttgggatctaacaggctaaggaccattttgaaggcccacttgtaattgtcattgttttataaaatatcagatctatacaggagaaaccactggttaggaga

SEQ ID NO: 182680 - DNA, 541 bp, Homo sapiens
gacatgaccctcaaatgaaatgcttatgtggagcatttgagatttcagattttctggtttggggtgctcagctggtataaatgtaatgcaagtattccaaaatccaaaacacttctgatctcaagcattttggataagggattctcaacctgtatggtcaaaaatgtccttgtacatagtctttcatgcttatacttcatacctatttcactcctagttactgagattataacagcatgcaagatagatttgccttatttccctaaattaatgaaagataaagataagtatatttcctgtcctttcatctttcttgttctttcagttatttttctacatcattatgttctcctatatattgacccattttgtccctatccatcagctgtcttctgtcatttttcttccccatttaacttacattttgtctgctctctagcatacactttggcttttttttttttttttgaggtggagtctcactctgtcacccatgctggagtgcactggtgccatcaaaactcactgcagcctccaccac

SEQ ID NO: 182681 - DNA, 639 bp, Homo sapiens
  misc_feature (499)..(499): n is a, c, g, or t
atgtttttaaagaaaaccctcatcttcttgagacgcacactgaaatatttacaaatgagatgacagatttctgggattttcctaaaataatcctttttggggaaagggaataaaagtgaaatacaactgactgtgagttgataactgttgaaactggtggttcattattccatatgctctacctctttttgttttatttttgtttttttgtttgttttgagacggagtatcgctctgtcacccaggctggacaaccacatgctgaagaataactgtgcgcccctacctcacaccatatacaaaaatatttttaaaaaagaataagcagaccagcctggccaacacggtgaaaccccgtctctactaaaaaaatacaacagttagctgggtatggtggtgcgtgcctgtggtccaggctactcaggaggctgaggtgggaggatcacttgaacccgggaggtcgaggctgcagtgattgcaccactgcactctggcctgngcagcagagtgagaccctgtctccaaaaaaaaaaatgatagattacattggtattttgtgtgattgctctggcctttgtgccatgagtttatcctatagtagtggtgtacttttagtaatttcagtaccttgtaatcttc

SEQ ID NO: 182682 - DNA, 481 bp, Homo sapiens
atgttaagtaacgggaatttatagtacttaaatttatctgcaaaaggaaaacatgataaacactagcatggttttctatcatttaaatcctaaattcacaggatggaacattcaactcctgattttccagaaaatctactcttatgaatcctaaagttatcttgaaaggcaggctttgtatttttccagtgaatatattgctgtttcttatcaatgttgcacttgatttttttttttttttttttttttttgagatggagttttgctcttgttgcccaggctggagtgcaatggcgtaatctgggctgaccgcaacctctgcctcccgggttcaagcgattctcctgcctcagcgtcctgagtagctgggatgacaggcatgtgcgactatgcctggctaattttttgtatttttagtagagacagggtttcaccgtgttagccaggatggtctcgatctcctgagctcgtgatccgcccg

SEQ ID NO: 182683 - DNA, 217 bp, Homo sapiens
cacatttcagaatagaggtaaggacatccttgggcagtagctttcctagttttgatgttgaccactcccagccatcatagggaaggtacatagcaaatggatgtgaaagcaatcccaatgaccttggagaacccccaacttggaaagccctacctggtgaaacttgagtgctccaaggggaaagggatttctttcttttttttttttttttttttac

SEQ ID NO: 182684 - DNA, 323 bp, Homo sapiens
tggatggagctacttcatgggtgacatggagaggtgggctgggccatgtgtgggagggatctgggccctgtggatggagctacttcatgggtgacatggagaggtgggctgggccatgtgtgggagggatctgggccctgtggatggagctacttcatgggtgacatggagaggagggctgggccatgtgtgggaaggatctgggccctgtggatgggagctacttcatggtgacatggagaggtgggctgggccatgtgtgggagggatctgggccctgtggatggagctacttcaccggcgacatggagaggagggctagg

SEQ ID NO: 182685 - DNA, 316 bp, Homo sapiens
tgagccacagcacccaaccaaggattacactttgtaacagtcctcaggtggctcacataggacttgaaagcaaatatggtactggaagggaacgcagagccaggggatatcttcccactgtctcttcaccaatgacttactgcttgtccccacttacacaacaaactgagccacatgagaactggtgcagggcgctgggcattttgtctggggaggtggagagcaagggcctaaatggagtcagagactttgaaatggtttgaaagggctttcgctgcctgagcataaatctagatttgggtaacacaaagttgct

SEQ ID NO: 182686 - DNA, 446 bp, Homo sapiens
aggaggatgtattgttaagtgaggagaaggggaaatggttgaagagtttagaagtgggagtcacatgccagggatgagaagtagcactaatcctgagagcccaaactggtatatggcaggataaaaaggtgggccttgaagcatatcattaagacttctaatctgactcaagaagcattccaagcaaggtgaacctctaaataaatatggaatttatttagctaaataaatatgcatttagcaaaatctgacccaggtgcaggttatactctttttttttcttttctttttttttttggagaccccagagtttcgctcttgttgcccaggctggagtgcaatggtgcaatctcggctcactgcagtctccgcctcctgggttcaagcaattctcctgcctcagcctcccaagtagctgggattacaggcatgtgctaccacggccg

SEQ ID NO: 182687 - DNA, 568 bp, Homo sapiens
taggcagacttcttggtcaatctgggtttacatgacccatcagtgaacaaggtgctggaagaggtgaggtctaacagaacaagatgtgcagaagagcatcttgttcagacgggacatgaagatcttaccaaggtgtgggcaagttcaagttgacagatggtctgcactattaaggggctctcaagaacccagggccagcctaggtgggcacacagctccaacctgacacacaggggcctgataaacagggccgtactgtaccacaccatacctcggctagagaacagaaactcaccactaattaagacaaacagtactaaatttgcacgtatcggtgtttctagagaggggcagtgggtgaaggctaaaaaacaaggggcttagagtcacagacttgcaaatcctagctttgtcatttactcactcaaatgacctcgggttatcaaaacacctagcagcctggggcccaccgttccaatgagaatcaaagtaacgagctttcagccctgctgtgaactctaaaaaaaaaatgtgggcaaaatgcctggcacactgccttgccaataaa

SEQ ID NO: 182688 - DNA, 765 bp, Homo sapiens
ggcgtgggctccgcggggcttccccgccggttcgctgagtcccagctccgctcggccgggacctccgtggcaggctcggggagcccgcggggggcagaggcgccgacctccgcctgggaccgagaggaacccgcgccctgccctgccccgcccggcgcgcgtgggcctgagtcaggcgcctcagcacggggacccccgggccggccttcacgccgcagagccgctgcaggtgagactgtggcccacagacactgcttgcagcaggcagaggatgtgggagcctcgtgggaacccccccgacttgtccactgaagtaacagcagcaatgaccttccctcgggaattccacctctgcgtttttccctccaggtatctttttgagcaccttctacaaggaccatccagcacatccataggaatgttccagaaatccacggccgtgctcagccctgattcctcactccacctcatcctcagtcaggctctggggccctctgagtggtgccactccaagagtgaaaccagataggcagtccatgctttggatggcagtgagacccagacgcagttccagcgctggcctctgagcggcagtacagccccatggaccaccagagcccctgaagcccagctctggttggaggtgatgccatctgcacctccctggctgtgtttgtattagtcatctatgctgataacaaatacccacaattcatgatgtagcagcacgttcattatcttccagattctgtggacaggaggctg

SEQ ID NO: 182689 - DNA, 169 bp, Homo sapiens
aaaaaacaaacaaacaaaaaaataataataaacacaagaaactgtggaatgattaaaatgaaagctaacttctcaataccaacaatgttgagagaaaataattgtcatcctagaaacttatatctgaatgttttacttagtgaatctatctatctatctatctatctat

SEQ ID NO: 182690 - DNA, 733 bp, Homo sapiens
caggtaagtgtgatgcctagttgtcactgtaatttttttaagtgactaaatgtatggtattggagtaatgaactagaaaacagtttaatttaatcattcttgtgctacaagggacaagcataaattgtcaaactcctgatgttgtcattgttccttttctatgatcaaacaacatctttctaatttttttcttttttgttatgtcctcagtttataaaacatactgatttctgtctttgaccctcatgtattaaatatccaaagtcttaaatccctgcgctccctaccacgttcctatactttccccagagaccagtgtgtttccctaaccctcccacttctcaaagttctctgaggaacacattcagcttctcctttcctggaggaccagtctcctttactgtggttaagggcccaaagtggctgagttgctagactataataatcagaattatactttacatttttatggccttctctcatcagatagaaacacctgaggagctagttcaagaggcacatccctttgcccaaacccagatataataaatcaatgactactgttgtggggtggctaatatttttagcaggctccccagctgagcctgagcaccaaagtttgagagtcattgctgtactgactgttttggggtccaaaacaagatcatcaaccgtgaacaagtcaggctgagcaaaggatgacataggaggacgaagggcactggaagagagg

SEQ ID NO: 182691 - DNA, 438 bp, Homo sapiens
gtgatggatatacttttctttgttttgttttgagactgagcctcactgtatcacccaggctggagtgcagtggcgcgttctcggttcactgcaacctctgactcccggggtcaagcgattctcatgcctcagcctctcgagtagctgggattacaggcacgtgccactgcacccaaattatttgtgtatttttagtagagacggagtttcatcatgttggccaggctggtctcgaaatcctgacctcaagtgatctgcctactttggtctcccaaagtgctaggattataggtgtgagccactgcgcccggctgcatgtagtcttatatctactcttgtgtatgtttgatatcatccacaaataaaacagttttttcaaataaaagtaaaaagtgaaggacatgaatagacgattctcaaaagaagatatacaaatgg

SEQ ID NO: 182692 - DNA, 832 bp, Homo sapiens
acagcagggaacaacaacaaaaatctctgccctacatttaagtagtagagagagagtaaaaatacataaaaatgtcaggtgcaatgaagaaaaataaaacaggataagaagacagtagcaggatgacactttcacagagagtgatcactatgatctgataaggtaccatttgagcagggacttgataaagtgacagaataagtcagaaagcaagaaagtagatagtgaaaagggaaaataaagaaataatctggataaaactgttaggaggtgaagaaggccgtcaccctgaaagggcttgccacgtgtagaacatcaaacctaagacacatcctgtgaaatagaattcaagaataaaaaaagttcctgaaagttgccacagaaaaaaactagattacagacaaaagcattacaatggttaggttcagggaatcaagagtattctcatcagccactgtagacaatacccaatctcaatggatactgacatgatcacaaaaagaaaaaaaaaaaaaaaaaaaaaaatttttgggccgccttgggccctgaaaaaagttttttaaacccattcggttggggcggggggcgcccggggttagggtcgacatggggccacagacgaggtgtcccaaagaggaaaccgggggcgcagagacacaacgggggcctgggagattccttccccacatatataaaaaaaagcgcccgcgggggcacccacaaaggcgtttgttggaaacaactcccagagaggggagttccaggaaggcaccaaacggggatccacacacaacagggggttccccagggaaagccggagatacaaatagca

SEQ ID NO: 182693 - DNA, 216 bp, Homo sapiens
acaaaaatctgtaaaatacttgaaagcaaacttaagaaacatgcagaacacctttgaagaaaaactatacagcttcacagatgaatataaaagatgatctaagttaaacggtaatatcatgttcctgggttcagattctacaaacatcaaatttctctaaaacccaagtttaatgttttaaattttgtgtttggcctttttctcttccaaggggta

SEQ ID NO: 182694 - DNA, 555 bp, Homo sapiens
ttcttgctggataggtatctacataagtaaattacatataatattcaacatatacagtaatatacttgcacacaaaaaaattttatgaaattagtaaacttccatttacaagtagagagagaaagaacttttttttttttttttttttttttgagacggcatcttgctctgtcacccagactggagtgcaatggcatgagccaccgtgcctggctggaaaaggtttttaataaattagcaggaaaagtaatagtaggacaagagttggctgaatccctctaatggcaaacagagctctgtgtagggctaagaaacactaaattagaaaaaaattaaaaatctgcaagaattctggcctgctctattgttgaccacccacttagtatgtgtaaaccactcagctaggctccgcagtctcaacagtagtaagacatggtcctggaccttgtgactctgtctcagagaaacatgaatgcacgataggtgaccacaatctcgtttcaacgcacaagggggtaaggagactaaccatctcaaaccacctttgactacaca

SEQ ID NO: 182695 - DNA, 700 bp, Homo sapiens
cagctactagggaggctgaggcaggagaatcacttaaacccgggaggcagaggttgcagtgagccaagattacaccactgcacgctagccttgtgacagagagagacttcatctaaaaaaaagtaaacacaatgttaagtgatggagggatgtaaaaatatatggccgggtgcagtggctgacgcctataatcccagcaccttaggaggcaaaggcgagcagatcatttgaggccaagagtttgagaccagcctgaccaatattgcaaaaccccatctctactaaaaatacaaaaattagctgggcatggtggcacaggcctgtaatcccagctgcttgggaggctgaggcatgagaatcgcttgaacctgagagactgagaggctgcagtgagccgagatcatgccaccgcactccagcctgggtgacagagcaagactctgtctcaaaaaaaatataaaatatatgtacacatgtgcacacacaacgcaaggcaggatccctttgtcaagacagtatgttgatgagaccagtatgaatgactgactagaggaaacagaaaccttttttttttggtgagagggcattatcagataaaacatctggaagcaggtagtaattaatagtttttctaggttctagaccataagtaatactaaaagatggcgtgctagacaaagggaataggccagaggcagga

SEQ ID NO: 182696 - DNA, 273 bp, Homo sapiens
tggtcttgatctcctgaccttgtgatccgcccacctcggcctcccaaagtgttgggattacaggcgtgagccaccgtgcccgggctgtcactatttttttattttggcaattcttacagatgtagtgatatcatgttgtggttttaatttgtgttttcttctattcagtttaacatgtgttttaaaagtttgtttgctaattatctcttttatacttaatatcttgattcttagggtcattaacaagattgcttgccttctcctatagtataa

SEQ ID NO: 182697 - DNA, 365 bp, Homo sapiens
agaaaaatggttgccatcaccactaaatggagatacaaagtgccaggtgagaaatcagcactgtctcttaaaagcttttcctaactttgccctagggaagcaagagggattcaaaaagtgggaaaatctgtatggcgatcgctctcacctgattcaaaatacacactagacgtttctaagaagtgtcattgttggccgggcatggtggctcacgcctgtaatcccagcaatttgggagaccaacgcaggtggatcaccagaggtcaggagtttcagaccagcctggccaacatggcgagaccccatctctactaaaaatataaaaattagccaggagtggtggtatgcgcctgtaatcccagcta

SEQ ID NO: 182698 - DNA, 146 bp, Homo sapiens
gtcacacacactgggcattgttttttaaaaaatcaccccatcccccaaccaaaaataaatacttaagtcagtaataatgtggcatgtttctcaactaacaggacaaagttaaaggcaaaatggcagctcacactcccagccccctt

SEQ ID NO: 182699 - DNA, 565 bp, Homo sapiens
tcaggagttcccgaccattcccaagccaaaaccaaaggattttgagatcagtgtgggccacttagccatacccatctctactaaaaatacaaaaaattagctgggcgtggtggtggtcgcctgtagtcccagctacttgggaggctgaggcaggagaatggcgtgaacccaggaggtggaaggttgcagtaagctgagattgtgccattgcactccagcttgggaaacaagaaagaaactttgtctcaaaaatcagtcagtcaatcaataaataaaaagaaccagtcaaatgcggaaggagttttgaggaggaagagattacttatgatgggaggaattggggaagacttcatggattggtggtggttgtcctggatgtaaaaaagggaaagggaacataacaaagaaagggaggaaagaagcatgagcttttgaggagtaactgaaagtccagtttaattggaactaagtgggtgaaggggaatagtgagccataaagccagaagggtactttggaaccagatgatgacccccctctaggcaagagagcatggcactggggctg

SEQ ID NO: 182700 - DNA, 680 bp, Homo sapiens
tctgtcaagtccttttgttctaggatatagtttaaggtcattgtttctttgttgcctttctgtcttgatgacctgtctagtgctatcagtgcagtattgtgtccgtcactataattgtgttttcatcagtctcatttcttatgtcctgtaagaattgttttataaatttggggggttcctcgttaggtgcatatatagttaggattgtgatatttttccttttggagtgattcttttatcatcgtatagtgttgctctttgtctttcttaactgttgtggctttaaagtctgttgagtctggtatcagaatagttcctcctgcctgctgttggtttccatttgtatggaatatcttttctgccactttaccttaagtttatttcagtccttatacattaggtgtgtctcttgaagacagcagatacttggttggtggatttttctccattcttccactctgtattttttagatggtgcttataggccatttacattcagtgttagcatttggatgtgaggtactgttttattgatcatgctagttgttgcctgaataccttggttttttaatttgtgttactgttttctcagtcctgtaagatttatgctttaaggaggttctgttttggtgtattttgaggttttgttttaagatttggaactccttttagtatttctt

SEQ ID NO: 182701 - DNA, 299 bp, Homo sapiens
ccaagataaacacatacaaacacacacacacacacacacacacacacacacacacaggaacatcacagtcacattgctgaaaatcaaagagagagagaaaatctaaaatcatacagattgcataaaggcaacaataggacttcaaaagagccacaataagactgacaaaatcaacaaaaatgatggaagaagaacaacgggatggtatatttaaagtgccgaaagaaaataacagccagtttcaaattctatccaagggtgaatgtgaaataaagattttttttccccagagatgggat

SEQ ID NO: 182702 - DNA, 316 bp, Homo sapiens
gatgcttaatttgtcagcttatcactccctttgccaatttgagtagttaatttgtcttgatccactttcatttacaactgccagccaaaagaaaattaaaccttatctgaagacaagcactaaacggatttaaaagaagttatatctccaggtatcctttcttgaaagctggcatgaagctcgtaataaaaagctaaatgtaaaaaacactattacagctatcttcattatccataatatcagtatcattgtagaaggactgcttaatactttgcctctggagttcctttatttcttcatctttagtaatctttcc

SEQ ID NO: 182703 - DNA, 407 bp, Homo sapiens
atatacaaaccagacaatgaactagatgttttacacatactattactcactttagcctcataatatttatggataggttaagcagcttgcctaaggtcacaacactattacattcaaaagccaggattcaggccgggcttggtggctctcacctgtaatcccaacactgtgaggccgaggctggtggatcacttaagcccaggagtttgagaccagcctgggcaacatggtgaaactctgtctctactaaaaatagaaaaattagctaggcatagtggagcacacctctactcccagctactcaggtggctcaggtgggagaatcacctgagcctgggaggcggaggttgcagtgagcagagatcacatcactgcaccccagcctgggccacagagtaagaccctgt

SEQ ID NO: 182704 - DNA, 185 bp, Homo sapiens
gggcactagcaggacgtagagagaaggggatttggggttggttttggaggcagggctgagaggcttgctggttggattgtgctggcgggaccgtggtcagggaggatgggcaggagccaagcgtgcctcctgggctttcgctgaagctgcaggcaggggagacatttcctggggtggaaaagtct

SEQ ID NO: 182705 - DNA, 392 bp, Homo sapiens
taaaaggagaagctattctttgcagggcgcagctgtgaggatgagcgcaggactctgcaggaagcagacccaagactctgccagctcctcctggccctctccagagagtccgtggaatgccatcagcaatgacttttggcaatttcagtaacttcttggtatcctgaaatcttggggtgcttttccctgaccttcacgcgaacagccctgctaacgattctgtaaacaccgaattccttctgtagaatccatccagcttgacggaatggaagttttctgtttccatgaccgggccccagctcacacagcgttggctccaagctgttttcaggggacaagaactctctaaagaatgagcacgtggggtggctaactaacaaggggtagattaa

SEQ ID NO: 182706 - DNA, 298 bp, Homo sapiens
gagactgcctggggctacagagggagagtcactggctgagagtacagagaacagactccaggttttccaattcccaggctagggcagccttcgaccccctgcaccccatgtccccatgcaattatttacactctgacactggtgtgacaggcactgggagtcagttccaaatccctactgctttttagaaatgcatgagtcaagtaatggcaaatttaaccccctgtagagatttacaaggtttattttacataggaaatgctaatagaagaaaacagactgggctctgtttcccgta

SEQ ID NO: 182707 - DNA, 446 bp, Homo sapiens
atcaatgctaggtacagacttgaggccagaatgcattccaggaggtaaggtgagccactataatatggcaaaaagttcctttcacaagagagctaagacggtccgacatttatgcaaataaaagcctctgagtaaagaacaagaatcaacagaacaggccagacacaggctcatgcctgtaatcccagcactttgggaggccaaagcaggcggatcacttgaggtcaagagtttgagaccaatactagaccaacatgttgaaacccccgcctctataacaaattacctgggcctggtggcttgtgcctgtcatttcagcggaggcgtgagaattgcttgaacctgggaggcagagattgcagtgagccacgatcgcaccactgcactccatcctgggcgacagagtgagactgtctccaagaaagagataataccagcttgattga

SEQ ID NO: 182708 - DNA, 166 bp, Homo sapiens
tttgcaccagtaccaagcaacggaagcccagccctgtgtccgggagcttgggagaaatgttgttgccatcagaagctcttgaggagtcagtttagactctagtaatgcatgctgttgttctagaattcaggaattttacataaaatgagagcttagatggaaattg

SEQ ID NO: 182709 - DNA, 212 bp, Homo sapiens
acattgattttgtatcctgagactttgctgaagttgcttatcagcttaaggagattttgggctgagacagtgtttgataatcctaaattaaagcgcttgcccaaaaattgcagtggttctgaatcagttgggaataaggaggcatatttaataattacattttttcaactttgttttctttgcatgtccaaattacagtgtttcaaagagat

SEQ ID NO: 182710 - DNA, 227 bp, Homo sapiens
tgaaaataaggatttccaatgtggtggatagaaatatatccaatatagaaaaggttaagcaaaacatcctatagtccagaatttgaattataagtatcagtatgaacttgggatattttgccgtgtgtgtgtgtgtgtgtgtgtgtgtgtgtgtgtgtgtgtgtgtacatttcctagctatcattgaagaccattgtaaacaatggtcaatacagtagcaattagcc

SEQ ID NO: 182711 - DNA, 750 bp, Homo sapiens
taagccaccgtgcccggccaacccaaacaatctctacaaaaaaaacaaaaacaaaacaaaacaaaacaaaacaacaaaaaaacccaccaaacctggtggactcacacttcctgatttcaaaacttactgcaaagatatagcaatcaaaactgtgtggtatcagcatgacatacagaccaatggaacagaacagaaagcccaaaactggaacttcagatatatggtcaaatgatttttgacaaggatggcaagatccttcaacaggaaaagggcagtctttttaacaaatggtactggtacaactgaatatccacatgcaaaagaatgaagttggacccttacctaacaccatatataaaaatgaactaaaaaatggattaccaacctaaatgtaaggaaagaacaaaactcttaggagagaacagagagcaaaagcttcacaacactggatctggcaatgatttattggatgtaacgccaaaggcacaggcacaaagaatagacaaattggactgcatgaaaatttttttttttttgagacggaatcttgctctgtcgcccaagcttggtctcaataacaacaacaaataaaatgaaacaaaaaaccctcccataacttcacatcttcaatgatattagaaaaagaacaatctcaaacccaaagctagcagcaagaagggtaattatagagcagagattaatggatcaagtgaatatagagatatagaaaaccaaataggggaacaaaaa

SEQ ID NO: 182712 - DNA, 340 bp, Homo sapiens
catatctcacttgtgcacttaatagtggtatggagtggccatgtgaagttatttgtttgtttcctgaaatgtttagcagaattcgccaatgtaaccattaaggcctggaatttcctaagctaaggttttgttttgcgttttgttgttgttgttgttgttgtttagaagtgggttcttgctatgttgcccaggctgcagtggctattctcaggtatgataatagcacactatacccttgaacttctagactcaagtgatcctcccaccttagtctcccaatagctgggactacaggcatgcgccaccgtgcccagcttgtgttaaggttttaaactacaaa

SEQ ID NO: 182713 - DNA, 325 bp, Homo sapiens
tagttatttatttatttattccttaaaacattgccatggtttctaacccaaactctagaccaaaaataccttcagtaagtcacctatttatcttatcactgctaagtccaaagctctattattacattctcttcctaattgacccagcactcaaaactactttcttttcccccattgcatacagagtatacatttatttgtttagtctttctctctcctgtaggaagtaagtttttatgaaggcaaagaccttgcctgcttgattcactgtctagaattgtgtctggcatgtaataagcgatgaacatctattgaataaatacca

SEQ ID NO: 182714 - DNA, 445 bp, Homo sapiens
ctaaacgttgcaggcgctcaggacgctgtggcgatgactattattatcattcatgtcagcagaacagatttaccaaacagcagtaactcagaaacagcggggaggatggaatctgtaacagggaagcggtttaaaggagagcatgagagagaggctaagatcctactgcacagtgcccaagagacaggaaactcacagttcctcaggatttggggtcgccagtccaggttacctgtgatccaagtttcaagatccacagagatccccaccaactctgactcctcaagtaccttggatttggaattccaggaaataaaagtgcaccccgtattactgttaaaataaggacaggccaggggcagtggctcatgcctataaatgctgggactcgttggggccaggagtttgagaccagcctgggcaacataaagagacactgtctcta

SEQ ID NO: 182715 - DNA, 212 bp, Homo sapiens
aatatgggaaggggctgatgctggtttaggataatcccagatggaatattatctatttagttgctgatatttcttggcaattgaagactaaaacaccattctaaggcaccaaatgatatcaccttaagtttcaaactgtttaaaatgagctgtataaaatagtttatgcaatagtttgctgtaatagtttatgctgtaatagtttatgctgt

SEQ ID NO: 182716 - DNA, 234 bp, Homo sapiens
ttcaaagagtatggcaggtagaatatgaaaggcagtaattcactctctttatggcatttgtgtacagcactaaagaatgtggcggtcttcctccaagacactgatgctactcacctatgatcactggggagaaatctttggaatatattcttatgaatgtgttcatggaaagctgaccatatgcatcataccattcatttaatatacactttttaagtggctttaaaacaacca

SEQ ID NO: 182717 - DNA, 129 bp, Homo sapiens
attctgagcatggccatgtgaccatattttctgtttgttggctgggtttgtttgtcctcagtttttacagatgcggaaaggaagctcagacacgtctccagttcttgcggagcatgacatccaccttct

SEQ ID NO: 182718 - DNA, 487 bp, Homo sapiens
cctggtgggaggtcattgaatcatggggtgggtttttcccgtgctgctctcgtgatagtaagtctcatgggatctgatggtttgataaagggcagttcccctgcacatgctctcttgcctgctgccatgtgagacgtgcctttctcctcctttgccttcctccatgattgtgaggcctccccaggcacatggaactatgagtccattcaacctctttttctttataaactacccaagtctcgggtatttctttatagtagtatgaaaatggactgatacagttacctaggctggagtgcaggggtaagaatacaggtcactgcagcctcgacatcagcacccacatagctgggactataggaatacaggcacgcaccaccacacccagctaaatttctttgtatttttggcagagccatcttggttttttgtttttgttttgagatggaatcttgctctgtcgtgcagtggcgcgatctcggctcac

SEQ ID NO: 182719 - DNA, 400 bp, Homo sapiens
tcctcagctgtaagtggaactaataacactgaatttgatgagttgttatgaggattaaattggacaaatgggaagtgtgtagcatctatggcacatagatgtaaaataaataagaatggacaggtgctattaaaaatattacctggccgggtgcaatggctcatgcctgtaatcccagcagtttgggaggccaaggcgggtggatcacttgaggccaggagttcaagaccagcttggccaccatggtgaaacctcatctctactaaaaaatacaaaaattggccgagtatggtggcacatgcctgtagtcccagctacatgggagaacaaggcagaagaatcacttgaatctgggaggtggaggttgcagtgagccgagattgcaccattgcactccagc

SEQ ID NO: 182720 - DNA, 152 bp, Homo sapiens
ttagcctcgccttctgagcttcccacagtacacattttttgcaggtgcatttgcttgtatttgcaagacagaagctcactttgttggaactttctttcctcggtccctcttcatcgtcttcatctcctaattggtgtttgtaataactccca

SEQ ID NO: 182721 - DNA, 1028 bp, Homo sapiens
accaaaatcaatgtggtatgaggttttatgaataggagacaatctagaagtcatggtttctgtgacatttttcacaacttcaaacgtttaaatatagtctacatttttcttggtgtggaatattttccttgctcttctgaccccaaagaaaagtatttgttagaggaccaattaaatgaaatttgagtggggattatactgtgtttgagctataattcttaaggggaaaattgtttatatgtgtatcttgtctgaagtaatacatagttacattaaatctcataaaagtacctcaattgtgtcaactgtttgacatttttgtttaatcttctgtgaacagatactaagcatccaactatgatattgatgtttgtgcacaggtatgcactcaggtcttcttgacaaagatctaaagttataattctaagagagtagataattgttttactaagtacttattctggtatcagaactcacacttcacttattacagaaggaaaaagaaatttgtttcctaaacttgctttgccccattaccttgtaatctagaccctttggtaaaatttgcatttttgataactacagtaatgttcattttacttgcctgcatctgggctctacttagagaatatcacataatattacataatctgacaattggtaccagtttaaatccatcaacgtcaactacaagtaagccctctactctactttaaaaatctcttcccatttcttcagtcaacagtttttctgtttttcacaatgcctatgtcagatagaaattttcccttctaccatatctctcctcactctcacttgcttgaagaggaaaatcacatggaagcttcatcagcttttcttgcaaaatctgctaatactcacacttgtctttctcttttaataaaaggcatagatgtttagttatctaagaccaataaacaccaaagcctatcgtcttctgcctgtcaagagactgcactatctgtcatcccctttctcatttatttctctctatattggccactttt

SEQ ID NO: 182722 - DNA, 991 bp, Homo sapiens
gtcaatttaacttaacaagtatttattgaatatccacatgtaggccagaatcagattagtaaccaggtgccttggaattttaaaatttctcctctctttattaatggatttagcgagtggaaatcaggctttctgtgatggtttataaaggtattttcctggctctcttggagttctctgtccaccttgctgcagtctttgttgtgatggggagaccacatgggagcggtccagatgagtgatgctacgggcccaaactgttagtggccgtgaggatataggttgtaggggacatctggagtggaaagagtgctcttctcacacagctctctctacttactgcccctaggatggtgggtgcaactgtggcaagggcagtcagggtaggggaatcccttagaggaattcagcagtgactagtctggttagcctttcccacaaggcccattgagttatgagccccctcctttggtttgtagaaagagaaggtagcagcctagaacaggtgagaagatgaggtaggtccttctgctcaaacatcctctctccgtattttaccaacacgatactgacctaggttaaaaagctactcttggccaggcgtggtggctcacgcctgtaatcccagcactttgggagtccaaggtgggtggatcacctgaggtcaggagttctagaccagcctggccaacatggtgaaaccccatctctacagaaatacaaaaattagccaggcatggtggcagacacctgtaatcccagctacttgggaggctgaggtaggataattgcttgaggccgggagggggcggttgcagtgagccaagatcgctccattgcactccagcctaggcgacagagcaagactctatctcaaaaaaataaaataaaataaaataaaaataagctactcttagccaggcacatagtggctcacatctgtaatctcagccctttgggagactgaggtgggaggatcacttgagcccag

SEQ ID NO: 182723 - DNA, 291 bp, Homo sapiens
ccttcaggtctttgctcaaatattgccctctcagtgaggagtcctttgtctacccttatctaaaactgcagtctcttgcaccacacttcctatccctcttctctgctgtatttttctccatagaattgtaactagtacataatacatattttttatttacacttattctcttccactagaatgtaaacacaataagggcagacattttgtctgttttgtttaatgctgtgcccctaaaacagtgccaggcacatagtaagcaaccaataaataattgtgaattaatgtata

SEQ ID NO: 182724 - DNA, 314 bp, Homo sapiens
tgatgtcatttggagggcttggtgccagggaagggtcacggccattggaatggatgagaggtaaagatggaaagatgtgaggatcagcttgagggtgccctgtgtattccacccatgccagagacctctttattttatcctccagcagtgggaaactggggaaggtgtttaagcccatcctcagttaaattcaaaggcaggataatcttacagtctgtctggagcctcctccctgtgttcaaattcttgtaaaaagaaagaaactaccatctcgtctcttctcttgtggctgcaccatctcgtctcttctcttg

SEQ ID NO: 182725 - DNA, 383 bp, Homo sapiens
tactgtgtgattcaccaaacccactttggagaatttagcatatgaacgaacctgctcatgtacagaaaggtgcaggtacaagattacgcattacagcatgactttgtttgtaatgtgcacattggaaacaacccataagtttattaacaggagtctggtcaggtacaatgtggtactatgaagtctgattagatacaacgtggtacaatgaaacctgattagatataacgtggtactacgaagtctgattagatacgacgcggtacaacgaagcctgattagatacagtgcggtactacgaagcctgattagacacaacgcggtactacgaagcctgattagacacaacgcggtactacgaagcctgattagacacaacgcgg

SEQ ID NO: 182726 - DNA, 536 bp, Homo sapiens
  misc_feature (389)..(389): n is a, c, g, or t
  misc_feature (396)..(396): n is a, c, g, or t
tgctgagattaaaggtgtgagacatgatgcccagccttggttttaagctttaagatgcaagaaaaaataactatttgcttactcatatttatctctttttagtataatagtgtctccctccttccataaggaacatgtgtgacatgggttctaatctatagctgaagagtgaactgacaagaaaaataatgactatttgtacactagaccttctgatgtgattattttaattttttttttggagagagtttcactcttgctgcccagactgtagtgcaatggtgcgatctcagctcactgcaaactccgcctcctgggtttaagcaattctcctgcctcagcctcccaagtagctgggattacgggcatgcactaccacgcccagcccnaaaaggnttttaaaatcagtcacagtcagtcagtgtccaacttgttgattattggctatgaatgaagaaaattgccctccttaaaaagtgactcaatcctaaagcattttattataattaaaatattaatagcaggacgtcaaggca

SEQ ID NO: 182727 - DNA, 398 bp, Homo sapiens
tagggtctctccacatggtagggtctctccacatggtagggtctctccacatgggttctaatctatagctgaagagtgaactgacaagaaaaataatgactatttgtacactagaccttctgatgtgattattttaattttttttttggagagagtttcactcttgctgcccagactgtagtgcaatggtgcgatctcagctcactgcaaactccgcctcctgggtttaagcaattctcctgcctcagcctcccaagtagctgggattacgggcatgcactaccacgcccagctaatttttgtattattagtagagatggggtttcaccatgttggccaggctggtctcaaattcctgacctcaggtgatccacccgcctcggcctcccaaagtgctg

SEQ ID NO: 182728 - DNA, 412 bp, Homo sapiens
cccagactatagatcaaaatcaagatagtgggcatgattatagttgctagggaactttaattttcccaggcccacgcttgacctctgtacatccagactccgggatccagaccatgtgcacctcatgccaccaaacctgagtaccaggccccaaatgggcatttcacaacttcacctgtttatttagctcacaaacaaggcttttgaagctccactattatcctctaagtgctctactttatgcctgtgagagacagaggaactaccttttcttcaaattgagatgcctgacaagaggaaagcatcttccttttggagaatgtggggctgccccccacttcatgcagagccacctagggttcctggagctatcaccagccctatctcccccagcaggaaccaagcacaccca

SEQ ID NO: 182729 - DNA, 354 bp, Homo sapiens
ctcatggtcagagacgggatggtgggtcacgtgtgtctttgggtgttccctccccgatcatctttcctgttccagagatggggccaaaaagatatccttaactgagcacaacttcacctgtttatttagctcacaaacaaggcttttgaagctccactattatcctctaagtgctctactttatgcctgtgagagacagaggaactaccttttcttcaaattgagatgcctgacaagaggaaagcatcttccttttggagaatgtggggctgccccccacttcatgcagagccacctagggttcctggagctatcaccagccctatctcccccagcaggaaccaagcacaccca

SEQ ID NO: 182730 - DNA, 931 bp, Homo sapiens
aaagacttagctcttaggtgactattacttttttttttaggtaaattgaacagcttttcaattagtaattttctttgacttctctcagtgtgcgactgacaatgactgccagtgcttcccttctttgattttacaacactgagctattgaaaatagctaacttttagccatctgaccgaatcactcaaccatcctcaagaaatttacctattaagctgatgatcccaaatgggttcggcattcttatccttacacttgaactgtaaactcgtatctccaactgcccactagccaccttcatctggatgactactagatatctaaaatctaacctgccaccaaagacactgattcactatcctcccaacctgttcctctcgcagtcctccctgccttagtagctgctaaggccaaaagcctgattctttcatcagcaagtcttgctggctcaacctcatcaacttctatcaattctcattacttctaatgcctccatctatcagccccccgccttccattttcattgctagtctctgttccctattttccacacaatagccggtgatttgcttaaaacataaattaattatctgtccaaaagtttcaaataacttcacataacatttaaaataaatttcaagtttcttttcatgggctaaaagacattacatgttttggctcctgacttcctctaaaactttattttctgtgactctcctttgctccctgtactctagccacaccaacattcttgctgttcctcaatcatcttcctgtgctggggtgtttctactgctgtgtcctctatctgaattgccctttgtttggattacttctcgacatcatttcaaggtttctgattaaatgtcatctcctcagagaggcctttcctaaaatctatacctatattgctttccgctccccaacttga

SEQ ID NO: 182731 - DNA, 550 bp, Homo sapiens
atgaagagagaccctcaaggttgaacaaagatgggagggctcacatccattactggttatatttgatcttttgtctcctccagtgcaatgatctttttcatcttcttaattcttaatttagctaggcaatgtttaattattagtttaattcttaatcaaactaggaaaggaagaaaacaccccatttctttgtgcttttttgcctcattgtggtggtttaggtcatgatgaggtctagttgggcaggtcatgatgaagtctagttgtattaggttctgatgatgtctggttgagttagatcatgctgaggtacagtttggtttggtcatgatgaagtttagttgtattagatcatgataacgtctcctttggttatgtcatgatgaagtagttgagtagaatgtaatgaagtcttgttcgattagatcatgatgactggttgagttaggtcattatgaggtatggtttgattaggtcttaatgaagtctagttcagtaacagcatgatgagatctagttggattagacttgatgatgtgtgacttattta

SEQ ID NO: 182732 - DNA, 254 bp, Homo sapiens
ctgttgcacagttctctagtacctttataccacacagtcatgtgccacatagcgaacctttggtcagtgacagacagcatatacgatggtggtcccttaagattataatacttgtctttttttttttaatcggaaaagaattaccattctttttgccaaggtggaattagtaaggctgttgactctggctccacggacaaccttctccttctcccaggtttcacgcgaattctccgtgcctaagcctctcccaa

SEQ ID NO: 182733 - DNA, 3234 bp, Homo sapiens
ccatgtgaccctctcgggtgggactctgcagctgcttcgcagcgcaactctctcaccaaactccgcgcccttgcgctagcggtgccaaaaggctcccgccccgattgaaaaggcgcagtgcatgcccgcccgcgtcactccgcgggcggaggacgcacgtcggggcgcggctctctggctagcgcgcagctccagctctgtcactcgcgcccttccaaggacctggagcacccgagcgcctgcctggtggcggcggcaacaatgcacggagccgccagagcgccagccaccagcgtgagtgccgactgctgcatcccggccggcttgcgcctcggaccggtgcctggtaccttcaagctgggcaagtacctgtcagaccgcagggagcccgggcctaagaaaaaggtattgaccattcagacctctgcccaccaggtgcgcatggtgagaggggagctggtggacgagtcggggggctcccctctggagtggatagggttaatccgggcagccagaaactcccaggaacagactctggaagctattgcagacttacccggaggacagatcttctaccgagcattgcgagacgtccagccaggggaggagctgacagtgtggtattctaactccttggctcagtggttcgacatccccaccacagcgactccgactcacgacgagaaaggggaggagcgctacatctgctggtactgctggaggacgtttagataccccaacagccttaaggcacacctgcgtttccactgcgtgttcagcggcggtggaggcggcgccttcctgcaccacgaacacgcggctcgccaaggcgccgtcccagcggctgatggcctcggtctctccccaaaacccccggcgcccgatttcgccgcgccttcccaggcaggaactttgcgaccccaccccctgggcccgccaccagttcaggcctgcggtgcgcgggagggcatcaagcgcgaggcctcttccgcgccctcggccacctcgccgaccccaggcaagtgggggcagcccaagaagggcaaggagcagctggaccgtgccctggacatgagcggagccgcccgaggacaagggcacttcctcggcatcgtgggcggctcctcggcgggggtcggcagcctggctttctaccccggcgtgcgctcagctttcaagcccgccggcctagcgagggcggcggcggccgctcacggcgacccctaccgggaggagagcagcagcaagcaaggagccggcctcgctttgggcaggctgctgggcgggggccgggcgtgcgggcgccccgggagcggggagaactcggcggcgggcggcgcgggtcaccaccatcaccaccacgcgcaccaccaccaccatcccaagtgcctgctcgctggggacccgccgccgccgccgccgcctggcctgccctgctctggggccctgcgcggcttccctctgctctccgtccccccggaagaggcgtccgccttcaagcacgtggagcgcgccccgcccgcagccgccgcgctgccaggagcgcgttatgcgcagctgccccctgcgccggggttgcccctcgagcgctgcgcgctgccgcccctcgacccgggcggtctcaaagcctatccgggtggtgagtgcagccacctgcccgccgtcatgccggcctttacagtctacaacggggagctgctctacggctcaccggccaccaccgcttattacccgctcaaattgcacttcggcgggctgctgaagtatccggagtccatctcctacttcagcgggcctgcagcggccgccctaagccccgccgagctggggtcgctggccagcatcgaccgagagatcgccatgcacaatcagcagctgtccgagatggctgccgggaagggtcgcggacgcctggactcggggacgttgccaccggccgtcgcggcggcgggaggcaccgggggcggcggcagcggaggcagcggcgcaggtaagcccaagaccggccacctgtgcctctactgtggcaagctgtactcgcgcaagtatgggctcaagatccacatgcggacgcacacgggctacaagccactcaagtgcaaagtctgtctgcggcccttcggcgaccccagcaatctcaacaagcacatccggctgcacgccgagggcaatacgccctaccgctgcgagttctgcggcaaggtacttgtgcgccgccgggacctggagcgacatgtcaagtcccgccaccctggccagagtctgctcgccaaagcgggcgacggcccgggtgccgagcccggctatcccccggagcctggggatcccaagagcgacgacagtgacgtggacgtctgcttcacagacgaccagagcgaccccgaggttgggggcggcggggagcgcgacttgtaacgagtcttcccgggaaggggcggggtgaggacagagaggagtcgagggtttattctcgcagtagaggaactcctggtggtgggaagagggacccaatggacaaaaccgtttttgtttttgagagggcgccagatttgaaacagtgagaggtcccacatctggtgctgaaactcagagcaacagttcagaggtggcgtaaatctggccacctggagagctcgagtgccaccagtacctccgcaccccgggcctctggacttcttggatgagctcaccctgaaccgcccaggcggtctgctcttggtgttcagaatcacatcaatgcgaacgtcacagcgccttcgagggcgcagattttaactgccacgtatttttaagttgtacttttctgtggaggaaattgtgccttttgaaacgacgttttgtgtgtgtatttcacgttagcatttcattgcataggcaaaacactagtcacaattgggtagatgtgacatccatatacttgtttacattttatctgttctcatgtcaaagactactccttgccccattgaatatatagtggtagcaggtgtacaaattggtcaagttgcaattatttatgagagaataatgataaatgtaaaatatctaaagcatgaatctaagagcacgcaatatataattttaaagaaaatattctatttggtagaatacaaatgtggtgtgtgttgttttataatgactgctgtacagtgggtatagtattttggttttggttccagattgtgcaatctttaagaaaaataaagatacaaacgagagttttgttcacttagt

SEQ ID NO: 182734 - DNA, 644 bp, Homo sapiens
ctgcctcgaaggtacattgccttcccaagcccgcccagtgtggctcagcttcctcacaggctctctgttctgttggaaatgctgggtttaaactgtcacgtggcagtgttggagcagcttcttccctacaggcctgtgaaatcaagcccaactctgggttttatttttctctttatttatttttataaaagccttaaaatttttataaaagccttatctcagtagagatatagctcacttaccatgttatgcaaccatcacttctatctgattctagaacattttcatcacctcagaagcccctacccattaggagtcactcctcttttccccatccccagcccctgtcaaccacggctctttctgtctctatggatttgccttttctggaccttgtgtctaagtggaatcataccgcctgtgctcctttgtgtctgccttcttccagcatcatgtctgcaaggctcatccatgctgtagcattcatcagcacttcatttctttctgttaccaaataaccttccattgtacagatttaccacattttgtttatccgtctattggtggacatttggttgtttctcttgttaactattatgaataatgctgctatgaacatttgtgtacaagtttttgtgtggaca

SEQ ID NO: 182735 - DNA, 698 bp, Homo sapiens
ctgcctcgaaggtacattgccttcccaagcccgcccagtgtggctcagcttcctcacaggctctctgttctgttggaaatgctgggtttaaactgtcacgtggcagtgttggagcagcttcttccctacaggcctgtgaaatcaagcccaactctgggttttatttttctctttatttatttttataaaagccttaaaatttttataaaagccttatctcagtagagatatagctcacttaccataaaattcacccttttaaagtatccaagtctatgatttttaagtacactcccagtgttatgcaaccatcacttctatctgattctagaacattttcatcacctcagaagcccctacccattaggagtcactcctcttttccccatccccagcccctgtcaaccacggctctttctgtctctatggatttgccttttctggaccttgtgtctaagtggaatcataccgcctgtgctcctttgtgtctgccttcttccagcatcatgtctgcaaggctcatccatgctgtagcattcatcagcacttcatttctttctgttaccaaataaccttccattgtacagatttaccacattttgtttatccgtctattggtggacatttggttgtttctcttgttaactattatgaataatgctgctatgaacatttgtgtacaagtttttgtgtggaca

SEQ ID NO: 182736 - DNA, 919 bp, Homo sapiens
catggagattgtgggtagaacattcccttgaccctctcgccaacacatgcctacacaccaggttagcagtttacctctttgtaaatctgaagcggtggtagtagtgatggtggaaggagtgaataagggcctaacctggctagctttctgtttgcctgtcttgcaaatggtccagcaacaggtgttttcttaaaaaaagcatgaacttggattgaggcttgactgcgagttcttgcaaaatataactgctccttgttgacttggaagatgctggatgtggggcccctcaatgggggtttggattttgtccttagagctggattttgcaacaaatagtgcccatcgttgtgtctgcgagaggtctctggccacttcaatggcatttactcttgtcagacatttaatcagtctcccagcggaagggcagcaaaacatgaatcctattggctaaaagagtgtacgctattcaaactatagtaggttgtgagtggctaaatgagttttgattgtagagtttcttccagaaattggcttcatcaaattctgctttattctgactttatcatatacagcatgccttgttttagtgggttcttgcttggagcttagtttattatacctgaatctcctaccatttaaaagccaatttataaacagggacttggagtgtgactccactaatgtgtgtctgtgatcctggttagaaacccacttggctgccttttcctcaggaggtgggggttgggggaagggagctgccgggaagtgattgataaggtttcctttatagattctgtggtgcttcactggagctcagagcactttggcaacttaagcactccaaattaaaagctcattaacaattcctgcccaaagatcctgtaaataatcagctagctaggtcatagagcttggctaa

SEQ ID NO: 182737 - DNA, 785 bp, Homo sapiens
caggagaaatatttgtaaaagatgcatctgatctaaaaacaaacaaacaaaaaaaacctgttatccaaaatgtacaaataataggccgggcgcggtagctcacacttctaatcacagcactttgggtggccgaggcaggcggatcacttgaggccagtagttcgagattggcctggccaacctaatgaaaccctgtctctcactaaaaatacaaaaattagctgggtgtggtggtttatgcctgtagtcccagctacttaggaggctgaggcaggaaaatcgcttgaacccagtatgcggaggttgcagtgagccgaaaccgcatcactgcactccagcctcggcaacagagggagactctgtctcaaaaaaagaaaaaaaaaaatcatacctacataatgaagcttacatttaaaaaaaaataataatactaggtctacagaacttctagacagctgaatatgtggaagttccctcctgaagggtggcacccctggagatggcatgggatctccacattccttatctcataccttcccctatgcatctcttcaatctggctgttcatctgtatcttttctaatatcctttataacaaatgggttaagtgtaagtaaaaagcttctgagtttcagcaagttaatcaaacccagggagggagttatgtgaactctgatttatagccagttggtaagaagcatttgggacttgaaattggcatctgaagtggagggcagtcttgtggtagtgagtcctcagtctgtgggttctgacgctatctctac

SEQ ID NO: 182738 - DNA, 276 bp, Homo sapiens
agcgaactgtgatcacaccattgctctccagcttaggtgacagagcaaataaaataaaataaaaaatttaaaaaaaagtctcaaaaaataaaatggctgtttctacagaaaaactaaggagaatttaattgatttaaagaaaataaacatatcgtagttatttccggtgagagtttggaataattgtttatctaaacaattctcaccttttccaccttgctatgtctgcagagaccttagctattttccggacacctgtgctctcctgctgctttg

SEQ ID NO: 182739 - DNA, 248 bp, Homo sapiens
agggaggagcagcaccactagggacaccatcactccacagggcactccagacatccacatcacagggcacaggttgctcaatggagaattctgtctctctccttgtttctctttttcacctgagccgaatggctaacactcctgacctttggttgcctgtgtacacctgagaaggtttctcatatttcacctgttcaagaagaagaagagaccaggaacctcattccgctgcgctgaggagtaaatgt

SEQ ID NO: 182740 - DNA, 444 bp, Homo sapiens
gttacatgtccctataagaagcagaatttgaaaggaagtttgaatagtgttgaatttagatagaaggaaggagatgccatgcctggtgaccgaaaactatatgaacagaacaaaggtaaataaaggtgtatgtgtgggtaagcatcttttatattgggcacagtgagaagtcatagtttcagggagtaataaagaataaggtttacctgaaccaagaactgcttctgtattttaatttttaattttaaactcctttataattgtataccaatatcaattgcataccagaatggtatgtgactcacagatacactagaattttgaacatttctagatctgtatttaattacttttgcatatttaattacttttgcatatttaaccctacatttctttttttcttcttcatttttttttttttttttgagacagggtctagctctg

SEQ ID NO: 182741 - DNA, 533 bp, Homo sapiens
aggaggctgaggcaggagaatcacttgaactcaggaggcggaggtgatagggagccaagatcgcgccactgtactcactccagccttggtgtcagaggagactctgtctggggggagggatgggagggagaagaattagaggatctctctctccagctctctcctctctgtggttccactcattttctgattcataagaatcccttttcctctttgatttctgtaagatttatctgattgtggacctctgtgactggtgcccacccttggggcaaggccgttagagaagtaggagcagggaaagtgggggaaggaaattaaccctatcttaggttactttgccaacatttgactcctctctacatcctgcctgattttgttttgttttcctagttctgaggtagttgctgtttatattttgttgagaatttctagttgtgagcagaggaagaatggctgggcacttaccatgatagctccatgactttaaataccctattggcaactctcagatttacctgtgttgcctggac

SEQ ID NO: 182742 - DNA, 486 bp, Homo sapiens
aatgaactctggctgccatgtggagattagaattattggagtgttcaaggcaatagtagatagtggcctgtaaacagtcttatattccaggcataacttggagatattgcaggttccgttccagactatagcaataaaatgtatattgcagtaacacgaggagtcatacaatttttttgtttcccagtgtatataaaagttatgtttttactatactgtattctattaagtgtacaatagccttatgttgaaaaaaccaatgtacaatgtaattttaaaaatattttattgcaaaaaaaatgctaacaatcatcagagccttcagctagttgtaatcttgtaatctttttgctggtggaaggtcttgtgttgatgttgatggctgctgactgatcagggtggtggttgctgaaggttggagtgactgaggtaattaaaaaaaataagaccgtaatacagtttgccccaacagttgactttctttca

SEQ ID NO: 182743 - DNA, 460 bp, Homo sapiens
acatacaaaaaggtcattatataatgctaaaggggtcaattaaataagaagatataataattgtaaatgtatgtgcacccaacataagagcaccttgatatgtaaagcaaatgttatcagatctaaagggagagatagactctaatacgaaattcccctgagagtgggaatttcaacaacccactctgagaattgagcaaattatttaaacagaaatccaacaaagaaacatcaagtttaaattgcacagtagaccaaataaacctaacagatgtctacagaacatttcatccactggttgcagaatacatattcttatcagcacacgggacgttctccagaatagaccataagtcaggctacaaaacaagtctcaacaaattgtttaaaaattaaaaacatatcaagtgttttttctgacaaatatgaaataaagctagaaatcaataacaagcagaac

SEQ ID NO: 182744 - DNA, 315 bp, Homo sapiens
gaaagggaggaggagaggagcaaattacaacaatatattatacagtattttctttatgaattggttgagagttttaaaatgataatacagtggtgttagggtacagtgagagaaatgctatcacatattgctacatagatgaaaatcaggacagccttgagcagtttggaaacttataccaagatttttcaaatgttcaaactctttgacttagtaattcctttcttagaaatctgctccagagacaggaagatcacttgagcacaggagtttaagaccagcctggataacatagtgagaccccccacccccaac

SEQ ID NO: 182745 - DNA, 407 bp, Homo sapiens
atagtattggatgaaattacctagatggtgtcagtagagaatggaagcaaagagcattgacatctgaggagtgggacattccagtgattcaagtttacaagatgagtaggtgacagttgaaaggaggagaatgacagtaaatgatatttcaagagccaagtaaagaacatatttcaaaatcacattggccactggctttgacaacatggagctcactgattgattacattaacaagagcaattatagttttagaggtgtatgtaagggagggagtggattcaggaagtagagacaactctttcagaagagatttatgtcaagaaagcagacaatcatgatatgtttggtgggtgctatgaggtcaaagtactttttttttcaagttgatagatattaatgcattatc

SEQ ID NO: 182746 - DNA, 345 bp, Homo sapiens
cctaggcaaaccagatggaaactaaatcgtttctgcagaatgaacgatttgtgaaatcttggcaaattgaattccaaatatacttagagatgatcttgactttctctgtaactctaccacaacatgcaatgcatttaaggcctacatgggaaatacactaattagttgcataacctttatgcagaaatgaatgagaacagaagatcaccatcaaaggaataaaagtcagtaactccgaaaaagaagtaatatgcagatgggacatcttcactaagaaagtatgagtttaatgtagatattgtgggaggtattcccttgtcatctttgaattggttctttttaacc

SEQ ID NO: 182747 - DNA, 460 bp, Homo sapiens
  misc_feature (21)..(21): n is a, c, g, or t
agaggagatacggctcatttnagatctcatttcagtttcaattaaaattatttttagtatgtgactagtaggccatggctaacatacaaaattttttccttcttcaatgttataatattctcaccaattatgctgcaaaatcagtgtttccccaagtatacaagatggtttcagactatattaatataggaatgaacattttccattttaacagtactatttactttaataagtattaggaaaaaactagtacatcaaaactatttcatagattactaagtgatataatgtgatatatcactataataaatgagaataaatgcaaatagtaaagtttatgaagggactatgggactcattgaagttcagtgaattttttttttttttttttgagacaaattttcgttttgtcacccaggttggagtacaggggggctatcttggctcactgcaacctcgc

SEQ ID NO: 182748 - DNA, 499 bp, Homo sapiens
gttcttggctcactgcatcctccgcctctcgggttcaggtgattctcctgcctcagcctcccgagtagctgggattacaggtgccctccaccacacctggctaattttttttttttttgtatttttagtagagttgggatttcaccatgttggccaggctggtcttgaactcctgaccgcaggtgattcgcccgcctcggcctcccaaagtgctgggattgcaggcgtgagccacggcgtacctggccaaaggtacaagttttaaatatgcttttatcatgcatacagtactcttatagattctgtcagatttagggatattcttttcagattgataaattgcacaaaaatcttggagtatattcttgtaatttcttctacaaaattctcaaaacaacctttttccaatggggagaagacatgaacactgaagtcatgtttttggaaaataccttgttaaaaacagaccccatgcccacaggatcctgcagagtcacct

SEQ ID NO: 182749 - DNA, 437 bp, Homo sapiens
tcccgccatttactccatggtgaagtcatgtttttggaaaataccttgttaaaaacagacactgctgtaagggtttccttgcttatgctcttttgtagaactttattgatgtgaagagttctcctttttctgtaaaagcttattttagagtacgaagtaaatgaggcactcagagagttaacctcatcaggtctgagtttagttcagtttaaactttttgctcttatgctggttgatatctttgtaactactctacttctagagttattttgattggaaaatgaattccttttttagaacatggaattgtaaggtagaaaactgctaggttctcaaaagaagggagataaattccaacttgaaagttttttcccctaacgttctaatgctttgtttttcctgtgtgtaaatgccttccttaggaacaaggaaaatta

SEQ ID NO: 182750 - DNA, 107 bp, Homo sapiens
tcgtgtaggggaacacgggaagctactgagggttttttaaaatggcgtgatatctcagatttagatcattgaactgttaagactgaatcttatgggatcaagactgg

SEQ ID NO: 182751 - DNA, 260 bp, Homo sapiens
aggttgcagtgagccaagattgtgccactgcactccagcctggaagacagagtgggactccatctcaaaaaagaaaaaaaaaaaaaaaaagctaaatctaagtaaagcacttagaacaatggctggcccatagtaaatgccgtgttagtgtgttagttgctgttcttccacgtcagaagaggcacagacaaattaccaccaggtggcgctcagagtctgcggaggcatcacaacagccctgaatttgaatcctgctctgc

SEQ ID NO: 182752 - DNA, 242 bp, Homo sapiens
aggaaaacaggcatgagccaccatggccagcttcagatctccctttggtgtcagtttcaggaaggaaaaaccaagaaacaagaatgttgactatttgcctggctaagacctgacacaggaatccttttaaacagctttagagttgaaagttgacttaattagaagctgatatttaggatatatgtgtatacaattttttcgaggcctctgctttctataaaagcttcttggaggccgggcgc

SEQ ID NO: 182753 - DNA, 338 bp, Homo sapiens
  misc_feature (255)..(255): n is a, c, g, or t
  misc_feature (260)..(260): n is a, c, g, or t
  misc_feature (296)..(296): n is a, c, g, or t
agagtttggagcctactccatctttcctgagcgtatacacagccctactcatgcatgtggccctctagatttccaggaatatgttggaccctttcaaagcccttacagactccccagcttttcctctcaatctttagactagtgtgttgttttcttcaacagttatctgtcaggcagcagcaaattaagagattagcataaatgttttcaactcctccacccaaagtgctgggattacaggcgtgaccaccgtgnccggncttctttacattttgattgctcacagtcaaacattnctattggattgtaaaataagcaaacctagagttgtggagatt

SEQ ID NO: 182754 - DNA, 319 bp, Homo sapiens
ttgaaaagtgaaaagaacaggtgtcagttgagaactgttattgaaagcttgcttttcgaaagtatgctgagagtgtctagagaaaaatagcttatctttcagtaatagtgctttaaaacagataatgccacccctttggtgttaaaatggaagagataatgccacccctttggtgttatagaggcatttttctttattcatcacaatttaaatttagtattgtagagcctttcacaaaatttgtcccctcttacggaattttgaggtcttcttattttagaaaaatatgccttcattacattttatttgcttgttcgtt

SEQ ID NO: 182755 - DNA, 560 bp, Homo sapiens
tttgctaacatgaatgatgctgcagtggccgtgtgtgtagctgcatcatttcacacatgtacgtttatctgtaaggacatttcagtttaaaataatttcagtcttagtggaaatgtttcaaaacaatacaaggaattcccatatacccttcatccatattcccccaaatgttaacattttactacatttgatttcgctgtttagctatttttttcctgaattttctgagagtgacttgtagatataatgcccttttaactgtaaatattttttagtgtgtatttcctaaaatcaaggacatccttgtacataatcatagtaaagtcatcaatatcaggaaattaaaattgacccagtactattgtccactgtaccgaccttattgaaattttatcattggtgtcagtaacatacttgataacaaatgaaaaggattttgtcaacagttacactttcctttggtaaaaaggaataagttttgataaacagttatactttcatgtagtcatgtagatttacccttctaggagcaattattggagcacctgtttcctcacagc

SEQ ID NO: 182756 - DNA, 367 bp, Homo sapiens
gtttaatttagttacatgtattctgtttttttcccccctctggaaacatttatgaccttctctttgtcttgatgctctgaaatgttttattgatatgctttgtcagtgttcatttattgttttggagaatcatgcatttattctgtaaatatagagaaatggccatgtagcagacactgctttaggcactggagatagagcagtgaacagaatagacaaaatcctttccctctttgaatttacactctagtggtaaaggcaaaaattaaataaactagtacataatgaaatgccagatagtaataaggatttaagagaaatgcaaaccatggtaatgggaaagataagagcaggataattttagata

SEQ ID NO: 182757 - DNA, 109 bp, Homo sapiens
atacctcttttcttaacatcactggttcacccttcttgacctcccttgtaggtttatgcttccctctgagcctcagtcccatatctccacttgtctactgacattgcca

SEQ ID NO: 182758 - DNA, 195 bp, Homo sapiens
attttgggaaagggcatcaccacagcccacatcacagggccacagactcagggcagcggggattacagagtatccctcacacccccacctaatcacccgcaaactttgtcaaatttaccacctcaacagcttctttattgcccctcctctgaaattcaattgctactgctttagtgtagaccctcatttcccttt

SEQ ID NO: 182759 - DNA, 476 bp, Homo sapiens
caggctgcaaaccagcggagcagggtccaaaaggggaaagtgcagttgtcttattttctcctgcgcctgcgatctgcgggcaggtaagagccagtgggtcttctcccatctgaacctgtttgtgcccttgaggctctacttgaatccttatggctcctctgattttctgcaccatcagccagactgaggagaaatggctgttgatagctttaaagtgttaacactccgaaaagtatctctatattaactggtaagagcttaaagccttgaaccaaaagcgttagagttctaatagcttaaaggagaaaagccggtatggttttaacaatatattgtttatcaaatgtggaaagccattgataaaattaaatagggaacaagacatttgttcaatgaaatcctaagtaaccattaaaaacaatgggatagcttcttataaactggccttccaggctggagtgcagtggcacagtctt

SEQ ID NO: 182760 - DNA, 289 bp, Homo sapiens
attttacagagcttgtatttttatttgaaatattctgtttgctattaaaatgtgagaaaaattaaaactcaattttgagaagtttgaacttgatactctttagcaaagctattatgtttgaaataattgaactggaatattttaacccaataaggatgtattttgcttaagctactggaactattccttaaagttgctcctctgaacaaggagtaaaatttatatatatgaaatttgtgactaaagattttgatttgttattggaccttatattattgtaaaacaaaaa

SEQ ID NO: 182761 - DNA, 533 bp, Homo sapiens
caaggcgatatccccccaacttgggaaatgaggtacaggagagcgaccctctactttatagtgttgccaaggctgtccaacttactggttcagataaattacagcccaaaatcagagcaatttcacccatggtggtcactgttccacagtggggacggtgctctgctggtgactatcaactcggtgatctcagtcattttccattcagggctttagtttcttcaactgcaaaactataagctggaatgagattatctccatgttccccactatctttataattgaataacagaaataattgaaagacccgggaacaacaatttcgcagtcagagtaccctaatgctgaattacaacctgatgccaactaccatggcagttaaaagagactccgtgcccctggcactaggtcagacgttgtgggtagaatcacaggggaaagggagtgacaccctgactcggagtgggaggagggagattaacccatcacagagctactaaggaatgcttacagagcctcacatagcagcactg

SEQ ID NO: 182762 - DNA, 478 bp, Homo sapiens
gtatcagccggtatcaatgagtattggcccgtatcaatgagtttggccagtattgatgagtattggctggcattgatgagtatcggttggcgttgatgagtatcggctggcattgatgagtatcggctggcgttgatgagtatcggctggcattgatgagtttggctgggcgtgggtggcgcggtgccttgccccctggccaggctggctcgtgggtgaaatgtgacatttaggcggttttctcctgtccttttagtttgtatttatgtggtatccgggtaccatggggagatctggcattcagggcagtattgagtattggccggtcttgacgagcagcagccggttctgggccaccgtgggtagcattgatgagtattgactggtatcaatgagtatcagcctgtatcaatgagtattggcccgtatcaatgagtttggccagtattgatgagtattggctggcattgatgagtat

SEQ ID NO: 182763 - DNA, 352 bp, Homo sapiens
gtatcagccggtatcaatgagtattggcccgtatcaatgagtttggccagtattgatgagtattggctggcattgatgagtatcggttggcgttgatgagtatcggctggcattgatgagtatcggctggcgttgatgagtatcggctggcattgatgagtttggctgggcgtgggtggcgcggtgccttgccccctggccaggctggctcgtgggtgaaatgtgacatttaggcggttttctcctgtccttttagtttgtatttatgtggtatccgggtaccatggggagatctggcattcagggcaggaggctgcagcgcaggtcatgggggctcaggcgcaggtgatgg

SEQ ID NO: 182764 - DNA, 377 bp, Homo sapiens
tctttgctcctgcattatttactactgttagagattgaaaggatataactcaaaacactatgttaagggttagtaatggctcatgtcactctcctgcctctacccgttttcccaacataacatacccacacagagcagtacatccacattcgtgtgtatgtttgttcaggcgtttttttctctggaccactatcgtttctcatattaaaatataaagggccctaaactagaaagttagttcttacagaattccatataaactggctcactctacttgcctggagggtgaggggaaaagaatgattaagaaggaggacagttggtttctctatataatgttgacattagccagtcattattgtctgcttatatgacct

SEQ ID NO: 182765 - DNA, 949 bp, Homo sapiens
cgcagatgccaatgacccagaccaccaatcagcctcccatcgccaatggtgtcctggagtatttggagaaagaactgcggaacctcaacctggcccagcctctgccccctgacctcaaaggcagatttggccatccctgcagcatgctgtcctccctgggctctgaggtcgtggaacgcagaatcatccacctgcccccactgatcagagacctgtcatcctcaaggaggaccagtgactccctgcaccagcagtggctcaccccaattccctccaggccctgggatctgagggaggggagaagccaccaccattaccctgatttccaccaggagctccaggaccgggggccaaagtcttgggcattggaaagaagggagttggacccatcgtggagtggaaggcaccgtagctctaggctgaatgggtcacccatacactggtcagacagggacagcctaagcgatgtcccctcatccagtgaggcacgctggcggccgagccaccctcctttcaggagccgctgtcaggagaggccccgcaggcccagcccccgggagagcactcagaggcacgggagacgacgcaggcaccgcagctactctcctcccttgccctccggcctcagttcctggagctctgaagaggacaaggagaggcagccccagagctggcgggcccaccgccgcggctcgcactccccacactggcccgaggagaagccgcctagctaccgctcacttgatatcactccaggcaagaatagcaggaaaaaagggagtgtggagaggcgctcggagaaagacagctctcatagtggaaggagtgtggtcatttagtcaccaagcacagcacaacttctgtggctacttctcggctcctgtgtgtcatcagcatcacctaggtttccagctgacttgggaactgcaagtctgagtctaacagtttt

SEQ ID NO: 182766 - DNA, 350 bp, Homo sapiens
aggagatggagattgcagtgagccgagattgtgccactgtactccagcctgggcttaacagagcaagatcctgtcttgaaaataaataaataaatatgataacatgtgaagtgcatagcacagtgcctggctcttacccacagttaatgtcagctgtttcaagatatttgatatctaaagctccaagtataatgcttggcacgtcatagacacttagtgactggtccatttctttggggagtacttatgtggacgtggcatgtcttcactagcttatttatttattttaagcagaaccttatttctagcatctaactactgcctccgtggttggcaagggtgacttcatg

SEQ ID NO: 182767 - DNA, 294 bp, Homo sapiens
atttattgggcaattaatgtgtactaggccctgttctaactgcattacatcaagaaatctgaaacaacaagaaactaagtaattataaaatatattcagctagaaaatgaggaagccagaatccaaacctaggcagttagcttcagagcctttactcttaactaccgtgctttaatggcctttagtacagttcgctctcattctcagcaagtcctaaaatccaaggacgcagagggctgactgtaagggcttgagcattgtgagtgttggtattcatggaggtgctggaaataa

SEQ ID NO: 182768 - DNA, 144 bp, Homo sapiens
gcagaggccgccatgtaggggaacgggccccgagggcagagcctgcagtgatctccagtgttctggggtaagtggcagcggcttcttggcagagctgtgctgctgtgtcacagggctgtagcgtcagcacctcccttgaaggca

SEQ ID NO: 182769 - DNA, 245 bp, Homo sapiens
atttgcaaggacttgtcatcgcctttcaagtcgtctctgaaactcagttgtcctgactacttcccaagaagagccccgctgaaaacttagaaaccagtggcctaccagaacgcctttggaaatagcccacattgcactggcctgggagagctttctggcagagccttgctgctccctggggtggccactgatcgagaattcggcatcatgctggacaagagggaagatgaaatgaacaaccagtc

SEQ ID NO: 182770 - DNA, 317 bp, Homo sapiens
ctgactctagaggagcccgctgatcgcttaggggatggatacctaccccattttccatgaagcgattattatgcattacatgactgcttcaaaatatctcatgtagcccaaaaatatatacacctgttaggtacccacaaaaattaaaaataattttaaaaatgattgaatcacaagagccaagggcagagtttgtttcaataatgatggagtaatatcaatattgccaccagttataatgaggtaatgaatggtaagtattgagaagcagtcattatttttagcaaaaatgcaaaaaaaaaaaaaattcagggact

SEQ ID NO: 182771 - DNA, 539 bp, Homo sapiens
acacaacaatggaagctgagaaaggaggcggtctcaaagaaaagatgagtaagacttccacaggaagcagaaatcaaaaagaaaaaaggctgaaaaaatggccgacttaataagtaggagtttgtcaatggacttctctggaactgtggggaaagaaaccaagtttcaaagggcaactggatgaatgggttaaagaggaagaggaggcagtcttttaaaaagtttggcagtaaaaggagggaaagggtaagaaaagtaagtagtctgatgaggagaagcagcaagactgttaataagagtataaggtgaggagcaggagccaaaagaaaaggaaaagttgaagacagaagatacatggagaagatgtaagaaagaaacaggaggaccagactccagcacgtcaagagggaataggatacaacacacaagtgaaaggctacccttgggaaataagtcaccttctgctctaagacagaaatgaaagaaaagagattttgacaaatggacatggtgaaaagttactctgaatcaaccttgaa

SEQ ID NO: 182772 - DNA, 318 bp, Homo sapiens
agtactaatattacatgaaccttcacacctcttgggctggtatgagaattaagtgaaaatttgtaaagaaattagcacattgtgttatatgtacacagtaagcaccatgtaaacatttgttaaataaattccagtcaatggacccatattttaaaaagtcttagctcttcatctaaagattagctagcctcttttgtgtgttttatgttaaaataagatgtttaaggcatgctttatatctttttccctcggtttaacaattctgattaatctgtttcaatctcactgcaagacaactgtttcttacatactgcctag

SEQ ID NO: 182773 - DNA, 489 bp, Homo sapiens
cagttgtaaaccccaaatggtcatttttaccccgattctctatggttactaatagtaaaaactccaggaaaccacctggagagttgccctcttgcttcaggcactagtgaggagagaagtctggaagccatagcccattggtcctggccaagaaggagagtaaacacgtggaagagtgggtggtggagctgcacagcagcaggcgagcaaatatgcagagtctggccagaggacaagaggtcagccaggcccagagctagcctggaagtctatgccctgaggagatgttcaagagtctggtggagtttggagacataaggacactaagcaccagcctcctaagaggactccctgcccactgtcctctctcctgctgccattctccacagtgcagccaaagcaatctttcttaaagacatatcagatttgcttagagtccttcacttgctccctatgattttcaagataaagttgaatttgtgacctggc

SEQ ID NO: 182774 - DNA, 636 bp, Homo sapiens
cctgtaatcccaacactttgggaggccaaggtgggtggatcacctgaggtcaggagttcgagagcagcctggccaacatggcaaaaccccatctctactaaaaatacacaaacacacaaaaatagctgggcgtggtggcgggcacctgtggtcccagctactcagaaggctgaggcagaggtgggaaaatcccacctgagactgggattgcagcactgcactgtgtatgagacgctccccacaataacaaattataagtagtttccatagcaccaaactattagcacccaggcatacattagagaaacatgtattctagcaagaagcctggttaaggtacaaattagttaaggcacttcacaaatacctacctaatcaggatctggcaatgtgctaatacacaaaagacaaaagaagctttctattcaggtaaaatcaaaagtctttgtaaataaccaagctgtgaaaagcagttacaaggggagttctccccagaattcattaacaaaagaatacttaaccacctcgggcaatgtatttacacccattaaagccctaaggacagatggaccaatttgaccaagagttcctttcagccctgtgagtcttgtctttagttagctattgtttaggtta

SEQ ID NO: 182775 - DNA, 661 bp, Homo sapiens
gggcagtgaatcgtagcgttctcatagctgttcctgtgtagaaacggtatgctagatgggagttagtaagaatgatatatttgatgtagttcattaactagtagtattcatgcagaatactaggagaattcaggaaagcaccacccatattgtgggttaaattgtgtctgtcaaaaatatacttagaagtcctagtctataatacctgaatgtgaccctatttggaaatgaggtctttgcagatgtaataaagtcaggatgagataattagatagggccttaatcaatatgactgtttctctttcgcccaggcttgagtgcagtggtgcaatctcagctcattgcaacctccgcctctttggttcaagcaattctcctgcctcagcagctgggattacaggtgtgtgccaccatgcccagctaatttttgtatttttagtagagatgtggtttcactatattggccaggctggtctctaactcccgacctcaagtgatctgtccacctcagcctccgagagtgctggaattacagccgtgagccaccacacccagcacaatatgactgttcttatgaggagagaaagacataaagggaagatggccatgtggcgatgacagaaatacatattggagtgataaatctgtgagacaaggaaca

SEQ ID NO: 182776 - DNA, 531 bp, Homo sapiens
acccccacccacccgctagatacttacaggtatcctagcctagctgatcccttttcttgcaggcctggcatttaccctttcatgggttttagtaaaacatttataattttttaaaacttcattaactagtagtattcatgcagaatactaggagaattcaggaaagcaccacccatattgtgggttaaattgtgtctgtcaaaaatatacttagaagtcctagtctataatacctgaatgtgaccctatttggaaatgaggtctttgcagatgtaataaagtcaggatgagataattagatagggccttaatcaatatgactgtttctctttcgcccaggcttgagtgcagtggtgcaatctcagctcattgcaacctccgcctctttggttcaagcacactcctgtagtcccagctacttgggaggctgtggcaagagaattggttgaactgaacccgagagggacgcggaggtcacagtgagccgacatcgtaccactggactccatcctggcgacagagtgagaccct

SEQ ID NO: 182777 - DNA, 1254 bp, Homo sapiens
ctgtgatctttcccaatattgactggggtttgttgagtgtctgtaatcccacaggtggatgttcatgatctgaagtgacaatggtatatttgctcagcatttcctgtacctgaaacaacccttgaaaactgaaatagaaagagcaagtcaatggtaatatcatccagcactctgccaggcttatggcgaccttgcttacccgaaagcaaattacttccctctcatttctatataataagtactttacggctttgtgttttcatgcattgagatttccctaggagtctgagaagatgtccaggaataaaagagggaagaacaatgattaaactatttctaggactttagacattggattatattcagaaacccataatcagaccgttaatgaatgtcttcgcattcattatcagactctgaaaaagcatatccagtctctccatggactggccttcacatatgctttgctatctggtagaaatatctgcccaaaagattattttttatggaaataatagtgcacatgcagattctagatattattttctatttatcaactgcattcaggcagtgctaagtagatgactgatgctgaaattttactagatgatctttgctctctattttgttatatgacacatggggcaaatacgtgagatgagcaattagtgaaattctggaagggacagatttatgtcatactattgaaagggacaggaagtggattaagtatgatatatatatagtatgtgtgtgtgtgtaggtgtgtgtgtgtacgtataacaagttagtttccttttcctaccactgaaattgttaaatggaatggtgacgtagacactttacttctctactcctggacttactagtaaagaagaaatatataaaagagcaagatagtattgatctggggtggtactatggtatgtattaataccataccgtaattctatgatctattaatgtcacaaccagctacatttagctggcttttatatacgaatgtgcatagtactgttttgtattaaatatcaccagaagatatttgtcacataaaacggaaatacgttttattttgcgactcatgcagagtgaagaggctggggggaaataagtttcgggaacccattacaacaaaataaaggataggggcgatataagaagaaaaaaaaggggggaagcgaaaaatatggaaaacgaaaagggcgaggtgtaaaaaaaaaggggtcatggggggttattaagagatgaaga

SEQ ID NO: 182778 - DNA, 666 bp, Homo sapiens
tggatgccctgactttacagaccatcatcgtgtaggaggtgaggctgctgaggagaagatgctttacacacgcaagggttgtaataatgactttcaaggtactcagtctaatcacaaaatagagctttaaaggtgaattatttttgaaatgttcatatttagtattttcctcataggcagaattttgaaagagtgcgtatctgaggcctgacatattgttttgggagctaaaatgtgtttaaaatgtaacgttcagaggaagttaactgctaacttttctcagttgtaagatgattccagattcccatgtatataaaatacatcagtcttaagacaaattaaacaaaatgtattatgtattttctttaaattattattttttgcacttcaggcataaatatttttaaatatgaaaactccacataaacatatgcgtacaactctgagctcatgtcaaaaatgtctgcgactgcctcatcatagttttggaaataaacatctttattaaaagacattcaacaaacttaaaattttttttaagggggaggatggaatcaaggttaacagaaggaagtgcctttaatttttgtatacttttgtaatttgttttacccctggaaattagcatgtattatttttaaaattcagaaaaataaagtcagcatt

SEQ ID NO: 182779 - DNA, 199 bp, Homo sapiens
cgctaacaaattgtataacctagaagaaactgataaattcatagaaacatacaacctacgaagactgaatcataaagaaataagaaatttgaacagacctataactgagaggacattgaaacagtaatcaaaaacctttcagtaataacgacaacaataaaaagcctaggcccagatggcttcagtggagaattctact

SEQ ID NO: 182780 - DNA, 164 bp, Homo sapiens
ttcaccttcctctatgcccattccctttgccccactagctgttactctcaagaatagatgctgactttactcttatgaactgtacatgacttgacctgaaaggggaatcgttttccttactcctcattgtggagtattttctttcccctactctaaaaatctgt

SEQ ID NO: 182781 - DNA, 623 bp, Homo sapiens
acctgtcccgcaagttgacaagtagaatgggggacgaaaatgtccgctctttcccaccctgtctttctccttcccggggctttatcatgacactccaggaggctttgttacaaggcagcgcttatttaaagcctttcagccctgctatgctctgcgctttgcagtttacaaagcgcttttcacctctcctctcgtttaacttcaggaaaattatctgaggtagcagtcacaaattcccatttcacaaatgacgacccgagaggagaagggactggcttaagattagtggtgctgtcaaagcactggacttgctcattaggaaacagagaaagcctcaactctggcactaagggcaaaaaccagccttctccagccccagtcccacgcctgggctcttctgcagcccagaacaaaactcctgggtggagaactcttactttcccattcttctcaaccaggcaagtcatcctgacctctgcacctgggacagccagcttgtctagctgaatgaaggagaacccttgaactccatacctgcaaagattcttagggagaggagggcggcccaatacctgcactcttcaaggtcacaaggctgggtctggaatttgggccgacgggtg

SEQ ID NO: 182782 - DNA, 613 bp, Homo sapiens
cccacagggctgcattcatttctggaggctcaagggatgaatctgtttcccagcccttcccagcttctaggggctgcccacattccttggctcatggcccctgcttctatcttcaaaggcagcaagagcaggttcagttcttatcacattgcctcactttgacctcctcttctgcctctctcttccatttataaagacccctgggactatgttgaacccatctggataatccagaacaatctccctattttaaggtcagttaattagcaaccttaactccatctgcaaccgtcattaccctctgccatgtgacatatcctattcacaggttccaaggattatgatgtagacatctttgggaagagcattctttggcctgccatgctctctttcctttgccactgaaaccagcaatgatctggatgagaaagcctccatcaacctaaatcccagggctgtcccactacatgacagatgtgtagcataagggagaatgaaagctcttgagccactaagatttgggggttcttaccggccacaggctagcttctcctggctgatacaaaaagtgagtattggctgggcacagtggctcatgcctgtaatcccaaca

SEQ ID NO: 182783 - DNA, 278 bp, Homo sapiens
ggtggttctgtggggtgtcccttccctatctttgttccctcactgagacattttgacctgcaaaagagctagactccagaagaagaaatagggacccaaggctgttcatgaggaccacttcctgacacaaggtacacacaaatcaaatcataaagtcccagaggcagggctgggtaggtcaagatgggcctcaggatccctgggagaaagtaggctctggcccagaggactggtgcatccctgaaatgcctaactgctaaagccatccccacacaagt

SEQ ID NO: 182784 - DNA, 549 bp, Homo sapiens
tataaaattctctgggaagaatttggcatgattgatccaaattgggtggaaagcaataagatgcaaagacagagaggaagagagacagaaaaagagagaaaaagagtttctgtagttcagtatttcaggaaatagtagatatttgttttcacaatgatttatttggtatcatagtaaatgaaactgctaaagaatcctcagatttattaaacaaaagaaaacttacctatatgatgagcaccttgacttggaaaagggagaggctcaacaaaaactatcttcactcaaaagtttactccatgattaggaagtccccaaagttagtaattcacacaaaaactatttgaatcactgtaaaagatgtttaaatttttatttccaaggttcactaatacattcgttttgagaaagttattagtttggtcacttcagctagtacaaatacatgacataactattttgtgcccagaatcttgttaggtaccagaagaaacacgaagaaaatctatgcttcagttcttacccacaactgagttactgtcttctgaa

SEQ ID NO: 182785 - DNA, 420 bp, Homo sapiens
gctcttcctactatcaggagtgggtgtgtgtgtgtgtgtgtgtgtgtgtgtgtcagacatgggattgaggagtggcccagagctcccaccaccatggaaatgcagctcccatggccacccacacttccacccaggggcagctcaaggctcaccccttcaatagagcctttccttgccactctgtcctacatgaatcacacctgcctaggggtacaaataataatgcaacagaatgttttagaataccatttttccatttccatctaagtgtgccaagtgttggcgggggggtgtggtgggcagagtccattttatagcccacagcaatgaggatcctaccttgaaattatgcacagtgatgatatcacaaatgctggcaatctcaagcaagtattcagccaccttggttggcagcctggg

SEQ ID NO: 182786 - DNA, 457 bp, Homo sapiens
atgaatctcatactatgaacacaaggatagtaataggccaaggagcatttaaatatttatgcatattctacttagatttatatttggaaacattttaaccctggtagaagaaacgtttctcttctcatgatctactatattttctaggactttaaaagtgggtatgttagtacagaaaagcagcaaaggagccaatccaccctgtagctttgaacaaagacaattctattaaactttcctttacaaatcatgattagggaattggctgagagtaacaatatgcatcataaataaattgaaaattgttccaggtattatcacacaataaaatatatgtaacactgatgctgtattcaagatcaagacaccttaatattttattcgtttccaagtcacttagaaaacctgcattagtttaggatgttcgttaatagtattgtaatcttggggaaaaaaa

SEQ ID NO: 182787 - DNA, 861 bp, Homo sapiens
actctattaaccaaattgtattatacaaagtgattattccactaaaataatatgatacaacttaggaggagatgatgaaatgaacatagcatacaaaataaaaacaaaacatttcccccgttttcttaacattatttctgatttgatctgtaattgatcttacagttactacttgtgcattctttttcttaaaatatttagtatttgcctgtgagtcctagcacagatgaaaaccacgtggatctagaattctttaaccttttccacttaattagtaaagaatctgtcataatggtgtttttacacagcatcttcagcaagataacaaagagcttggtagctcagcattacattgtcatggcaactgcccaagaatgtttttggtgtttttggggtgtgtgtgtgtgcacgcacgtgtgcacagggacgtgctttaaattgaaactgtagtcaggttcttaaaatgtcgactattcatttttagatttctaaagctatgtccaaaccaagagaaattacatttatttgggattcttgaaattctcctcttgctatgttttattttctagtatatttaagagtcataataagttcaagttcatacacatatgcatctacccatctctggatagttcataatcttactcagtttttcttgaaatcatgaagaaaccatttttttcttttctaaatatgagatatttataacaccaaatgtaaaaaatattgacagtaaataattggcaagaagccagtggaacaggggctcttgaaatgagcgtgcagagacatgaatgggcagctggacactttcaaccacggtcttgcaggactttgcttagaagtggatgttaaacccca

SEQ ID NO: 182788 - DNA, 502 bp, Homo sapiens
agcagttcttcttcatctgtgtggtcttggcattgctggaccgtggtcttctcctctgtaaaatgggaataataatagcacccacctcataggtctataatgagggcaacctgagataatgcagggagagccgtgggcacaggctgccactcactaaggggggttccaagatgaaggcgtggcctctttgggcctctctcttgctctgtatggggaaaaggttggactcatcatctcaaaggacccttccagctctgagtcagtaatgagctccttctcttcccaggtgcaggtaagaggtgctgcctggcccaccttgttgcaggcagtggtgactgatggagtgtcagggcctggagtcaggaggagacttctgcctctgatggcttgctcaagactttacacctgggtgtcaggttgtcagggactctggtgacctcatctttctcctgtctgtctgtctgtctgtctggtgagctgagatcacgccattgcactccag

SEQ ID NO: 182789 - DNA, 209 bp, Homo sapiens
ctcaggtgactctgacactggtgttggcagtgaggggtcccttgggacctgcagtgttaccatcaggaaggaggggtccccagagccaaaggcagctccttctggtccttgtgcttgttgatgacaggaagttgaatgtggcttttagttaaaacaaaaaactgttctggaaaccagcttggtttcagctcatcactgtcatctgaaca

SEQ ID NO: 182790 - DNA, 430 bp, Homo sapiens
agaggagggagctttccaagaatgaatgttccggggaggaagaaagcagaagttatgggtcttcttaaggtccttaagaggcgttgaagtcccagaccaccacttctgcttcattctaacaggtcaaagctgtcacaaggccagcagggaaacaatggcagtgaaagtaaactccacctgttggtggcaaaatggcagcacacgctgggaagggtggagttgacagtggctgtctttggagatgactacactaatattgtcccttttggaatctcaaaggacagtgcaaggctcttggacaaaaagaggtcagaaagctctcaggacaaagggcaaagggcaaagggtaaaggctgcagcagtgattgatcaatcttgtcgcctactgatattccctctacccccacctctccactctctatgccttgtc

SEQ ID NO: 182791 - DNA, 156 bp, Homo sapiens
agggagactgattcagtgaacaaataaagacggttgacatttaaccaggattttaatgggtgtgccaaattgcaagatacatacacatgtccactttgggaatcatgtttaataaacaatttgccctaagaatttgattcaatcagcatctcccag

SEQ ID NO: 182792 - DNA, 186 bp, Homo sapiens
tcctatgtcttcctccctctccctactctgccagtaaccaagtgacaacaatattgctagtcatctatttttttaatcatgtgattttcttacaaaagacaaggacaattgctcagattgttgtttccaaaaaaaaggcacatgatggttagatgagattccataccattcagttgcaaattcaag

SEQ ID NO: 182793 - DNA, 315 bp, Homo sapiens
acatactcctttgccacaaagtgggatgggtgtgcttggccccagggccatgacccccttcggatcttgcagacttcttgcaaacttgaagtggcagcagcacatacaggctaatgactaagcagttcccactgcgctttaaagtcttgccttaggctttcaattgtgcttatcattcaaaatgctcttttttgcaaaagagcccattttgtcagttttcttcttgtttagatttaatgattaatcagaaaagtggttttttgtttttaggtttttttgtctggtttggagataacattggaggcttaacgcctg

SEQ ID NO: 182794 - DNA, 117 bp, Homo sapiens
cgtataattatagctattcctgtttgcttttagtttccatttgcactgaatattttttccatccacttccagtctgtgtgtgtatacaggtgatacaagtttcttgtagatagcata

SEQ ID NO: 182795 - DNA, 510 bp, Homo sapiens
ttctatatttggggatttgaaataaaacattcatgttggaaaagctatgaatgatgcttcacttcccttggaggcaaactccttgctaatgagtgatgtcaaagaatatttcactcctccagaaaaactgaaattccctgtaatctcatggctcataaatgaaaagaaatgagaaaaatttccctaagtttgacaataattctaaactttaatatgaaattgctaatcatgcaagttggggagtttaaaaatatattttaaatattcaataatgtaaaaacactatttttcaccacattgaaaagaaaaactaaattattttttaagcttctccatagaaagagatgtaaaattgtcatatgaagaggcactaaagtgttctagagatgacagactcctaacttgaaatttgttatggtaatttttgtttgtgttttttgtggcatttaactttataagtatacagtttgttgtgtcttattttctcattaaaaataaatattttacttc

SEQ ID NO: 182796 - DNA, 325 bp, Homo sapiens
tacaaaaaaattaaaaaattagccgtgcatggtggcgctaatagaacctatagttctagctactggggaggctgaggcaggaggatcacttgagtccaggaattcaaggctggagtgagctatgattatgtcactgcagtccagcttgggcaacacagtgagaagaaccccatgtacatcatctgccaacctcataattggtattgtgacatcatttaatgcaaggaaacagactcagggaggtcagggaacttgcctaaggttgcagagctaattaaaggatggagactgagttcaggcccaggacaaaggataatgatccaag

SEQ ID NO: 182797 - DNA, 626 bp, Homo sapiens
tggctagtgttttccatcaggaggcaattatggcaaaactacaatatcctttcatgtacaggtgtaggcatacgttttgagaactacctaggagtggaattgctaggctatgtgataagtgtatgtttaactttattagaaatggcaaaactattatccaaagtgactgttttacatttccagctgcaatctatgagagttccaaattttccactttctctccaacttagtgttggaggttccagccagggcaatcaggcaagagaaagaaataaagggtattcaatttggaagagaggaagtcaaattgtctctgtttgtggattacaatattgtatatttagaaaacaccatcgtctcagcccaaaacctccttaagctgataggcagcttcagcagtgtctcaggaaacaaaatcagtgtgcaaaaatcacaagcattcctatacaccaataacagacaaacagagagccaaaccatgagtgaacccccattcacaattgctacaaagagaataaaatacctgtgaatccagtttacaagggatgtgaaggacttcttcagggagaactacaaaccactgctcaacgaaataacagaggacacagacaaatggaaaaacattc

SEQ ID NO: 182798 - DNA, 300 bp, Homo sapiens
taattttacttatttcctacttattactaacttgacttaataatatcttaaaaggaggaggatcattaaacattcctttgggggagacaaatacatcacgtcccatcccccaactaggttgcctaatctactaggaaggatgagaaagacatttctcatctgcaactgcatcaaatgggaacccaaactgaaagatggttttcattttttaaaaaattacaagccttaaaatatgtttctggaaacgtatcatattagcattttatgattgtagacaattcagctatgtgaattgaaaga

SEQ ID NO: 182799 - DNA, 356 bp, Homo sapiens
tgctgggattacaggtgtgagccaccgctcccagcccagacctttcttactgacagaatctggtctgggccagaggtctgatacagacctttcttactgactcatggataaaaacattgtctctccagaaccaaaggccaggcatgggcagccatgtggcccaaggtctagtctatgagagagtgggggcagtcccagccccttgaagactgggggcagccccttctcactaggcagggctcagctttacccacttcagtagaggatttttcagtttttattcaaacttcctgtttttcttcccaattacacacatcttttttcattgtagaaaacttagaaaatgcaagtgagca

SEQ ID NO: 182800 - DNA, 258 bp, Homo sapiens
agtccttcagactgatttgttaatgcctctcttgcaactatgtctggatttcacacaggatcaagtcattctacttctccccttagcagtctaaacctattttgctgccagatcactctcaagcttgaacacatctactatctcaatgttctttgttcaaaactaagttcaaaacaaaactttgttcttgcgtagcaacttctcaaccttacatttgaagtgttgcaaatttttcaactattactgattctatgctat

SEQ ID NO: 182801 - DNA, 211 bp, Homo sapiens
tggttttatcaaatggaaaagatttctctcatcccatcattcaacattgtaagcacatgtgaagcatgaattacttcaaggatcataactccaagacataataataatatagcaagaataacaatggtgaaatatatcttgacagtttttgagatcttgtacctttggaaagtaaaagaaacggggatatgacttctggggatgacttctg

SEQ ID NO: 182802 - DNA, 300 bp, Homo sapiens
ctgacatcctttcttttattggaagacaaatccaacatttgttagacatccaacatttgttggaagtctaccttacaagaaaccacctcttatctgcaacataaacagaagctacatcaggttgaaaatccacatagaagactggagaaaattgccgtcccctttcgcactaggttttaccaggggcccaagatgtcagaggaaagtccgcggagggccaaacacaggtttacctaattatgaatctcagattagaatgtcttattgtgtggaaaagtcagaactcaggaaatgtgtctg

SEQ ID NO: 182803 - DNA, 546 bp, Homo sapiens
atcgttcattctgttagtgtggtgtatgacgtttattaatttgtgtattttgaactatccttgcaaataaccacttgattatagtgaatggtccttttaatgtgctgttgaattcagtttcctagtattttgttgaaagttttgcgtctagtttcatcagtactattgacctgtaattttcttttcttatagtatccttatctggccttggtataagggcaatactggccttttaaaatgagtttggaagtgttcctgcctctttaattctttggatgaatttgagaagaattggtactagcttgtgcttaagtgtttggtggaaatcagctatgaagccatctggtcctcagcttttctttgttgggaggtttttgactactgctttagtcttctttcttgttattggtctgttcagctattaatatgtcttcacttgtccaggtacagtgtgtaatcccagcattttgggaggccaaggtgggaggatcacttgagaccaggagttggagaccaaactgggtaacatagcaagactggtctcta

SEQ ID NO: 182804 - DNA, 307 bp, Homo sapiens
ctaagttggttttgttttgttttttataaagaggataagaaatgaaggggggcaacttcaaactggcttagacaggatgctgtagttttgctaaatttttcccaagcatgtttctatttaaaatcatctttttggattattctggaagaaagggtaacttatctcatccaaaattggtgtttccaatttccttatataacaaggcttgaatgttgtggaggaagtaggcaaaaactaaagaaccaagaaagatcaaaaagcaagagacctataacccgtaaggttaagaggttatgaccctagggcc

SEQ ID NO: 182805 - DNA, 625 bp, Homo sapiens
ctctaagcaactccccacacaatagctaaaggaatctttctaaaaacctgagtgtgtaccccttaacagctccccagtccttcgtttgacttcctcagagccctatttattgcttaccacaccctgcactccagccctactaacctgcttgacattccaagactacacgccattttaaaccccacatgttgacaccaactgcagtgtttcttcggcatggaaggtccttgccctgcccccttattttacttggagaattatttagaatgccctcctgatttccagtttgcttttagattacaaaatgatatccataatgattagaaagatacataacttatacatacatccgaaaaagaagtcatctgaaaatctacaaatttttataaatcagtaagaaaaacttacgacacaatattttttttaaagggtagggggcaaaagacttaaaaaggcgcttcacaaaacaggaaactcaaatgaccaagaaacatatgaaaagatgttggctgggcctggtggctcacgcctgtaatcccagcactttgggaggccgaggtgggcagatcacgaagtcaagagatcaagaccatcctggccaacatggtgaaaccccatctctacc

SEQ ID NO: 182806 - DNA, 417 bp, Homo sapiens
tggccgactctagagtatcccagcggacgcctttatctacttggagaattagtttagaatgccctcctgatttccagtttgcttttagattacaaaatgatatccataatgattagaaagatacataacttatacatacatccgaaaaagaagtcatctgaaaatctacaaatttttataaatcagtaagaaaaacttacgacacaatattttttttaaagggtagggggcaaaagacttaaaaaggcgcttcacaaaacaggaaactcaaatgaccaagaaacatatgaaaagatgttggctgggcctggtggctcacgcctgtaatcccagcactttgggaggccgaggtgggcagatcacgaagtcaagagatcaagaccatcctggccaacatggtgaaaccccatctctacc

SEQ ID NO: 182807 - DNA, 236 bp, Homo sapiens
taaggcagattggatttggcctgtggcctatagtttgctgggattgatggaaggttctttaccatgtaaagaaaccaggagacaaaggaagttttcgcagtagtcagctatagtttccttgtcatacatccttggagtagcatcaatgtattacaaggttttcacccgtccttagtgaaatacataaagttaggaatctcaactacttgttttaatatgttggcctttgttttttt

SEQ ID NO: 182808 - DNA, 220 bp, Homo sapiens
ttgccactacacaaaacttaggttattttaaaacttggaagccatgtaatgtcaataatcaaccccacattatagcccgtcacagtaattctctgaagaatatgtagcagtttttgattatgtcctgatcaaaggataaggtagtcgggttgggtaaggaaatacagagtaggtcccaggtcaccatggtccaagcccaggtgctcagtgtgtgtcctct

SEQ ID NO: 182809 - DNA, 653 bp, Homo sapiens
ctgcaggattcagtaagaccaccaatttttagagccaatgcattataaagtcatattcaaaagaattttggggttctgtattctgtggccttcaacttaatggaatataagaatgttcttttataattataatctccaaattagcctagttgtgtatgagagagggagacagagaaagagagagagagaaaagccaaaaaaggtggtgtattaaaatagctacacttaacatgcttctttacaaattatttagagacaaggctgactgtgccaaactcatttaaaaaatgcaattctagatgacatttaggttttcacatagtcattaaaatacattttagacacagcttagatttggaataaatgtgcagaagtgacataagtatctagatcacttccaaaataaacagtggcactatagtacctcctgccagtcttcttcgatggcaccccctactggatcattgaggaacttattcgtgttctaaattagagaaatgattcacgaggaaacagttgattttgaaaatgcctaaagactggttatttagtaaacaatatttgatttaggaagattgaccttgccaggtactaagagaatacacattaaaaaagtggtatcaaggcatgatatatatttatgatgtgtttaa

SEQ ID NO: 182810 - DNA, 505 bp, Homo sapiens
aggctggagttcagtggtgcgatcttggctcaccgcaacctctgctttccaggctcaggggattcttgtgcctcagcttcctgagtagcaaggattacaggcccgtgccaccacacccggctaatttttgtattttagtagagacggggtttcaccatgtttgccagactggtctcgaactccgtacctcaggtgatccactcgcttcagcctccgaaagtgctgggattacaggtgtgagccaccatgatggcccagttcttgaattttgatgactacagttcaaattgattgtatcaagagttcaatacctgaatttatttggtttggatattggatgtcaagagagttcaggataatttcatctgaaaatttataaatttattcatatctgttcagttcttgattttttttcttttttttttttgtttgtttgtttgtttgtttttgtttgtggagatagcctcactctgtcttccaggctggagttcagtggtgcgatctt

SEQ ID NO: 182811 - DNA, 262 bp, Homo sapiens
gctctatactttctatattaaaaaaaaaatccaagtgctacttttccttcccttgccagctggtatcatgagcctgttcttttgaagttagagagataagtagaaaataagaccatttgtcactccctgctgccaggcagctgggttgcaagatgagggagcacctgagttttcagagaccattggcagggacacgctggcagggccctccaagtccctttggttttcttcaattactcccttgccccttcaagtgcttgta

SEQ ID NO: 182812 - DNA, 544 bp, Homo sapiens
agtgcaccctctccagagtgaagcaggatgctcgtttctttagggaaagaccctgccttggtgtgggaaatagagcctccaggggcggccctgccccacacctgcctggggcctagggaaatcctgccccaagatccagacccagacacctgccactctgacagctggcacagggatgggggctggggacatcacaccacccgcattctctgcagggatacccagccatccattttaggctaaaagccttctccgcatctcagccttccccaaaattttacaaatactagaagataaaagcgcaggaaccagcatgaatgaagttggtttttaagagacagtgtttaacatcaagatccttctgatgtgagtaatttggattctgatgcaattctggattgtttgttgaattatgcatcagcagcttctgttgctgtaaaaagcaccaccgtcactcgagctaatctgaaacctgcagcaatgaagacagttgggttcacagtttggatactgagatgcgtctttgatgatagtgaaccagcag

SEQ ID NO: 182813 - DNA, 222 bp, Homo sapiens
acaacagaaaaggaagaggaagtgaggtagggaggctatttaagccttgggagtcggaagtagggaggttgaaactgtgacatgggtgaccagggagttgggaagggacccttggaggtggctgtggcaggagaatcgctggaacacgggaggcagaggttgcagtgagccgagatcgcgccactgcactccagcctgggcgacacagcaagactctgtctc

SEQ ID NO: 182814 - DNA, 778 bp, Homo sapiens
ttccctcaaaataaggtagctagtaaatggcagagctaacattcaaccttatccatgtctgactacaaagtaatccatccattacttaccttttttcatggtaagcttttgctttttggtcaacaccatgcactgtgccttgagtacatgtaccaacattggaagaccattcccatgtgatatttgtaatagaattaggtattcaaatcacgcattcttgagacaattaaagaatgtaggatttatttacatacaaagttgagagaacgtgcatcatgctgtgtcaggcttcctttccatgattctgttagttttcagtgcaggtatttgccacctgacttgggtttcctagatgtctataatcaatgaaatattttctctttttaaaaactatttttaaaatacatgttttaacagtgttgaattacaagatgttttaagataatataaacctggacccaaatttctatgtaaatgtttattttatagagacaagtaaattaaccaaataattcagtgaatcttcattgagaacctaatatgacctaggtaccgtgctaggtgtcagagaccggctatatggtttagtagaaagagaaatggtagacgctgtgccaagcatagtgcctggaacaagcagaaagtccataagaaatatatgttaactgaaaggaagaacaaaatggaaactgtgtctgtctgagtcacccaaattagtaatgtctgtgagtttatttcctcatctgaaatgaagggtaataaacctacctattcagaa

SEQ ID NO: 182815 - DNA, 298 bp, Homo sapiens
tgctgtgaaatattaacagtgcctgctacatacatgtcatggcctaggagaaacagaaagaacttgatagcctggaggtagaaagaggcacatgtgtttgaacagtgattctcaagaagtggatcctggactagcagcatcagtatcatttgggaccttgttagaaatgcacattctcctaggagatgtaggagaagaaggttttgggggagtgatgagaatttttatttttgcacatgctgaatttaaaggaatcatgggtgggctaggcacagtggctcatccctacaatccaagc

SEQ ID NO: 182816 - DNA, 381 bp, Homo sapiens
tactgaatgctgcccttcattcacgaaaagaaacagtgcatgttagcacctcctgaaatattagtatctggctccaggatgctttgtccaggtcatttggcatggagctatttcaggctcacaagtagaatacatatgtgcggttagcagagtgaagaggagctgtgggtctgtgaggtatggaacagggaagtgggctttggggctgtgcagacctgctctacacccaggctctgtagcgtcgcgaatgggtagcttgggtgcatcacatcaccttcctgaatgttaacccttcatatgcccagtgggggagagaagcacctgccctgcaagatgcaatcaggatgcaaaacatgttggggtgatgcaggtgatggtaat

SEQ ID NO: 182817 - DNA, 155 bp, Homo sapiens
attaaggtaattcaacggaggtacaataattttttaataaatggtgctggagcaactggatgcacatatgtaaaaatactaatcttcatccttacttcatatgacacaaaaatgaactcaaaacagatcacagaatgtaagaagaactataaaag

SEQ ID NO: 182818 - DNA, 377 bp, Homo sapiens
atcactcaatgtatcagaagtcatctcaaaaaatctgtatgttaattttcctattagctttcactaaatttcacattatgtcttctttccatctcatatacataatacagatattaccaacaaagtaggctatagtatagtcccattagaaaaaaatctttgtgttatatgttaagtacatgtataggcatgtgtgcacatgtatgtgcatgtatacatacacacaccataacactcctaaaagaggaatgagttaaatgacaatgaatacatattcattgggactacaaacaatatttgcacgtggaacagcaaatggctccattcttttaaatctagatgatgagctgggtgcggtggtacatgcttgtaatccc

SEQ ID NO: 182819 - DNA, 375 bp, Homo sapiens
gtgggtagttgagggagtagggaggggctgaacaacttctcaaaggtattccatgacagaacacagaaggctggaccactgccagtttctggggaaaccaggactgaagggattggcagtggaccgagaggccactcaaggggctgacctttaggagtatgtctacagtcagagtacaagttggctagggctactacatccaagggcacagactgggtggcttaaacaacaaaaatgtatttcctcacagttctggaggctggaagtccaagatcaaggtgtcagtggggttggcttcctttgaaggcaactctccttggttggtaagtggcatcttctccatgtgtcttcacatggtcttccctatgtgtctgc

SEQ ID NO: 182820 - DNA, 326 bp, Homo sapiens
cataaagaaagagattactaattcccatgtggtactaaaggttataaagagttaaatcacagcatatgaaaacctgtgtttaaataatttttaggcaatgacacaagctgaggagggaaataaaattaataagtgacaggaatgaggggctgtcagcaccaactccaaatttcatgctccttggcttgatcctgtattttatttaacacagatttctacatatgcaaaatttgcctcttcttgtgaggtcttgtacaaagttgaagaaccttgggctgtgagcttatctgagagatacaatgaagcgggatgaactgcttgggcag

SEQ ID NO: 182821 - DNA, 169 bp, Homo sapiens
aagaagtgcctggcagcattgtgcacatagatgtgtagtaaatatttgctgaaggaatgcttcaattaatatccaaggcacaagagatatgttatagacgaggaacttgacttagaaagatttagttgcttggggtaacacagctcttaaacagtggaggtgggcttca

SEQ ID NO: 182822 - DNA, 386 bp, Homo sapiens
tttaattcattaagaaccatgttgattttgctatacttaagaacttaagtcattatatgttaagtttaaaaacaagcagaatcgtgaggaaaccttgtatcatctaggtttttttattcaactgtggtaaaatataacaaacttccagtttaatcattttaagtgtacagttcaataacattatagttacattgttttgcagctatcaccatcatataagtggaatcctatggtatttgtctttttgtgactggcttatttcacttagcataatgtcattgaggttcatctgtctatgttatagcttgtgccagaatttgctgaacttttaagactgaatactatcctattttcctatctagttttagcatacatagtacataatg

SEQ ID NO: 182823 - DNA, 576 bp, Homo sapiens
gaaggctgagagctgactgggctaatgaggcagggaagtacattctagaaataaatacaaacactgaggaaggagagagcctggtactttcaggacattgcacttgttcctgtggctggtacagaggtgatgtgccaaaggggaagagaagaggccacagaagctgcagaagtcagcctgtgtctgcagaaacaatcccttctgcttcttatgacaccatcagcacctgttaattataacactgctccaggtagagttaaaattccatgcatgcatgatctcttaaattacccgtctgtggaatatagcatgatgtaattctgtggttaagtttttaaaagtaagtaagtgtcatccagaaagaaatgtgacttggcttgcgacctgggtatgttcttgaatttgtcttaatggattcacggcttttctgtttccgggattggggaataattatctgtaatgtgaaatcatctacatttattctgaaaattcacctgtcagaacaagtctatctataccttttctctctgaataaacagcttccaaacgaccaaagaaaaaggtttccttttttga

SEQ ID NO: 182824 - DNA, 556 bp, Homo sapiens
ggacttgagtatcctttgttatcctcaggagatcctgaaactagtcccccatggatactgagggctgactgtatagtcctatcctcacggaactttcattctaatgagggaagactgactataaacaaaatatacgtaataggtggtggtaagtaccgtggagaagtaacaaatggggcaaagtgagttatacagctccattcttagaaaccttggagtacttttcttagtttatactcgtggtggtttccttttgtctcctttattacatgggactctgacatgtgcccatagctaggggtggcagtaggatctacccgaaaagcatcctgctgatacaggaccaaagcatcctgttgttctcgagcctataaaaagagctaatggtcttgcttctcttaactgtggcctcctacactgtgttttggatgattggtgatgtcttggatattctgtttctttggaactttgaatatacaacactttactagggaagtagcaatggaagcagagcaaagatgtacagaggaaacaatgcataactctgatggaattg

SEQ ID NO: 182825 - DNA, 577 bp, Homo sapiens
atttgctccttgagtgatcacttccacattcgaatggtttcaactttattccaacaaaggtagatctttatctctactgaggacctggctcctgagcttctgactcacatagtaactgtttgctagtcagatatacctatatccctcacagccatttcaaagtcaagtgaacaaaaccaaactcatcatcatttcatggctcaccactgcaacaaaaaataaataactctaactctgtctccattattttattttagtttatggtatcaccatccatttagatacccatactaaatatttggtggttatcctgtttttacttcccacattcaactttccatcaaggtcagatagttttagccccataatatttatctagttcttttctcctccagccctttgacaactggcctagttcatattgtcattatttttctttcagatgtctacagctagcaccataaaatcaacaagcagccaacctaaaatataaatctgataccactactctcctgcttttatttttcaatggcccctatagtctggaggataaaacccaactatcttaatgttgttt

SEQ ID NO: 182826 - DNA, 519 bp, Homo sapiens
agacatgaaaaggataagcgttggcattttgcaaaataaagtttaatttgtaaatttaaaagtttaatgattgcctgttaaagtattggcttttggttcttttagctggggcagtaaacctagatgaagtgaagttttttatttaaaagaaactgtactttctgtactttgaaaactgaactagtaagattgaatttatttggaaatggcagtgaaacttgaactctgtaagcacctcttaggtggcagatgccgtgctacctggtaaatggctgtgtcaggtactgtgctgagcaggactgacagggagcttacagtttagagaatgcagacatgtccacaagcaacgatagtacagcagccgtaaaatgataggggaagggtagtgttataaggccgtccatgggagggatagatacgtaaccgattttgcacgtcataaaatgcttcccactggtgacatctaagctgagacctgaaaggtgagtaggatttggtcaggtgaagaaagagggaagg

SEQ ID NO: 182827 - DNA, 198 bp, Homo sapiens
agcaattgtttctttccctttttatctagtaaattgctccctctacctcctcccagtttgggaaaaaaatacaagtatgaagaagaaagtaaaaatcactcctatggttaggttaggcttgactgcagaattgtttcctttttttttctttttatctttttttttgagacggagtctcactgttgcccaggctggagt

SEQ ID NO: 182828 - DNA, 220 bp, Homo sapiens
cttgaggataacccacaccaaactcaaaccatgtagtagaaaagttgctaaaagttcctttcaacttgcaggtatagacaactaaagttttggcaactcaactaacaaggaaactgagaatagaaaatgttaccttttctattactcatttattctatcacccttatatgcaaatttgaaggacattccaattaaaactcattctgaatatgatctgatg

SEQ ID NO: 182829 - DNA, 297 bp, Homo sapiens
tctctcaactggattactacaacagcccccagcaggtatcccaactcccatacttgcctggatttagaccacatcatccaagaagaagtctgggatggtggaaatgttctgtatctgggctggctactgagcatctgaaatgtacctactgaaactgaggaactgaattttcaactttattgcttcaattaatttaaattccaatggctacacatgcccagtggctactagactggaggtttagaatactgtccatacagcagctgagggatgctttttaaagccagagtcagattt

SEQ ID NO: 182830 - DNA, 613 bp, Homo sapiens
tggtgacgattcaatactataattgcgatgagatcatatcaaatattgatattagctgatgactatggtaacactagtcacagctgagccatgtagtatactgtgattatttttccttttctgcacaaccttttattttccctggagttcatgatggtcttcctttttcatttgcttcattttctatattcttattgctaatttagtccaagttatataaacttttttttttttttctttaatcacccaggctggagtgtagtggcacgatctgggctcactgcaacctccgcctcccagattcaagtgatccacccaccttggcctcccaaagtgctgggactacaggtgtgagccattacacccggcaaattcatttttataatcttgccacccccacaaccactgccctcatggaccctgggcacgcctcacccgaattacagaaattccctcccagctggtaaaactgtttgtgtgtggctctccttcattccatcctccctggtttagccagagaaataattctaaaatgtacacatcccaaagcatctcattttcctgcatgcagtctttcatcatccattcactaactggaggacaacatctgaat

SEQ ID NO: 182831 - DNA, 300 bp, Homo sapiens
accacaaggcgcactcgttattagaggccagagagggacagatgcttggtgggaattgtagtgcgaagccaagaggctcccccctcccccccttcccccctgccccaagtgcttagaccgaaggcggcgctgcgccaccgggggacgccctgggctcatttctctgacagtccttctactagcttcattttccttgtcaacaaaatggggataatcacatctaccttggaattgttatgaggatcacatggagaaacacaagtgaaatgctctgtagatataaagcatgtatcaacgatg

SEQ ID NO: 182832 - DNA, 520 bp, Homo sapiens
gtaggtaggattacaggcgcccaccaccacgcctggctaatgtttttgtatttttagtagagacagggtatcaccatgttggccaggctagtctcgaactcctgacctcaggtgatccacccaccttggcctccgaaagtgctgggatttcaggtgtgagccaccgcacccggcccactttaattctctcaaggtggtttggtacagtcattcccaaagagacaacatcaaaaacacctgggaaatgtcttaaacatgcagaccctgaggttctacctttcttcccatcccctaaacttcttcattattatatctgggcagggcctggaaatctgtattttaaataagtgcctccagtgagttttgcttttatgcactttgggaacccaaggacagatcctgggactctgaggccaagccctgggcttagtttctcctggcactgtctctgtctgcctggatgatctcctggtcacgaaggttcttcgtgtctcagggttatcaggtgtgagtgtctgat

SEQ ID NO: 182833 - DNA, 308 bp, Homo sapiens
ccccgtacgcccaaccatataattgtcaggctagaggaccacctgttgagtgatgcataaactttcactgcatttttgttgcaaagagctactgtttctctgattagtgtgacgtcggcatggcctagtctttacatcagtgctcccgggaggctggcccaacgttgggaggtgcagcaaatgcatatgggagggaatcgtgtttgagccatgtggcaggaaggttgtgcacctgggcactggggctagtttattcctgggttcaaatcctgcctctgcctctcactagtgggtgaccttgggcaaga

SEQ ID NO: 182834 - DNA, 694 bp, Homo sapiens
atttttaggaaccagtcttaactttttgaaacctaaatattaagcttgttttattatacatttttgataaaagaataagtaattaaggaaatggatgaaagagggaaagaagtgggagcaagtaacaaaatgttgctcatgcatttccatgagtcctttggatcctttgatcaatcacagctcaccaaaacgagtcagtgcacaactgcacgtggttgccacaggttataagaatctcagtgcctgaacggacctggcaagtaatctcatctcatggtttactttcttaagcctttgagctgtttcttcaaagtaaaggttacccaggaacccaatggtaaagcagatagatacagagctggcatagctgacagggagtggggagaggatggtgctttggccctcctctccttcccccacccctccagcttgaaatctctgccctgtgggggaagctggaaaggctgttcaaagctagaaaggctgttcaacctgtgcatgagcattttcaagagactggaaagtaactacctctccaggcaatccattttttctccagacagttcagactgtcagttcctacaagcagtgaaaaatcagccgaagttgtgttccttgggtccgtagagaataggtttaatatcttatccatatattaggtcatcacatgtttgaagacatgattatagttctt

SEQ ID NO: 182835 - DNA, 436 bp, Homo sapiens
cacatctggcaaaagcacagaaactcaaaatacttcaataaccatttactcaagaagatttaccttgataccagcagagcatacacagataaacaaaatgtgctcacctctctcaccttccccatccccagaacagggaccacatataccaggagtccaaaggagggggaggatcactggggcgggctcaacttcttacctcactcttagtaaaaggaaagatttagttacatgctaaaggcaactggtactctctgaacttctggattttattgctcttttgtaatcttattttctacttgaaaatgggaaattaggccgggcacggtggctcatgcctgtattcccagcactttgggaggccaaggcggctggatcatgaggtcaggagatcaagaccatcctggctaacacgctggaaccctgtctctactaa

SEQ ID NO: 182836 - DNA, 455 bp, Homo sapiens
gagataacatttttaaattaaaaacaatgcttgactctaaaagtaatgagctgtcttgtgtacctcatatactgtattagtctgttctcacactgctataaagaactacctgagactgggcaatttatgaagaggtttagttgattcagttcctcaggcttaacaggaggcctcaggaaacttacaatcatgaccaaaggggaagcaagcatgtcttatcacaggagagcaagagagagtgagagcgagagagcgagcgagcgagagagagagacacacgcacttttaaaccatcagatctcataagaacctcactatcatgagaacagaaagggggaaatccacccccatgatccaatcacctcccaccaggcccctcctttgatacatggggattaccattcaatgtgagatttgggtggggacacagagccaaaccatatcatgtactatct

SEQ ID NO: 182837 - DNA, 245 bp, Homo sapiens
gggcagaggattacctcctacgagcgcagcgggagcgttataaaagccgtcgttgcgtccaaggcatctgtgagcccgcggagtatacaccatgagcaaagctcaccctcccgagctgaaaaaatttatggacaagaagttatcattgaaattaaatggtggcagacatgtccaaggaatattgcggggatttgatccctttatgaaccttgtgatagatgaatgtgtggaaatggcgactagtg

SEQ ID NO: 182838 - DNA, 282 bp, Homo sapiens
ctaccagtaatctgtgaagttaatattttttatctgttttacagatgaagagaagttcaagaagaatggtgtttgagccatattaaaacttcaatataggttgttaattattaacaatattgcaatagcaataatagtggttttagtattagttcctatctaatactttagttccttttaaaattccttgactgatgaacacttcagtgattagttagtaattctctcatcttccggatgagaattctgaggtctaggtcgatcccataacttgattattgc

SEQ ID NO: 182839 - DNA, 173 bp, Homo sapiens
ctactataatgtttatacaaagaaaagtccctgaatcttgtgtatttctgtaagcttagctttgacagacagcatctctcctactgtttggtttgtggtatgagagttatcacctcacctatgagctgaatgaaggtatatgtcacaatcccacctgtgcatagaggtagcag

SEQ ID NO: 182840 - DNA, 305 bp, Homo sapiens
cacattcctaagcctcagctttttttgttgctgttataagtttaattattcatataagctatgtaatatagagcctcaaataaggtaatcactcagaaaatgtttgctattgtcattattatattgtttttactctgtggggcttgacatatctggaaaagatttttctacagttttctttgccctaatgcagcttgtataaacacaaaaaactaggaatgaaaaaatcacttgtacttgaagttgtttcttatttaatatagactaatagtcatttgaaaaaatatagttgtaaggataagaag

SEQ ID NO: 182841 - DNA, 504 bp, Homo sapiens
atgggagtgtctcagtctattttgtgctgctataatagaataccacagactgagtaatttataatgaaatgaaatttactggctcacagttctggaggaggagaagttcaagagagagggaacagcatctggccagtgccttctcactgcgttatcccaagggagaaggcagaaagacaaaaaagagacaaaggggagccaaactcattattttataaggaacctactaccaggataacaaaactcactgcattaatccattaattaagggcagggccctcacagcctaatcacttcttaaagttcccactattttttttttaaccattttcttcaatagccctgacagtcccacctcttaatactattacaatggcaattaagtttcaaagtgagacattcgcaccatagcagggagttaatatccagaatatatgtataaataattttacaactcaacaataaaacaaaacgcaaatgacccaatttaaaaatgggcaaaga

SEQ ID NO: 182842 - DNA, 603 bp, Homo sapiens
tgctcaagacgcagccagccttcttcagaaagagacccaaggtggtggaggggacatgcatgtctcagcatttctgagagaccgccaacccttgcaggaggcattttatcagatgtttattaagagactaacgattacaggatatgatatatatataaattttaatttccctttctaatataatcagggcatggggtttcactatgtaggccaggctgttcttgaactcctgacctcatgatcctccagccttggcctcccaaagtgctgggattataggtgtgagccaccgcacccagcctagtgtttaattttcaatttaatttttggcactatttttttttaagttgctcatcttaggacagtataactggaatgagccttgtgtttccagttacaaaaacaagacagaacaaaggatgaggctagatttttgtattattgacaaccccatattcttccctccagaggagagatcatctttcggaagcaagcccgagatacacacagtcttacccattccttcaatgctgttgatgattagccttaagatggttcttttctctaaggaaaccctccccatttttgcaggatgtttgaaaa

SEQ ID NO: 182843 - DNA, 340 bp, Homo sapiens
ggaaccaatcacacaagagtctgggacaagagtaattcaggtaatgggaacaacaattagaaatgttctgagatgaggagggagcccagaatcagccagggacagaaatattgctagtctggctggaatgcaacaagtacttggaataaagaaccagataatgttaaggcagaaggcagggaccagattcaaaacatctttacatatgagatgaagtaatgtatagagtgttaatatggttgagtagattttcaactggttgaatgaaacccaaatactatgcatggcatttgcaacatggatgattgccagcagcgtagttccttccttggattggtcc

SEQ ID NO: 182844 - DNA, 357 bp, Homo sapiens
acttcctccaaggctaaaatagctgaacctgctgcattttaaaccaatcctcagccactttggtgttttctcaaggatttccagggatcccaggcagtaaattctgctgataataggaattggtgtgataaggtgggtgctgagcagtttaagcaccaagattgtagctctgtctggttttgtggagatttactcaactagaagaacagagatttggctggtttttcagtcctggggtgcagggtgcacctgtactggaaaatttaggacctggtttcattctttgagtctcatgttcaagttggttttaatgttatgaagacacttgggacgtaatcctgagggcagctgggggga

SEQ ID NO: 182845 - DNA, 295 bp, Homo sapiens
gtggatgggcagatgattcaagctgcatttggggcttacaggacatactctcaaaatgcaaaggagggaacaactaatgccattgggagagaaggaagagtgggtgatcagaaaagacttcttgggctgggtgtggtggctcacgcctgtaaacccagcactttgggaggctgaggcgggcgaatcacctgaggtcaggagtttgagaccagcttggccaacatggcaaaaccccatctccgctaaaaatacaaaaatgagctgggtgtgttggcacacgcctgtattcccaact

SEQ ID NO: 182846 - DNA, 460 bp, Homo sapiens
aaggcccctcatgcgtccacacccccatggcaccctcgaatccccttgatggctaaaaacaccagctttgaagtttgtcagaacgagttccagtcccagtaccaccacttacaaactgtaacctcgggcgaggtacctgacctcctatacccggtgcccacatttgtagcaccaggatagggaacaacagtccccacatcaaagggtgttgacgggatgaaatcacacaatataggtgaggccctcagcaggatcctggcacacagtaagcactcaataaatgttcaccccaccaccagcaactcagcaggaagactccgcaaaagcagctagctatttccagaggactgaattccttggtccgagcagctctcaccagtgagaaaatgtgtctaaacttccactctcagggccgaaattcgatgccttggagccacgcagaacgcgcctaatctctcct

SEQ ID NO: 182847 - DNA, 1205 bp, Homo sapiens
aatttcattaaatgaggtctattgaaaactaagctccactccctaaaatatgacatccacgtgtgtgctctggcaaattgttaaaaagttttcttatgatttaatgttttattattttttctttaatttctttgaatattttaggcttaaattttagggagaggtggggaattttaaatgaaattatttaaagaaaattctatctattctaaagaaacaggaactgtttttaaccagtctcatctggaaaaaatgagttagatttcaaaagtgcaggagactggcagagtctgctttatattgtggtatttgcgaacccccacttcgtcctgcaccaaggagataagttgtgggttactaggggttactcctgtggagtactagttagcacagtagttgaaataactgtgccctccagaacattgaaaggaattacatcaacactcttctttgctatctgagaacataacgttaaggctgaaggccctgaaatcagactgtgtttaaattgcaacccaactgctcagcaagcagtgtgacctccaacaagacacttcgtccactctgttgtgttatttgtagaatggaaggagtagtatcctcttcatgaaattatcgaatacattaaataaaagaatacgtatgaaagtgcccagtgtagctaggataatatatattataattgttatattattaaattagctcacctagtttccaaaaatgcccattttgtaaacatgcaaactgaggttcagatagatgcaatatttaggtctcaataatcaagggataaacagagctgaggtttaagttcaagacaatctgacttaacgcttatatttttattatactttgtccctttgacttgtgctgatggattttgaatattgcatcatagaggaaaacttaatgatttaaccttatttcataggattgaaaacatcatccattttaagatacatcattattttatgaaccaataagattttaaatgccgctaagttttgacagtgtttattttatacttagagaattttaggataaacagttttatcatgtcactgacaggtatacctaaacagaaaatggaagcgaaataaattggttagggcagtgacaactctcactactgccaacctcccccaaaaaggtatatattatcgatttaagattcattctgttttcagagatgttagaaaattggg

SEQ ID NO: 182848 - DNA, 635 bp, Homo sapiens
  misc_feature (287)..(287): n is a, c, g, or t
agggaaatttatagcactaaatgcctacaagagaaagcaggaaagatccaaaattgacaccctaacatcacaattaaaagaactagaaaagcaagagccaacacattcaaaagctagcagaaggcaagaaataactaaaatcagagcagaactgaaggaaatagacaccaaaaacccttccaaaaaccaatgaatccaggagctggttttttgaaaggatcaacaaaattgatagaccgctagcaagactaataaagaaaaaaagagagaagaatcaaatagacacnataaaaaatgataaaggggatatcaccaccgatcccacgacggacgcattcacctatcaaaggccccacctcctaataccatcccgttttgggttagaatttcaacatacgcctttagcagggacacaacgcatggttcataacagcaggtatcttaccatgtttctgttatagttgtgttagctttgagcaagtcaccaagaatccaagggctcttaactgaatattaaggacacccaaatgtctttcttaggtccaaacctctcactggagtcccagactcctatatcaagtccccctcgacatctgacatttcactctgaatgcgtccgtcgaagttggttccca

SEQ ID NO: 182849 - DNA, 187 bp, Homo sapiens
ccctcagtttaggacatattaggactcataatatttttggttcatagttatttttgaattaccatatccaatgtattttcaagttctattgagtgtaccacctactaagttttccagaagacattacaacctctataacctaattcacctccacacccaaatttaaaattctccctaatcgcttact

SEQ ID NO: 182850 - DNA, 474 bp, Homo sapiens
aaggaggtgcgagtgacctgaaactccttttaaaaacagaaaggacaaaaagaggtatgggctgacaaaaggaaagtggtagattactgatgtattgcattatgcttagaatgtctcagaatgcgagaggcagtaaacacaccagaagaggatacaatatccggaccatgtgcaactgcaaataaatgtttgggttaaaacttggttgattctaaattacatgaagagctgatgataattgaggcagaactgatagacctaacaatagaaaaaaatcgatttaaattcagagaagaggtcatttaagaaagtataatgaagccacttaataaaaggaaatattcctctaactaaagtttgagatttagggcataatcctcaaagacaggctaatataatctattttttgattaaaaaaaggaacttttggtttaaagtaagatgttcagctgctcttagagtttatttctccat

SEQ ID NO: 182851 - DNA, 205 bp, Homo sapiens
cccaggttagaatatttgcaaaattcatataagcgaataagatctcctgcttagaaatgactttcctgaactccaaattcacatgtcctccttttcccagtcactccattatatcattctgtcttatttctttcatagcatttgtcacatcttgcttgtattgtgaaattaatttacttgcttaatgtctataaccatctctaaa

SEQ ID NO: 182852 - DNA, 397 bp, Homo sapiens
cgacctagaggatcccttctctgatcgctccaacgggtctctaacttgtgcatttgggttgtttccaatcttttgctattacaatgtgcaatcatatccttgtatacatgtctttgtacacataaatggcacacttcagtacgcctgctgattccagataatgatagtagtgaaggcactgatgaatctaaagacttgaaaacctttctttacactctgtcctataaagtgtgtgtcctgatattgtgttaaacttcaggtaaacgccttttagaagtttatctacagtcattttgaggatagtcacgtctgtccttgctggtggacaagattctacattttcctaaaaaggtccatgcaatctaaagtatattcatatgaatactttacctgtaca

SEQ ID NO: 182853 - DNA, 440 bp, Homo sapiens
tcttgatattcataaatgagactttttgtgggggaggttcagtctttgtcaggtctttgaaatcaatgttatgttcatttcataaaacaaattgggaagctttcctttaaaaaaatatttggcttaagtagcagtaggatttcctctgacactcttctctgtgcctggtagtttgtttttgttgttgttttttatttttttctttggtgtttttattttggggtttttttggggaactcttttatgactttctttgggactggggtcaattttaataagttgtattttctttaaaagttactctcttctagctaggtgtagtggtgcacacctgtaatcccagctattcaggaggctgagaggatgatgacttgagcctagagtgtggagtttgagtctagcccgggcaacagagggagaccctgtctctttaaaaaaaa

SEQ ID NO: 182854 - DNA, 434 bp, Homo sapiens
tagaggatcccccccctctgtgtgctctccaggaattccatgagtacattcagagctctgctgaaacccagatccagtgtccgagtgcttttgagaggacaagtagcaccatcaaaaagggaaacccattcctttattcaaaaaccacccggggccaggcgcggtgggtcacacctgtaatcccagcgctttgggaggccgaggcaggtggatcacttgaggtcaggagttcgtgaccagcctggccaacgtggtgaaaccccgtctctaccaaaaatacaaaaattagctgggcatggtggcgcatgcctgtaatcccagccactcaggagggtgaggcaggagaatcgtttgaacccgggaggcggaggttgcagtgagctgagatcgtgccagtgcactccagcctgggaaacagagtgagactccatctc

SEQ ID NO: 182855 - DNA, 380 bp, Homo sapiens
tgaacctgggaggcggaggttgcagcgagccaagatcgcaccattgcactccagcctgggcgacagagggagaccctatctcacaaaaaaaaaagaaaaagaaaaaaagaaaaaaaaagaattaagaggatttccccctaaagtattaaaagaagagcaagtatacttgttcagaccatagaatacaaaaaataccaaacctgcaacttgtacccaaacccagatggaagtggaccagcctcccaggcagtgtccagggtcctaggtcctggccacctgcctgtggcaaggccacaaccattcccttgaggacacagagggtcccaccccgctggtgacaggacctgcctaatgacaattatcttgcagcgagacctctc

SEQ ID NO: 182856 - DNA, 504 bp, Homo sapiens
caacaataatgtgctcctatggacaaagggtgggaaagagcctcacacagaaccattttttgcaatgatgctccccatagattaagctgcaaattcactgtacatcctttgatttctttctttttcaatagaggatgatgttcttcccctttgatttctaaggtgacacctttaaatgtgaactgtgttatgcaaataactgtgaacaaaatgatcaatttatgaatctaaattctttctattctctgtacacctgaaaattattttctagtttgtggccacagccattatttcaagaacttgccagcctgggcaacatagcaaggccctgtctctacaaaaaataaaaacaattagttgggtgtggtggaatgcctgtagtcccagctacttgggaggctgagagacaggaggatcacttgtgtccaggaagtcagaggtcagaggtcaggttacagagctatgatcatgccactgcacttggcctggacaagtgaaaccttg

SEQ ID NO: 182857 - DNA, 340 bp, Homo sapiens
aagagacaccagacacagatggaggaaggacacgctggggaaggcgtctcagatgaagctatgtctgcattcattctcaaagcaatcctcatgttaaccggaagatgtggaaaggacatttcagggaaaagaacaatttatttggaggcacagaataagagaaaataggccctactgttgatcaagaacaatgatacgatatcctaaccaacagaggaagcaacggaagttgttgttgtttttatgctgtttttttttttttgagacggagtcttgctctgtcacctaggctggatggagtgcagtggcatgatctcggctcactgaaagctctgcctcc

SEQ ID NO: 182858 - DNA, 339 bp, Homo sapiens
gagaaaatggaaaaagtgcacagtgaggacattttttaaaagccttgggctggtgtctctctggtcttcaacacgcccaagtcgtcttccttgggcttattacttcagtggatgaagtgcttttattggcatggatgtgggcttttttggtcgtgggattttttttttcctcccagaaaccctatgttagctttcaaaatcaaggagaaaggagttttagattatatgcttttaggattatcagcacagaggccacgtgttgcctggagagtttattcccaagtgccatcctcactttctgcctccgctcggtccctgcagcggtggggacgggcccac

SEQ ID NO: 182859 - DNA, 694 bp, Homo sapiens
agattagaagtcacaagatccaagcactgcagattttctaccaacttggtagttctcaaaatgctgttcaatcttctatgactgtcagattgattcggttttttaacagttatgtcccttggctagtcaaattgtgtgtgtcttcctgtttattcttactctcattcttttagttctgatacccaaatcatagttttcatttctcattcctgttccattttcttatttccagcttcttacagaatacctccaagtccccttctttaagactgtcattttctctataaaattagcctcaccaccaatgttctaaacaaacattggctcctctattgccaaattacctaccctttattttatttactttattgcatgtatagagagacctttgtttagtttatgtgaattacatgagttcttaatttcagaaattatgttccataaactttttgttttttagagacagggtctcactctgttgcccagaatggagtgcagtggtgcaatcacagctgactgtaacctcaaactcctgggttcaaagtgatgctcctgccttggcctcccaaagtactggaattacaggtgtgagccactgtgccagccacatttaaaaactgtaaattaaacgtgacatataaatggaaagagcactgtatgctgagtccaaacctgggttcaagttctcgctctt

SEQ ID NO: 182860 - DNA, 341 bp, Homo sapiens
ttgctccttcccctgccatatgagatgcctgctcccccttcagcttctgccgtgattgtaagcttcctgagtcctcctcagaagcaaatgccagtgttatgcttcctgtattgcttgcagaactgtgagccaactaaaccttttttcttataaattacccagtttcaggtatttctttataacaatgcaaaaacagcccaatccagtatctgtaagaaagccaaggaaatcccaaataggcagttggctctgcagcctggaacccagaagtagatctgtacaccatccctggctcttccagggtctcactctgttgcccagactggagtgcagtggcataa

SEQ ID NO: 182861 - DNA, 192 bp, Homo sapiens
tttattcaccccaactccaccaacacaaataacaacaaaccataaacattcatgtccctaattcatttcctttggagattagaggttttgttatatacaccattaaagtcttcggggacccatctcaatatgtttttttcatcttgacttaaatccaactcttcttgtttccttctccatcaaaccacagca

SEQ ID NO: 182862 - DNA, 365 bp, Homo sapiens
aacaaaatggacgaacagttcagtcacttcctaacatctagccacaaaaatacatgggaagatatagccacatctaaagattgtgatctcctgattttctttataacttaggtagattcagaataccatcttccagttttcccttggaatacaaggaacattagtcttaatctactgttctgtgttgaatagagaaataattccttcccttccacacactcttttttttttcctattgaacttttcctaggccattcatatagatgcagcctagatgaaatagacttggactgttcgtaaactcacccttttcttgaaatatcatactgcagtgtgacatttcttacctgtgttacgtggcagac

SEQ ID NO: 182863 - DNA, 175 bp, Homo sapiens
cagtaagagcatccacataggagataatatttgagattaatttctgaaccttaaaggaagagggcagtgtagttgtggcttcagctgaaaaaaactacagtacaaggaacaaggcattaggatcttacttcaggattatcaaacctttctattggtatgatggctgggggtaggg

SEQ ID NO: 182864 - DNA, 563 bp, Homo sapiens
aaccaccttggagtctgggatagcccaaaacagagaaggcatcctttgaatttctccctggccgtgccctgtctggcccctagctagtccttggagcagattggtgtcaaacagacctacggcggttgctgtggcctggtcagacccagctgctggccccctgggggtcattttttggagctgctcaagtcttctgaaatagtttgtgcaggctgggattatgtgtttaggggcccagttatttcagaactgagatagccatctctccgtgttatcagtatgtccagccagctggccaaacactgtctagcaaaagaggaatcgttcattcagtagatacctgccagcaactcttctaggtactagagcctgtgagagtgaatgagacaggcctgctttttgccttcaaggagtttatgagcacgaagatcaagctggcttccaagagaggccctaactttgtcaaggaactgaagacctcaccgcaagagtggttagaaacacatccaggctgtggagctgggccagcctatgacttaatttttgtttctgccactcccttg

SEQ ID NO: 182865 - DNA, 356 bp, Homo sapiens
agtcgtctctaaggatcccccattttatctgaaggctgcatgtgcctaacaggttacaaaggagagtggagcttgagatagggagccatagagaagagtgggcaagatcacatttgatgcttccttgagtactttgtataaatttaggaaatccaaggtaaattgggagaagcaggtccagaaggcaaagtttgacaggatgtgaaaaggcaagagggggatggcattgtaggagttcaggtatttgtcaagaccatcatggtgactggcttttggggagtgcctgagtgggaaggaagtaaagtcagaggggagcccctggtggcttagcagcccagtagtagccgccagaggct

SEQ ID NO: 182866 - DNA, 321 bp, Homo sapiens
cagccgtggtcacaccatcacacccagctccagactgaacaaaggatcctgccagtggccacagggagcctgcacccagacctgtttttccaaggatgccaggctgaacgcccaaccctgggtgtagctaaatgggtctagctgggtgtagcttcactgcatctcctgccgaattggtgataccgcaaatccaaaggagccctgcttcacctccaatggcagctttcagaaagtagaagggatcagtctacacgaaacatgaagatcatggagaaaaatgtacaaccagccagatcaccccataccctgcggctggctctg

SEQ ID NO: 182867 - DNA, 241 bp, Homo sapiens
aataaacgtaagtggcaatgaaatgtgattttgtgctctagtaaagcaccattagtgtggtgcacaatactcttaaattgcattgatttttaagagttaaggaccacttaagtatagctaatactgattgttctatatcaagcatgattttcagagctgggaatacggtggcaaataagacaggcaaggtctttgccctcagagtttacattccaatggggaagatgaataatacactagt

SEQ ID NO: 182868 - DNA, 318 bp, Homo sapiens
tgtagagaaaagctagatgtacagagagatgaaggacagcaaggtagggagagggacagcaaagagggagtctcatcagagtgagggagaggaggagggatttggagccagggcagacagagcagagtggtgctggtggcaaggagaacagagggagaagcacagcagggaggacacctggggatctggggtgccagagagtggggccagggaggtataacaaggaagagacaatttaacagggagagcagaggatgcacagagatgggagaagaggtggaaatctatagagattgaggatgatctaaagattgggga

SEQ ID NO: 182869 - DNA, 514 bp, Homo sapiens
aacatcagctcggtaccgattacgctcctagacgggaaggtctggaacggagacccatggggagaatggagggtcctagagtcaggctgcctgggttgagtcctggctcccctacttattagctgtgtggcttgaggtgggttacttaacttcttggagcctctgtttcctcttctgtaaaatgggaataacaacattacctgcctcccaaggccattgaatgagttgaatgtaggaagtgtgatgtaaatattagccattgttacgtgagatgttcaggggatagagtgacaggctcaacgtgtggctgaaggaggagaaaagaaggatttagaggcccctgtgaactccggagtccccatcctttctgggagaaatgggcagtgccttcctctctgcccaacactgaccagctgtccacccacctctctagggccagaggaagcacttgtgatcttgattactactcatggacgctgggtagagggctagcctgggcatgctgggagaggcc

SEQ ID NO: 182870 - DNA, 580 bp, Homo sapiens
gccctcccacctgtgtggctcaggaagaggccgatggctgctcaggagatgggagggaggcgctgtctggggctatgttaagaacagataagaagtgacaggaaggtctggaacggagacccatggggagaatggagggtcctagagtcaggctgcctgggttgagtcctggctcccctacttattagctgtgtggcttgaggtgggttacttaacttcttggagcctctgtttcctcttctgtaaaatgggaataacaacattacctgcctcccaaggccattgaatgagttgaatgtaggaagtgtgatgtaaatattagccattgttacgtgagatgttcaggggatagagtgacaggctcaacgtgtggctgaaggaggagaaaagaaggatttagaggcccctgtgaactccggagtccccatcctttctgggagaaatgggcagtgccttcctctctgcccaacactgaccagctgtccacccacctctctagggccagaggaagcacttgtgatcttgattactactcatggacgctgggtagagggctagcctgggcatgctgggagaggcc

SEQ ID NO: 182871 - DNA, 511 bp, Homo sapiens
agttcaggctcggccacttttctcctagacgggaaggtctggaacggagacccatggggagaatggagggtcctagagtcaggctgcctgggttgagtcctggctcccctacttattagctgtgtggcttgaggtgggttacttaacttcttggagcctctgtttcctcttctgtaaaatgggaataacaacattacctgcctcccaaggccattgaatgagttgaatgtaggaagtgtgatgtaaatattagccattgttacgtgagatgttcaggggatagagtgacaggctcaacgtgtggctgaaggaggagaaaagaaggatttagaggcccctgtgaactccggagtccccatcctttctgggagaaatgggcagtgccttcctctctgcccaacactgaccagctgtccacccacctctctagggccagaggaagcacttgtgatcttgattactactcatggacgctgggtagagggctagcctgggcatgctgggagaggcc

SEQ ID NO: 182872 - DNA, 530 bp, Homo sapiens
caaaaggtaaaattaatacagacggtgttttggttggccaaggtcaggtagcttgtttttggaacagatatggattgtatatttcaagtaataaccctccattagtctttaaagttatacattttttatttattttacacagatttatctaaatttggatatttattttgaggttggtatatcttataagcagttttgacatgtgaaacatattcagatatagatgattgaggtatttatttaagaaatatagatgttggccttatccactgtgatagcaataataaatgactaaagaaataaataagaggataaaagaaagaaaagataatttgcaaaatacttactgtatactccctcacattcatctctactctttcatatttgaaacagtgaccaagtgacaggcagggattttgtccaatttgtcatgagcaggaagagaggagtctattgctaacgctcaaaagttattaattccagataccattgtttattgaacctgcttcagtattcatatctttacatta

SEQ ID NO: 182873 - DNA, 244 bp, Homo sapiens
tgccactgcactccgatctgggcaacagagtgagatcctgtatcaaaagaaagaaaggaaaagaaaatagtgcagctggaatattttttctgattatagaaggaaaagtaatcccaagtggtaccctttaaaatgcagccttaccattccctatgtaaacctgaggaaaattttaattgtttataagaaaaaaatcagagatgttggcatagctttatgattatgttagttggcccttatccga

SEQ ID NO: 182874 - DNA, 317 bp, Homo sapiens
atttctttctctacttagacttaagtggtgacagcctcatattaaagctggtttctcgcatggtagaaaaggactttggcagttccaagcttcatagctgcatcgtgcactagaggtcaacaaatgttttctgtagagagccagataagaaatgttttaatctttataggccatacagttctgctgcaactactcaactctgccactgcactgtgaaagcacccatagacaatttgtaaacagatcaacacaactacgttccactaaaattatttactaaagcaggcagcaggccagatttagccagaggccatcgt

SEQ ID NO: 182875 - DNA, 430 bp, Homo sapiens
ggggatctgagcggtggcttcaagagggggcaggaattctttctgtggggaaggacaaggtggggcgtttgcacggagaaggagagaaggacgaaagaaggcttatccacatcacagggacagagacgtcccaggttgggacagggagctccttatttctgccctatcctcggaagcctggactaaatggaggatgcttttgcctccctctccgtccatcttatcggttcccatcgaggcactgccatcttccttgggtaactgaggcacgagggtctccacttaggaagctgggaaatgctaggctgctgggcaaagcttcccagagtcagccagtcactgctgccctgtctcttgggcccagcagagggaaacggctgggacaggaaagcccagaggggagtgaacttgctctaggacaaaaagcaag

SEQ ID NO: 182876 - DNA, 353 bp, Homo sapiens
ttgtattctcaatttaggagtctgcatatagacatctagtataggggttggtaaaaattaagacattatggagtgtctacaaggacccatggtggacagagttgcctgtctccacatagatccttatcccaagggcttcacccacactggccagatgcccagtgttttctgtttccccattaaactccagtttatgactccagtttaagatattctatgatgtctataactgcttaagctggcacgtatttttactcttcatgtttagggggaaaaaaaaggctgtacaagagataaggcagtggttctcagctggggacatttggcaatgtctggagatagtgttggttgtc

SEQ ID NO: 182877 - DNA, 458 bp, Homo sapiens
acgtagaatagggcctttccctgtttaggcacccacagaagtgcttgactgtcgataccttgagggacaccagttggagaaaaggtcaagcatccgttcaactctgggaatgttcttaacagtgccactaagctgtcaaagagatgcactcacatgctgtaggaacatcattgactctgaatggctccatctgggaataaaaagcaggggctctgaaggatgagtgggagtttgatagaatggatgaaaatgagaagaactttgcagcagaaggaacccacacggacaaaaggcacagtgtgttagacgaacaccaaatcatctggtgtggcaagaaatgaaccttttgggaagaaaagctggggtcaggttggggcacgccttgaagctttggactttattgtgtagctacactcacatatgctttgatgcaaggttgctatgtaaaagttgcctcc

SEQ ID NO: 182878 - DNA, 305 bp, Homo sapiens
ggttactgacttttgtgaactaattctgtagagtttgtattctttgtcatgtctgtccactgaaatctctgcttggtggtcagctaatgattgaatagacatgtccttaaatttctggaaccagtaagtctaccagtctttgccaaggagttctgtgtgtgtttgaacatgcgtttgtattactcaaccattcatttgaaaactctgtcttgctttcacctcctgcttgtatagaacttcaaagtcagccaaaggcaagagtgtagagccttctcaggactttcctaatgcacaaagccttgagc

SEQ ID NO: 182879 - DNA, 217 bp, Homo sapiens
aatcaccggaccaacatcgaacggactgatcgatgctgatgtgacgtgtgcatgtgtggggtgtgtgtgtgtgtgactgtgtacgtggtgtgtgtgagtggggtgtgtgatcgatgctgatgtgacgtgtgcatgtgtggggtgtgtgtgtgcgactgtgtacgtggtgtgtgtgagtggggtgtgtgattgatgctgatcagtccgttcgcatgtg

SEQ ID NO: 182880 - DNA, 128 bp, Homo sapiens
aagtcctgagcacaccaagcgctcaggaggtgtttaaaggaatccagaacatggtttaggcccacgctgcactgggggcccggccaagatgagaagcatggccagaatccctggcctccagacctgag

SEQ ID NO: 182881 - DNA, 260 bp, Homo sapiens
tgtctagttccagaaaacactttttaaagaatcaagatcatgttaagtttatgaacttaaaatctatttgacttctctgagcctcagttttctaatctgtaaaaggagcaatagtgcctgtaagaatgctggagggattaaaagagaaaacgtgtgaaactcatcgcttagtgcccttggtccactcccacctttgttgccaacatgggctgaggttgccattccctcatttttttcccactgttacccatctcactttc

SEQ ID NO: 182882 - DNA, 457 bp, Homo sapiens
tgtcttcctggagtttacagaaaaagagactcagggattttcccaaagcacactgcaagttaggggcaggaatgacagcccagaccttctggtttccagtccagggctcaactgcctaaacagtggcatctcttcaggcaggccctgtcagaggcagattaggggacttgtccaaagttactcaactatgaagagtcaagattcaaatccagagacatctgacttcatttcccttcattaacaaccatctaaggaagttcctattactttgggaactcctagtagcaggtggttaaaaaaaactcctggacaacatactatgctatttgaatcatcctacttcttacgcgttcctccaggatgcactcttctcccattctgaaactgacagttctctttacaaactgtgtatgtttcattcctggattgcatctgagctgccgccatggaacgggca

SEQ ID NO: 182883 - DNA, 404 bp, Homo sapiens
tctaccggaaaccccgtctctactaaaaatacaaaaaattagtcactgtgctcagccttcttcagcattattgataattggggctggatgacttttttgttttggcgggctattctgtgcattgtagggtgtttagtggcacccttggccttcatccactaggtgccaatagcacccccacctcccagttgtctcccaaaatgtctccagacatggcaatatgtcctgagggggttggaaaaagggtaaaatcacccccagttgaaagccactgatttctctatgtattctggataggaaccctttgtcagttaaatattttgcaaatatctcctcccactctgcagcatgccttttcaggctcttaaaggtgtttttgatgaacagaagttcttagtgtagtc

SEQ ID NO: 182884 - DNA, 360 bp, Homo sapiens
accacgagttatagttaataagcctacacaagagataaaatagaataaaaagcattcaaccaaaaaaatgcagaaaaagagaaaaagaataacaaagaacagacagcacaaatggcaaacaaatagtaagatggtagatttaaactcagccatgttagtagtcacattaaatgtaagctgtctaaaaactctaaagatacagactgtccatttggattattaaaagtaacatctaagtacatgctgcccattgaaaacaaatttaaatatatagacactaaaaggacaaccaaaaaaagaaagagaaagataaattagactttaagaagtccctttataatctattttgtgcccctaatt

SEQ ID NO: 182885 - DNA, 378 bp, Homo sapiens
agacccttcaggaataaaggttagtgttagtccaccaggaaaaacagaaaaaaaaaagaaaaaaaaacctgctgaggtgcttgctgaaggcaaagagaatacagaatgggtagtagaagaaggtagtcatcaatgctctctatgaccacgtgaccagctgcagaaatgaggactgtaattgtcatgagtacttcctcattcttttgttaaaaacatgtttgtacatatatatacttgtattaagaaaataccttcattttatttcctttctcccttagcatgtgacataagctttattgacttcccatcagcaacagtaacaatacttattattgctaactttatctaatagtatttgggttggggattagtgtgttt

SEQ ID NO: 182886 - DNA, 384 bp, Homo sapiens
tctatcatgccttggttccaaatcactgcctctcctggtcatgcctaaacttctataagaaactgagttatgcccagaaaataccagagcagtaacccacttaagaaacatcttctcactttttcctgcttcatccttcagcaatcaaaacttacctgttctgttttctgcacctatgggtcaatgttccttaagccaactcatacatacccaaataagattaaagtattcataattaatcagtgacttccagtcctgcattacatgttgaatgcacatggatttggaagccagagagacctgggtattatatttgatggtgataaactttatgagaaaactttctttaccctttaatttaaaaatgaggaacctaaaatttaa

SEQ ID NO: 182887 - DNA, 428 bp, Homo sapiens
tggggagattcattgtactgagtgcctactgccagatattctggagcttttatcccagtgggagatgcagacaaaaacaggtaaacaagagaatgcagatagaagtaagaaaaataaggcaagggaaagaatggaggggagggacacgtgaaactagttgcaagtgatatgaaggagccttccgtgtgcagaatttgagcatggaccttatgggcagaggaaacagcatagataaagtcctgaggcgagcgtaagcattgtgtatttgaataaccattgcgaggaacagtgactatttttctactagatgagatgtgtgggtttctcccatctaggcacttccttggagctgactagagaacagatacggctttttttttttttgagacagagtctcgctctgttgcccaggctggagtgcagtggcg

SEQ ID NO: 182888 - DNA, 424 bp, Homo sapiens
acacagcccttttcttcacaaacatgctcacatacacatgcatgcacacgcacacacagcctctgtttgtagcagaatttagtataaagctttaagtatatggaagaaaagttattcacagtaagacaaacaatttagaattgtagttgtctggctctttgtcatgattctttgtcttttttttcttttctccccacccctcagtcatgaatccatctttatttttaacaccttctgatttattgtgtcttacttatgtcctcgatattccaataccaatctcatgttgctgatcaaagtcatttccttaaaaatcatctctgctacatgttacctcagtaggcttcttggaccatcatatcaaaaatgaccaatttccccctctctacttctttattttattccaagcaccaatccttaactg

SEQ ID NO: 182889 - DNA, 495 bp, Homo sapiens
gtgatcacgtgattgcactccagtctgggcaacagagcagaaagctccgtctcaaaaataaagaaataaaaataaagaaacaggccaggtgcggtgactcacgcctgtaatcccagcattttgggaggccaaggcgggcaggtcgcttcagctcagaagttcaagaccaccctgggcaacatggtgaaaccccatctctacaaaaacatacaaaaagcaaccaggcgtgatgatgggtgtctgtagtaccagctatttaggaggctgaggtgggaggattgcttgagcctgggaggcagaggttgcaatgagccaaaactaggaagccagttctctatttcagaaaaaaaacaataaaaccctaacagcagagctataggagaagctattttaaattttggaggctttgctttctgggatcattttttgggtcaacgaggagagcagctgacacctcgtgcacagccagggagaacaagcctgtctcacctctag

SEQ ID NO: 182890 - DNA, 142 bp, Homo sapiens
tgggacatcaggtttctgtttccttaaaaatgagagagttgattagagattccctaaggcccaggtgcagctcctgcatctctatgggagtaactcagaggtagccatctggttggcagtctacctttcggagttggcggaa

SEQ ID NO: 182891 - DNA, 487 bp, Homo sapiens
  misc_feature (392)..(392): n is a, c, g, or t
ctcccattttgtttcacagccctctccctttggctccctctaggttccttcctcagcagtggttctttattgtctcagggcatctgcttttgttgtttcacagttgttaacattcttctttctgctttcatgtatttggccttttctcagtgttcaagtcttggatcaaatgtcacttcctcagaaagccctctccaggccgggcacagtggctcacacctgtaatcccaacaatttagaagaccatggtgggaggatcacttgagcccaggagttcaagaccagcctgcgcaacatggtgaaactccacctttacaaacaattgtttaaaattagctggatatggtggtgcatgcctgtaatcccagctactcaggaggctgaggcatganaatcacttgaatctgggaggcagaggttgcagtgagcacagatggagtgactgtactccagcctgggcaacagagcgagactcagtctcaaaaaa

SEQ ID NO: 182892 - DNA, 145 bp, Homo sapiens
attgcctgctgggtcaccctgaaaccttttgggaaagtgaaagttagcgcacaggtgcaggaaacctggttaacataacaactaaaatgaacctgactgggtgcagtggctcgtgcctgtaatcccagtactttgggaagccaag

SEQ ID NO: 182893 - DNA, 245 bp, Homo sapiens
ttgcatccaaaagcagctcttgctagggtataagcttcattataggactacagtgcaaaaatctggtccttttgctacgggacactcaaatattggtacgtgttaatttttatcttgggcaagttagcttccccagagagaaatcctctctgccactattcttgaagttgagtggatgaaaagggccagtgatctcactttgcactaaatctgttttcagtatggcgttagctggctagagtctc

SEQ ID NO: 182894 - DNA, 109 bp, Homo sapiens
ctgattccacgggcacgcactctctctataccacatacaaagactacgaactcatgttccacgtgtcaaccctgcttccctacatgcccaacaacagacaacaggtatg

SEQ ID NO: 182895 - DNA, 294 bp, Homo sapiens
taaatgtttcacagcaaaactgtggcatggtttcagctttacttgggattctgtgctctaacagtagggctatgcaaatagcctttcagcacctgagccagggtcaggaataatgcgcccttgggtcctttcaggtcaatatacagaaagacattgttccctggctatgacttcagaggtaagaaaatctacacctatttcatagagcctgaccatcatcttaagagcctccgtgactcattaaatattaaattccgggccccggctagagcacaggtaccctcaattggtaaa

SEQ ID NO: 182896 - DNA, 618 bp, Homo sapiens
gccaaaccactgcaataggcctcccctggcctccctggccctcaggcaggcgggccctcctttaaaaaccttgccctgcttcagcagagagcacaactctggcctcagaaaaatctggaatcaggggcaaatggaatcatcaggcactaggagagggtgctctgtttgactcaggggcaagggcaaatcctaaagctgagcaggggctctggaactctttggtgggaacatctccagcttcagccacaagccaggggaacaggcctcagcccctaggactcctgcaaagaggctccttccaccaacaaacacttggtgctgcctacctctgtgcctactccgaacagtgccagagctttggcagtgagtgaaaagtggtccctgccttgaggagcttaccctaaggtctagagacgatgtggaggcagtaaacctggccaacggtgactcgatggggatgatcttgcctaatgattaaacactggggctctggagttcaaaccctggctctgccatctaccagttacatactttgaacttagcctttgagcctcactttcctcacctgtgaaataagcaggcccctagtacagggcctggcacacagaggctctccca

SEQ ID NO: 182897 - DNA, 309 bp, Homo sapiens
ggcaaccatgaagttttcttacgaagttcactatcgaacaggcattccattactaaagtctgatgaacaactttttgaaactctagagcacaaccaagtaagatggatatttttattgcatatatttttcattttatttttatttgacaaataattgtatatatagggtaccatgtgatgttttgatgtatgtttacaatgtggaaagattaaatcaggctaaccgtcatctcatacacttaacattttttttgtggtgaatcacttaaaatctcctttaggaattttgaaacatacaatgcattatta

SEQ ID NO: 182898 - DNA, 123 bp, Homo sapiens
acctcaggaaagacatttgctccctctcagaacttttcaccccatctgtaaaatagaaggatgaactctttttctcatccctttccctccaagcagcagaactcttccagaaaagtccaatag

SEQ ID NO: 182899 - DNA, 524 bp, Homo sapiens
taaatgattccgaggcagatggtggaacaccactaaggagtgattgatgtacaaatccggagggccctagaactcttcttccctagtggttttcaacgtctttgttattttactcctccttcccccactgaattcacaaccagagccccaatatatgagacagataaaggagtagtttatgggcgtaaattgctgagtctacgtatataacaggtacttctaaaccatcagtgagaataaggaggctattttattgaatacaggaatttgaattaaaggctgcattcatgagaccaggctctgaaccctgtggggacggcctggctgcatctgtcaccttgagaaacaagtgattcagtggaaagctagacttgagggaggacaaatgtcctgcgtgtttttactattctttgattaaactgctccccacgtttgcaagaagaggaaggtgaaggagagaaggtttatatttcaaagttgaatcaccaacaatatccaataaatggttacattctcataaacag

SEQ ID NO: 182900 - DNA, 415 bp, Homo sapiens
atccgcttaagccattgtaaattcgggtcttcgttacagtagctgaacttacatcctaactagcaagtggtggaaggagaggaggctaatcaatgtaacgggatgttacacatacaagaaacttgctcaataggtgccaagaaaaggtggtgaatagtggatagatgtggactacaaggaggttcccagaagcagcagtattgtctctgttaatgctacagaggtaaccaagcctttaaggaacatattagaagtatagtattcccatgtaatgcaatacccagaaatgcattgtggagaaaaaacaattctttatcactgaaactcaataaacaacttaaggtattccctagaagaaatgattaaaactccatcccagtactgtttggctgaccttaagctcaacttgatgttt

SEQ ID NO: 182901 - DNA, 351 bp, Homo sapiens
gtgctgaatcctaaccactagacaaccagggaattataatgaattttaaatcaaaagaatgactccttagagcataacaactttgtgtccgctctttaattttcatctttagggacatattttaaatatttcaaaataggctgtcacagtatatttggaagaaaggaatttgtttccctttatggaaatcatcctcaaatgtattgaggaataattttacattcaataaattacatcaggatgtttccaatgttataatgaacctacttttggcaacatagtaaaataaaggggttcctaaagcccacccattagtaaaagttattgaatattttatttaacattaaaagg

SEQ ID NO: 182902 - DNA, 384 bp, Homo sapiens
atgtcatattaatatcatgaacatcttgatatgatataatgagaagggcatcattgtagtattcttaccaaaatgctaaatttattcctatcatgaggaactagcggtcaaacccaaattgaaggacattctataaaataactgattagagctctttgaaattgtcaagatcgtgaaagataaggagagactgaagtattttaacaaactcaaggagactaaggaaaaataacagatgccatgtgggatcctggataggaatctggaacagaaaaaaaaaaaaacgagtaaattaaaaattgtgtgaaattttaaaaaggcgtatagctaataatattgtgtaagaatttatttcctgttcttaattgtctcatgatcaagtaa

SEQ ID NO: 182903 - DNA, 529 bp, Homo sapiens
ccacacaggaggaccggacctcgatgatgagctcaccctcgctcttaacaagcactggctctctacagatgtcacttcctttaaggatgagtaaataagggaggaaaaactctatggggcggggcggggtctgggaggtagttttttgtaaagctacagaaaataggaaagagacttcatctcaatgatttagaagactttagaagactctaaaaataatctacaggaggacccaagagatccaacacgctggactcctctataggatatcaaaaggaactccgggtgaggacgacaagagctgagctcgggtgcttgccttctgcactctcgggaggaggcaccagcatgggcacccttcacagttcgggcccctcactcacaaacgtctggcacatggaaacaagctggcaaaaagattgtttttttcttctgtactttttgttataagcctgtggtgaagtgtccatatctggcataaatgaatgtgagtggtcttgggaatctaaatataacatgtttctaagtt

SEQ ID NO: 182904 - DNA, 707 bp, Homo sapiens
ccatcatctgccatgtgaacccatctgcatagaaccatgtggacatccgtgctaagagtgataaataaaactataaatagcttcatgttggttcacaccaggttttgccagcaactgcatagtgccaatcttttgatggtttagagctttctgggtttcagaattacagaataggacatgatgatctggagtggggcctgtgggtgttagaaggactcgggattttatccgcagtgggatgaggaaccaaaagatggacacgatctgacttttgttttaaaagtgtcgcctggctacatgtggagcccagactacaggaggtgaggatgtgtaggtgaccatagcggtactggtccaagcagaaaaagatggtgacctggaccaaagtggtgggatgggctgagaagtgctcagattctggatatattttgaaggtagacacaagaggacttgctgatagattggctgtagggttaaggaccacctcaaggttgggggcagtggagtgctgtatcctgagttggggggtgcaggtgatgggtggagtgatggggcaaatatcaggcaaagcagttgcatatagcaggagcagctcttctgccagagaaggctctgggaagcatcaggtgccccgctcctgcccagcagtgtgagtccaaggtactcttgggataaagccttgcttcttgctctgatctccacagggg

SEQ ID NO: 182905 - DNA, 761 bp, Homo sapiens
ggtttactttgaatctgtagatcactttggatagtatgggcattttaatgatattctttaattacatgaatgcaggctgtcttttatttgtgtcttctttaatttctttcatcagcgttttatacttttcatcttagagatcttttatctccttggttgaatttatcactaggtattttagctatttttatagctattttaagaggaattgtttacttgatttttgtttttttcagatagtttgtggttgatatatagaaatgcttttgtatgtttattttgtgtcctacaactttactgaatgtgattattagttctgacagtattttggtacattctttagggttttctgtgtatgagatcttgttgtcttcaaacaagaacaatttaatttctacctttccaatttgtatgccttttatttctttctcttgcctaattgttctggctgggtcttctagactatgatgaatagaaatggtgaaagtatacatccttgtcttgttccagatttcagaggaaaagctttcaatttttccccattcagaataatagctttggatttttcatatatggcctttattgtgctgagctgcattccttctatacccaatttgttgataatttctaacatgaaagaatgttgaattttgtcaaatgcattttctgcatctattgaaatatggttttcccgcttatgtggtattcacagttggttgggttttgagcctccttttctggggaggaccactgacctggga

SEQ ID NO: 182906 - DNA, 402 bp, Homo sapiens
tggtttgagatttaattttacatatttatctccttggtaccaataaccatggatatgagagatgggattttgagaactaagtgtgagtttgggggcagaagccctttatgaattaaatgtatatgtgcatgataggtgtccttttggaaatcaggtatattggtttttcatcagtaccgttttcttttttcaagcagcagtgactgggacctgctgataaagcctttgctcagaggcacagatcccagagttcttaaagccttttccaaccataataagtgaaactaatttttgatgtttaacatttataaacctatgaaaccaatggggcagcatcagtattgagaaaaatgaagccaaaagtagaaccatgtctgagaataggccttgaaaacagttctt

SEQ ID NO: 182907 - DNA, 207 bp, Homo sapiens
agggctggttcttgcttttgttaccttcaaatcctgaaggattcagacagactaacattccaatgccctttataacctttccccctggcaaaacttcagccagaataaaccaaaaatgaaatggagagaaagatcactgcatctttctggatccccaaatttccattccagatttagggctgatgttcccagctcgttgtccctaac

SEQ ID NO: 182908 - DNA, 262 bp, Homo sapiens
cagggtccttgcaagggaggcaggagtgggtggtgggagatgtgagaacaggagcaagtgggggctcatgcctgtaatcccagcactttgggaagcttgaggactgctttgggagggaggactgcttgaagcctggattttgagaccagcctgcacaacagagtgagaccccatctctacaaaaatacaaacattaagcaggaatggtgtcgcatgtctgtaatcccagctacttgggaggctaaagtgggaggatcccttg

SEQ ID NO: 182909 - DNA, 1456 bp, Homo sapiens
agcgggggagaggcgtcaggatccctggcgccgcctgagccagcggctgctaggaggctgtgtccgcaagccagcggggcgaggcggctgggccctgcgcgtcaggtcccggcctggggcaccggggctgccagcgtcggaggaggcctgagaactgggaggaagctggagaaaagatgccctctgaatctttgtgtttggctgcccaggctcgccttgacaccgaatggttgaaaacagatatacagatgatagtgtcgaaccaagtggaacaaagaaagaagatctgaatgacaaagagaaaaaagatgaagacgaaactcctgcacctgtatatagggccaagtcaattctggagacctgggtgtgggtcaagcaaccaggaaacggaagcccaaagaggaggggagcttacagcaggccctggactagggattaacacaaaaacaacagcaacaaatctgatttaagcttcacacatgctggaatgcagtggcgtgatctcaactcattgcaagctccaccttctgggttcatgccattctcctgcttcagcctcctgagtagctgggactacaggcgcccaacaccacacctggctaatttattgtattttttagtagagacggggtttcaccttgttagccaggatggtctcgatctcctgacctcgtgatccacccgcctcggcctcccaaagtgctgggattacaggcttgagccaccacgcccagacttgtgaggttttaatatgaagtattaaagctatgctggttagacaatttggaaaatgtttcttctcctatttctgacagagtttatgtaagatgtgtgctatttcttccttaagcatttggaaagaattcacttattaagccatgtgagactgtagttttctttataaggtgtttaactacaggttcaattacatatatataaatattcattttggtaacctgtgtttgctgaatcaatttgttcattttatcgaaaatttcaaagttattctattattcatttatctttttaatacttataaagtctccggttagagtttgtgccttttgtctgttttgttaatcaatcttgctggaggccatcaattttattagtgtttcaaaaaagcaaactttgattttattcatccctttaccatactgaaaatgttttgcttaatttccaaacttatagttccactgtgattaaatatttgtataactaaaactctgtggaatttgtgtcttctcaatgattgaaaatatgattaatttttataaatattgcttctgcacttgaaaaggatatgtattctgcatgttgagcgtagtgtaccacgtatctcagttaggtccagtgtgttaaatgcatcctttaaagattctatgtgcttactgatgtttgtttatttttcagtggctgagacacagatattaaagtttcccacaatgatcatcaa

SEQ ID NO: 182910 - DNA, 872 bp, Homo sapiens
tttgaaacgcagtcttgctctgttgccaggctggagtacagtggcacaatctcggctcactgtcacaatgtccgcctccatggttcaagcgattctcctgcctcggcctcccaaagtgctgggattacaggcttgagccaccacgcccagacttgtgaggttttaatatgaagtattaaagctatgctggttagacaatttggaaaatgtttcttctcctatttctgacagagtttatgtaagatgtgtgctatttcttccttaagcatttggaaagaattcacttattaagccatgtgagactgtagttttctttataaggtgtttaactacaggttcaattacatatatataaatattcattttggtaacctgtgtttgctgaatcaatttgttcattttatcgaaaatttcaaagttattctattattcatttatctttttaatacttataaagtctccggttagagtttgtgccttttgtctgttttgttaatcaatcttgctggaggccatcaattttattagtgtttcaaaaaagcaaactttgattttattcatccctttaccatactgaaaatgttttgcttaatttccaaacttatagttccactgtgattaaatatttgtataactaaaactctgtggaatttgtgtcttctcaatgattgaaaatatgattaatttttataaatattgcttctgcacttgaaaaggatatgtattctgcatgttgagcgtagtgtaccacgtatctcagttaggtccagtgtgttaaatgcatcctttaaagattctatgtgcttactgatgtttgtttatttttcagtggctgagacacagatattaaagtttcccacaatgatcatcaa

SEQ ID NO: 182911 - DNA, 548 bp, Homo sapiens
agcgggggagaggcgtcaggatccctggcgccgcctgagccagcggctgctaggaggctgtgtccgcaagccagcggggcgaggcggctgggccctgcgcgtcaggtcccggcctggggcaccggggctgccagcgtcggaggaggcctgagaactgggaggaagctggagaaaagatgccctctgaatctttgtgtttggctgcccaggctcgccttgacaccgaatggttgaaaacagatatacagatgatagtgtcgaaccaagtggaacaaagaaagaagatctgaatgacaaagagaaaaaagatgaagacgaaactcctgcacctgtatatagggccaagtcaattctggagacctgggtgtgggtcaagcaaccaggtaatcttctgagttttggcattttggaaagcttgatctgacgctccttttctaaataacttggatggattattcgtattttttggtaacaatttaaaaaaatgtaattaaaaaaatttaaatattgtggtaaaatatacataccttaaaacttgcaaaaaaaat

SEQ ID NO: 182912 - DNA, 755 bp, Homo sapiens
agcgggggagaggcgtcaggatccctggcgccgcctgagccagcggctgctaggaggctgtgtccgcaagccagcggggcgaggcggctgggccctgcgcgtcaggtcccggcctggggcaccggggctgccagcgtcggaggaggcctgagaactgggaggaagctggagaaaagatgccctctgaatctttgtgtttggctgcccaggctcgccttgacaccgaatggttgaaaacagatatacagatgatagtgtcgaaccaagtggaacaaagaaagaagatctgaatgacaaagagaaaaaagatgaagacgaaactcctgcacctgtatatagggccaagtcaattctggagacctgggtgtgggtcaagcaaccaggaaacggaagcccaaagaggaggggagcttacagcaggccctggactagggattaacacaaaaacaacagcaacaaatctgatttaagcttcacacatctactcaggagactgaggcaggagaatcggttgaacctgggatgcggaggttgcagtgagctgagatcgcaccattgcactccagcctgggcaacagaatgaaactgtctcataaaacaaatataacatgaaatggtaacgtctttctttaaaaccaaagaaaatatgcaaggcggatgtcttcctgtcacttcgcacagtctactcccatagcgcctgagccccagaccccaaactcactgtcctgctcggggacccccagaccacagtgaac

SEQ ID NO: 182913 - DNA, 337 bp, Homo sapiens
tatcaattgcttttttctttcttgattgagcaatgttttttcttatctttttatgttgataaggtaacttaacagtgattggcttttgaatgttgaacattgcatttctggaattaaatcaactttgttgtgataaatgattaataccatattatgtatggttgagatgggcttgctcctagttcatttggtagttttgtacttatgttcacaagagaaagtggagtctaatttttttttttctggtgatttttgttcgtttgtttgtttgtttgtttgtttgtttttgccatggagtctggctctgttatccaggctggaatgcagtggcgtgatc

SEQ ID NO: 182914 - DNA, 1376 bp, Homo sapiens
agcgggggagaggcgtcaggatccctggcgccgcctgagccagcggctgctaggaggctgtgtccgcaagccagcggggcgaggcggctgggccctgcgcgtcaggtcccggcctggggcaccggggctgccagcgtcggaggaggcctgagaactgggaggaagctggagaaaagatgccctctgaatctttgtgtttggctgcccaggctcgccttgacaccgaatggttgaaaacagatatacagatgatagtgtcgaaccaagtggaacaaagaaagaagatctgaatgacaaagagaaaaaagatgaagacgaaactcctgcacctgtatatagggccaagtcaattctggagacctgggtgtgggtcaagcaaccagtctggctctgttatccaggctggaatgcagtggcgtgatctcaactcattgcaagctccaccttctgggttcatgccattctcctgcttcagcctcctgagtagctgggactacaggcgcccaacaccacacctggctaatttattgtattttttagtagagacggggtttcaccttgttagccaggatggtctcgatctcctgacctcgtgatccacccgcctcggcctcccaaagtgctgggattacaggcttgagccaccacgcccagacttgtgaggttttaatatgaagtattaaagctatgctggttagacaatttggaaaatgtttcttctcctatttctgacagagtttatgtaagatgtgtgctatttcttccttaagcatttggaaagaattcacttattaagccatgtgagactgtagttttctttataaggtgtttaactacaggttcaattacatatatataaatattcattttggtaacctgtgtttgctgaatcaatttgttcattttatcgaaaatttcaaagttattctattattcatttatctttttaatacttataaagtctccggttagagtttgtgccttttgtctgttttgttaatcaatcttgctggaggccatcaattttattagtgtttcaaaaaagcaaactttgattttattcatccctttaccatactgaaaatgttttgcttaatttccaaacttatagttccactgtgattaaatatttgtataactaaaactctgtggaatttgtgtcttctcaatgattgaaaatatgattaatttttataaatattgcttctgcacttgaaaaggatatgtattctgcatgttgagcgtagtgtaccacgtatctcagttaggtccagtgtgttaaatgcatcctttaaagattctatgtgcttactgatgtttgtttatttttcagtggctgagacacagatattaaagtttcccacaatgatcatcaa

SEQ ID NO: 182915 - DNA, 305 bp, Homo sapiens
gttctccccagagccattgaccccaccgagagaacacagaggaagccatggtgtcttttataacctaatctcagcagcaactgagatctctgtaggccacacacacctccctggggtgtgggaaggcctggtggatgccagggccaggggtagcggagtagggggctagagactgcctgctttccctctgcctgcctgtcccaccatcaagcaggccaaagctgtaattcatgtccttctctcctctgttagatctaagaaagaggatctgtttcctagcataccttcttcagcctggagagttg

SEQ ID NO: 182916 - DNA, 375 bp, Homo sapiens
ttgggaaaagagacccttaagacaatacccaggagcccaaatgtcccaagaacttcctgtcttggcccccagcctcaattgtcaacaccaccaccaagcactgagcaccacttgtgccaaaagctgaattatgtgccagacagcatgaacagaagtgaggacataacctaaaagtgggaataacctctaggggaaaagctggacttgactaactttaagggtgggactcaaacaagcagagaggaatggatgctcttcctggaaggcaaaaattcaaatatgtacatagcatggctaagaaaccaactggcccttttggctggagctgagaatcataaacaagggagagagtggaagatatgtgagtgttgaaga

SEQ ID NO: 182917 - DNA, 379 bp, Homo sapiens
atcaatatccctaggggaagctagatgcaatgtcatgaaatcattcaaacagtcccatggaacaatccatctagcaaggaactgatatctcctagcaatagctggcattaacttacaagtcgtatgagtgggccatcttagaattggattcttcagtccaaatcaagtcttcagataactgtagccctggctgacatcttgattacatcctcaagagagaccctgagccagaatcactcagttaagccactgagttctttttgccaaaaactttttttttaccaagttctttttgccaccaactttattgaggtataattgacaattaagattgtatatatttaaggaatacaacttgatgatttgatatacacataca

SEQ ID NO: 182918 - DNA, 631 bp, Homo sapiens
gtttctgggaatcaaaaaatggttggagaaggagaaaaaggctgagagaatgctgttttttggtaacaagcctgtataactattcggttctggtaactctgtacatgtatacctttaatgaaaataaaacgcaaaacaaacaaatcaagatcagcaactgataacaggcagacacaaacgccagtcctccgacttggagccaacgttcttcctggcctatctctacccttgctctccagcctttgcttttccagactggatagttctgtctgcatccctcatcattttagttgtcacttctgagctggctttgtgccataatgtctttcttgaggtcacagaaccagaaacacacagattgctccaagcacgcagttctcccaaggccctcaacaaaggcgggtcacagtccaggtaagcacctcctgacatttcccagtaattctttccgtggttctgctcgccactctccaaaactacacagctgcaaactcagggagttcccaccatatatccttgcccagatatccctcaactcaggcctaatcagggagcagataaacccggagacaaggatgcattaatctacttttccaacatctgtgccaaagagtaccctagcccccaacac

SEQ ID NO: 182919 - DNA, 208 bp, Homo sapiens
cagctactggggaggctaaggtgcaaggatcacttgagcctggcaggtcaaggctgcgggtagccgtgagcaagccactgcactccagcctgagccacagagagagacccctgtctgaaaacaaaactggcaaaactctatgcaccctctaagtatctcacttttcaggatcagctgaatttcacttagagtggcatcaacagactaa

SEQ ID NO: 182920 - DNA, 236 bp, Homo sapiens
cttagggaagtggatttctggccagacggtaagaaatgcttttatctactctcacctgaggtggaaggagaaaaataaatttcagagacactcaggagcaatgaaaagatagaaaagagctggggaggatatgtcagagagaaatgagtgactaggacagcatgacaagcccagtccccatgagcagaggggaagagagacccaggccaccttcggctggctggctactcagtgtg

SEQ ID NO: 182921 - DNA, 642 bp, Homo sapiens
ataataccaaggtaggcatgtttgattatcaaaaatttgattctctgatataaaagcaatacaatgggaacaacatttagagtttttctatgataggtaagatttttcatgcaactggggatgtatctgtacgagtagatccagtaggcagataatcaaaggacaggttacactgttgaaaataacaacagtaatgtttggcctaaagatcttcatttgtaaaatgaaaataatagcagtacttccttgggtgttttagaggagtaaagatcataaatcatgtatactccttagcacagtgcctggtatcgtgaacgttaactgttgtttattataatcatcttcattatcatcatctaaaacaagcttcaaagttacttaatcaaggcttcgtccctttttaacctagatggggaaaacacagctattttaaccaactgttaaatttatgtagtttacaaagcactctcacatattctgtctcattgattctcactatccctgggaactgcttaaattttttctcaggggaggctttcagggttccgtttttcatagacacagcttggtctttgtcatcacccttaattgttctacctataaaatcaattcagagtaattctaaactttccccactctcac

SEQ ID NO: 182922 - DNA, 438 bp, Homo sapiens
gcctcagagctgtgtattaggaaaactgacagctgagcctttgcattagctagaagggagggagcccacctgtggaagtacccccttaggagtctcttgcagtcggttgagaagaagggtttcctgtcttgaattatctaaaactggaattattttggttaaattgtgggccttctgatacaacttggtgaatttgaaagtcctcacacacatattattctacttcattttctgggaaaataaatctgtttcctagtaaagaactgtctgggcctgctgaacggtggtgtgtggaccctcattcaaccaataccgtgcacggcatcttctttttcttctattcctcgccacctgtggtggtgttgttgtttttcttctctatttcctctctccctttctaccccaactggatctactttctccctgtccctcagcttt

SEQ ID NO: 182923 - DNA, 624 bp, Homo sapiens
aagaggaggtaacccagaggaagaggaaaagagcagtgggttgaacgtggtttcagtgtgggggagggcatactgcatgccactccccgggtgggagaagccaagtttgcctatgggacaaatcctactgcaaagaaaaatcctttgtggtcaaacaaactgggtgctcttggcgtgggcccccttttcctccaggtcccatcttctgtaatatgtactgactggccatacacttttttttttttgagacagggtctcactctgtcacccaggctggagtgcagtggtatgaccatggctcactgcagcctcgacctctctaggctcagatgatcctcccacctcagcctcctgagtagctgggactacaggtgtgtagttaaatgtcttttaaacctaagtggatggaagtgtagtatgataatacaggtgtacggatttattaaaactctaattgaaagtgatcagcaaaatcatactattggtgacctcatcatggcttttttggtggttggtttggagacagagtctcgctctgtcacccaggctgtagtgcagggccgcagtgtcaattcacgggagccttgacctcctggtattaagccatcctccttcctcagcccc

SEQ ID NO: 182924 - DNA, 482 bp, Homo sapiens
gctgtggccacgtgtatgctgaaaggagtgacaggactgggtctcttgtttttaaacagggtctcattgctacaatcattgaatgtattttttaaagatgaatataaaacagctaccctcccaagcaaatcataaaacaaattatgcccttgccacccagaactacagagaaacagcaggcacttcgtggcacagagagtaatggctgcaatattaaaacaatgatgggaaaaccaggatccaatagctgaaagcagggaggaaaacagcctcgtaatcccccagggataatgggtctcaccgacaggtccctgtgatttattgtgcttaatgtacttatttttatttgtccccttcaacacggagctttgtcactgaagagatttgataatggcctgtttgcagtcacttagactctcgtaataaagcgccacattttggctgtctgtaggttccgctggcttcattggcattccccctct

SEQ ID NO: 182925 - DNA, 643 bp, Homo sapiens
aatcgcttgaacccttgaggcagaggttgcagtgagccaagattgcgccactgcactccagcctggggacagagtgagacttggagactccatctcaagaaaaaaaaaaaaaagaaaagaaaaattacaaatagttttgctacttccaattgtaacacccttattaggcaacttactaatttaaaaagcagttcacaatagctctacattataccaatcacaaacaaatgctgtgacgtatgtgaatgctatttagaatctgaagttagaaatgttactattttttcgttttttgaactgagttagttgtttaagatgggtggattctccaatgaccttgaaccttcactgatgaacaaattagttttttggttttttaaccatttaaaggtcttgatctgtgtctagtgattgcctgcccccaggatattgtctcttatggttttgctacactttcaagctcccgtgtgttacacccctcgcagatttgccacaaagtaacctctgtgacatctaagacttgacagttgtctaaataggattgtgactttgagaagagctgaacttcactgtggtttatagagccatttaactcctcctgccccctctcccccttcccggttcccggtgggaagtcggggat

SEQ ID NO: 182926 - DNA, 290 bp, Homo sapiens
ggtttcaagcctcatcttataggcagggcagtcatggaagggttttgagtggagggggagatgcggaccatggattgcagagggatcagagcaaggggagaggtcattgtgtctgaggactaggatggcagtagtgggtgaacagaagtagatattgacatgctagtgctgtgtgtggaaacagaggccactgcaggggagtacaagaggctgtgatgggtctgctttagaagcattgggcttgaggggcttatggtgtgactaggtggaaatgttggataagcaggtag

SEQ ID NO: 182927 - DNA, 265 bp, Homo sapiens
ccaggctggtcttgaacttctgggctcaagccatcctccttccttggcctcccaaagtgctgggagccaccacgcccagcaacagacttgcattttatggaatgattactctagtaacaggctagaggctggaatttatgcggaaaagactaaaccagaaaaccagtaaagtgctgcagtagcccagtgagaggtgacaaaaggctgaattacagccacaggagtggagattcagaggaaggaattcattataaaagtgcagcct

SEQ ID NO: 182928 - DNA, 374 bp, Homo sapiens
tttgcatctgctgcctttattgtgcatactagtggataaaagaagtttatccagagaaaatgagttttgcattgaatttcaaattactagttagctagataaagaggtagaatggtaagattcaggggcattcagcaaagagataagcatataatgtcatgaatcaagaaaaatggcatacatggaaaacaacagtgggtcctttgagagctaaggcaatacattggtgtgaagcaggaaataagccagacatatcaaaggagccagatcacacagaccaggggtgtctaatcttttggcttccctgggccacactggaagaagaactgtcttgggccacacataaaatacactaacattaacaatagttgatg

SEQ ID NO: 182929 - DNA, 255 bp, Homo sapiens
tgtgtgcttttcagtgcatcacattaggaggcacatgtccacttgtttccttatcagtgatacttacttagatctttaggttaatgtgatacctgccaggttcctctacttaagttaatatttctccttctgtaatacataatttgtgggaagacactattacatcttaagatgccagaataatctcctttgactcccttctggccacgcacttgaaggacactacccaatcgatggaagcctttaatcgcacag

SEQ ID NO: 182930 - DNA, 525 bp, Homo sapiens
tgttgctaggaagcgagatggataaattttccaaataactggaggatgcttttgttagccattgaggtgtacaatgttaggcttgactttttactgaatttcttgagaacgttgtgcttaactgacactatattacttgtagatacatctgtgcagccatcagtggttctgacatgtagaacattttcatcaccccctaaaagaagttccattagcagtcactcacctcaattccccaatcctaggcaactactaatctaatttctacctctattattttggacattttatataaatgggatcatataataatgtgggcttttgtgactggcttctttcactttagcatgatgttttcaaggtccatccacattgtagcatttatcagtactactttattcctctttatttgctgtataatatttcattgtatggatataccacattgtatttgatttattcattcatccatccatccattgatggacatttgggttgtttccactttttggttattatgaataa

SEQ ID NO: 182931 - DNA, 206 bp, Homo sapiens
ttgaaagccagggaaagactaatgaactaatgaaggcatctagagagacatgataactaattgcaatgtgtgtttctgaactggacacttattttgacaatcaaatctgaaaattagagagtagtaatatctcaacatatcaattgcttaataaatacccagagcagagtaagcactcagtttaactatgatgatgacaatgatga

SEQ ID NO: 182932 - DNA, 337 bp, Homo sapiens
gcgggcaattagtatgtatcagtaaatacatctggaataataaaatgggtttcactaactcacacgcacctggtataaccagagtatttcttgctatggtagagaaaaagctattcaatattccaccttttctccgtatttaggcagcttactggaagtgagaatcccataaaagtttaaacagacccattgactcacttaatgatctatgtgatattttgacctcatatttgcaattatttagcttccattaataagttctgtttctattttcagcactgggattcacttccttctgagcttgggcagatttaagaagtttctaacttcaaatggc

SEQ ID NO: 182933 - DNA, 276 bp, Homo sapiens
tacaatgccaaatattaactaattaagaatacatatgttcaactacaagaaataagtctgaatatcaatcaacctcaccacgtccactgatacctctttgagcatttagaaaagaacactgtgcctgccaaccagtttaaatttaaaaaatcccaaaaaccagaaatggagggagaaactgggtaacttacactaatttttttaaactatttttctccaattaacatttaatttccaaaagcatcttggcaggtatacttgagcacaactgcatgc

SEQ ID NO: 182934 - DNA, 589 bp, Homo sapiens
tcctcctcttctactttttcaaggatgccatccctcacagaccattttctcttagttgtgttgagaggtataacatcagcattcattgagaaatgttttcagaaacaggtgtataacggcctttggtgtatttgtttcagaagttaggagatgaccttattactcaaaatatggtcctctaaccagcagtatcagcattacataggtccttgttaaaatagccaatcagcagacagccaagacccactccaccagattctgtactttaaaaaactcccgaagtgaacacccagcatattaaagtttgagaagtactactctagaccactttaagagcatagggtatagaaggatcaggcttcaaatctagactctgacacttaattatgtatatgacctgaggcaacattataaatgttccaatttcctcatctgtaaaattaaaataataatagtagttacctcaaagagttgctatgaggattaaatgaaaatccatatgcagcatttggtagactgcaaagaaaacaggatgtgcccaataaatgttagctgttgttattgttgaaatcccccattatctactata

SEQ ID NO: 182935 - DNA, 852 bp, Homo sapiens
  misc_feature (852)..(852): n is a, c, g, or t
ggcacttctccttgtgccgccatgtgaaggattgttgcttcgccttctaccatgatgtaagtttcctgaggcctccccagccatgctgaacttgtgaaaacagactaatacagagacccagcgggtggagacctccagctcctcatccctcaagatacaggaagtgagctgttcaggccgcctgttccccgacgaggtaagttccaggggacagaaacaagctctctgaagactctcattaatctttgctgtccgaagctaccttctccatctcctgctcacctgggaggactccctggaggaagccaggaaaggtgaaaatccatgtatctcttcacatttggagaacaaagggaattcaagaacaattttatggattttctttgttttttattaattaagacatgcctgttttaaattagacaataattttttaaatatccttcagattataaaatgtaaattgtcatggcctcttttaaaggcaattctacaaaaaaaaaaaaaaaaaaaaaaatttggtggggcggtcggcccggaaagtttaaaacccttggtgggggcggggcccttggaaagcgacgggcaagcgggcccaagagaccgtggcatgacacggcgtggttcacccaaaaaaagcgccggggacgggcgcttggacaaccagggcgcgaggcatcggcctacccagaccaagagcggtcatccccccgcggggatcaagaagagaacgaagaagaagaaaacagatacacacacagcacacgatagacgcacacaagaagcagacaggaagacagaaaagaggaaaacagacagaacttcaggataaaccagcacgactactcacgn

SEQ ID NO: 182936 - DNA, 1100 bp, Homo sapiens
tcgcactcattacgtctattggcaacgtgggggcgggactagcccagacacccactcagctgcggcatcacggagaggggactaagtccagataatgtccttgcaggctgtggccccgggggcaagacacgcaccctgcgggcgtattaaataatgagttaaatcacctgaaccacacccacttccggggacgctccgggcatcctggcttgagggtagggtgggcggaggtccctaagggagaggtggggctcgggcttaatccctccttgggggcatctgggtcaagtggcttccctggcagcacagtcacggggagaccctctctcactgggcagaagctaagtccgaagcagcgcccctcctgttaggttggactgtggtgcaggaaagcctcaagtggagggttgaggcttcagtccagcacctttctcgggtcatggcctcctcctggctcccaagaccccacaattggcagaggcaggccttcctacaccctactccctgtgcctccaggctcgactagtccctagcactcgacaactgggtctctgaggtcacttcaccgtggtctctgcctcacctctggcgctagaccactgaggggagagggctggggcgctctgctgagccactcctgcgcctccctggccatgtgcacctctcgcccccggggggattagtgtccaggttaccccagcatcctatcacctcctggtggccttgccgcccccacaaccccgaggtatatagccagatacacgaggcaggggatgcaccaaggatggagatgctccaggggctgactgctgttgctgactgctgagcatgggcagggggcacatggcgcatacaacgggaagaccagcattcgacgcaatgcgtgccaaagccccaattccaatggccataccagggacatagcggaaagaaacagacaggggaatgacaccacgaagacgcatccaacacggacaacgaaagcaccaagcaggaccacgagacaaacagaaaccacaaacatggaaagcagcggtggcaaacaaaagacggaccactagacgaaccaccctaccctcacggagagaagctgaacacaa

SEQ ID NO: 182937 - DNA, 392 bp, Homo sapiens
ttgatttttgtatataatgtaaggaaggggtccagtttctatcttctgcatatggatagacagttttcccaccaccatttattgaatagggagtctttttccccgttgcttgtttttgtcagctttgttgaagatcagatggtcatagatgtgcagccttattcctgggctctctattctgttccattggtctatgtgcctgttttagtaccagtactatgctgttttgggtactgtagacttgcaggaattattttctaccctgcttgaatttttccaagggcaaaagttagacctgagccatcgagattgggatctataatccattaagcttgggtgtcagaagtcatcatgttgatattgaatgtaagatgtcactatttatggtttct

SEQ ID NO: 182938 - DNA, 413 bp, Homo sapiens
ttgatttttgtatataatgtaaggaaggggtccagtttctatcttctgcatatggatagacagttttcccaccaccatttattgaatagggagtctttttccccgttgcttgtttttgtcagctttgttgaagatcagatggtcatagatgtgcagccttattcctgggctctctattctgttccattggtctatgtgcctgttttagtaccagtactatgctgttttgggtactgtagacttgcaggaattattttctaccctgcttgaattttaaaatagctctcaagggacctgatccataaagatttgcatctataatctatagagttggagcagaataatcatttgataaaaatgaaagatgtccccatttttagtttctctaacgttcaagtaatcttaaagttaag

SEQ ID NO: 182939 - DNA, 303 bp, Homo sapiens
aagttttcttagaagaaagcaaatgctttacttctaaattctgcttaaatagtattaattattttctgcatactctaacaatgtataaagaaattcttagctttgatgcaggtgaatcctaaaaatggggctcatcccaaaagggttcttggcttcactcaggaaagaattcaagaaaaagcagacagtgcaagaaagcacattttgttggagcaactttgtacagcacaatggttgctttgtagaccgaacaggcccatcctatagagcagcactagcggatttatatggactactccttac

SEQ ID NO: 182940 - DNA, 230 bp, Homo sapiens
agatacttttatgtatcagatgtaatcttgtacaaaaacaggaataaaaatactgtttgtcttctgttaagggtttagataggtatttttaaaactatacagagagagagagagagagagatttaaggctcagcccaagatttaacattctttccctgccccagttccccttcatgaattacttttttttttttttttttttaaatctgtaggatcaagccagtccttgc

SEQ ID NO: 182941 - DNA, 292 bp, Homo sapiens
aatggtctcatgtgatatgtggccatctgcgtctgacctccttcacttggcaaatgtttgcgaggttcatccactttggagcatgggccagagcttcattcctttttacgggtgaagaatagtgtggggccaggccacaatgtgcccatctgtccctcagcagatggacatgtaggctgtgcccacctttgggctattgtgaataatgctaccaggaacatttgtggataagcttttgtgtggataagcttttgtttctgattctcggggacgtgtacccaggagtgggatt

SEQ ID NO: 182942 - DNA, 228 bp, Homo sapiens
tccctagaaaaacaggtgactttctttttcggtttctgtattgacttttccacttagccctgggcattagtctaagtatagcaagatgctttacaattatacaggctccacattgtcccatagggaggatgtctactagggcaagtttttcattcataataaacctggccccagtggcttgaagctgacataaatgccttccagagcccaagtgatatcagtgaacat

SEQ ID NO: 182943 - DNA, 283 bp, Homo sapiens
agaacccatctaaccattctgtgagaaacactaaggaaccacatggggagtcttgaagtgtattcccacaaatcacttatttacaaaggggaaaatgaaaactacacagtggagaaacctggtagacaccaccttgacctagttatcaaagttaacaagaccaatagataaggaaaatagattaatgcatctcctgtcatggtcactaaggacacaacatcactcctatggtatttctgcagacatcacagctaagtgtaatatatgattctggattggatct

SEQ ID NO: 182944 - DNA, 450 bp, Homo sapiens
tctcaattctgaacactgtacaaaaatccaatttctgttcttttttgtgactagtctgctggtaagcattgccagtgacagactcaggagtcaaaacatggtgactggagaaaaatacacatgctaggttgtttatttaaaaaaaaaatattcatttgtgatggcttttctgcagatattaaaatactgaatatctttctcctagtttgcacttgcaaagcatttcttagcctaggttttcaaaggggcacctgggcacctatcatagttgaggctgcaactgtgtgtgataacccatcagaaaggagaaaacccaagcaaatggtaaatgtgactataatgaacaaacgtaacttttactgacttcatttattttggggtttgtttttaaaaagctggcttttgttataaaaataatacatactcttaccaaaaagtccaaacagaact

SEQ ID NO: 182945 - DNA, 612 bp, Homo sapiens
tgaattgccccactgatgttggtcaatttaggttaagaactgttcagtcatttgggggaaaaaaaacagtcaaataattcttaaaaagaaaaggcagctgcatctggagaaaatactctgaacttctgtcattaacacattaaagtcttagaacatagacagcttatttccttccatatctgctagcttccagcaaccctgatgatttaaatcaaaaacaatgggacaacaagctcttgtttcaaactgacattacttttttccctttaaaggtctgttgaggaaactgggggcccgctacagaaaagggtaaaattagctgaaaagcaaacaatttctcactccaataggaaaatacaccatcaactagttagatacattgtatacaccaccacctcttacactcacatttacccaagtcatttgcctgcagatttcacaaactgatacatttgaggcaattcaaagaaataacagtacctgcaaagataaccaagaccaccccatcccatcccaaaaagaataaaagatttctcccccagtgcctgagcaagaaaacctatgcttacttcttaacctgcatgcactgaaaaaagagcaattaaaagttgc

SEQ ID NO: 182946 - DNA, 515 bp, Homo sapiens
tggtaactgatgtacgactctgtgaacatacaacaaaactactaaactgtacacttctaaacagtaaagcttacagtatgtgaattatagctcaacagagctgttatttcaaaaaaaaaaaaaaaaaaacaccaggaaaaacaaacagcctgacaaatcaagaagatggaacagcatgttcacaaccacaaccaggagtggtatttagtctgtgatgcagtattttagagcagtgaaggaaggatagattggccaagaaaaggtttgaggacaaggggttaatcatgtgggaaaaataaagttaggttttaagaaaatttctacctcttccacctcctagctggtggcctgtgaaagtccctttacttctcagagcctctttttccacatctgtaaaatgggcatactattcccgatccatacgatttgtgcaaatattcagtgagacactggaagcctgctctctggagtcactcagtcagcagggttgctgtttctacaacacagcaaggtcc

SEQ ID NO: 182947 - DNA, 359 bp, Homo sapiens
gacactcgtaacgataatcagtatttaacaaggctggtattcattcaacttcaggcatgttttaaatgtaaataaactctagaaccctagactaataaatttatgaagacgactccttccaagtcttccctatctctgtaaatggcaaccgtttccttcctttggctcaggccaaaaccttcagagtcatccttgactggcctttctcctcaggtccattgcacttgctattccctctgtccggaatgctgtgtctccaaataaccacattccctccccttaccacgtgcagatttcttctcaaatattctttcatcagtgaggccttggctgaacaacccatttagaagagtaaattg

SEQ ID NO: 182948 - DNA, 256 bp, Homo sapiens
acttcctccttccaagtccaaaatgggactacaccatgcataccataggctctgtcaatgtctccagccccagctatactcaccagacaggagcaagaaagcctcagtaatacaggcatcttgcttgcatacccgcacatccagagtactgccctccatgggaactcaatttctagaagtctcttggcccagcactctttatttctcatctgagccctccctactgctttcattcttttttaaaactagacagctg

SEQ ID NO: 182949 - DNA, 330 bp, Homo sapiens
aaagtgctgggattacaggtgtgagccattgcgcccagccccatcttaaccatttttaagtatacaattcaatagtgttaagtatattcacattgttgtgcaacagtttctagaagtttttcatcgtgcaaaactaaaactcttcaccactaaacgatttctctcctctccccctgcccttgacaatcatgattctttatgtttcattgatttggactactttggacacttcatatgagtggaatcacacagtatttgtccttttgtgacatgtttatttcacttggtgtcatatcctcgaggttcatctgcgttgcagcatgttacagg

SEQ ID NO: 182950 - DNA, 449 bp, Homo sapiens
tccagcctttgagacagagcgagattctatctcccaaaaaaaaaaaaaaaaagcaacagaagcaaatgagagtgcctgggagtggtcattgtggggcattcctgttcgtgtgacccaggtcatgtccctccctaagccctggtctctcttgcctcctgcagggctggtgaattaccatatctccgtcaagtgcagtaaccagttcaagttggaagtgtgtcttttgaaatcagacaacaaagtcgtggacaaccaggctgggacccagggccagctgaaggtgctgggtgccaacctctggtggccgtacctgatgcacgaacaccatgcccggcgttgactttttaataataaccattctgactggtgtgagatggtatgccattgtggttttgatttgcatttctctaatgatcagcgatattgactactcccgggtactgagctcg

SEQ ID NO: 182951 - DNA, 701 bp, Homo sapiens
tccagcctttgagacagagcgagattctatctcccaaaaaaaaaaaaaaaaagcaacagaagcaaatgagagtgcctgggagtggtcattgtggggcattcctgttcgtgtgacccaggtcatgtccctccctaagccctggtctctcttgcctcctgcagggctggtgaattaccatatctccgtcaagtgcagtaaccagttcaagttggaagtgtgtcttttgaaatcagacaacaaagtcgtggacaaccaggctgggacccagggccagctgaaggtgctgggtgccaacctctggtggccgtacctgatgcacgaacaccccgcctacctgtactcgtgggaggatggtgattgctcacaccaaagccttggacccctcccagcctgtgacctttgtgaccaactccacctacgcagcagacaagggggttctgtaagtcaatatgatctgtgtggacggccagtactctgggtataagaatgcaggtcgacctggagaggattcactcgctgtgggccgcccagtttgagaattggtgtaagacatcacaatcccattattcagagcgagtatggagtggaaacgcttgtagggtttcaccagggctggtgaattaccgtatctccgtcaagtgcagtaaccagttcaagttggaagtgtgtctttgaaatgcagaagacaaagccgtggcgtg

SEQ ID NO: 182952 - DNA, 1224 bp, Homo sapiens
ggtgcacaccaccatgcctggctaattttttgcatttttagtagagaagaggtttccccgtgttgcccatgctggtctcaaactcttgggcccaagcgatctacccatcttggcttcctaaagtgctgggattataggcatgagccaccatgcccggcccagaaattttgtaaggtgttacttcagtgttagtgctcaaggaacaggcttggtaaggttgtggcttatctaaaactaaatggctaatgggtttgaatgccttcacagttcagacccagattatctgatgcctgtccttccttttactatatttcaagttcctttccagacagattattaagaggagtcagatttttaccctttttgggattctggctacagacagcgccactaggaagacttaggaatgtttgttgggttactctctgaattactgtgttgaattgtatagtctcatacttgaagaaggacaggaagcccggacacttaagcacactcattggatatcacctgctaaacagaacagtcatttctttgtcaacagcattaccacatacagttgcaaataacctcccccaccctcagatatacccagactgtgtgtctctcagctcctgttccatcattcagcatctctactaagaggttccatttcccttgaacattttctgtcctgctgactgcaggacactatagatctgacatgaatgctgtcctgccgcataccttacacctcccacaccatcattcagagcaactacaggcagcaatgagggggaatggaaagaaagatagggaacactcccccttttctggtctttatggtttttattttcctgcatctaatcctatttgtttttctgtctatgtctcacacacacacgaagagcttctagctatggccctggggtttggacgaaaaagttggtcattaaattctccttatgagactgtggagatatatatatatttttacatgtaggctctattaactactgtatttgcctgtagattaattacacctcagttggttgacctgaagacctgattaccatgtctaatattattcctgttggaataattttgctttgacccaaacaactgccacattcagaatgcagtccatttggaaatcagaagattcccatgggtgcagagatagccaactccaaagggcaccattcacataatatcccgtgtaaataacacaccccctgaagtctt

SEQ ID NO: 182953 - DNA, 368 bp, Homo sapiens
tccaccttcccagccaaatgttcctgccagcttgtcttccccttaagggcagaagaagccagttcatttagttcctacgaaataatcctcatgagagaccaagggaaaacaaaatgtgagacggaaggaacacatcaaaaatctaaccagctccacagatatttgatggcattcctgtagtgcaggcagcaatgctcagtgaacactatttgtctctccagcagtgattctagcccttccatattgtggagcttcctacttccagtttcagggtcctgattacatgatatagatcatggtcattcctacatctcttgctagagaatggtgtaaaactcagcctaagctaatccaccatggggcctttc

SEQ ID NO: 182954 - DNA, 173 bp, Homo sapiens
gacagtaacatgacccagtccttggaactttctgaattcattttcttgtcccctttgaaagtacagaacgatagtcaccactttctatctcccccagcaaattgttctttttttttttttttttggtattggatcaaaaatttctgatattggttcatcgtgccatttgtaag

SEQ ID NO: 182955 - DNA, 377 bp, Homo sapiens
agagatgaggtctcactatgttgcccagcctagtctcaaattcctaagctcaagggatccacctgcctctatctcccaaagtgctggggttacaggcatgcaccaccacgcctggaccacattgcatgcattttatttaaattttttttttttttttttttaagacggagtctcattctgtcacccaggctgaagtgtagtggtgctggcagagacactgcttttccctaattgacctgtttggtcctcacattaaccatattttacagctactctcatttacagataaggaaactgggccaatgaggaggtgagaaatcactcaaggctgccaggtacagtggctcatccctgtaatcccagcactttgggaggcc

SEQ ID NO: 182956 - DNA, 649 bp, Homo sapiens
ttatatctgagttgctgacagaatcatcattacagagcatttccgtaaacggacaaatgaaactaccaaggactttaatcacacacgaaggcaacggtggcatcagaatataaaaacaacaaaacaccatctttccagtaccactcccaagcacatacaacataatttatcctaaacgcaatgttaacacaatctttttgggaatggtaggagccaccttcttttcagaaatgcttcgagcaaaatcgaaaatctctaacctaacaacttgaaaaagacattatacagaaattacttcatcaactgccgttctttcttaccggcgggacccctctgtgtcttccgctacaattcttttttttttaacgccagtcaaatttagcggtaggggttgtatactaattttcgtgacactaataactattaagttctgataacccactaccattggaccagcctgagtataatttttaaagccctccaattgggtcgggggccgtggcttatgcctgtaaccccagcactttgggaggccgaagcaggagggctgcttgagcccaggaattcgagaccagccagggtaatatagagagaccccgcctctataaaaaataaaaaattaaccaggagtggtggcgcgcgcctgtag

SEQ ID NO: 182957 - DNA, 248 bp, Homo sapiens
aggatctgctatcttctttggcatcatgcctcctttttaaaatcttaattatcttgccataatcattacttagtttacatgagaaagttaaccaatactttttaatgtcaagtaagcttctttcactatggtcaagcttcttcattagtcagagtaaagactaatgaaaaaattagtcacacttcttttacctccaattttagaaacatcatttaaaggtttcacaggtattttcatagttgcaacct

SEQ ID NO: 182958 - DNA, 307 bp, Homo sapiens
tagagctcggtccggttctgcacaaagcaggctcaaaaatatcagttgaagaaaaataaatgtgttaaacgaatgaaagtaagttaagcaaatgcttatcatcagagtgaagaggcagtgggggccaatataatttatttacaaagtaggcaaagggagttaggaggaagcagcctggtacggaggaaagtgcattgaagcaggcatcaggagacttagctcatgactggagaagttcttaaaaccatgactctaggcagaccttcatttctagctgtagaattttggccagggtcctttgtgcagc

SEQ ID NO: 182959 - DNA, 316 bp, Homo sapiens
tagagctcggtccggttctgcacaaagcaggctcaaaaatatcagttgaagaaaaataaatgtgttaaacgaatgaaagtaagttaagcaaatgcttatcatcagagtgaagaggcagtgggggccaatataatttatttacaaagtaggcaaagggagttaggaggaagcagcctggtacggaggaaagtgcattgaagcaggcatcaggagacttagctcatgactggagaagttacttcagaagccactgtctcctcgggccaccatcaatttatacgctgtacaatattggaccagctcctatgtgcacgcc

SEQ ID NO: 182960 - DNA, 312 bp, Homo sapiens
gtgaaggggtattacctctactttatgaatgggaaaacaaagccaaagggaaatttggcttttctttccccttaggctgcttatgtaattattgtaactagggttttattcctagatgagcctcagaattcaattccatacattcaatgccaggcattgtcctatggacttaggctagaaggtgaaatgatatagaccttgctctcaaacctactgcatcttgctggggagaaagacatatagactaatgtagtaccaatgttggttactcatcctgtggtcattctcttttctgcttcagtttataggatc

SEQ ID NO: 182961 - DNA, 296 bp, Homo sapiens
tgaatagtagcttctgcccactgtgggcattcagataacatttaaaaagcaggggcaaggagcacttttcacatctgctgtgtgtttctgagcttctgcctgcggtcactaactttctgattcttagcattcatcccatattttagacacagcctccaccccaccccagtcctgcaaggcatccctctggctcctggatgcctcctggcctcctgcaccaccagccacagcatcacacagatgctggtctgttctgcccacagctcttggtgcaggtcagattcctgatcctggct

SEQ ID NO: 182962 - DNA, 213 bp, Homo sapiens
gcaagttattacaccactgtgcctggaagagggacacacacacaattacacagagcagccatgaagcagcatgtgggaaggcagaggaggcctttgtattgtcctcacagagatgaagaaactcagtctcagagcttacagaatgtttgagctgaaaacagctgtttaaatcagccctgtcatttctgcattggggatggtagtatcatggta

SEQ ID NO: 182963 - DNA, 387 bp, Homo sapiens
tttcttatgttatcttgcccgatcattttgacagtaagaatgacatccacccacagtgctaagatagcttgcttctaaaggctgctttctcctctcggattcagtgttccatagaaatgggattgtttataaatcttttatgattattctcttgaagagctgaagaaccagagaaattgcctcattgttgagcttaccacttgagaataaaccatttttagatagcctcattatagactatgcattcccctcatctttctacactggagcctctgctgcacttaagtctcctcactcctaattttacctatctcctgctgctcagatgtgttcaggcatggcaacctccacagtctctaaagcataattgcatgggcagatgttgcg

SEQ ID NO: 182964 - DNA, 553 bp, Homo sapiens
accttatagtagcgggaagtcaggaccccaaagtggagggacctgctgaagccatggcagaagaacataaatgtaaagattccatgcatacaattggttatgctcatgtactgtttctgagaatgtaaatttgtatagccattcttgaaaacagtattgtgttgtctcataaaacaaatgatgtaaccactatactgtgtcaattccactactcagtatttatcacaatgaaaggtatcagtatattaggaggatattttcatccatctccttattgcagctctattcacaatagcttttgaattaacctgaaagttcatcaagggatgcatggaaaatggcaatattatatatatgcactattgaaaattgttaattaaaaggaacaaaatcatatcactttcagtaatatgactggaattggaggtcattatggtaagtgaaagaagccaagcacaaaaaaataaacactgcgtgttctcatgtatatgttaaaatataaaatagttgatctgcttggtgcgcagagttgattgctggttactgaatgatc

SEQ ID NO: 182965 - DNA, 218 bp, Homo sapiens
cgccgaggcctcggtgccccttcccattttccatccgcgctcccacgaaggttgaggcggcggggagaggcgaagccgcgagcgctcggccgggcggtcccgccgggtggtcgcagccatgacagcggctccccttccgcgcccctcccgccggagatgagggaagatgtccctgtcagggttaaggccaagctgaagttgctggcgtctaccttcca

SEQ ID NO: 182966 - DNA, 453 bp, Homo sapiens
cctcatctgtcctgttcctcctgtggcctgggtcgtagcaccatgtctggtacagtgtagatgctcaagggaagtttactttgtagaactgtttacctgggagatgttactgttagtctaacctgtaccattttgtaaacctccagccattttgcagactctgatcacagtgaaacgttccatgggaacttgggccatgagaaacatccttcctaaccacgtgactgcagaaacatccttatcgcatcttcctgggcaaaggcccaacagcctgactgcagggacatccttgccatatcctgctgggcagcaagctctaccacccagatccctccctcccagtcccatgattaccccagcctgtgagcggcagttggtgctggcactaagctggtttcctcctccccagggttttgctggcaataaagatgttgctgttgaagccacaaaaaa

SEQ ID NO: 182967 - DNA, 568 bp, Homo sapiens
gtctattgccctcaaagatgaagaatcatcataaccaaaaatgtgatatgtccacagtggatgaattagcataatagtgaagtgtttgactgtccagggctgcatttagatgaagactgaactcacgctgtccaccttgctcacgagttgacatatacttccatatggcacagttcaggaagagattgaactcggctaagccatccttttgtgactttgtatttgacgatcctaactggaggaggaagcaggagtgagaaggaggaactggagtgagaagcaggagctcctaacaatgcaggagacacaggcaccatgcggagaaacgcccagcggcccttcatgacccagagccggggagctgggtgcgggcagaggccgctgcacattcacccacagcagacgacggcgtgccgtccgacccgctgggccaccctccatgacacacgggatcaatccactactaccccgcgaagaccgcgcgcgccgcccaacactaggctgcactacagcggaccaccaagaccacctgacacacaactccaccagcccacacgcccagttgccc

SEQ ID NO: 182968 - DNA, 463 bp, Homo sapiens
gtctattgccctcaaagatgaagaatcatcataaccaaaaatgtgatatgtccacagtggatgaattagcataatagtgaagtgtttgactgtccagggctgcatttagatgaagactgaactcacgctgtccaccttgctcacgagttgacatatacttccatatggcacagttcaggaagagattgaactcggctaagccatccttttgtgactttgtatttgacgatcctaactggaggaggaagcaggagtgagaaggaggaactggagtgagaagcaggagctcctaacaatgcaggagacacaggcaccatgcggagaaacgcccagcggcccttcatgacccagagccggggagctgggtgcgggcagaggccgctgcacattcaccacgctcacgccacgtgccggcctcaggcttgacaagctcaggcctttggttaaagcctttctagcacat

SEQ ID NO: 182969 - DNA, 189 bp, Homo sapiens
gctgtgttgcccaggctggcctcaaactcctggcctcaagatatcctcttgagtctcagcatcctgagtagctggaactacaggcacatgccactgtgcctggctcccaaatcattttaatattgggctatgatacatattaggccacagcttacctttgtcagctgcattgctcatgccactctccca

SEQ ID NO: 182970 - DNA, 818 bp, Homo sapiens
cggactgggactattccaaaatatataattatcacacaacttagcatagaaagtctgaataaacaaacaactactggaaaattcaaatggtaattgaagtgggtcctccaaaagagatcgggctgtatatttcagagcatactagtattaactttcatggatagataactgttttctatgagatttgtcattaggtcgtaaaatataaatctcttttggaatttcacattagaatttattttatttttcacatacaataaaaatgcttagaatatttcaaatgttagcacaattactattgatagcataaggaaacaagtatttgtaaacagtctaacatttttaaagaagaaacccactgtcattgtgaaagaagtatatttgtcatcactgggtttaattagaagacctttaggcttatcccaacctcttcagtatttaaaaactggaaaactgtcagatgtcttattataaggaacacatgctgtatgattaaatcccaaaacatatgtgggaaaaataaaaataacgaaaagagcaacaaaacaaaagctgcttttctgaaaacaaggcaaacacaatgctagcaaaaaggagataagcatagaagagacagatataagaaagaggcaatataactaaaagctagcataatttttttaaaataagagcacattacaaacaactttatagcaaaaagctaagtactcagaagaaatggctaatttcaaaaatatataattatcaaacaacttagcaatagaaagtctgaataaacaaacaactactggaaaattcaaattggtaattgaagttgg

SEQ ID NO: 182971 - DNA, 232 bp, Homo sapiens
gtaaggaatggtgtcacacattaagcaaatcatgattcaggattaaaatgtacattaggtgagaggccgggaaaactaaaggaaagtacatttaagcaacttctcggtgaaggaatatataaggctgatcacaaagaaggcaagctcatgtgaggggctggtagggttcttgaacctctggccacctgcagataaataattgattgaaataaaacccgaaatgttctccaga

SEQ ID NO: 182972 - DNA, 118 bp, Homo sapiens
gagggggaggaggccacgatttgatttcagatccacactgcagctaattttcaagacactaccacttgctgaatttttggtatactgtcaaagaatacccacaattagaatacctctg

SEQ ID NO: 182973 - DNA, 539 bp, Homo sapiens
tcagccaggcggtcgatgtcagcatccactgtgatgagtcctgttgatggtgtggacccttgatgggatgtgatgagatgggcacttcaccccggggatcgtcctaatgattcataaacccagtctaatgagaaagacagcagacagtcccagtagaggggcactctataaaactcctgagccatccacacagctatcatggtcctcagagacaaggagagtcggagaagctcagggcccagaggaacctgaggaggcgacaggacgaaacggccagtgggaccctcgacgggatccctgggcaggatgagctgcggagcactggggcagtgaatgaagtgtgggccacgctcccggtaacgggtcagtgccggttcctgatccgtcacaagggcgccaaggagaggaaggtattcatgctgggaggacattggtgtgggcgtgtgagagctctcggtactatcgtctcaattttctgcaaatacaaaacttctaaaatagtgtattaaaaatagagaattaaagtgcaaacatacaaa

SEQ ID NO: 182974 - DNA, 717 bp, Homo sapiens
gaaatcagacaatacctaggttctagtctaggctctggcacttaactaatgggtgatcatgggcaggtcgcttaacctttttgtgcctcagtttccttatctttacaatgggattataatagtacctccttcataggattgtcctgaggattcattaattgaaatgaccctaggaaagggtcagtgccttacactgagtaagttctcagtaaatatttataatatcatcatcatcatcaattattattattattaatttactttaccaaaacacaggtcctgctgagccatgttggccagaccacacctagaacagcatgtccagttttaggctaatctgtgtaaaattcagtgcctggaccattgaaaggggctcgatatatggtggaggtattattgttaattaatgctgctgctaaccttcctggagtgcatacaacatgccaggcactgcatacgtgctaattctattagtcctcttaacctttaccactctatgaataatatacaattattaatcccttttgcagatgagaaaattaaggcacagaaacgttaagtaactctcccacaattacaaagcatggaagtggcaaacccataattcaagtctagactctctttttccagagcctggactcttagccaccatgccaaagagctgtgctgtccactgctgtagccagcagtcacatgtaactatttaaattaataaaa

SEQ ID NO: 182975 - DNA, 196 bp, Homo sapiens
aatttcaacattgtggttacaaaataagagtttccttcatggtacacatagaaggtcatttatgtggtggtttagctgcgaatttaaatactgagctcatttttttctttccccacttactccagaaacattaaaagcaaccatgcaacctcattatatttgttagcattccaaaaatatttcaaagggcagtatg

SEQ ID NO: 182976 - DNA, 903 bp, Homo sapiens
tagatgaaaaagaaatcctgaatgttctgaaaggttatcatttttgttctctcctaggaataatgattttcctccattattattatttttatttatttatttattttttgagacagagtctcgctgtgttgcccaggctggagtgcagtggtgctatctcagctcactgcaagcaccgcctcctggattcacagcattctcctgcttcagcctcccgagtagctgggactacaggcacctgccaccacacccagctaatttttttttgtatttttagtagagaaggggtttgacggtgttagccaggatggtctcgatctcctgacctcgtgatctgcccacctcagcctcccaaagtgctgggattacaggcatgagccaccgtgcccggcccctccattattgttttgggtgggtgcatggttgcctacctagagacatttaacatcctcctttgcagcttggtgtggtcatatgactttaagttcaacccaggaggctatgagttgtaatgtgtacagcttctagaccacattcttaaaacggtgctttcgtttttcttttcttttttccatgggctggaacatgacctattgttagggagctttggctttatagatagaaagatactccagagaatgacagtgtaggtagacagaagcaaaagtcccctgaaaatggttgtcatgaagccctctcctctcccgctaatcagcttggacttcgacatgagagaagtaacacttctatgttattaagccctttgtgataggagcaaatcctgtactctgatgtagggtgatgcagtagtggccaattcatattactctatgatatgctctgtatggaatcaatttttaggaatgacaagtgagtgtactgtgtgtttagcatacattatag

SEQ ID NO: 182977 - DNA, 349 bp, Homo sapiens
gcattgacaatggctagggcatttccaacaggaatgcaagtctgtgataaacaggggagaaacatgctaccccacacctgcacaaactaaatgatgtgtaaaaaatagttcctagcctctcatcacattgagaactagttgcttccaaattcagcactctttttaaaaaaatcattgtctaagaggaaagcagtcaggcctttcttaaagcaccactgcctattagatgaaagctgctgaggcccagcgacactacgtgttccttactccatgagtctctgtgttacaggaaaggggtcctgatccagaccccaagatagggttctgggatctcatgcaagaaagaatt

SEQ ID NO: 182978 - DNA, 644 bp, Homo sapiens
gcctcaagctgagcctaaaacataagcatggaaataggccctttttttaatcattttaaaactagaagcctcagtgggaaagtgatttgactgtccagagaaaatacaggaatggaaagcaagctcgctgtcactgtaaagcactcaaaggagcagcccaagtgttcagggtggtgacaggtgcctgcctttctgcaggaaagctgagaactccctccacctcaccccactcacagcacagaaacacccgagggctgggcaaatgagactctggaagggctcccagaggtcacacggcttggcttctcaaggacagacatcccctgtgtactctcggagggctggggcacacagtcctcacgggcagcccatctgcaacactggtatctgcatccttgcactttctacccatcagcccaaggaaatcaggagtcaatcaatcgaacaaaagttattcaatgaactcaggccatgtggcctgcgatgaggcaaaaacaaaagcccaagagcggtccccactcaaagcgtgtgcagactcattgaggagaaatgggaacacacatagttacccaattaaccaagagattcagtcagtacaagaggcttcagtgtttggggaaggcttaagagttgcagaagggcct

SEQ ID NO: 182979 - DNA, 390 bp, Homo sapiens
ttttaacggtaaggtgctgttgtctgtacctttgcatgtgtgttttggattatcatctgtcacacctgggtggaaaaaacaaacttgaaaaaggttcaaagtcacacactgatgaatttgcgagaaacacattttttaactaatgttcacctggtgcataggctacatattcattttttaaataaaaaaaattttgcatctgtaggcttttctgcacgttgccgcttaaactacgcacctagaaattcatgctgcatcttttgggaagatgctttcctggggtcaaaaacacattcatagtggtttgggcactttgtattctttcaaacctgtaaactttagttggtgattagaaatagttaaggcagattctaggctgcaaggtttagg

SEQ ID NO: 182980 - DNA, 474 bp, Homo sapiens
tcagctcacaaggatgtttaatgctaaataagactgtgtagttgtgctgtttagacatctcctttgggtgattaaaatacattattctaatgtaacacaatgcatatgtgatatacttagtgatgagatttttttcaaagaactggtactatagccttatgtacccgtacaacagttgcatattattaactagtcaattgtttaaataatttggtgtgactttcagtccctgatttttctgtgtgtatcattaaaaaaaatctgtaagcaattgcagcaacactgacctgcttataaaaatccatcattatgggatgtgtatgctaacaatgaagaatgttatttgaaaacttgcttttttgttatcttaaaagaacagatggtaaatataagcttactctaatgtattaaaacacataaaattttccttaacactaacatgttgacttgccaaataaacaattgctcctgcct

SEQ ID NO: 182981 - DNA, 187 bp, Homo sapiens
ggattggcgggcacttaaagagatattatcttcacattagaggctaacaggcttatacctactgatagctgacaagtattataggaatcctggcaggcaaattgtagcataaaaattatgtaatttactaactgtaaaataacctttagagtttagaatcagtcagataagttgcccgccaatcgaa

SEQ ID NO: 182982 - DNA, 225 bp, Homo sapiens
ggacctaattaaggagcttctacacagcaaaagaaactatcaacagaataaagagataacctacataatgggagaaaatatttgcaaactatgtatctgacaaaagtctaacatcgagcatctataaggaatttaaattccctttagaatgaaatctaaatcctttcctctggcctacagggctctgaatgatggtgtgtgtgtgtgtgttttaatgttatcttg

SEQ ID NO: 182983 - DNA, 459 bp, Homo sapiens
ctatggtgaaaaaggaaatatcttcgcataaaaactagacagaagcattctcataaacttgtttttgatgtgtgaactcaactaacagaggtgaaactttcttttgatacagtagctttgagacacactttttgtagaatctccaagtggttatttggatagctttgagggtttcgctggaaacaggaatatcttcatataaaatctacagagaagcattctcagaaacatcgctgtgatctttgcattcaagtcacagagttgaacattcccttttatagagcaggtttgaaaccctgattttgtagtatctggaactggtcatttcgagcgctttgtggcctatgttgaaataggaaatatcttcccatagaaactagacagaagcattctcagaaactagtttgtgatgtgtgtactcaactaacagagttgaacctttcttttgatggagcagtt

SEQ ID NO: 182984 - DNA, 379 bp, Homo sapiens
atcaatgttcaaaacgtttaggaattaagtcaaactaagggatatgggcctgagtggaagaggctttgccactgaaatgacgtgcatgtggcagccgccggaaccagaggacatgcagccgcgtgcggagagtgaggcggatccattacgggcacacagcttaccatttccttccagaattccttcttccaaacaagctatactgaaatccctctagtaaaagattgagacgaaacactaatagttttgggccaaaacgtggtggagaagtttgaaaagacaaacatagcaacgtgtctttggctatatggttccttgccctccagcaagcttgaaatataaaaaggctaacatgcaaaactaggggtactacccccct

SEQ ID NO: 182985 - DNA, 224 bp, Homo sapiens
ccaacatgcgaacggactgatctatgcaaaaccttccctctttgatatactaactccagaaagagccactctgtcttggtgtcagctttcaaagatgtcactgcttcatcagtatgaaatatttacctaggctatttgactggtggtgtctagacaaagaaagcatggaggcacatatggtttgattcaaataatgtagagtcttcctgaaagcctcagatcag

SEQ ID NO: 182986 - DNA, 223 bp, Homo sapiens
ccgtgccgttatttacaatgacataacaataagatttaatgagtaccagctttgtgctaactacttttctataactggacagtcctgatcaggtttaatctttaactctgaagtaggtgaacaagacagatgcagtgtcaaccctcctgaaactgacagtctttatgggtaacagataagtacccaggtgctgtggcttggatatggttggtttgtctccacc

SEQ ID NO: 182987 - DNA, 332 bp, Homo sapiens
tgaatattgccaagtcttcaggaacacgtcactctcataaaatgaaaccgtattgtactttctctgctttagtcatatgcctgtaccattcatgtcaataaagtttctttaatttgttgactggcatctgggttttaagaagcagagaagagaatcatgataaatttatgtttcaggctattaagcgatatttagaaaaactgaaataaatagttaattggatacagtcatcttgttagctttaatagtttttctgccttttttgcagtcatgaaactctttgacaacctaaagaaagctatgggtctagggccgggcgcttgggaggccaa

SEQ ID NO: 182988 - DNA, 184 bp, Homo sapiens
atgatgtcatgaaatcccccatctgcagtcattttgctgtacatttgcctgcatcatctgggagcacctgcctcacaaaacccatgggggtagatagtagcaaaaggccaggagtggtgtttgtgtggggcctccttccagttcattagcaaatattttcccattacagtggtttttgcttctc

SEQ ID NO: 182989 - DNA, 667 bp, Homo sapiens
tcccagaacagagttcaaaaatacttaaaatgaaatgatagtatacagaaagcaatgagataaaattcactgtctagcatgcggccggaatattgaacgtagatgcgaacaataggagtgtgtaccaggaatcaaagacaaaagttaccaggcatgagaacaatcaagaaactataacccacaatgagaaaaatcaaccaatagaaaattaatcacaaatgatacaaatagcagcattagtcaaactgtatttcatatgctcaagaaaataaagaaaaacataaacatgttaaagacagggaaaatataaaacagcctaaacaaaaattacaatgtcttgaggtaaaaaacatactgatgaaataaagaggagattaggccgggcacagtggctcatgttacagttcttaatcaggtcccaagtatcagcctgtgccaaatcagactcaaaataaagtcagcaatgaaatgctaaagatcaaaatgaagaatgagcgcagtgactgtcacaaagccatctaaaacacaaagaaataggacctaattgggtacatctctactccattcactcctaccctcactgaaggaacatcaagacagcataaactatggagcgaaaattctcttcctggaaacttcttctacctgaccaccctgggtgacctct

SEQ ID NO: 182990 - DNA, 556 bp, Homo sapiens
tcccagaacagagttcaaaaatacttaaaatgaaatgatagtatacagaaagcaatgagataaaattcactgtctagcatgcggccggaatattgaacgtagatgcgaacaataggagtgtgtaccaggaatcaaagacaaaagttaccaggcatgagaacaatcaagaaactataacccacaatgagaaaaatcaaccaatagaaaattaatcacaaatgatacaaatagcagcattagtcaaactgtatttcatatgctcaagaaaataaagaaaaacataaacatgttaaagacagggaaaatataaaacagcctaaacaaaaattacaatgtcttgaggtaaaaaacatactgatgaaataaagaggagattaggccgggcacagtggctcatgcctgtaatcccagcactttgggaggccgtggcagatggatcacctgaggccaggagtttgagaccagcctgtccaacatggcaaatccctgtctccactaaaaatacaaaaattagccaggcgaggtggcagatgcctgtaatcccagctacctggga

SEQ ID NO: 182991 - DNA, 863 bp, Homo sapiens
tatgaaatgtaatgatgaaattgaaatgaaattgaaatgagttgaaatgatgagatgtaatgatgaaatgaaatgatgagatgagatgaaatgagatgcaataatgagatgaaatgcgataacgagatgagatgagatgaaatcatgagatgaaatgatgaaatgaaatgatggatgaaatgatgagatgaaatgtaatgagatgaaatgacaaatgaaataatgaaatgagatgaaatgaaataatgaaatgatgagatgagaagaaatgatgagatgaaatgatgaaatgatgagatgagataaaatgagatgaaatgatgagatgaaatgatgagatgaaatgaaatgatgagatgagatgaaatatgatgagatgaaatgacataatgaaatgaaatgatgaaatggaataatgaaatggaaatgatgagatgagatgcaatgagttgaaatgagatgaaatgatgaaatgatgagatgaaacgatgagatgtgatgaaatgatgacatgaaatgatgacataaaatgagatgaaatgagatgtaatgatgaaatgagatgagatgaactgagatgaaatgatgagatgagataaaatgatgatatgaaatgagatgagtgatgagatgaaatgatgagatgagatgatgagatgaaatgatgagatgaactgatgagatgaaatgaaatgaaataatgaaattgaaataaaattgaaatgagatgaaatgataagatgagatgatgaaataaaatgatgaaatgatgagatgaaatgatgagatgagatgacatgaaataatgaaatgaaataatgacatgaaattgaaatgagatgagaagatatgagatgagatga

SEQ ID NO: 182992 - DNA, 439 bp, Homo sapiens
cgaaccacccggggagaaatcccctgtggttgcattgcgagagactgtctcagaaaaagaatatctgatagttcatttgaagtttttgttgatgagaagtaaataattctttttctaaaactaatacataatgattgtgcaaatttctggagaagttggttaatgggtacaaaaaaacagttacatagaaggaatatggtctaatgtttgatagcactgtgtgatgactatagttcacaataatttatggtatatgtcaaagtagctagaagagaacatatggaatgttctcaacacaaatgataaatgtttgaagtgctggatattttaaataccttgatttgattattacacattgtatgcgtgtatcacaatgtcacgtgtacctaagaaatctgtagctttccttcctaactaaaccttagtaaagtccacacac

SEQ ID NO: 182993 - DNA, 843 bp, Homo sapiens
cactgctcctccaggccccccagactctttgccaaacccttgtagccatttccacctattccaagccaccagtgaccttgcaattggacaaaatcgccagcagataaatggcactcaaatggaatggaattcagaagtctggagcagggcttctggaggataacagatgggaaggcagcctttcctccagcctcacattcccatgccctcgtggctttggtaaagtcagctgagctcctggaattcaccaagacccaggggaacaatgatgagcaagagttgtcctgggcctcgaggagcctgtagtccagtagagaatctgggaacttagataacctgcagtacaatacagataaacacacatatggaagtgtttaggccatctttcttcaaatgtaagggttttgcttgaaaatacagccttttgatttaaaaggtcatcagaaaaataggtgagaagagctaagaaaattttggaaaagagaaaactgaggaaggatttatactatctgatattggaaaattttgtaaaaactaagaatgagagcactgtgttatcggatgaatggacaatcagtgaaatagacagaaaacccaaagcaggtgcaagcccacttcctcactcatttattatttcactcagctccctgcgtgccaggcactaaattctgagcactgagggaaagcagtgaacaaaaaagaaaaaagaatttctgttccaagtgaggagagagacgaacatgtgaaaattatagtatgtgcaatggtacaggaatgctggtgagggccaggaatggctggaggtgtaaagaggtagccaggtaaggccttttgaagaagata

SEQ ID NO: 182994 - DNA, 695 bp, Homo sapiens
gccactctggggcttggcctgcaagaacaaaacgaggggcatgtctcgagcctggcgcgtttaaatgaggcatctttcctaaccatgcagcctcgaagatgcaactcatgtgacttgtttaaaaaacagtctttggtacctgttaccgccaacctcacctaggaacaagtgggcttccaggaagacaagaacaaagagatgtgactgtgagggtgctgtgtacaccaatgccatcccaatgaagggccacagtctgtctcctaacataattctgtctttattgttttcattttcaattatcaataacctcaccccagataaacctccatggctacgatactgcctctgtgcaaaacttctaaaataatcttgtagggttattttaccaatgtgtggggaaggattccttacaggtaagcacttgctccccatgacaacagacaggagaatactgcggttaagagcaagcagacagacgtgcctgcccgcaagccaggcttattcactgacaaaccacttgcttttccacctgtaaaacaggggtgccaataaaagctcctaaactttgagcattcctgtgaagattaaattggttaaaatcctatgtgccaggcattctgtgtacatgctaaatattcaccattaataatgaaaactgaacttctcttccatcaaatcctcgatttcctacctgg

SEQ ID NO: 182995 - DNA, 284 bp, Homo sapiens
gtttctgatgttcagattgtcccaaatttggccaggtggagcccttcaagtatctcttatgtccttttgacattcactctctagtctttggacacttgattgccttctaacacaagatatctcaagttggccttgcattttcaatgccccaggcctggaatgaaacctttttccaagaatccctggctccttttaataggtagctatttagaaaccaagatctgggcactagggattctcactgctcccggagtgtcactggcaattctttccaaccattcaag

SEQ ID NO: 182996 - DNA, 580 bp, Homo sapiens
attcttgggtccacgagagagaaaaaacgaaaccagccagttgttcacaaacagcttttcctgggagagacaaattcgtgtaaatgtctgttatagggagtactggaccacaggcaacttccaaacaaaaaaataagcagtaagagtcagtattaaaacctgtgctatttgaaaaaagaatctgctgacaggggcggaggctcttgcacaatcaccaaaagcagctcctctcggtgaaatttgatggtgttcattccatttcaggcattctgctgggggctaagggagatccacaaacatgaaagatgtgatccttgccctcgaaaacattctactatggaagccaaacacaaatgcatgtggagtctcccaaaggaagcaagggtttacaggttttgtctgctggagaaagtctatccagctgaaaaagttcatctcttcccttccctgcgatgatgcctcttcagagagggccaatttgaagcattcccgaagatttactatcacccaccaaactatagtgttggtaaatatttaagtattgtgagtgtgggctcgaatttgttggtgctaaatccta

SEQ ID NO: 182997 - DNA, 502 bp, Homo sapiens
ggtgcagaccccctcctatctgaatccagatcctttatagccctctctgtgttaaaggcatcacagaattaatttccacttcattgggagctctcagtccctgaaagttgaatccagagtggctattctgcaggtcatgcgattgctgccccaggcatcagaactcaggcatggcccactccatatggaaacaggctctctaaaaccccagtggcctggctagccagcatgttatattgtacctgtcctatctctatcagtgtccagtgcaggtgtgagagagagtactgtctttggaaaagatgagagcccagtaggatgctctgcccacagcctcgcatccacctgacttaaaaaccatcgtgatagcaaattgggtgttgatttcagaagtttttgatttgttatcttaaacgtcatacctatctggattcagataggaggcctcctatctgtatccagaccgccatgatgacaaaaatgagacggacgtacgtctctg

SEQ ID NO: 182998 - DNA, 464 bp, Homo sapiens
ggtgcagaccccctcctatctgaatccagatcctttatagccctctctgtgttaaaggcatcacagaattaatttccacttcattgggagctctcagtccctgaaagttgaatccagagtggctattctgcaggtcatgcgattgctgccccaggcatcagaactcaggcatggcccactccatatggaaacaggctctctaaaaccccagtggcctggctagccagcatgttatattgtacctgtcctatctctatcagtgtccagtgcaggtgtgagagagagtactgtctttggaaaagatgagagcccagtaggatgctctgcccacagcctcgcatccacctgacttaaaaaccatcgtgatagcaaattgggtgttgatttcagaagtttttgatttgttatcttaaacgtcatacctatctggattcagataggagagggatcgtctagatcactca

SEQ ID NO: 182999 - DNA, 271 bp, Homo sapiens
gagggggagtcccccagaggtgcttcaccaattccgtaataacagttctgctctgtaacactcttaatgcttgggcgagagaaactgctgccaccccatgcccaccttcacacgtgtcacgtttttctggcccatctgcacaggcaggggcccaggtgttgccatctgttctgaattctcaaaatgtcagtgtaatatgggcagcctagagtttcacaattcagccagttattcaccctgccacgtctgtcttgattgtggctctcatgtg

SEQ ID NO: 183000 - DNA, 463 bp, Homo sapiens
tgggaactccctagtgatcacagtaacgatttgcttctctatataatgagaggggccagagttctattttgatgctttggggattgggggagagcagaattataattgtatcagacccctccaccagggacccttttctatcatgagatgaagagctcacataagagttaactgccctacaataaacaggttttggagttattctttctattactcttaaatctaaaggttgcactctaggttccttttaattaagctccagaatttccataatgaccaaaaggagatggccttgggggctaaaaacacacttaggagtctgtagcctgggccctcagacacgatgccttcctgagcctattgtagagcagtcacctacacagacactctgtttctgaggtcatgatgtctgggacaaatcacagcttcttatacttggcttaattttcttatacttttttga

SEQ ID NO: 183001 - DNA, 455 bp, Homo sapiens
gcttgttctaaggctcacagatggcaccttctctgtgtatcctcacatggtggaagaggcaaagcagttcctgggggagttctttgataaaggtgctaattccattcaagagggcacctcccaagggctccactccctaatactatcacgtggggagttaggattcgacatgtgaattttggaggcacacagacattcaggccaaggcataaacagtgaccacttttgttctgtctgtccacacactgcctagagcttccatttatttcaactacatttgcttttttcttatttatctgttcagagtatcttctcagtggctatttatttaccaccctttaacatgttttcttgacattgtacttcagcctgtatatgctttgcaactcaggaactatgctggcttaactaatagtacctacttaacaggtgaaactgacagtaacagcttaata

SEQ ID NO: 183002 - DNA, 478 bp, Homo sapiens
gagatgaaaattttgtgggaaaacatctgcaaaataaatttctttgaatgaattgggatagatggcttggccctcaggtccagacctccctaacataataaatgaaccagttattgaccagacaaaagatttcccttaagtgctctttaattttaaagcagaatagctttaactggctcttgatgaagaaatcatcttaccattcttagctgtcctctcttctgcatatgcagtgccaggagtgcttttgggcatttgctgtgttagggtagtgatatgttttggaaagataacggtattgaaattagggtactttcaagagaaattcaactttggattgatgtaccctctgatatgtgctgtcttgtttttaaagaaacacctttatcaggatatgattcatacatgaaatgattcatccatttaaaatgttcagtggttttcagtatattcagagttgtgcatccatcaccatagt

SEQ ID NO: 183003 - DNA, 1100 bp, Homo sapiens
gggattttcaagaagtgttattaatagtgctctatgctatagggcagtcaagtatggaaaggtttttaaaatgtctagtggctttagcccctggctgggcactagtgacctaaaggggaaaaacttcagttgagcaatgaggatgtgaggaagcagaggcaatgagggaagacagacatttcacgcaggctgcatgtcatgacgggaagggaagaaggaacatggtgcctatttaaaaaaaattattaaaaaaaaaaggcttgagcatgtttatgatctgtgtgaatactgctggaagagatgcaggaggaagagagaggacattgggaggggcagggtcccagaagagtcaggagggagggagatcctgaaggaagtaggtggaagaactagtcttgaagcaaaggaatcctgcccaatcccctgagacaggaagccggaaggaaaggaaggatgcagataagtttgcaggtggcaaggagagagcacaagaagttaaggaagttcctgtctgatggcatctgttttctctgttaagtagctgggaagtggtggggtagggagaatggtaagctcttgtaaatagctcttgtgaggactagtttgcctgcaatgttgatggacccacatctatacccaggtagatgctaacctatagcaactgtataatttcttctagcaatgccctaatctgtcagcattgccctctcctatgcaggcacagtagaactaaggattaagagataccttagataacaatgggaagaaaatagagtggtctagtggaggagaaaaagactgaaaaataggcatagttagaaaatcagaaggttgaaaggctgtggtcagaatattgggagtttatgatttttgatatgaagtgcttctggatgatttcatccacccatctatctaatcagtgggagattctgatgggtagagaggcaatacagcctagggtgtggccatagtgaagtagaaggcaaatggaggtagctagagttgaagtgccaagataacaagaggacaggaagtggacagtcaaccagaatgagaagactctgacctaggaactagactgattgtggaaaactaatcag

SEQ ID NO: 183004 - DNA, 175 bp, Homo sapiens
tgacaatcattagtcatgagttcatcttgaatctgattctgaaggcagaatatgtatctttcctcatacctgcagtgttgagtcattgtattagtcctgaggaagtgactggaaaagaagtcttaatttcactgccaaagaaataattggatcaaggttacatagcgtatttaaa

SEQ ID NO: 183005 - DNA, 404 bp, Homo sapiens
cctgtgtcctgagagggcctagaagcaatagtaccctagtagcaacaagcacacccaatgctaagaccttggattctaatatcattctccaataaaaggaactagagctacttggagaaataactgattctaggaccaaggcaggggaaatacaagatgggcctggagaatctcatagcaccagaaagtaaggaattgaggaaaaaaaaaaaaaaaaagatgaaggcatggcaaaggaatagaggagtcatcctgaaagattgccaaatttggaaaaattgcctcaataaaatatagatactcctcaccttctgatggggctatgacttaataaacccatcataagttagaaatattgtaagttgaaaaggcatttagtaccccaacaaacccatcataaagtc

SEQ ID NO: 183006 - DNA, 554 bp, Homo sapiens
  misc_feature (498)..(498): n is a, c, g, or t
  misc_feature (542)..(542): n is a, c, g, or t
  misc_feature (550)..(550): n is a, c, g, or t
agcctggcacatctacagaaagaactctgaggagaggggcctctcggcccatagttaaattgtccttattgtctgacccctggtccttatctggagaccgagccccagatgccatgtgcactcactcccctgtcagcctaaggggcacatctggctgccacacatctcactccataaagccattcaggaattgggaaacccgctgtctgcaaaggcaacataaatcagcaaggctgtttctgagttgcacaacatgacaccacagcagctggaacaaagctgcaggccccacatgccagcttaggccctgcctctgtgtgcttcccattccagtgggaatgattttcccatcctagcccaatagggtgaggctgagctatgccgacactgggaagagagctagtgtcattaagtggaattgagtttcggatctagggaaagttacaagaaatgtgccctccacattctcaaaccttcactcaacacttccttccccanagccagaagatgcacaaggaggaacatgaggtggctgtgctggnggcacccnccag

SEQ ID NO: 183007 - DNA, 446 bp, Homo sapiens
acgtgcttatagcagctttattcctaatcgccaaaaactgtaaacaaaccaagtatccttcattgaatgatgtaaatcaaattggtacatcaatacgatgaaatactactcgctgttaaaagcaacggcatagatgaatctcaaagacattatgccaagtaaaggaaggcagcctccaggttatatcatgtatgatcctatctatgtgacattctggaaagggcagcagggacagagaacagatgagtgtttggaagaggaggggtggggtaacaaaggggaagcatgaggggatttttaggtgatagaactgccctgtgtcctgattgtggtggtagatacattaatctttacaaatgttacaactcagagctgtacatccaaaaagttacgatgcaaaaaagttttatttaaatcctcacatttatgatgtttagaattctaaa

SEQ ID NO: 183008 - DNA, 464 bp, Homo sapiens
gcactggaagagcactaacagggaaacctcacctttctaatgccagcaataacctgaaggataaaagctgagaactagaaattatccctgcaaaagcaagacaatttccaggacaaagcagccaggtgtccaggagaaaaaaaatcaaatacatgactaaactaaatatttgatcttttacactttggtaaattcagtttgtctcctttaaaaattataattagaccaggcacagtggttcacgcctgtaatcctaaaattttgagaggtcaagggcaggagtttgagatcagcctggccaacaaactgagatccagtctctacaaaacagaaaaacttagatgggcatggtggtgcacacctgtagtcccagctacttgggaagctgaggcaggaggatggcttgagctcaggagttcaaggctttagtgagccatgactgtaccactacactctagctgggc

SEQ ID NO: 183009 - DNA, 702 bp, Homo sapiens
aacataaaattgaaaggcaagagactaatccagtggtatgagattatttttaattgtcaaaaaggcaaaaaagcatcaacaacagcttaattagtgcatagtgtcttgtattaagatgacacagtatctaagtactttcggaagcaggtggctagtgatgttccccaaatattttataaagtttatacaagaacaatggcggtatacttttttcctctgaaatctggacctaggtgacaaatgttcttgtgaaaatattagtgagtcttggttatctggaaaaactgtggccacaagggtacaactgatagcaagaaaccacccttgaatatattctgtcaaacggaaatcctgaaactgaattaccaacggcacaagcccaaacaaggtcatctgtacatgtgctaaactgaaagtcatgtcattgacattacctagcaacagatcgttcgcaaagtggcaccttccgcaagactgctaggaagatgtggtcaaatagagtgtcaacacactgtctcccagagctatgaattggggaattgtccagaaggtctttgagaaggtgaaaatgatgaatgtatgtaatcatccccatttaaataatttaggaaccaaagcccagaaagcataagtaaattgttcatcgtcccaaagctaggaagtggaatggtttggacttgaactctagctggcttggctcaa

SEQ ID NO: 183010 - DNA, 371 bp, Homo sapiens
ctaccactagtttttgggggcaagaattctttggtaggaagaaacattgcagtgatagagttgaagtgttatttaagctgtctaatggaatggatcagccctgtaatctggaggaaagactgatggggatctcggtgttctgttctctctacgtccagctctgctaatgtattctaccactactaactactacttgatcaggtcaggtgacctctaaaaatagagggtggagtcaaccattgtgtcctggatttcagacattccgatatcatgagatgcttgctgcgtggtatactactatattaatgtttgtgtattatttttcttcagtcatgtttattatatctataaacagaagtgttttcccagta

SEQ ID NO: 183011 - DNA, 456 bp, Homo sapiens
gaggtatcccccgattgtcgaacgagctctgcaggtggttctgagggcagcctggtgagggaagggttctagagggcattggggcattctagagaaaggtctgagctgaagctaattttgagtttgtccctgtatggatgattttttaaaccatgggagggggccagtcatcaaactttgtggaagttctgtctgtgtaggttctatggtttgctttttgtcctctgtaagtattaaacagtaatctctcagagcattgtcatttggctgaagtttttcacatgtatttcctgttcaaatctagaatgtgggatggctctaatccttatgcccctgtgctagatttctccttttttgttgctgtttcttttagaaggcagaggaatatatgggattttattgtgggctgtacctgtcttcaatgacaatctcttggagagcatgagctctgtagtt

SEQ ID NO: 183012 - DNA, 300 bp, Homo sapiens
cgcaacttggggccactctggtgagcctgtatatcttcctgacacgtttgcacctggtggtaatctacctgtgccaaaccatttctgcccttatggtggtgtggtatctcatttttttcaaatacttttcagagtcctaacagctctcagatctcagaatgatgacctcaattggagcctgcttcctggagaaattggccaaggtagagattacgagaaccagagtcattccaggacagattaaaccttagcattgttgaaagcaactaccattacatgacagcttgccaagatgggttg

SEQ ID NO: 183013 - DNA, 421 bp, Homo sapiens
ccattcaatttccgcataacttttgtcttctaccacaccaaagattcccaggaatgagtttcaagggaagcagggttatatggtagaaagcattccacaagcatggaattattaaccatgaagccttggatgagttacttaagccaacagttgtttaccacctaactcacagcatagttataaatggtgagaccattaatataaagcatttatcatacagttcattcaacaaataaagttctcttcctttctactgcccaatgcaatccatccactcatcccactatttgatgaatatgtaccaagtagctgttatgtgctagggcagcgagatgtgtgaggtcaacaagacagaaatgtctgtctccaggactttacctttgtgtcctatacccaggccggggatgagatcctctagatg

SEQ ID NO: 183014 - DNA, 317 bp, Homo sapiens
gccggaccgagcatcaatactgggcagtatctttccctcttaacctttcacacgtttttaaagtgtcaaaattgatgaatggtcgacggattcattcaacaaataaagttctcttcctttctactgcccaatgcaatccatccactcatcccactatttgatgaatatgtaccaagtagctgttatgtgctagggcagcgagatgtgtgaggtcaacaagacagaaatgtctgtctccaggactttacctttgtgtcctataccctgggttccactgtttttcacattgcttcctctcagaatttgtccctgcactt

SEQ ID NO: 183015 - DNA, 299 bp, Homo sapiens
tccctcccaggttcccacaggggcttggaagtcaggggagccgggaggggcggcgggggccggggcaagaagccggacggcttttattttgcgccataaagggctgcacagtgtctgctggaatctcagcagttaaagagacccctctgcacaaaggggcgctccggccgtaatcgggaaataaatttgattttctgaattctttggcagctggtgacaaagggccaggtagcgccgcggcgggggtgatccttgcagaaggcggcgcgcggcggggcgtgcgcgccggagggacaaag

SEQ ID NO: 183016 - DNA, 226 bp, Homo sapiens
agcggaccggatgggacattcatatataattttgatgagatcaatatcaaatatttatattactatgactattgtaacactagtcacagctgagccatatagtatactgtgattatttttccttttctgcacaaccttttattttccctggagttcatgattgtcttcctttttcatttgcttcattttctatattcttattgctaatttagtccaagttatataa

SEQ ID NO: 183017 - DNA, 455 bp, Homo sapiens
cagcatggtatagtgcaaaaaagacacttagagtcagaagcttcaggttccacgttggccagtgccactatcgagttgcattgtgtggatgagtcggttttctgtgtgtctcagtttttttccacctgcaaaatgactgtgtgggattatgtctattattgccattaaacatgcggtgaccgatttctagtagaggcttgacgttagagacttgacatatgctgaatgtctaccctatgcatctactctgctgagctcttcattatatattagctctgtgaatcatcacaaactagagacagtcattatagtcttgtactgccactgcactgtacagctttggaaaaattcatttaaattttctgagtctcagtttctttaccattgcgaaaaagggaaggaactagaccatctttcagtgtccttctagctgtaacaattttataagtctaggc

SEQ ID NO: 183018 - DNA, 506 bp, Homo sapiens
ccagacttaaactagtgggatcttggcatttatctttttaaaaacctggtgctcattaaggaaaggaaaatattctgaaataatcgaaataaccttttgggcattggaactccattttaaattaaaaacatttgtgcctactattatcttatgctaaattatacccaggtattgtaagtaaaattattttgaagttactttgttctaagaaactatggagattcttgacagtgttagacaaagtccttaaatgacattatataaaaattgagaattagtaccttatgacttaaccattttacactgagatattattggacattgagtgtacatggaaatcacgtgatcaaagtatttgagaagtaaatatctaaaggaagagaccaatttaaaacattctaatgagcatcatctcataatttggtaatctcatgtaaaatgcttataataggggtgtgtgtatgttatatatatttttaaaataaatttgtaatcatgtatacagt

SEQ ID NO: 183019 - DNA, 146 bp, Homo sapiens
cgacagagcgagactccatctcaaaaaaaaaaacaacaacaatatgaattcaaaattctgaaggtctctttcctgctgtagcaggtgaccttgcccatgctgccatggtagtggcatcctcttcagcctgggacccaggcttcaga

SEQ ID NO: 183020 - DNA, 224 bp, Homo sapiens
ttaaaaggctccaccctaaagccaataattcagtcaagaaatttacacctttaaggaagcctccatgtctcagaatgtctgtttttcctggcagtttgactgaacttttacttacaccgtttttcctttgtttaaataaaatatgaattccctattttgtttcacctaagaattatctctttaaaaatgcaaatttggaacagcttggctgacaattgtttagg

SEQ ID NO: 183021 - DNA, 194 bp, Homo sapiens
acgttgacagagttgtgcaaccatcaacactatcattttaagaatattttcatcacccaaaaagaaaccctggtactcattagcagtcattccctatttcctcccaatccttcccaccccagtctttggcagccactactctgctatatctgtggatttgcctaatctgggtattttgcacaaatgaaaccata

SEQ ID NO: 183022 - DNA, 347 bp, Homo sapiens
ctctggataagcccaggctagttaaaatttgaaatgacctaaaaatccagctaaaaattgaggtagggtactttttgtactatttatttgaaatttcttcccttgttccctctaagccatatctatacaaagctggaattaatgttcatgtacaaaggtgcatgatctgaagtcataggatgggattataggtaaacagctgttgcttacaagcttacagttttgcttaagctatttggaagtggtacaaaaagcagttaattagttgccctttgtcatattccaaacaccaagctctagtggagtttgccttgacatttaatgaaacatttgcttatgagaatatg

SEQ ID NO: 183023 - DNA, 276 bp, Homo sapiens
tgtgctctgcggtacagtggagctgggggcatcctcaggtcctgctgatgacaggggccccgtttttatctgctcggctgtgccctcttccctctgactagcaaggcagctgttgcacgcagcacagttgtctgtatggaaggcgcacggaagacagccaggatgccgggaggcagagaggaggccaggtggcagtgaagaggccaagaggcagtgaggatgccggaggacagtgaggatgctaggagccagtgtggaggccaggaggcagggtgg

SEQ ID NO: 183024 - DNA, 713 bp, Homo sapiens
tgtctgctgttcacgaggatccccgattgtgaaataggtaggtgagtgagcccattgtgtcgattgtgaaataggtaggtcataataaggcacacctcatgagtacactgggcatgcaaagctcttagaagagtgtcaacatagaggaaatattacctgttgttattatgataacttagtcattctcaattcatttctcatctttacagaatcctaagtaactcctctaattattgctttatgtacttaggcctgatattcaaaatatctaacacctgatttattacctgcagtgataaacaaacagagtgccactagctatggttttgaggtccctgtggattctacatgaatttagaacaaaaattctgactttcagagttggcaaatcaggtaaatagcagccctatagaaataggtagtaagggtacttctttttgcctagttaacctagttcttcgaaagcagggaaatttagcagaagtggacatttaaggacaataacaaatttcctgtacatcagcgtgtgtgtgtgtgtgtgtgggcgcgcgtgagtgcatatgtgtgtgtgggggggcgcgcgcgtgcgtgtgtgtgtgcgcgcgtgagtgtgtctgggcatgcgtgtgtgtgcgcgcgcgtgcgtgcatgtgtgtgtgttggggtatgggtgctgcttttctctacctgcctcttccgcctaccttctttct

SEQ ID NO: 183025 - DNA, 521 bp, Homo sapiens
tcatcgagctcggtaccgattagctcctaacgtctgtgctgctagcacgtgatttccagataaggctgtgatcaggaatagagcaaagtcttgaatcttggtcacctcagcaccattctctaggtagttgtgactgatggtgataactggctgtaggttttgttaccagtaaataaggcagctaagctgtcatctgcacaatgcaaactgaaatcatcctgcagttttttaagtggatagtaggacattccctccattgcaagatgatttgctaggagagttttaaatagtgctgaagacacacgagaacaaagccttccctttttgagctcaggtccaaaaaagcagttttggcattaaagagaaaaggtttatgctcaagaacttcttgctttttcttctccctcttacttcttggactaagtgtcggtgataagatacaaaaccgttggtgtctgaagtacctctgaatccagcagccttctaaagaaatgttatcagaattatattgtgtaatataa

SEQ ID NO: 183026 - DNA, 310 bp, Homo sapiens
ggaagttctgatttttgctaaggggttattccgagttgcgaagtggtgtggtgttgggggaagaataccaccaactccaggccagctgctgcatctcctggaatctctgttttctcttctgtaagatgggagtcagggtggcctccatctgatcacactgaattgttgagtgactcaaaggagataatgtaccaaacactttgtaagccctatgacaccgttcaaagtctatttcctcccagctctgttttctaaaatcaggctgtatgttcgaatcacctgaggaacttaagactattaccagcgccac

SEQ ID NO: 183027 - DNA, 491 bp, Homo sapiens
tcactgaccacagcactcaagcctgcgaggagtggctggtggctgctctcctccgcttccatgggattgggtggccaacgtgggcagggcgccatcagggcatccccacctcctatccactgtgcttctgtcctggccctaggccaaggggtggggctgggctgcggccacaggctgcccttatcaatggtaaatgggacacctgggtaccctgagtgtaaacaggaccagtcaccccagccttcctggctctgcccaggacacctgctccttcttgccctgctctcagctagaattgcagggagtccctggaaagtgccacacatgctcttatctccaagctgtggtatgtgccatttcctctgtctacccctgcccaacccttactttttcttctggtcagcttaggtacccttcctccaggaagccttccctgtcccctccttccccctgccagaagagttaaggacccctgagctctcccaaacccc

SEQ ID NO: 183028 - DNA, 178 bp, Homo sapiens
acgaatgacatatggctccaccacgagatggcagtgtctacacacgtaagcaaatacttcccagtccaagaagtttcaaccattatagcatctgccacggaaagcaaaggaaaaaataaagaaaccaggatgtgaaattaagtcagcgcttctccctcccactctgtctctcctctga

SEQ ID NO: 183029 - DNA, 273 bp, Homo sapiens
gttacttgaagctgtgactcaactggtccttcactgccaaatatacctggggttggatcattggcctgatgtttgcaaattgaggaaccttagggcaaatcagtgaacttctgaactgctttcctcttcagttatatggggatttccccacttttgagatacttgtaaggattatatgagatgaagagatgagacaaggtatataaaagtcctagcacagagcgtgtcatataatatggcttcacaagtaccctcatctcctttccagtcctg

SEQ ID NO: 183030 - DNA, 463 bp, Homo sapiens
tgcgcacactatccatcagcactgaatacttatgtatttcttacaaacaaggacattctcctacaatatcacagtatagctattaagaacagaaaattaacactgctatattactaccatctagttttcaaatgccattcaagttttggcagttgtcaatgtttttggagatcacagcgtagttgttttggattttatttttcattactaaattcagattatgttttggggggcaggaattttatagaaattatctttgcagtgcatattatcaataacacataatcaggctttcccaatgtaaaggttttctttccccctttacaattagtaattattttgtggaataaattgtgacactatatgtaatattccattccccatcagattttcagtttatatcagtatgtgtttaaggattcctgtgggctataatttattattcatgatttattgtgatgct

SEQ ID NO: 183031 - DNA, 240 bp, Homo sapiens
ttaccattacggggaagttttgttttggaggaggtgcagaaatggggaggttactatgttctttggtagagaggagataatagctggtaaagaaccaggctgaagaatcaaacagctgtggtttatggtctgaacccttgcaccagaccactcgatctaccttaaatcctaaatggaaaacaggtaaggggatacttaaccccgccacacaatatcaacttgacatagcaacctctgcct

SEQ ID NO: 183032 - DNA, 446 bp, Homo sapiens
aaatcactttcatgtctggtttaatggtagaccagctgaattcttgttttctttttttaataagctttcttaggctgaatgattttttttttaaattctatcaaatggattcagacagaagaatgaattcttacatgtgcttctgcatttaatctgttacatgttattttgaagtctgtggaaaaaacctggtcttagaccaggaaaaaagaagagtattttaacactctttcctaaatattgggctttttttttaattacaccaaaattcaatgagtgatagtttttaaaacttaggtgaaatttctaatctaaaaccaaatgaatcaactttccatgtgctgttacagtaaaatcaactggtctatactgcattttaaatatatctttcacctgtccatgattttgtaacatcattcattggtcacctggaaaatactggtgca

SEQ ID NO: 183033 - DNA, 556 bp, Homo sapiens
ctcctgcaggatggagttctgcaactgtgaggcggggccttttctggaactgtctgcgttcgggtaatctccccccagaatgcattgcttctgatggggcgccgccttggctctgcaggtgtcagaaccctgagaaacgagatggtcttcttttcctgtcccctttcccatccatggtagtgatggcggtgatagcaataatgataggaattattactgacttacctattttgatatctgtcatctcagttcttccagcaaccaacctgtgaagctggcaaggccatgccttgcatgtagtagttgctcaagaaataccaggactgtgtggcacccccatgcagtcctgagcagaaacaaggttggataggattctaggaggacagcaggaggccgagccaggcagcccaggttttcacattgggtcaccatcagcagcatggccttccgcaaatcgcccacatctgtgaaacggactggaggtgcgagcgccgaatgtcagtgcgctaaggcctgggaagggctactggccacccctacatgggggtccaggcct

SEQ ID NO: 183034 - DNA, 436 bp, Homo sapiens
tggtcaagatcacacagtttaggctgggaatagtggctcaagcttataatcccagcacttcagaaggccaagggggttcatattgtacaaggttgattgctcattacaaattctcatcaacagaattcaagtaatataaattcttacatttaattcaacatgctgccgctatttggtgtcataaaaacacagacgataggagacatgcctgaaatgctttgcaaatataaaacaatttgcaaaataaaaaagcaatttcacatctcatttcatctttccatttgccccatgactcatggcccttttttaaaaatgagaaagctgaagctcagaaaagctgaatgcattgtctgatacctataaccaaacatggaaacacaagccaccatctgtggattctggtctcagtgacaacagcacctcaaacatagaaagt

SEQ ID NO: 183035 - DNA, 753 bp, Homo sapiens
tggcgcccattttacagatgtggaaaagcaagcacagaccagttaaggagcttgggcagagtgactgggagacagttcagctccgtatcagaaagggctttctaagcgtgcgtgctgtcacatgtaagcggctccctgtgggtggtgggcccccttccccaccaccaccctgacatcacaggtgtgagcagccaccgcacacactgggcatcacatgggccggggagcctggctctacagcacagtcctttggccatgaagagggggtggtagtgaagatacagagtccttggcttgataggaggtggggctgacagcctcccatcttccagcctgccccaagaccacgtgacctttcctgacctggtgcttctgtaagtcccacctcccgggtgcccctgggcgaccttggcccataaatctctttgatccccatctcatcttcaaatgaaggtttacagctcagcttttaaaaaaaataaaaataactagtaggttctggctgggcacggtggctcacgcctataatcccagcactttgggaggccaaggcaggtggatcacctgaggtcaggagtttgagaccagcctggccaacatggtaaaatcccatctctactaaaaatacaaaaaagtagccaggcgttgtggtgcatgcctgtagtcccagctactcaggaggctgaggcaggagaatcacttgcaccctggaggcggaggttgcagtgagtggagattgtgccactatactcc

SEQ ID NO: 183036 - DNA, 216 bp, Homo sapiens
ctctaatcctctactctgactcccgtgcagccaggatcctagacgtgaaccgagttccctcaaacagacacactcatgctactggcagggcaggggatggaggccgatttgagctgctgagggtgttggcactggcaggcacagctgcatcctgaagaaacacttctggcagaggctgctatgtcttgagcccaggcctctcctccctagaaaggg

SEQ ID NO: 183037 - DNA, 327 bp, Homo sapiens
aaaagctgggggggcagaggtgggataggtaggggtggagtgaggaggaaacaagctcgagagacttaggagagcaacattctgggactttgttccatggtggtgtggctaaaaggaaggtggctggtcttacacctgaaggaatagagatgggcaggagagggctcctggatggtgaagagtgtgagtgggtgtagatgtgtatataactgaggcgtctaggacttggggagaggagaaccccctcccctttccattacttcttgaccaagcttgcatgccaagcttgcatgccctgaccaagcttgcatgcctgaccaagttgca

SEQ ID NO: 183038 - DNA, 320 bp, Homo sapiens
ggtccaattaaaaatatactttgaaggctgaacaaaaagagtatgctgatggattagatgtaggatgtaacaggcatctagctggctcttttggaatcaagcaatagcaggaatggtgatgctattgactgaaatagagaacacagaaaaaaaagcaggattgagcatgtgaattcaagggttccattttgaacatggtaaacttagcagcccattgttatctgagtggaaatgcagctggatatgtgagtctagactttctggaagaggtcaggtctagaaatgtgatttgagagtcagcagtgtattggtccttttaa

SEQ ID NO: 183039 - DNA, 372 bp, Homo sapiens
tgaccttctaataaatttctcttttacttaagatagcaagccatgtttcagttgcaaacaaaagccctgataaaaacactgcaaccacaggaaatgaatgtgcaagtgccacaggaggctgggaggctgggatggaagagaaacgaatccaccaggccttcagtaaataaatttaaaatacttgcccctttaggaatggattgccagtattccctgcctatgaaaacaatggtggactttcacaattttttttcttacaatctaagaggatgtcaatggcccacttctgtgcctctgaaatcccatgtttgttttaccagagccaaagagaatgactcactaatgaggaccagatttgccttgtctgaaatg

SEQ ID NO: 183040 - DNA, 476 bp, Homo sapiens
ttggactaaagctgttacttggaggacactcaaggtgcaaatttaccaacacgtcagattttctgtaaacagatgcaggcactaggcaaacgttttttaagccagaaagctatatcaagagagacacagtccttaaaggaactgcaaagaaagcatttgtcataattccccactcagtatcctgaatgcataatttctaccgtgactcagcgcgtctttggggactgagaaactaacagtccctttcgtgcatacaagaaatactgagaggcattgagacggggcccttcgagtttgcagtctgccactgcctctttccagctgtgtgacctttggccaggttagctgacctctctgaaccccatttgtaaatggggatactggtacgtccttttgcaggatgggtgggaggactggagagaagagctcacccagcaccatgctcagcacattcagcacatagtaggtctacctga

SEQ ID NO: 183041 - DNA, 602 bp, Homo sapiens
tccaataacagaggagtggcccacctgctgttgcattctctggcatacagcttctggaagctgttggttcactggagcagaaggtctttggcaagtgattgtttttatttcccacaagttgctgggaaagtatttacttacttcctgaaacactgaaccacttcatcaggaaaaagagatgtgaactgactcctcagtgattacagtttggtcctgtttcttgtttatgtagcagaagtttctctgtttttgacatgaggatggaacctatttttcagaaatgatgcagatatccccatatttgtaatattttaaaatcattggtttttttttttgttgggtagggggagattgtgggtaagtttggagattggtgttcatgtggctatcttagaagaaacttccttttgttttgatggtgaattgtaggagtggcaggtgcttggaagtttaaaaaatttaacaaaattttgacataatttcagacttacaacacttccatctttccttgtctttattgactgtgacatttttactgagcacaggccagctattttacagaatgtacttcaatttagatttgttttctggtgtttcctcac

SEQ ID NO: 183042 - DNA, 538 bp, Homo sapiens
gtcattaatcaggtagaaaacagttagcttatctaaggtgctgccaattctagaatttaaatattcagatcaatggttttggcttttatataggcctatgtaataatacaggatatgttataagcactcataaaaagcaaagaagtaattctccacatcaaagcaatttagcttatttcctgacacttgattgaaattagggtattgatcaatctacagcaaatggcagggttcaattgagagaagtacagtataggcagtaattagggatgattatgaaatagaatagaataacactggaagagttagatatagaaccattagtggcactgataaacctgcattatgaatcttgtcacttcttccatgggggttattttaaaatgaaaagttgccacaattaaaaaatagtttcaatgatatactggaaaaataggcctgtgtttgcccaagttataacatattataaaaaattacagttggcccattgtttggtgagcgattctgaaactgctcttatatttcaaaaaaataaaac

SEQ ID NO: 183043 - DNA, 368 bp, Homo sapiens
agaggacccgctgatccgttagcaaacagaagagtctgtcccacagaaactctggagctccgggtcttctcttctctgtagaagtcctttggtattgcatcttcgttggggaatggcagcaattatgagtacctgaccaatattttgtatcggagaagctttgagcaccagttaaatctcattccttccctttttttttcaaaatgggcacatctcttttcagctgctttattttatgtattattcaacttatgcattattatgtatgcattattcaagttattatatatttatgcattattcaactttattattattcaacttattttcaacttaatctttttatgtagtattcttcctgcttaagc

SEQ ID NO: 183044 - DNA, 341 bp, Homo sapiens
tttggaaagttttttcttctaaaatcaattcatttataaattattactttctaaatcaaatttaaattgttctgtctgattttaagccatcactggcctctacttgtttctcttcaactaccagcaactcctgcctccctcccaccagtagaaacatcagctaatcctttgcctatcattttgcatctcttttcagctgctttattttatgtattattcaacttatgcattattatgtatgcattattcaagttattatatatttatgcattattcaactttattattattcaacttattttcaacttaatctttttatgtagtattcttcctgcttaagc

SEQ ID NO: 183045 - DNA, 688 bp, Homo sapiens
atttcttaacttaggtcccctaggaagtagaacctgaggcaaagatgaaagtattgttactttattagggagggacagatctaggggggtgagagtgtggaagaaaagggaaagcaaagcaaggaaaaacgtgatgcattgtgttactgcagtgaccaggcttcatgacaagctgtgacgagatacaggagccttccagcaagtgtgttcacttagagtgtggggcttctccagaaggtttataaggagaaactgcccctctgagcagtccattgaagggaggaaggagaagtaacttagtttcctaagttcttccatttcccgttgatcctagtttgcccacagggctgtgtcatctcgtcctttggtaactgctcaggaagccagatctcgtgctcagtggtgtggcattgcatctacttctagaaggatttctcaatactttataacttcctcatgtttctggtcatgtttgtgttcagctatatctctagaacggttggccaattcatagcatgaaatgatttcatgagtggtgacaaagaaagggtgcaatcagcccttggggagtgggttagtggaatcccagtcctgaggccattagtgggtggcagagtttaggagaaaaggtaagaagtttcagtccttgggccctgtagtaaggagaaaaagggtacaggaggttgtc

SEQ ID NO: 183046 - DNA, 290 bp, Homo sapiens
gaacaatttaaagactctgacctgtgacctgttgttccacatataattacttagtaaaaggctgggcacagtagcttatgcctataataccagtacgttgggaggccaaggcagaaggatcacttgtggtcaggagttcgagaccagcatgggtaacatagtgagatcgtgtctccacaaaaaatttaaaaattagctgggtgtaatggtgcacatctgtggtcccagctactcaggggactgaggctgccgtgggctgtgattgtgccactgcattccagcctgggtga

SEQ ID NO: 183047 - DNA, 431 bp, Homo sapiens
acaagtaacagcataaactattacagcataaactattacagcataaactattacagcataaactattacagcataaactattacagcataaactattacagcataaactattacagcataaactattacagcataaactattacagcataaactattacagcataaactatggaaaccttctggacttccaacagcataaactattggtagagtgacttctattcactaaaaccatgtgtctgaactgaagaagcttgggctcacttccacaaatgtaagtgctgattttttaaaaataatattcctttcactattgatatgtgctacacactaggaagttgtataatttccagaaaaatgtaacaaaccagctgcttaacaaatcaagccctgcttaaataaagggaaggtaactggtattctgtgggct

SEQ ID NO: 183048 - DNA, 479 bp, Homo sapiens
cagctggggtgcctgtcaaagaggaccttcagaagcctagcaaagggtgcctgcattttttctcagaaggtgagtccaaggttttattaataggctgggcaacttctggcctgattttactggatgcacataacttttaagatcttttaggacagtttctacaagaaaatggtctcctcggtccactgtcttcgcaactcatgagatgtctgctcaaaatgcagattcttaaattctgtcctaatcacattaaattaggaattctggagatggttcccaatatttgatgtttttacaagcgtaccaggtgagacatgttcctgtatcccaaaagcttgagaagcattcagtgagccattcatcccacaacccgtgaccctgaagttgtaacaaagctaaattctcaaagtataccaagatatcaggactatcagctcccatttctacagagttttatggcacacaaaaggggctctctc

SEQ ID NO: 183049 - DNA, 1467 bp, Homo sapiens
  misc_feature (377)..(377): n is a, c, g, or t
caaagtgggcagcccacgaaagagagtcagaggagagtgcaaggtccccacccaccatgggctcacctgggcccagaggaatccgttatttctaggtcaggcgcaaacagttccttggtttggagcaggagcccgggtctggacgatgggtgaggggaggtgattttggagcagggtctctgggcagggaggggccaggtttgctcagggcagaggcagcagtttagcctctgctggtggcagctctccccactccctgcaaggctgcggtgatcccctgtgaaaatgcattgtccccctcctccagggctccaaggtgctgtccccaagcagtcatcaccccagacctgggtctctgagtctcagtgtgggtgggnctgactctgccacccagggctccagctttgtgtcagacccacgggagtttcactcctgactccaccctggtactcctccacctttctaacctcggttttcctcatctggaaaatggggacagggacacctacagcagggggttccatggtgtgctctttccccttggctggtcacaagtaactccggtgactgcagggccaaggtgcaggaagcaacaaagctgagtccagcccgtccttcagtcccacatgcagcgctgggacctctgggaagtcactgagacagagccgcatggaggagcggggagatatctggctggccttgggagggttggccttggtaacctgtggggaggcgaattccaggcccctctgggtttcctcgtgggtccattctctcccccgagctctggcttgagcacctggctagagcccctctccagggagagctagggacccatgtccagcccaggaggaatggggggcacggggcatacattcttctttttctgcctcattctctgttcccctagaccgggagacaaaggactggatttgaatcctgtctttgcctttcaccagatataaggcattgggcaaggtattgaatctctccaagcctcagttttctcatctgtaaaatgggagtggctgggtgcagtggctcacacctgtaatcccagcactttgggaggtcgaggcggatggaccacctgaggtcgggagttcgagaccagcctggccaacgtggtgaaaccccgtctctactaaaaatacaaaaaattagccgagcgtcgtggcaggcacctgtaatcttagctactcgggaggctgaggcagaagaatcacttgaacctgggaagaggaggttttggtgagctgggatcgtgccactgcactccaaccttggtgacagagcaaaattccatctcaaaaaaaaacaaaactggtgtggtagtgtgcacttgtagtcccagctactcgggaggctgaggcaggaggatcacttgaacccaggaggttgaggctgcagtgagccaaagtcatgccactccacttcaacctgagtgacagagagagaccctgtctc

SEQ ID NO: 183050 - DNA, 582 bp, Homo sapiens
agaatcgggtgcttctctggatggatggtaacatgtgggattatcataatcccagaatttaagacattggagtaagaaaccagtaaatcaggatttctcaaccttcgcactattggccagtgtggactattgatttgggggccaaataagtctttcttgtcgggggctgccccaggcattgtagggtgtttgtcagcatcactggactctacccagtaggtagcagcagccacccttttcccaactgtgatgcacaaaaaagtctctggacattgctaaatgtcccctgggacacgaaatcactcctattgagaaacattcttaaattaagctaacatttatgaggaggggaaacagaaaatctgcactgaaaccctatcccttgtccatcagaaagtgttgttcaacgggaccttcaagaaacaccccagatcctcccacttttcacgttctcatcaacctccctgggtcccagcactgtcatctctcacctggacccctgcatccagcctctcgctaatttctgccttgtcccttggtccctatcctgaatagaatctccacaagcagccagagggatct

SEQ ID NO: 183051 - DNA, 162 bp, Homo sapiens
gcctcatccccagccaccagcacctacgccgcctgtagttcctgattcttcatcagggctatcttaatactgaccttcttgacctaatctaagcctgacatctgtggtaaaattctagagccttctctttttctacccgcaaaagctttttttggccccagc

SEQ ID NO: 183052 - DNA, 798 bp, Homo sapiens
agctcggtaccgattaagctcctagacggagtgtcactcattatttattttggagacggagtgtcactcactctgtcgcccaggctggagtgcagtggcacgatctcagctcactgcagcttccgcctcccaggttcaagcaattctcctgcctcggcctcctgagtagctgggattacaggcgtgagccaccatgcccggctaattttttgtaatttttgtatttttagtagagatggggtttcaccatgttggccaggctggtcttgaactcctgacctcaagtggtccgacctcggcctcccaaagtactgggattacatgtgtgagccactgcacctggccggtgttttgattgaagtttgcatttaccatgctgtaggagtatctttcttgatcagtgtttctcttccttggttatacatgaggagcttataaaagatctgaatatcctgaccctatcttcagagggtctgatttaactggcctgtgatagagcctcggtaccttttctaggaggtaaattcttaatatattgccaaggttgagaatcactgctctagacaacatgacagctatttggatgacaccgtgtaatggttagtatttccttgaagtattgtatcttactgtgtatacagctctaattgcatgtcttaataaggtcttgctgagcatgtagtttgtatgcatacaactgaggtatatatttaccttttcagtaagagtttgctgcctcttttgccactatttttcagaagagttagactggttaattgtgaataaaatagggccaat

SEQ ID NO: 183053 - DNA, 621 bp, Homo sapiens
ggcttaagcctacactcctgacctctctgatcatcctgagagccatcttgaagcccacagcctactcggaggcttataggaggtaccatgcttcttattctgggtcctgtccaggccaagcagtctcccagctcccaacagcctggggaagctctacacagagcatcctgagaccaagtacaggtctctcaatgtctgaccaggtacctgtagctcaatcaatgtcttttcaattacataagcagtaaggtcttaataaagtgttctagggtgtacagtggttcctacaaccacacacacacaaaagtgctactcatttccttagcacctgtctccaaatgccctatttcctatggcctaaacaatagaaagactggtcagtagtcaattggctgaagtcatatatccttcacaccacttttctgcctcatggatagcaaaaatgagagtctcttaactcagctaattccacagttcattcaaactcaagataaaactcttctctgaaaatacaaatgaggctcacattatgaacacctagatgtgttagatgtcctccttcagaaaagctgttatgaaaataaacataatagctagagtaataaataaaatttgctaaga

SEQ ID NO: 183054 - DNA, 850 bp, Homo sapiens
cttaggtgtgattggtgggagaggacagcagcggatgttaaggacagatgccaacctgatcctggagtgaggtgggccatgagaatcctagactatgcaaattagagggatgcttagccctccctggttcagcctctcttgggttacagatgggaaactgaggcccagagtggcagccactctctcaaggtcccagactctgggctgcccatcaaaaggtgatgggtaatgatgaattgctggggatgcagggtaaccccaaaggcagggagggccagactgcccacatacacacaagcacaagcacaaccatgatacgggtcaccctccccaccagcacacaggccgagatggtgtacgcatcatccctcctgccaacacagcaagagtgcttttccttctttctgctgctaagcaccctcaggaacgaggcctcgagggtgacgggaggtgggagaagcccaaggctgacccaggcccactctgttgggttcatccatcctccaaatccatctttggaggctgaattcacacacaaagccgttgtgagatgggagctctgaagatgcggacccagacccagaaacagactgtttctccagggccaactttgtgccaggaattttcaccccatgtcgtttcacttacactctcctctggtcacgacgtccctgcaagagaggtattatcaacccatcttacagacgaggaaactgaggcccagagatgtagcatgagggtcacccttggcaagttattctcctccccagtatcccagaatggcccatctggctgctgccttctagaggaaaagtcctagctggggtcctttacactccaggagactccc

SEQ ID NO: 183055 - DNA, 470 bp, Homo sapiens
ctaggcacaaatgccttatcaggatatctttaaattcaagtttccctttggaaacttgatgggacagtgtgtcctcagccacactgcttttttttaagtcttgagttttagagctctcttgggataacccaagatacacacaacagccataccttttggaaggtttggtgaatatcagccccttggtcatctccttccagaggacacactgatgtatggaaatggagcttctcaggagagcagctgaatgtcctgaggctgagagaaatatcctggtttacccttcccataaaaagaacctttggggatcttaagattttctttccccagccccagttcttcctggtcagccaattggatggttgtatttaggggaaaagacaaaaataatgcctgtcttctgaattatctcatatttgtgaaggggggagaactgttttaaaagacaaaaaaaacaaacaaacaacaac

SEQ ID NO: 183056 - DNA, 204 bp, Homo sapiens
tttttttatagattataaagcttccttttagagtttcaaataagtgggagcaaatataaggatgcataagcctgcagaggattaaagaagaaataggatatctttgaaattagtttgaatgccagagtttaaaattttaaagaatagctcagatgtaccagttaagtaacaaaacaagcattttaaacctaccatgtgaatgat

SEQ ID NO: 183057 - DNA, 300 bp, Homo sapiens
tcttaaaaggagatacagataattcattcaagaatgaaatttcatttcgtttgtgtattattcacagtctgctgtatattatttctttgcatgaactgtgaatcaaaaagacaatcttctcacaacatgggttgtgttatctcaactaattcttttattgtccttgtaaagcctctgagtaaagtactctgtcaattattggggaagttattatactacattatatacagtggttacaaatgtaagctcagaatttagacacatctgcttttaaattccagctcagtcatttaatggctg

SEQ ID NO: 183058 - DNA, 219 bp, Homo sapiens
tttcctcacggtggcagtagtgcttcagattttcaaggacgccctgtcttggagcagtcttctcccgcccttcctgtctgaaaaaacgccacccagagacaaatgcgccaggagacatggctgccttgcattttgcacagtttggggcaacctgtgcaaattcctgtacttttgcttttcttttccatgtgaaatcaagtcaaagcctaaacgacccat

SEQ ID NO: 183059 - DNA, 211 bp, Homo sapiens
agatgctttgaacaacaatgcacctcaagatgcataggtttgttaggttcacggaaggtttatagaggcagcttctactgcaaacatgaagtagagggagtgctggttgcaggtttgccttaccagtgacctcagctaacccaacgtcataacagcatgatataggagcatctgaggattcaactgagtccggaaataaaatatgacatag

SEQ ID NO: 183060 - DNA, 228 bp, Homo sapiens
tgtgccccccgaattcatgtcctctccaaacctcagaatgtgaccttatttggaaagagggtctttgcagatgtaatcggttaagatgaggtcaaactgggttagggtggcccctaaatccagactggtgtccatacaagacagacacataggccgggcgtggtggctcatgcctgtaatcccagcactttgggaggccgaggcaggtggatcacctgaggtcaggag

SEQ ID NO: 183061 - DNA, 280 bp, Homo sapiens
acgtgaacaggtgggtcctagaaggagacataaaaaactaaatatcaaccaataagtgaatggataaactgagacatactaatacaatggaatattaaacaatgaaaatcaatgaatcagagttacatatataccaagacggatgaatctcacagttgagaggaaagatagcaacttgcagaagaatgtgcaacatacagtaaaactgtaatattaattacatatcatcttttttttttttttttttttgaggcagagtctcactctgttgcccaggctg

SEQ ID NO: 183062 - DNA, 378 bp, Homo sapiens
tccttcttaagggagaaggtattgaaatgaagcaggactctcaccattcatctgctttttaattaactcactctgctgccttaagtgattccctgctcacgctcattcttttgaaaattccaaagtgctacttctgacctgtgatttactattgctgtacgtctctataagcagtgttttagcttaagtggcagttgcatattaattacaaagttaattatgtgctgtgtaatcatgctgtaattcattagtttatactctgagagcctcatgctaatagcaagatctgacaggatttcgggaatcaacaagaaagacccgctggaaatcccaaatggggctaaaaaacactggaggccccaccaagccccttcctgc

SEQ ID NO: 183063 - DNA, 532 bp, Homo sapiens
aaaacaaggcagtgatgtttgaaactgattttgctagtgatttggccagtgaagaatttttttcaactgaaaaaacttaaaaattgaaatttttattgtaaaagctttgtaagttatattttagccctgttagaatctcaagtagtaacttcatttgccaggttatattttactgctctttcagaagtaacaatttactttcatggtatttggagatttactgaacttttatgatgataccctttgaacatccatagtctcttcaaatttactatagataaactcagtaaatcctaacggattttaaggtattatgccgggtattacaagtgcttacttgttcactcactgtttcttgatgtcatcctgggctgccttataaatgttgctatacagtggaacttataaagcccttgattgcctttcctgtcagaatctgatattttcagagaactcagcaaagaacctttcggttcaaatctgagtcacagccccaaaataaaataaataaataaataagtaatttttttta

SEQ ID NO: 183064 - DNA, 517 bp, Homo sapiens
tttttataatatgggatgcatgttttgagtatatactgaaaaaactctgcttaaaaccacggctacgattttacatgcatacagcttatgatacatctcatgaacagatgcaaaggtgtttatcattatctttgtgctacacagtttctaattttacatatgaaaaccaaggcatcattcagtataaagtacattatttgcatgatatatttgcatttgtaaaacacccacatttacttttactgcttaatgggccctgatttaaatgggccactctatataaatggagcacactggttctccactcaatggtgttgataagaaaactactccttttagatgcaaatgagcctactaatcacaattagaatggtggagttaagggaggcagagcagctgggccaagagctcccagtctagtagggccagtttggttctagcttcatctctgaagcagcaacttgggacttccccagaggacatctgcccaggggccccagggataaactcaacattt

SEQ ID NO: 183065 - DNA, 141 bp, Homo sapiens
tttctccccagtgaaacggaaataatcaacaccttctcctcacagggctgttgaaaggatcagttaatgacacagcagagcgactggcacatagtaagcacttaacacacgttatcttttattattgttgttggtattaat

SEQ ID NO: 183066 - DNA, 789 bp, Homo sapiens
ctatgattaaaaacccaagagagtgcagaggagtacaaggcatgcatgttgggaaaggagggaataagctagtctctgcaggaggcttcagagacccgtctgggaagtagggctgagactaggctttggagggccttgaagggcagctgagggttgattttaatccttggaaatgaccagtgcagatcaaacatggagctcctgctgccctggtcctcaggagtctggtgactcagtcatgttctgtaggtttgtgctccattttgcataaatcttgcaaacataccaggtggcaggtttgcacagtaacacaaaagcttaaacatgtcaagcaagtggggcattcagcagccacagaaatgtgttcatttttagtccctaatggatgtgattaagcagggctgatgtgtacagatttaaaaacacacacacgtgctggattaaaaacagccactggtttcagtgccagggccagcaaggcctacctgagccaggcggaagcagcagcttgcaaatagaaactgccacctgcgagcgcttcttgggtcatgtgcagctccacctcagctggtccctgagccgtggtcatgtgggggttttgaagggctaagttgaagcaagtaattgcaaaagaacaggtggcactctgagggcaggggaaggagacagaagtttgactgcgtttgaaattatttcagtcagggaaacatctgcgttgtcttgttaagcagcttgtaggcccacccctggctaactgaactttgtgagcagttggggcagttatttgaa

SEQ ID NO: 183067 - DNA, 246 bp, Homo sapiens
aggtaagtagtctgttacatacattcaagagaatttgtatctggagggaaccttcggattgtctgttccagcttattgccatgtatatgacgaaactaaggcacagagaaggaaggaacttgctccaaatcacacagcccaactagagcttccatctcccagccagccctagtcctcacttacaagctcctacaactcatgcaaggattaagctctgtgtgtttcagctatttgcctagttaacag

SEQ ID NO: 183068 - DNA, 224 bp, Homo sapiens
gggggctggatacagcctcagtgatgagcacctctggttgtcatcttagtgccttgccctgccaggaccagtcagcaatgttacccctgtgccagggactgcagcagtttatgcagttgatgcatagtgggagctatgaggtacaaatggagtgaaccggaactcacagattcccacccactgagactcagagggggctgggtcagtcccttctccagcacatg

SEQ ID NO: 183069 - DNA, 458 bp, Homo sapiens
agctacaattatcatcattcccgttttacaggtaaggaaaccgagacacagacacagatctagacagcgacagagctgggaactgaatctaggcaatctagctcacagtccatgttcttcatcgccatgctatgctgcctctcagtggattttgttttccttgttgtaatggttgagggaggggaggtaccagaacgccaacttcttcttgtacagtaataaacatgaaagacacagcaaaccaacagcgctgtcttctagcataatcgagcacattctctcctctaaagtccaagttataggacaggccaaatctcaaccaggaacatgttattgatttactctaagaaagccctgtcacaacagcataaacaaaatgtccatgtggtcagcctattctttctatcaccatccaggaggttgtttcacaggagtaaaaagtcaagtcaaagtctcag

SEQ ID NO: 183070 - DNA, 507 bp, Homo sapiens
tacttttagtagagacagggttttgccatgttggccgggctgatcttgaactcctgggctcagtggtctgcccgtcttggagtcccaaagtgctgggattataggcgtgagcaaccacactgggcaacatttttaataactcagttaaaatatgctaatgtaggccaagtatgatggctcacaactttaatcccagcactttgggaggctgaagcagaaggactgcctgaacctgggtgttggaagtgcagtgagctgtgattgcatcactgcattccagtctgggcaaaagagcaagaccctgtctcacacacacaaaaaaaaaaaagaaaagaaaaaagcaacaaattactgccaggcacagtgtctcatgcctgtagtcccaactactcgggaggctgaggtaggaggattgcttgaggccgggaggcagaggttgcagtgagctgagattgcatcactgcatgagattaccccagcataggtgacagagcctgaccctgtctc

SEQ ID NO: 183071 - DNA, 455 bp, Homo sapiens
agctttcatcctgtcaccatgaagtagagtatttgctataggtttttttggtaaagattgtcaggttaaggatgtttcttcctttctcttcctactaaggatttttaatcataaaaggatgttaaaatttatcaaaagctttttttccagttcctgaggtaatcatgatttttttgcatcatcattctaatactgttttgtaaacatctgtaaggatgcctgctaaagcagtaaagtaattccagttccagccattttattggatgtggcttttagaaggaaataaaaggccataaaaatgttgttcttcctcatatgtcttatcttcagataagttccataaagtattttgctgccactgcaaattttttttacagtttatgaaactatgtatttttgttgttcatgcagtattaggaaataactgttcatatctcctgagatttttgaaaaca

SEQ ID NO: 183072 - DNA, 577 bp, Homo sapiens
tcctggggaatgtagcctgagttgtgtgtggggcttgcagcgtcaaatctgttgccagctcctgcttccttagtgttctccagcctaggatgggtgtcttggccagtaggagcaggtccatccttcagtgccgccttttttccacagcttccagcgaccgtagcctctgtgagtggtcaggctgtgtgaggctctcacggagaccctccgtggagtaccatgttcctgataagtgtgcctgggaggcttgctaatgaaagaagtaatataccaaacataatactttacataagaaaagtgatggtaactttatggtggaagggagaggtaagtgttgaagtgggcaaattttggagacaaggatcagatgcacagagacaggaagaatagtgcagtcatcacttccaagactggtgagggctgctgcatcgctttgtgtggggtataacattaatgtgatgagaacaatctcatagaatcagtggaacttctgtgtggtattaacattatgtccttattttccagttgcatatgagataatttgatttacagaaataagcttttagcaaaaaccatg

SEQ ID NO: 183073 - DNA, 387 bp, Homo sapiens
agattgcagtgagccaagatcacagcattgcacttcagcctgggcgacagagcaagactctgtctcaaaaagaaaaaaaaatttagtgcacacctgtggtcccagctacttgggaggctgaggcaggaggatctcttgagcctaggaattggaggctgcagtgagatatgattgcaccactgcactccagcctgggtgaccaagcaggagcctgtgtcaaaaaaaaaacaaaaacaaaaaaacccgcccctatgggaacagggtgacagactctttggctttgagcatctgagtgggacatgacatctgctcactctgaacgaccgtcaggatctgagcctgagaggggtcagcatcctcctcccacaaagtgcatcacccttacgc

SEQ ID NO: 183074 - DNA, 386 bp, Homo sapiens
agtggatcagttcctagactctaccattctgttggttcatttgtctatccccacacccataccagaattttaacattattatagctaaagagcaagtcttaatagctggtgtggtgtttgcccttattttttttgttttagctcacatttgtttttgttttcattagtctttcctcttccagtattttaggatctgattgtggattcctgtgaaaaatgctattggaattgataaaggaagtgtacctaaataggttaatttggaaaaattttgccacttgtactatagttatctatggtacacgtggcaaaaattagtgaaatagaaaacaattaagcaactgacatggccaacgaaggtctaagattagaagaaaaagaaaaat

SEQ ID NO: 183075 - DNA, 383 bp, Homo sapiens
gtgtatttgttgaatgaatgaataaatgataggatgggaatcccttttcccaagagtctggattcatttccagtttgccagggtggtgttgaggaggaatggctggatgtgctggtgggtggttccttcattagttagttggttagttcattcacttacacataatgggcacatagtgagcctgagggacccaggactgtgaagggcatggcagggaaacacagcagaactcatggttcctgccaaacaaaaatggattcttaagttggagcctctctgaaggagagggtagtgcctgtaatgtgattgagagccacgtggaacaaatggccacctatgaaggctctaggaggaagaagtcctgggaattgagagcaggttgg

SEQ ID NO: 183076 - DNA, 349 bp, Homo sapiens
ggttatcacccctccatactccagcattaatttctttttccttttatcaggaggcaattcttaattaattaaaggcaatcctgtattgtttcttcccatactctccccagctcttttacatctttttgaaatactcaggaagagaaacgctttctaggtgtggtctgtcactggagtcactgggaggaaacttcaactctccactccttggtatgatgtaagctttgcatactgtgtgaaaacattcagaaagtgctgactgcaatccgtttgcattaaattccttctgaaggaaaaacaaaacaagttaaataccttctactcaaaggaaagcagaattttaagtttg

SEQ ID NO: 183077 - DNA, 395 bp, Homo sapiens
tggcgcatgcctgtaatcccagctactaaggaggccgaggcaggagaatcacttgaacccgggaggtagaggttgcggtgagccgacatcgcgccattgcactccagcctgggcaacgggcgaaactccatctcaaaatcaaaacaaaacaaaacaaaattctcatcaccctaaaaagttctctcatgcccttttgagattgggactacccctatactccacttcaggcagcgtcgatgtgatttgtggccagatggacattttaaaacaaatctcaccatgtggctacctggctttaaaacttcaatgttctcccatgccttcaggatgaaatttagaatctcttgcatgactttcttgttcttcctgagctggcctgacctctgctgaccatt

SEQ ID NO: 183078 - DNA, 227 bp, Homo sapiens
ttgtagttttaagccactcattttttagatgatctgctacagagcaatgggtgactatcacctattgtagtagaatgagcttcctggtgatcaggaagttaaaaagaatgggtaagactttacacactgtcttttatagattctcatgcccacaatatctgatccaatgtttcatagtttgatacatctgattatcagctcctcctcctgtgggagaagtaagtaac

SEQ ID NO: 183079 - DNA, 324 bp, Homo sapiens
gagctaacctgcaaccggtcaattgtggtctttttagtataaaaacctaggtttgaatctttgttctgctgcccgtgactgtggacaagttgtttaacccttcagctttatttttatctgttatgtttgggttgttgtgaaggttaaattagactaaatgagctagttcacgtgtgaaattttcagcttcagtgttcagtggatattaattccacttcttcagtaaagagcccaactttacaggaatctaataaaaagcagtttcttggaaggtactggggtagttcctttcttcttggaaggagtgattggaccattcctttg

SEQ ID NO: 183080 - DNA, 155 bp, Homo sapiens
aattagttttaagaaactacctctggggagaggtaaaggattggcagatttttaaatttcatattccatccctctatggggctggaggaaagactttttaccatgtgtgcttattattagtgatttttaaaaataaggttaaatatttaggtggt

SEQ ID NO: 183081 - DNA, 259 bp, Homo sapiens
gctggattgggaggtgggagcgtggtaatttcagaccacacataatgctctatttcttcagtcaacgctccggctctgccagaggtggctccatatgcctatggatacataaacttttcctattaaaaccaaagattctgctttcagccaagatgcagtaccagggactggactgaacttaccgcctaatggtgactttcaagaccctggagacaggaaacaaggtgagccctacagctgccccaagttgctgccacag

SEQ ID NO: 183082 - DNA, 477 bp, Homo sapiens
cccaatggaatgtatagaggtgagaaataaaatacctggtatgaaaacttcattgtatagaacagtaagatttagacactgaagaagaaatgatatacagcaacaacaaaaaaatagcaataaaattatctaaaatatacatggacacacatggacaaacagagcatcaatgacttaaaatgtaaagtctaatatacatgtaataagagactcagataatagaaaaaaaatgaccaagtaagggaaaagttacaagaaataatggccaaaatttttctaattttgatgaaaaccataaacccacagatccaagaggcttataaactccaagatcagaataacagcagacttcttgtcaaaaactaggcaagctataagaaaatgcagaggtgtctctaaaatactgaggggggaaaaaaggaaactttcaaactagcattgctatattaggaaaaacagctttcaaaaacgaaggca

SEQ ID NO: 183083 - DNA, 280 bp, Homo sapiens
agccctaaaacatggtccgagagaaattaggcaaaatgaaaagttaacagacaaaatgactctgccattgctcaagttcctttgttctttcctttacagccttttattttatttctgatgttggtttatatccactgcatattaaaccagcatcccgactacatgcagagcatctcatttggcttaactgaatatcactccaaaaatggggtgcaaaattcagtttgttgtcattcctgagtttcccctctctaatttctctcggaccaatgttaaaaag

SEQ ID NO: 183084 - DNA, 420 bp, Homo sapiens
cacacaactgctattatgagctatttgttaatatgaaataaaaaactccttttcttcatgcttcatgtaatgggcagtgttttgctgtccaacctccccaaattcactgttttctttttacaacactcctgtcttgtccaggggaatcggttcttccctctgtgctcagccttggtgaaactgccagtcaagctgccctgccttctcctcgtcaaggcccaactgggcctctctcccaggactttgtatctggaggctttaaatggaaccaagggtttgggagatgagggtgatcagagtttcttccagtgacaggcctctaccatgacttggtttgtaccctctttgaacctgcttccataggtttcccctcaattctgtgactaccccagatccttggacaggctgtagtgcctaaga

SEQ ID NO: 183085 - DNA, 287 bp, Homo sapiens
acccaaactttgactaagaaactagaaatggatcaggcgaagtacaacagctgcagttagagttaggaggttaaaaattctggaagagaatgagaccaggatttactcttcaggagaagtttggagctgcttttttaaaaagcagaggttgggagagtggaggaaatgaaacaactagaatttgatggcaaaaccaatgctcttctcttgattctttttcaataaaaattaggatgaataagtaaattgctctaggctgggcattaggaattctgaggtcccttccc

SEQ ID NO: 183086 - DNA, 267 bp, Homo sapiens
aaatatgcctgcgtatccacagaactcacccaccgtgtgtggagtgaggactgccacgtgggcgtggtggggttgcatggatcgacttgggtgggcaagtggaggaaggcctgagatcctacgaacacagaggcagtcacgaagtggtctcgaggcagatgcctctgaaaataatgtggatccgccctttagaaaggtaattctggcttgattttgaaggataacacaatggttagtttgggcgtacggggagttaccgagctcgaa

SEQ ID NO: 183087 - DNA, 252 bp, Homo sapiens
actataattgtacataaactgcactataacattaatataaatctattgtaaattaaggagaggaacatggacctagagcaagatgaaactgtctcttactagttctctgacttttaccaataacttaactctggtttttgcttcctcaactctagattgaatgtaatgtttctactcttaggattctttggtgactaaatgttggtgatttaagtcatttaatagtatttccacattggtaagctgctacat

SEQ ID NO: 183088 - DNA, 312 bp, Homo sapiens
ccacctcgtccttgtagagatgagatttagttatgtcgtccaggctgatctcaaactcctgggctaaatcgattgtctcacctcagcctctcaagtatgttatgaaggttatatgttaggaagggtcccaggaggtagacccacacagatgggatttgggcataggtttggtttcccagggggcagtgctgagctctttgccagtgggaaatgggatgctggtgatttccagtaggtgacctcacagtgactcaagctaccacttactgttgattgtgacgaaatgccagctgaggcacatgccttgggagc

SEQ ID NO: 183089 - DNA, 462 bp, Homo sapiens
tgctaaggcttcattcacaggcccccctcaaagtgctccccactgcagggcactcagagttattacagaggtcaaagagaagagccaggccaacccgaaggagcccaccagacctggcaatgcctcctagtagagcccatcactgctggagacagcagcaagcttagacccttcatccaggggtgagtttgggcagaaagtggccgagacgccaaagctgcaaaggggaaggagaaaaaaattcaaagttcaaatggtccttagagatcatctgctgcaatctcctcattctacaggtttttatagaaaaagcaaatgatcaaaataccctgaggttagttatgtgggaaaaaaagattcagtaagcagggcaggaatacttcaccccactttcagtcacagattttagaaaagatatatgtaacgaatccaaaatgcacagccataaaaggtgcttattta

SEQ ID NO: 183090 - DNA, 218 bp, Homo sapiens
catctcaaagcctcagcatcctttcctagaagacataatatgactttatgaagattaaaagaaataaatctgtgcacagcatctatatatagtaggcattcaacaagtggtagtaattaccatgacaacaagctttaggtctctcccacactgacatcggtgtggctgctcagaaatgaatttcccattattcatcaaaacatatctgtaaaggatga

SEQ ID NO: 183091 - DNA, 133 bp, Homo sapiens
aacagggaatctattccccattgcttgtttttttgtcaggtttgtcaaagatgatgattgtaggtgtgcggtcttatttctgggttccctattctgttcccagtctgtgtgtgaaagaatcttttatctattt

SEQ ID NO: 183092 - DNA, 468 bp, Homo sapiens
attgaagtgtttgcaaatgcctcttaaaccaagcactacaaatattaagaaactgagtcagcttctcaattaagtgaaattactttaaaccaacacaccaatatcagtgtttttaaccatttttgagaaattgcagacccctttgaaagctaggggcccctctccaaaaaattctgcatgtaacttccaaaagttcattgtcctccccattccccaaaagtccatttactcctctggtcaaaatttcaaaaatgataaaaggataagctatagcaaggcaggaaaatgaagaaacaagcacacatgggattagagcatgttacaaaaaagtgcacaggttaaccagctttttcctttgcttgtatactcatggtctgtatctgtattaactctactaattaaaaaaggtaaataaaaaagaaataacatgtaaatattagatatgtgatctcaatatattaggagcca

SEQ ID NO: 183093 - DNA, 955 bp, Homo sapiens
acctcctgccttctaagacaaaaaattaacttctatctggttctggtaactaggcccctggctttctcttatttaactaagtctatgccctgatgcccacccagcatcctaactaagccactcctgggagcctctaaagaggaactggctatggcatcagggggaccctgcacacttccacataggccagatagccgaagcttaaatggcaggtgaggtaagtgttggcagaataccctgcagtccctggaacttgagaacttgggaagatttcgaggcacttctacaaggatgtttctcgcctacttccctctcttccaaagaggctgtcatgagatggtttttcattgccacccaggctctgatgaagtcttaggctttctgcctgttccctccttagggtacagaagcaggctatagaaccacttaactgctgcatggatcagctcctcaaaaacagagtaccccactgctcacattgcatcgccatctgacccttttgttttgattcgttttgttttgttttgagatggagtctcactctgtcgcccaggctggagtgtaagggtgcaatcttggctcactgcaacctccacctcccaggttcaagtgattctcgtgcctcagcctctcgagtagctgggactacaggtgtgtgccaccatgcctggctaatttttgtttctttagtagagatggggtttcaccatgttggccaggctggtctcaaactcctaacctcaggtgatatgcctgcctcagccttccaaagtgttgggattacaggtgtgaggcactgtgcccagccaggaagctcattgtttaatagactttatggtgaatccttatatgaaacaaataattattgtgtaaaagttgccttcagatgaacattgtagatcaatctatattttcacaaatcaggtttctaatttgccgttaaagcaagatatac

SEQ ID NO: 183094 - DNA, 269 bp, Homo sapiens
tgccctgactttggttagccacctggcagaggtgtggctggcagtgtcggagaacgtgcccttcgcccggaccatgctccacagcctgatgggccggctgcagtcacggctcagccccagaatcagtgccacctccaaggctgacatctggcgcctggctgcggtggaccccctgatgaccctgtgcaccatccaccttctcattcagaagctggatgagaatgacaagctcccggacttcctccctgacctcatctacaccctcctgc

SEQ ID NO: 183095 - DNA, 290 bp, Homo sapiens
aaataatatagagatacagaagaacacgaattctcattcactactgggagaaatacaaaatggtacagtcattttagaaaacagtttggtagtctcctgtaaagttaaaccataaagttaccaaacagcctagcaatcccactcttaggtatttactcaaatgaaatttcacactaaaacctgtacatgaatgtttacaatagctttctttataatcaccaaaaaccagaaacccagatgtcctttaataggtgaatagacaccaggcgcggtagctcacgcctgtaatc

SEQ ID NO: 183096 - DNA, 570 bp, Homo sapiens
gtgcgcttcttgctgccaacatgtgaagaaagacgtgtttgcttccccttccaccatgattgtaaaatcaacaaggaaggcgatgagcacagcagtgtgaagcaatgacaaggatgccctaagctctatgaaactgcgagataaacatctaccaggttgatatcatatcactcaaaagcaaaatttattcctcaggtctcttcacagcgtggcgcctgggttccaaggggaatcatcccaagagagaaccagggagaaactgtatccacctgcaagatctaacatcagaagtcatatagaacaccattccctactcttagctaaggaagtcacagagatctgactcccttccttcaagggagggaaccatagactctacttgtgggactggctgggttctgatagaatatggacatatgacttcagccatttttggaaattatactgtgccacaccttaacgtgtcagaagacgaggacactgtcataactttcagtcaattgctcaaaccaaatatcaaagtattatcctgaaaaacaaaaaaaacaaaaccaaaaactttttggccca

SEQ ID NO: 183097 - DNA, 131 bp, Homo sapiens
catttccaccaggcaatgggctgtctaaagccaagcggtggccacactctctaggtccctcaatcccactccagagtaagaatgtctccattccgggccaggcgtggtggctcaagcctgtaatcccagca

SEQ ID NO: 183098 - DNA, 310 bp, Homo sapiens
tgagccaccacacctggcctcttcacgtcttttgattctctaggttaatgatgtggaaatagttgtttcttcctgtctcatgatttaagggagtcaggcaagattatttgataagataaatgattatagagttcttgaacttggaagagaagaatagtatcacaccattttgaaccgaaaaggatcttggaaagtatgagtattagactggtgtagaaggagatctgggctctctttcctgatcctgtgaccttgagtaagttacttcctgaatccattgtccattggagatgatcttcattgaacaaat

SEQ ID NO: 183099 - DNA, 288 bp, Homo sapiens
ttattcaaaggggaaaacaattctttttagaatatactctttccctgtcctgttaaatgcctatgttctttctgaagagatacacagagtaaacacatattccttctaaaagaagtacacgagaataatgtagacaccgccagccaccccgctaatctgccacctcacagacttagggcactgtattcacaatcccaaggttagtttccaaagaacaatctttctgcattcattcaaattcatttattaaatgcatttgcatttggctcaaagaataatgttttaact

SEQ ID NO: 183100 - DNA, 444 bp, Homo sapiens
cccacagtcctccctctctcagtaaaaggaaactttattctttcagttgctctggtcaaaaaccttgaagtcatccttgacttttctctatcttcaaaacactgtatatccaaatacaccctctgtaatcaccatggtccaagtcaccatcgtgtcctgactgcactattctcataatctcccgactggcttctttgcttctgctcttgacactctacaatgtattttccacacagaagctataattaaaatgtaagccagagtcaaaacctaccaatgtcttcctaacccacttaaaataaaagtcagtccttaccaaggctttacatgatctggctctcagctacctctttaacttcatcttttaccactttctaccttgctcaatctgtttcaacaagggcttgcttccttgctgttcctcaaacactctaagcacactcc

SEQ ID NO: 183101 - DNA, 268 bp, Homo sapiens
aatgtacatcatttgaaactaatttttcaattaactttaagaacattttaaaaagattatttttgacaacttaaaaaatatttgatacatcattataaaaatgtattccaggcttatattgaaggttatttattcgtttatgtgaactttctgttcattatttttcattaaaaacaaaacaaaaacctgaagccaggcagtgccacattattacatcttaattttttttttttttttttttggactacaggcatgtgccaccatgccc

SEQ ID NO: 183102 - DNA, 532 bp, Homo sapiens
agggaagcaattgcaaaagagaaggacacgaggaatgggaaagacacagtttcaaccatttacttttcaatagttctattatagttccattaaaaatatttttattttgaaagtatggatatgtaatagctttttgatacgcatgtatatgaacagagaaaaacaacatgagtaaatctgcttcccgtgacaaatgttaattgttttattccaatggaatcacagcaggtataccttgtaaagtttcagtttcaaggatctgcctgcccttgcatgattagtttttctcctatctactgtatcatttaaagcaatatccatatatgtggcaaaacctttttatctcctattttttctctccttttgctataagtccttgaaagagttgtccgtaactcctctctccgattcttctcctcaccttctctttgaatccattgtgagcaggctttctttatcacctctgcagtccactctcttaagatcagggtaacctccacattgccagatctgatggctaattcttaatctc

SEQ ID NO: 183103 - DNA, 244 bp, Homo sapiens
gatgaggggatcggggtagcggatggtgcgggcatcatgagctcagcacattagggattccttttgtgcccacaaagatctttctcactttgcacaacttgtacttggcctcctcaggtgtaatacgatgtacagcaaagcgacccttggtgtcatagatcagacggaaattctctcccgtcttgtcaatgctgatgacatccatgaatccagcagagtaggttatatcagtacggaccttgcc

SEQ ID NO: 183104 - DNA, 151 bp, Homo sapiens
tcacataaaccaaatttatgttcaaattaatgttcaaaatcagcatgcctggtctttactccatttgactggtcagttcctctttttccaagtagaaaatgggcttgggaaaacagataaatatcggaaagttgcttgataggtacaaaag

SEQ ID NO: 183105 - DNA, 398 bp, Homo sapiens
gattacaggtgtgagccactgcgcctgggaccactcataaggtttgagttgagatagagaaactctggcaggactgaggaatttggccacagtctctgggaaatatgcacaatttctggaatcttctctacttccagagttcccactttctatctgtctcctatttattcaacaaacttgtatggaaccacagtgagtctagaacttgccaggtgtggaggataaaaagatgactgaggtcgagccactgcgcctgggtccacacgtaaggttccagttgagatagagaaactctggcaggactgaggaatttggccacagtctctgggaaatatgcacaatttctggaatcttctctacttccagatttcccaccttctatctgtctcctatttagt

SEQ ID NO: 183106 - DNA, 198 bp, Homo sapiens
catagttatgctgtaatagttatgcgtaatagtttatgctgtaatagtttatgctgtagagagaaatttttaaacaaatttttaaatagtaattactgagaaagaggaatccgtaaatactctacaagaccacaaatactgagtattaggtagtagggacctactacagaaaataattttacaaatagcttatacagg

SEQ ID NO: 183107 - DNA, 500 bp, Homo sapiens
atagcgacaccgtaccacgatcacacaccttattatcttccttcatgtattttcatgggcacataaacatacacatgtgcctctttttatcattgaagacagctgtggtcatcccatcctacctaggtatttcctcttgttcacattgccaataattataaaatacagctcgatttcagagatgaaaatatgaaaaaatacgaaaattttaaagtgccatcagtaacaagctgcagggaaactgtgctcacggaatcattgaaatgtggtagctgtgccttgccttgctcttttcttttctcttctaacaatctgacctggtgacctctcctgtgagcacaccaggactccttcaccttcacagcagcacagcacagtgtccatgccacacccgtggtctccatcgtaagaaggcactgtgggagatgctactcgttgtagtttcactttgatgctataagcagtgctgcattcaccatgactgtctgtacgtgttgttt

SEQ ID NO: 183108 - DNA, 327 bp, Homo sapiens
gggtcccatatatttcttgtctaatacaaaatcgcagaaggctgaaacacattaactagaaaagagaatgcaatttggattcaactacctgctgtcatgaaaggtaacagtagttaataatgtttgcaattcatgggatgttagagataaaagagtcctcaaatatcctccagcaaaatctctctccttttacaaatggacaaactaaggacaagagaagaaagatgagtcaagccttcagtcttatgctgtgatctgatggtgagctataaaatcactgtcaagagagcccttccaaccacctgtgctcctggaattcatgaggga

SEQ ID NO: 183109 - DNA, 494 bp, Homo sapiens
atctgcatcccctgcatcccctaccacagtacttggcacacagtaggaactcaaaaattcttgttgaataaatgaataacgaacatcaaaaaaaatcagcttcagcaattctagttctaagaatttaccctacagacacagtcatatatgcaaagagccaaatatatatgcttcttcactgcagcatagtttgtaatagcaaaagactggaaactgtgtatgtctatcagtgtaaggtaggtgccaagtatctttattgctgatagggagtaacagtcaaaagaggtataaaaatggccgggcgcggtggctcacgcctgtaatcccagcactttgggaggccgaggcgggcggatcacgaggtcaggagatcgagcccatcccggctaaaacggtgaaaccccgtctctactaaaaatacaaaaaattagccgggcgtagtggcgggcgcctgtagtcccagctacttgggaggctgaggcaggagaatggcg

SEQ ID NO: 183110 - DNA, 911 bp, Homo sapiens
gtggcctgcatgccagttagccagagcactgcaggtcactgtgacagaggaaaagcacagtgaggaaataatagactcttaaaacttctgcttggaagtgactcatacgacttaaactcatatatgattggtcaaaacaaatcacatggccacaactaacttccaaggagaaaggacatgcaatcatacgtacctggaagagaaaacagtatgcaaaagcatgaagacttgaaaacagtgtatcaggagattataaattgtacacctggagtatggaaagtataggtaggaagagtagaagcttgaaatgtaggtagagggcaggtaatagcaccctaaggagacaggacttcattctgttagcatttgcagggaaggtattgaagattttaagcaggtgagtcacatgatcagatttgcattttagtaagattactgtgccagcaaggtgaaaggtagactggagggtggtaagatgggaagagttagcaaactacatgtaacaacctagtagatatagaagagtgcacttcaaaagtgcactcttctatatctaaccgcacagctagctctgcgtgaattactctttctccactgcaagtcccctgtcctgatacatcggttctgtctaggcagcaggcaaggtgaacccattgggcggttacacttgcttggatacaggagggtcccaagtccagcattttgcccacttaaaattactcataaccattattgttggtagtatattccattattctaggagacacacaaggaattgcatttttcagttcctatgtaaaggtattaatatttcctccttgccttaattcaggactggatagctcaccaacaaagactggtctctttaggacgtctgtgcaccacgtctaacgataagatctaaagaaagg

SEQ ID NO: 183111 - DNA, 444 bp, Homo sapiens
ctttcccctcaaaagtcaagagacaccaaggctaagggtaattagagatcaggacactggctgctttcagtatagaagcacacagcaatctagtggcagactccgaaaactagctccaaagagcaccatcctctctccatctaaactggatattacatcacttctgataaaatgagtaaccaccataataatctctgtcagctatgagaaaatttaccctggcttctatgaaaggaaaaaaaaaaagcacttgatttctggagctgagaaattactttaaattacctccaagctcttggtaaatggacgtccattggtatcagaggtaattcgcttaataaagccattggaaataaaaagtatgggcagttgccaacctacacatacttgactttcaaaaataataaatggcctcattcctcctcacagtgctctcttggaggg

SEQ ID NO: 183112 - DNA, 459 bp, Homo sapiens
tttagcttgggaataaatcctgtgtttgccatgcaacgatgcatacaatgggaaaatataaggatgagcttataagaacacgagcttggttctcaaggagcccaaccagaagagtcttaaaatgttaccacatgtgtgtaatggacactgggtttcctgattagatcttatcatggttatttcaaatggcttctttcttctaccacttgctaaccttcccctctgcagagtgcatacacacacaaaagaaaaagacaaaggaccctttccactctgtcttggccccttccagaagtattcttagagccatgaatccacagaggcttttgaatttagataacttttatggtcaaagctaaaaacctttgctggtaataggaaatgtcatatggaatccactgggtagtcataatttccatttataaatagaaaatataaagtgggtgccttatctgggtg

SEQ ID NO: 183113 - DNA, 173 bp, Homo sapiens
gaggtcagcttggaaattaactgatcggttgtgagggtttggtagaaaatttttcccttatcttaaggctgaatgttgatcatgctttaaattaaatttgatacacactggtgacaggaaaattgtcaaataaatgaccttgattagtggacagatcagtccgttcgcatgtt

SEQ ID NO: 183114 - DNA, 357 bp, Homo sapiens
caaacagtgatgtatccccaacacctttgctgtgttctattggttagaagccagacacaggctgtgttcattcttaagtggaagggattgcacaagagcatgaatgccaggaggtggactcatggcagccactcgtatgagtattatgagtctatctgccacagtaaggaacagtctgcttctcatgccatgtttcgggtccagcagactccatccctctcaccttggctaagccaatcaccatattccattctctggccacagtgattggatcaaggttgggcataccaccaaggtcaagccaactggggcccatgtgactcaagtgctcagaaaataaagtgttgggcgataaca

SEQ ID NO: 183115 - DNA, 639 bp, Homo sapiens
ttcagactcaagccccagcccaaccccagatgaagggattttccgagcagctatcttgatccggtgcacaggcccctgttctgaccagggctgaacgcttggcccaggaaaaggacaagtcctagtatctaaaaatgatgacaaagacaaggcgcagagatgatggtgctgatgccactgggcactggaaccatcacatcacagggactggcaccaacatcccagcagggcaagccaacagtgtgagaaggcaggaatcaagagcacacagagggagctgggctgcaaagaggaggctagaacagatcctcagagaaaggcagagatgagtgtccacgtggccgcagaggaacagaggaggcacttccaatggccgtggacctgagatatgctttgttgctctctgacactgctcccgctccatgggactggctgttatgtttttgggacaagtacccttttgatgaaggaaaaggtgcattgatgaatttatagctatggcgacgtactgacatagttactttatgtcaacatagatgtaagtatttatttcaaagtacacaaaggaagaaattgcgtgtgggcgcaatgacgagggcagcgtccatttcatgctcatttcattccaccactgccacg

SEQ ID NO: 183116 - DNA, 308 bp, Homo sapiens
ttattttaggtggccaaaaagtgctaaaatttttaatttctcttcttccaagtgagtatctttctaagtatcactcttatcacttaagaaggaaaacttgactgggtgcagtggctcacacctgtaactccaacactttgggagaccaaggtgggagaaccacttgaagccaggagtacaagaccaacctgggcaacacagcgagacctctctctctcaaaaaaacaaaacaaaacaaaacaaaagaacaccgatgctttttcttaaaaaaatgacaacaacaacaacaaaacaactatatgctcaag

SEQ ID NO: 183117 - DNA, 309 bp, Homo sapiens
ttaaggcatattataatatctcacttatcttgaagtcagcctcaactaacaggaacagaaaacccacattttatgatacacacacaagtaaatccttaataccattcaagtcaaaacagctgtcatgatatccaagtattaaagcatctacacgtaacttcatggatcacagaaaagatcccggctcattcagagtgattcattttacatcccagtctgacaaattttattttctatctctcagcctccagcagattagaagcaacaatttagatgaaaggcgattggggtaggggatacaactgatag

SEQ ID NO: 183118 - DNA, 268 bp, Homo sapiens
taatatcaaaatggtcagtgacctgaaagaatttactgtctatccattcattaaagcagttttgcaacagtagtgttttactctacctatgattaagatttgaactttgggaaacttttttatttcttggtaaaagatgtaaattttttggaatgaaaagatttcagtctaaaccaacaatttatgatattgctctctatgaatctcttactagtgactaataaatattaaggcacttaatggattcactttagctgtattttttcat

SEQ ID NO: 183119 - DNA, 487 bp, Homo sapiens
ttgtcagtttcatgattgacaatgataatctctcttcacctagcacccatggagcctgctggacagaagcagctggctggatgtgatactggggttggcagagttagggtctacaattagggtctcttttctctgccagggcaagaagccaggtgctaagggcagaataccccatgagagataactagtatagcatgatgtttgagtatagcctctggagtcagactgcctgagtttgaatcccgggtttatgacttcttagctcttgaacaagttgcttgttctctccatgcctcagtttactccttttaaaagtgggaatactaacagtgtctcccccaagagtgatgtgaggattaaatgactaaatgtaggaaggcgcttagaagagtgttgggcatatatctaatgtgtgttatttttcacaggtgactcaatctgcctgttgtatttattcctgaaatgtttatattgaatcatactcaaa

SEQ ID NO: 183120 - DNA, 665 bp, Homo sapiens
gtgatccggcgagtcggagtcacgacgttgctgaaagagtccgagggacgaagcccgtaatgatgctcctagtatgcttcccgagatctctggctgcctggatcctcaggtcgctgttgataaaagtgtagagttggggtctcacggtctcaaactcttgggttcaagggatcctccagccctccaaagtcttgagattatgggcatgagccaacatacctagcctatatttttaattaaatttatgtctaggcacattatcttttttatgctattataaatgagataatttgctccattatattttatagctgaatactatttgtttactgaaatgccactgaatgtggatattcattgtgaaaccaatccacctaactgaactatcttctgctggtaacagaattcctccaattgattcttttgcagtttctaggtaaataactacattgtttgaaaacagtaataattttgcctccgtggttgaagtatttatgtctcattttttcccttatgtaattgcattgattagtactttcagaacaatgggttttaatttgagaggcttgcagaaaatagcatctattataaaaatgacttacagctaagaattatgtacataatatatataggcatgttaagactgagaaaaaatacaaagaact

SEQ ID NO: 183121 - DNA, 162 bp, Homo sapiens
tgtcagaggacgcctggagttccgacgcgtgtcttcgagctcatagagggagttcttctccctttgaagaatcccgagaactgtgtaaagctgtttggcaccttgagacataattctagccacgcaggtggctcagactgtctgatcttgtgatagacactt

SEQ ID NO: 183122 - DNA, 663 bp, Homo sapiens
aagctatgtaaacatcatacctgattgaaccaatctgtaatccctatgtaaatcagacgccgccgcctcaagcctgagtaaaatccagcacatctgccaccaactggtctgggagtcccctctctcacgagagagagctgttttactttctctttctttcttttttttttctttttttcctattaaacctttgctcctacactccttaaaaaaaaaaaaaagaaagaaattgaatttgtagtttcaaaaatctttcaacaaagaaaacttaaggtctagatggtggccttactagtaaattatagcaaacatttaaggaggaaataataccaattatacacacagtctttcagaaaatgggaggaagcacttaccagctcgttttatgaagccagcattatactaatatcaaaaccaaataaagacatgagaagcatagaaagttacagccccagtatccatcatgaacatagatgtaaaaatattctataaaacttaagcaagtttaagtcaagagatacataaaaagaataatacatcatgaacaaatggggttcacttgaaaatcagtgcagtccactatattagtagactaaaaaataaccacatgatctcaagatatagcagaaaaatcatttgtctaaattatcaaaaacctaggct

SEQ ID NO: 183123 - DNA, 267 bp, Homo sapiens
catgagttggatttaaccaggtatttactacagggcataataataaatcaaggttccacttacattattatcagagttaatcatctgtactttaagttctgcctttcttgatcataacagtctacagtgcatcctcttcagaaggaaagttgatttctgtattatgccttgtatctttagttatctttttacctgtcatgtttcatctccatacctctactgtaatgtttcttgaagacagacagtgggtcacataatcttttataa

SEQ ID NO: 183124 - DNA, 287 bp, Homo sapiens
acaattgtgatttactaatcagataccctagtatctatggaagataaatcatttaataagtcgctgaaataatttgctaatattttatttgggatttttgatttttcacatgtaaggagtagttttcttttttcagctattttaggttagctaacagaattctactagcttaaaagaatagatacctaatttaaaacaaagttcttatattacataaactcattagcaaaaccagctggccctatggatttttggtgagataagttaggctttttactttttgagtt

SEQ ID NO: 183125 - DNA, 657 bp, Homo sapiens
gtttaagtgattctcctgcctcagtttcccaagtaactggaattacaggtgtgtgccatcatgcctggctaatttttgtatttttagtagagacggggtttcaccatgttggctaggctggtcttgaactcctgacctcaagtgatctgcccgccttggcctccaggattatttattgaattttattgtcatatatttttagtctccttcaatctggaatacttcgtcagcctttctttgtcttaggacattgacaattttgaagaataaagtccccccgacttccctttttgaaaaaacagaatgtttctcatttggtgtttgatgttttctcatgattatatccaggttgtgaattcccagttgggatacatacataagtgatgtgtcctcacattaagaggcacacagtgtccatctgtcatcatttgtgatgttaattttgattacctggtcaaggtactatcagtttttctctactggatagttactatgttttctttttgtgtctaataagtagcctgtgggaacagatcttaagatcattcaagtaatttgtttctcttctttaaaatttcttctctatatttagcatgcattgatgattcttccctgaaccaatttttactaagatgattttgcaactctagcactttg

SEQ ID NO: 183126 - DNA, 191 bp, Homo sapiens
tgggaatggtctaccatagggagaactccaattacaggtgagttgagggaataaagtgagtatcagagaaatctgctgcatcttatttaagaactttaaaagctcagatattattttcacagggtagtgatttttaaaccatgcttctttaattctctgaaggttccaagagttttttctggaccaaactt

SEQ ID NO: 183127 - DNA, 319 bp, Homo sapiens
tccaccattgtatatttttatttccaaatcctgtttctaatactctggaagaaaaatctgttctcttttgtgggatacgtaagttaattcttggacggcagcacagcgatcgtttacaggttgttcagtttgaatagctattaatgctcgtgcaaaataaaccaaagagccacagaaacacatttttgctggtgaaaattgtgttcgccaacatcatttctcactccagcttatgatgtcaggcatcatatttctccattattaatgtactatgccagtggggggaggtcctcttggaaggagattaaaaagacaccac

SEQ ID NO: 183128 - DNA, 236 bp, Homo sapiens
tagccggaccaacatgcgaacggactgatcccaacaccgttttcaaggacttcgcacctctcatgttcgtcaaatattggacacgaattcatcgacaaactcaggacatttgatcagtccgttcgcatgaacatgcgcccggccgatctgggggaaaagactttctaagtgcggttgcatcttcagacctcgtctgtcacaatgacttaacagggagggggtaggaggggccctat

SEQ ID NO: 183129 - DNA, 382 bp, Homo sapiens
cttctttctgtactagtacatggcagagggcaaaagggcatcacatggcaaaaaggcaagagtgtttatgtcagctcaggcccctctttctcttcttatagaaccaccagtcccatcatgaaggcctcatcctgatgatctcatctaatcttaattacctccccaaagccccatcttcaatcagtgtatggattttgggactgtgttttcaatacatgaaatttgaaggagacgttcaaaccacagtaatactaaaacttgtaatctgtgatggatacaaagtcaaacacatggtaattcctggcataaatgaaggctagaaccaaggtttgctgactttaagtcacgctccttctcctgccaataatttttctttacagaa

SEQ ID NO: 183130 - DNA, 1419 bp, Homo sapiens
tgcctcagcctctcgagtagctgcgaccacaggcgtgcaccaccacacctggcaaattgttgcatttttggtagagacagggcttcaccatgttggccaggctggtctcgagttcctgacctcaagtgatctgcccgcctcggcctcccaaagtgctgggaatacaggcatgagccaccgtgcctggccaactttagttttcttaaaagcaaattggaaagatattgctatgattagataaaatattgtaaataaagtgttaaactgttgcatagtaagtgctcagtaggtagttgctctcatttttaatatcgatattacagattgatggtaatctgtggattctgagttaaagaactgatgtttgtgatttgttataagagtaggagaccacatagttaatataatacagatttttaaattgtagaaaatgaagatatttcaaccaaccaacaagccaacatttattgaacaccaactctatatccttggcactttgctttagatctagtgtgaaagacagatatatacactgacaattacaatataatgaaatgttgtaatcgcaaaatgagaagaatttaggaactactgtgagagcactgaatgctaacccctgcctagagggtgagtttatatgtttcaggaaaggcttcagcaagaagatattattttactttgattgaaatctgaaagagtttttaaagtgttcaatagtagatgtgagtctgggtgcagtggctcatgcctataatcccagcattttgggagcctgagatgagaggatcactcaggccaggagttggaggctgcagtgagctatgattgtgccactgcactgcagactaggcgagaccttgttaaaagaagaaagggtagatgtgcagaaaaacattaagagaacataatgcaaagttcctgtatctggcttctcagcttatttttacacttgatcatttgtattaggattttaccattagggaaattccaagataattttgtgcaagtagaaaacatggagtattacttaaagtgatgattctgtcaaatggtggttttgacgtacacgtttatatattgttgtggcagaccaagtagatggaaggcagatctaacacctgtgtaattatcagtttttctagctatggtactgaggattcattcttatgtgtgtatatgttttgagttcctatagataggtcagcagttgctaggttgatttcatattttataaattctaatttggtaaaataaggtcataggggagaatattaaatatgccagaataaaactggatcctctttcatatctatgttatatctgaatcaaataatgtttataaaatcattatacatttaatggttgtgtggtaagaatgttggctatttcagcctcaataaactcacatcctttttggat

SEQ ID NO: 183131 - DNA, 156 bp, Homo sapiens
aatctgtactttgaacagtactacaggtggtatttatgcctaggcaagtatgggaaacaactgtgcagaaggataaagacgttcttatctatgactagaccatctgaatgatttggcctttgaaggtgactcaaggttgagcctggatgttggaga

SEQ ID NO: 183132 - DNA, 286 bp, Homo sapiens
gtctgaggtcatctagaggatcccggctatcacattatccaaccaagatgttttaataggtgactagataaataaactgatatatccaattaatgtacaacaggtcctcaagtaataatgtcatttcgttacagtgttgatgattggggaatgttggttttgttgtacaattattttgcttaagtcagtttccaaaaacctatggaagatgttaaatgaagacttactatatatgacattctggagaaggcagaactatggaagcagtagaaagataagtggttac

SEQ ID NO: 183133 - DNA, 108 bp, Homo sapiens
tattgtatctcactgacttcctatacccctgccacagttttaaggattgtcactttataatcagtgattctcagcagggggcagtttttgcccccctagggagcattt

SEQ ID NO: 183134 - DNA, 478 bp, Homo sapiens
gtacccacgacacccactgtcaaataccactaacttaaatcaatccccattatcatacacaccatccccatcattcatatagtcacaccccaattactcaatccctacactacaccattacgcagtgtctagccacacccactatcatacacacagtccacatctccattatcaaacttgtatcatcctccaaatctccttccacacattctcataccacctccatttcatacatactcacaaccaataaccacatcaactctgctctcactcacatatattccccattcctcactggcactcagaaactctttgcattttcccatcatatactttattcaacaaccctattcagacactcatgattttcccactccaaattatcacattttcattgactgtgattacccatgctcactgtatccatctgtcctcacaaagagacacacttctcattttccccagcacacatagacac

SEQ ID NO: 183135 - DNA, 210 bp, Homo sapiens
ctggaggagaaggactgagaaaagacaggtggatcgctgatttaggaggtctctggtgaatagcaggagaattgttagaaaatggggttgaagctaggttacatattaaatgttaagttctaaacaaagttgtaagaacatagaggcaagtatgtacagacgatttttgaagagtgtaacagagaaggactggaaagaaacagaaaggtg

SEQ ID NO: 183136 - DNA, 514 bp, Homo sapiens
gcatgatgttcagtgatttcaaggactgtttcatccttaaacaggaaatcgataatttccatctgtcagaggcatttgaaccagagcaactccatcctgaatagaagctaggtaaaatgaggctgagacctactgggctgtgttcccagacgattaaggcattctaagtcacaggatgagataggaggtcagcacaagatacgggtcataaagaccttgctgataaaacaggtttcagtaaagaagctggccaaaatccaccaaaaccaagatggtgcatcctcactgctacactcccaccagcgccatgacagtttacaaatgccatggcaatgtcaggaagtcaccctatatggcctaaaataaggggaggcacgaataatccatcctttgtttagcatatcatcaagaaataaccataaaaatgggcaaccattttatggttgctgctctgtctatggaatagccattgttttattcctttagtttcgtaataaacttgctttcactttac

SEQ ID NO: 183137 - DNA, 455 bp, Homo sapiens
aaaaaccctaagaataactgtcctagactgtgtgtatatgtgtgtatgaattgggattttattttgtaaaggaccccaggtgattctaaagttcaactaagatggagagtcactgcaccaacccttttcttctcagctcactttgtcctgggcccatatctcatggttttgggtctactgtggaagtaccttctctacagaacaaagacaaagcaatagaacccaaattcttccaattccctttgggatctattcccttcttctcctgcctaccagtatgaacttctatgggattatgctgatgagaaaaaataaattacatttaagtgactgataccaaaaactggaattacttcacagatgagaaacctggtcccagatacagtgcaccttctggacctcagtatcttcaattttaaaatcattgttttgaatctgatttctaattgttaagc

SEQ ID NO: 183138 - DNA, 1600 bp, Homo sapiens
aatagggtagagacaagtttgagtgtcgttgcactcacgtggtgagctgcatgtgtcgtgggctgagtgctagtattggtctgtgatggattgggatcagacccttgtccatgaccataaaatcttgagcaatattgcagcaagccaaatggcaaagatgactatgtgccccaagaccacacttttttttcctatagtttttttaagagagacacggcctcgctctgttgcccaggctggtcttgaactcctaggctcaagcaatcctcccatctcggcttcccagagtgctgggattacaagcataagccactgtgccaagcctccctaaatgtttaaatcttgtcattgccaccattctgcaagatttacctttgaatctagaaaagaacttggagtctttctactaggcctatccccacaccacttcccatcatagaggtgaagaacctgaggccgggacacaccacaggactctcagaatgacacagccagtcagattttcctggcacaaaacccagtgttctttcaaagccaccattcttttcctgtaactaatgcaaaagcaaatcttagcccatgacagggaatcacagattccaaatgagtgccctcagaatgactggtttccttgaaagcagctgtttcataaacatgactttgcgggggcagctcaggccttccatgcagtggagtctgctggtcttggggctgctctgttaagcaaaggatgggaaccaaaggtactgacattttaatattagccacacagatgtcttggcttgtaatctggagaaaatcagtcagtgtcccagctgaatctgtaaataggaacgacaataagatttgctctctctcgggacatcctaagaatttttgtcaggctagaagaggcagcctggagagatttgtttgatctgggaaagcagaagtcaaacttggtttttcattcggtaagatccactgtggttaaaatgtggtcagagggctcattcagcctcctacttcaggtcgaactatacttaccttctcttacttttaaagaaggaagggagattctgtaaatgagtggcttttcttttagtcagtgctgtcatatgccatgacaatattgtatttaagtctgttctcacagtgctaataaagacatacctgagactgggtaatttataatggaaggaggtttaattgactcacagtttagcatggctggggaggtttcaggaaacttacaatcatggcagaaggggaagcaaacacatccttctttacatggcagcagcaaggagaagcgctgagcataaggggggaaaatctccttgtgattcatgcctgtaatcccagcactttaggaggttgagttgggtggatcgcttgaggtcaggagtttgagaccagcttggccaacatggtgaaaccccgtctctactaaaaatacaaaaaattagctgggcatggtggcaggcacctgtaatcccagctacttgggaggctgaggcaggagaactgctcgaacctgggaggcggaagttgcagtgagccgagatcacaccattgcactccagcctgggcaacaagagtgaaactccgtctcaaaaag

SEQ ID NO: 183139 - DNA, 365 bp, Homo sapiens
  misc_feature (34)..(34): n is a, c, g, or t
atctagaggatcccgtgtccatttactccatggncccccagggggtcagacgcaaaagtttagaggtcactggggaccatggaggtgcatctcactggacatcgtagtgttcattgtcttagttcattgttcacagtcatagcagtctgtttaatactgctagtgaagtaaccctggtctttctcgctcaacctatgatctagtgtttggctttattttagcgaccaatttgagaggttttttggttttttttttttttggtatgtgtgtggtaaaatagcaagtttttgcttgtagacttttgggaaacttaattcatccaagtattcattgaactcctgctgtgtattagatgtcatgagtat

SEQ ID NO: 183140 - DNA, 440 bp, Homo sapiens
actctagagttaccgctgatccgcttaagcatgtttccaggctgaggagaagtagtcactggagagagaaaactaggagatgagggagtgggaccaaggacataggtcacatcattctctcagattggagaaaggagataagtctgcaggtgagagaaagtaattgagagaaatcacactagctagcctccattttcttggtagtatagaaggccaagttaactgtggaaagttgaaggaaacagaagttgcaatgggactttgggagagtagagagggtttggaataacagtggaaaggagtaggagagggagctgtccagaggtgttaagtgccccgctgagtcaagtcagtgtcattactgtcatctctgatatccttgcactgagaccgtgaatgtgctgtggcatccagagacatggtttcttatctccttaagt

SEQ ID NO: 183141 - DNA, 177 bp, Homo sapiens
tgtgacagagactgtatgttgctctcaaagcccaaagtattaactgagcccttacagaagaagtctgaacccctgtcttaaatgttggcattttcatagggttggatggctgctgcccatcccccactcctcaacaattcccccggcaatcacataccacctctagggataacttcc

SEQ ID NO: 183142 - DNA, 253 bp, Homo sapiens
ccagttacacattcagcaaatacttattgtacatctactttatgccagtcactatgttaggtgtagttctttaactcttagctttagctgacaataggtagaaatgttatattctttatagcactgaaaatatatttgaaccactaacgaattttgttttactaagaaatttccagccaggcacagtgattcatgcctgtaaccacactcagataggtttttttttaaaaaaaaaatttggtagagatgggtt

SEQ ID NO: 183143 - DNA, 296 bp, Homo sapiens
taagtcccttctacatgccaggcactgtatgtgtgaaatagtcccaactctcaatgagtgtaggcagatacacaaacaaagccttaaggaggtcagttttctgagaccatactgctggacagtatatgaacctgggatacaaacccacctctatttgacctcaaatttgatgctggggtggttttaattttattctgggaatttcagtcattcaaccatgaaaaggtgaaaagtctctgtcagatgtgtgtgtagtggtctgtataataaggtagatatagaagagtgcacttttg

SEQ ID NO: 183144 - DNA, 422 bp, Homo sapiens
gccggatgcaaaactggaatactggatatgaagtgaaatgtataaaagacataaaatgtcacaaaatagtctgatcacaagtgttgattttcctggtgagttggggctgcgtgtttccatgttttctgaaggttcacataaacatgcagcctgccaattctctgtacattttttttttcaatgagtggtatttcggtattcacgtttagttgtaagacagaaattggagacttatatgtagctggagtggatgacttctttcttttgggggaagaatgagagatgcacatttcgttagtaaattgtgaacaacttgaaacaaacccaaatccaattttgaatttaagaagtagagttaaaatgaaaggtagccattcaaatactatgccttgctgccttcacttattaagttaggattttct

SEQ ID NO: 183145 - DNA, 532 bp, Homo sapiens
aggggaacaaaaaacatctgggccttcctgagggtggagggtgaaggataaagcaagtgagaaaaaataacagttgggtactaggcatagtatctgtgtgtcaaaataacttgtagaacaagttcccatgatacaagtttgcctatataacaaacctgcacctgtacctcaaacttaaaattaaagttaaataaatctagagaaggcagaaaaagaacaatgtaaatgcaccaaaaaaggtacaaatatagtagatatttatcaaaatatatcaataaaactttaaatgtgagtgaccaaaatataccaattaaaaatggagattgccaaagtgtccccctaaaaaagcaactacagtcatgtgctatataataactttttggttaatgatgtgcctaatatatgatggtgatcttataagattataatggagctgaaatattcctattgcccagtgacatcatagccagtctaatgttgtagtgcaattactttatttttatataaatttaatataacctaagttaaaaat

SEQ ID NO: 183146 - DNA, 280 bp, Homo sapiens
gccataactaggtggcaccgtgtccatttccccctcctcctctcatgccatggtgagacgcacactgagagcaggacactgggggcagcccttcctgctgcccgctgctgggccattaggccctgctgacacctagcagggcggaaggcctggcagtggagagaagggagcagatgttcccccaacactgacctcgcaccttggaaagaagcaagatgggaggagctgagagggaggacggtgctgagcatggctgaccccgagggctgggctgccgagg

SEQ ID NO: 183147 - DNA, 304 bp, Homo sapiens
acctttactccacgaacccccagacacatgctcattgtaacacatttgatgtgactgtaggcagtaaaccagtatctcacacaattctgaatcaccattttgacaatctagggatatatccttatttgcctttcctatttctatttttggcacatggattctaacaagataacatatatactaattgtcttctggataagcagaggtgttatgatatcacctagggttgcctcactgagcacccatagccattcaaaagacccagcttggccaggcgtggtggctcataccagaactttgggag

SEQ ID NO: 183148 - DNA, 357 bp, Homo sapiens
atggagactgaacttaacattaaaaacaaattaaaaaatgaaaagatagggatgtaaaagtatccacatgagctgataccaaggagttggagccaggctccagggaatgtaaattgggagaataactaagtttcttccatacctctaagaaacattggcaacactgaaatcagagactgcagtgccctccctcccaaacctaagaaggaaggctggaaaagatggcttacctggaaggaatgggcttctggaagtttcagagacaaagacacagcttcagaaccagaagctgagccatgctgctttcttggcccagggcctggatccgcagtatcgctgataccacaactgagcagg

SEQ ID NO: 183149 - DNA, 370 bp, Homo sapiens
caaataagagaatttagcaaggtcataggacacaagattaatatacaaaagtcaattaccttcttatatgccagtaataaacaaatagaattgtaaatttaataaactaaataccttttgaaatagcatcccccaagatgaactactgagatataaatcaaacaaaatatatacagcatctgtatgcagagaactaaaaaacaaaaacaaaagaaatcaaagatctaaatcatggagagaatgaagagacaactatggaatggaagaacatcctgcatttataaaccatacatctcataaggggttaatattcaaaacgtataagaaactcaaacaactaaatagcctggccaacgtggcaaaaccccct

SEQ ID NO: 183150 - DNA, 290 bp, Homo sapiens
ctgagggcagcccaggggtgggtagggcctgtttctaaagaagagaacccagcactcggcaaacatgcactgatgctggtgatgatctttggatgatgatggtgatggaaactgattccatctgtgcaccacagcctgacggcagggcgggctcaaacacaggggcggcagttaccctcctgggcatcgctcccacccaccccttcccgccaggaaagctgtccactcacaccctgtccttccctcgagaggaaaattcctgtagtagacctcatgggccagaggcagtg

SEQ ID NO: 183151 - DNA, 356 bp, Homo sapiens
ttggtgtttaatcattttccttttgatctaatttccttagagaaatattttgtacttgtgctctcaggccagattttcctgtcacactgcctgaactagatcagcggcttctctgccctttaatccttgccctgtttaccatcagtaacaattgtaaactagtgcctcatcattataaaggcagtaactatctttcccattgatgggaagtggtgattatttacttaggcttgtgttagtcacagatgcttcaaatagcttgatctttttctttaagcatttatacgtgatcagcaaataggaaacatggatgaaaccgcttattccttaaaatttgctaatagaatttatccgaa

SEQ ID NO: 183152 - DNA, 568 bp, Homo sapiens
acttttacccattgcttgtgagaacataaatgcttgaaagctatttcagcagtacttactatagcttaaaatcttgtacactttacaagccagctctacttctagaaatctgagagaatttctagcacgtgtaacctaggagatacatttcagtttattaattgcagggttgctcatagtattaatagcaagaaacaatccaaatataaatcagcagaaaaaactgaatatattcatacattgaaatacatcatacagtaatgttaagtaaaataagtcacacaaaaacataaaaagtatgattctatttatgcaaagttcaaaaacagaaaaaaatgaaacactatattatttggggggaaatagacaagtaatgaaataatgaagaaaaacaagggaataggttgacataaaactcagacgagtagttacctctgtggggaggattgtgattgaggagaggttcacagatgccttctaaattttgattttttaaatctgtgtaataagtatacaggtattcattttattttctttaaacttttcagttgttttaaaacactgttct

SEQ ID NO: 183153 - DNA, 109 bp, Homo sapiens
caagggaaacagtattccataattaatctattaggtggtattgcagacgttctcccattctctctcaccctcgcatcaggagagtttggtataatagccccagtttgct

SEQ ID NO: 183154 - DNA, 859 bp, Homo sapiens
ttctaagcacattttgattaggctaggctaagctatgatgtttgataggttagatgtattaaatgtgtattcaacataacaatactttcaacttactatgggtttatcaggatgtgaccttacgctaagttgaggagcatctgtactgtatttctaaaggaagctgggatatgaatatctggcattttcaagcttcttaatgaaaaataggtactccatcttattagtattgaagaatctcgagtgtttcccatcttaaaaagaaaacacaagctccctcaacctcactttcccatccagattctgccatgtttctgttttctcatctatagacaatattgactattctcaaccccatttcttgatgaactcttcaatccaccagaatctggtgtataccctcattaatctccaaaactctttttcacaatttcgctaaaattcatggacaaatttcagttttctggtttgatatttcagcagtttttgtcaatgatcattccttctttatgaaacacttgcttctgcggcttctttgatacttctgtgttttgggttttcttcttttggaggctgcttcttgcccttcaagttcctcagagctctgctccaggccctattcttgtctaaacatactccataagcaagctcatctacctttatagcctcatttaccacttacagactagcctaggcctctctgttgagttccagagagaactttatactagatatttcttttggggtgtttcaaagtcatctcaaagatgcctttttatgctttaaaaaacatacttaagttttctccacttctagtattgcttattgtaggaaatgacaccaacgatcaaacacctat

SEQ ID NO: 183155 - DNA, 507 bp, Homo sapiens
gaatataaaaataaataagacacagccgctttcctctttaaatgaataatccagctaggaaaactgaaaatgcccaaatactcgaaataccaaataacgctgtgatagaggagctacagtagaccttgtgcatcctgggcaggaaaccacaggctccatcagaggaaatcagggaggcctccctgaggaggttatgtatgaatgggtcctcgaagaatgactaagactctggagacaggacagagagaggaggcggcattccagacagaaggaaggtaatgccaagacacacagagagaggtgtgtgctcgggccagattacaggggcctggggaacagtgggcagaagacgcagctaggaaggaaccaggctctcttatgttacacaaaggaggatggccctaagtggttcttaagtaggagagtggtgagctcatactggcatgaaagaggccaagggacagggtaatcaaaagaccactgagatcagtgcagtgaggggtgacg

SEQ ID NO: 183156 - DNA, 556 bp, Homo sapiens
cctgcaaatctatgcagccataaaaaatgatgagtcatgtccttgtagggacatggatgaaatggaaaccatcattctcagtaaactatcgcaagaacaaaaaaccaaacaccgcatattctcactcataggtgggaatggaaccatgagatcacatggccactcaataccggtattgtgtggccatgtgaaaaatctgaacatgaacaatgaacatgaacaatataaaaaacataatattgagtgaaaaaggaaattgcaaagggataacctatcagtgtgttagcagtcattcagtcaaacatttttattctttttggagaatcttctatgtggcagctactatcctagacaataagcatgaaacagtaagcaaaaccattaatataaatttgaaataaatactgtatattatcatgggcacatattaatgtattaacattaaaggattcatatggcagggatatcactaaattcatttcacttttttaaatctaaagaaaacatggtaaaacatttacatatttggagctgggttcaccagtgactgttctac

SEQ ID NO: 183157 - DNA, 2110 bp, Homo sapiens
cgcgggggcttctcggggtccacgcacgccctgcgccgccaggacccgagcggagcctccccgcggcccggccgcgcctggtcctgagcggtaccatgatgtggggtgcaggcagccctctggcctggctctcagctggctcaggcaacgtgaatgtaagcagcgtgggcccagcagaggggcccacaggtccagccgcaccactgccctcgcctaaggcctgggatgtggtgctctgcatctcaggcaccctggtgtcctgcgagaatgcgctagtggtggccatcatcgtgggcactcctgccttccgtgcccccatgttcctgctggtgggcagcctggccgtggcagacctgctggcaggcctgggcctggtcctgcactttgctgctgtcttctgcatcggctcagcggagatgagcctggtgctggttggcgtgctggcaatggcctttaccgccagcatcggcagtctactggccatcactgtcgaccgctacctttctctgtacaatgccctcacctactattcagagacaacagtgacacggacctatgtgatgctggccttagtgtggggaggtgccctgggcctggggctgctgcctgtgctggcctggaactgcctggatggcctgaccacatgtggcgtggtttatccactctccaagaaccatctggtagttctggccattgccttcttcatggtgtttggcatcatgctgcagctctacgcccaaatctgccgcatcgtctgccgccatgcccagcagattgcccttcagcggcacctgctgcctgcctcccactatgtggccacccgcaagggcattgccacactggccgtggtgcttggagcctttgccgcctgctggttgcccttcactgtctactgcctgctgggtgatgcccactctccacctctctacacctatcttaccttgctccctgccacctacaactccatgatcaaccctatcatctacgccttccgcaaccaggatgtgcagaaagtgctgtgggctgtctgctgctgctgttcctcttccaagatccccttccgatcccgctcccccagtgatgtctagctgagtcttcatgacccttcaaccctgattactacagaattccagaatgttaggctctccagggcttctttccaaacccccagctccacaccccccagacccagctggttctggagttctaggacattgggtgtttcaaggttctgttcagatccctatgggggcccagctggctccacggttccagaatgttcaggtggtcagtgttctactcagaaatgtctcacagcccagctgggttgcaattccagaatgctgggagttttacagtgccattccaagtcccagatgtccctcttcccccaaacttgaccttgaccatgtcactttacgtttgaatttctgagctaaagagtcagagagattagtcacatagttgcctaaataggagagagaaagattatatatgcacatatacaaagacagtgtctatttatgattgatttatttatttataaatttacttatgggtggtaaggggcaaaaaagaggcccacaccttgatatccaggccataccagggtatcccttgtcccttcacccccatttctgacctcagttcctggaggggggaaagggtgaaagagaaaccacgtattttgttattattttggattattttttatcgaagagatcatagaaaccagagccttctccccaggcctgccctcctcgggtttggaaggggaacacaccagcctctggttttttatttttttaagaagccatcacctgagcaaccaaaaattcctctgcgctggggtccgactgccctctggtggccatttggggaaaactgcagcccggccaggcagctgggaccagaatgcaaccccagctccactccagcctggcgtccagggccacagccatggcctgggggccaagcctcaccctgcggtgccctaaaggagggggggcacgagccaacaccccacccctctgccaaccggggtatggcccccagtgcattccctgttcccgtctccaacccaactcaataaaaaatgattttgtcataa

SEQ ID NO: 183158 - DNA, 504 bp, Homo sapiens
aggggggtcagataccaccgagggtgaccagccccagggaaatggacgtgtgagctagggtgctgctacggactgaactgtgttgtccacccccctcaaattcatacattgaagccccagcctccaatatgatggtacttggaggtgtggcctttggaaggtcgtaaggatgagatgaggtcactagggtaaagccctcatgatgggattagtgtacttaaaacaagagataccagagagctggcttgcctgcctgcgcacactctctgctatgtggcaacacagcaaaaacgaggccatctgcaagccaggaaaagggcccgcaccaggaaccacgttggcccgtacccggatcatggactttccagcctccagaactatgagagataaatatgtgttgtgtaaatatgtgaagccaccccatctatggtattctgttacggcagtctggacagattaacacaggtcaattctgaaggtggattttttttttttgagacagcg

SEQ ID NO: 183159 - DNA, 351 bp, Homo sapiens
tcccttcatttatccaccagcccactcaacactgacactggatgccttacaacgtgtcagaaccagcatgtcagaaggcaagctcttcatttctctccatcccctgttcctcgcttgccccctatccccactagcctccttgtctctgaacagcattgcacacaccctactgaccaaagccctacggaggggtccctggtctcttcctgctactggatgtgcaacaccatgactgggcctgagggtgggtgacccctgcacctgatcctgaaactgggctttgagattggaaatccccagacctggggtgagcttgcatttagtccattagcagctctcattggctccacc

SEQ ID NO: 183160 - DNA, 677 bp, Homo sapiens
gtacccatctaccagtcctcaagtagtttctcaaactggagtctctagatattctcaggagtctgagaattctctgagatataaacagttttgtggttctctgtgtagatgcaaacaccatacatctggtgtctactggagggtggagttgaaaatgatcattgtgaaacaatgccagaatctttctgaaacttttgcaagcagcaaatttgaacagctggtttgtaactgaggtttttaaacttcattcagtctaactgtatgaagtgccttacgtggctgttatggtagctgagaggaaggatgaactggagactgaggacaccacccccattttaacctggttggccctacttttatttgtattatatattgtggctcagtgaagatttctcttgggagcttctctccatctaaaagttttgaaaaccactggactaacaggtttatggcttgtggttttggtaggggaatagggaaaagtagcaatgtatccttataaagaggctgtatgtggctaagttatttgtaaatagatttttcatagttaaccaaacaaagagtccttagaaatttttactgctaattgggaatgttattccagggttatcttagattggtagatagtagttctcaagtttttcggtctcagaaccccctcacagtctttatttatt

SEQ ID NO: 183161 - DNA, 205 bp, Homo sapiens
tcttgttttccttgttaaatgtccaagttgaagagatccctaatagatatctttattacttagctcttgtttccattataagattagtgatcaatagataataatggtacaataatatttaaattgcatcttacagtttaggaggctcgttcatgggcatttttcagtggggagagattgtcaccacaattcagtaattacgaca

SEQ ID NO: 183162 - DNA, 515 bp, Homo sapiens
cccatgattcagttccctcccaccatgcccctcccacgacacacagggattacagggattaagattcaagatgagtttggatgaggacccagcaaaaccatattaatttcataaagtgaggtagcatttgtgctttgaccctgcaagtccattaccaggaatccaccctggaaatgcatctgcacaaatacaacatgcatccagggttatccacagtggtattgtctgtaataaaagaatggaagcaacctaaatttcaaacaagaggaaattagttgaagaaactattgtacattgtcacaatggagtactatgcaaatgtaaaaaggatttttaaaatttctatttactgatttggaataatttcagcatatattcttggtaataattccagcatatatgtttggaataactccagcatatatatgcccaggtatagaacagtgtttatatgtgcactacatttcatgaaataagaaagagaaatgagaatatgtgtgtgtttacttttgatc

SEQ ID NO: 183163 - DNA, 341 bp, Homo sapiens
cctcctaccccacgaccacctcaaaacacagaaggcaaaaggaatggtaacttccatccctaattttgactttgggttatttgtacatttacagcaacagacaccaacttttatttgagatttggggtcattttggcatcgtttcagggtggagagaagacataaatgaagttaggacttcccagtccatctcaccaagctcaggatctcacagagctataagcaggcaaaggtgctccccaccagaaccatctggacaatgtgctttccagtgacttctttttttttgaggtttagctaggtctttttgttttgtcagtacatggtaactagattgatgg

SEQ ID NO: 183164 - DNA, 375 bp, Homo sapiens
agtatatcacacactttgagagcatactgtgactgtggtatgacattgtatacttgcttatctttggcctttccaactaaagtgcccataagccccagccatgattagctatgacctaaacaaactcttttgagccagttgtaagctataaagtttcggtattggcattatggaagacaaaggttaagccaactccttcataaactgataaagtataacacattgataatataagacaaattcctttcaaacaactaagggtatattggtttaggagaattaattttcttggaaaattctgtggtttcacaaaacagattgttaagttctaataatgtctaaatgtatctctgatccaaataaatgtgatataat

SEQ ID NO: 183165 - DNA, 3060 bp, Homo sapiens
cagctgtgaagatactataaaaagggaagagaaggaccgagacagaagcaacaacggaactgtcagtgcggagtagggctaaactcagttccattgttaagcaaggaaaaacaaacaatacattgaatttgacaacccactgaagttgcagataatgaggacttaccattatataccattattcatctggacctatatgttccatatagttgacaccatcctattacaagaaaaacctaacagttatttatcaagcaaaaagatagcgggtctgacaaaagatgacggtaaaatgctacgtcgcaccaagcgtggctggatgtggaatcagttcttcttattggaagagtacacaggtactgacacacaatatgtaggcaagcttcacactgaccaagataaaggagatggaaatttaaaatacatactaacaggagatggggctggcagtctatttgttatagatgaaaatacaggagacattcatgctgcaaagaaactagacagagaagaaaaatctctgtacattcttcgtgccaaggctatagacagaaaaactgggcggcaggtggaaccggaatcggaatttatcattaaaatacatgatatcaatgacaatgagccaaaatttacaaaagacttatacactgccagtgttcctgaaatgtctggagtcggtacatctgttatacaagtaactgcaacagatgcagatgacgccaactatggaaatagtgccaaagtggtctatagcatattgcaaggacagccatatttttcagtggacccagaatcaggcataataaaaactgcattaccagacatgagcagagaaaatagagagcagtaccaggttgttatacaggccaaagacatgggtggccagatgggaggcctttctggaaccaccacagtgaacatcacgctgacagatgtcaacaacaaccctcctcgatttccccagagtacgtatcaatttaattctcctgagtctgtacctcttggaactcatcttggaaggataaaagccaatgaccctgacgtgggggaaaatgcagaaatggagtatagcattgctgaaggagatggtgcagacatgttcgatgtcatcactgacaaggatacacaggaagggattataactgtcaaacagaatttagattttgaaaatcaaatgctctatactttaagagtggatgcaagtaacactcaccctgatccacgattcttacacctgggacctttcaaagatacagctgtggtcaaaatatctgtggaagatatagatgagcctcctgtgttcactaaagtctcttacttgatagaagtagatgaagatgtaaaggagggcagtatcattggacaggttacagcatacgatccagatgccaggaacaatttaataaagtactctgttgatcggcatactgatatggaccgtatttttggtattcactcagaaaatggttctattttcactttgaaagcccttgaccgggaatcatctccttggcataacatcactgttacagccacagaaataaataacccaaaacaaagtagccacatccctgtcttcatcagaattctagatataaatgaccatgctccggaatttgccatgtattatgaaacatttgtttgtgaaaatgcaaaacctgggcagttgattcagactgtcagtgtcatggataaggatgaccctccccgaggtcacaaattcttttttgaaccagtgccagaatttactctcaatccgaatttcaccattgtagataataaagataatacagcaggaatcatgactcggaaagatggctacagtcgcaacaaaatgagcacctacttattgccgattttaatctttgacaacgattatccaattcaaagcagcactggtacactcactatccgtgtgtgtgcctgcgataatcaaggaaacatgcaatcctgcaccgcagaagccctgatcctttcagccggcctgagcacgggagctctcgttgcgattctactctgtgtcctcatactgcttattttagtcgtgttgtttgctgcattgaagaggcaaagaaaaaaggaacctctgataatttcaaaagacgatgtccgggacaacattgtgacctacaacgatgaaggcggcggggaagaagatacccaagcttttgacattggcacattaaggaatccagaggcaagagaagacagtaaacttagacgggatgtaatgcctgaaactatttttcagataaggaggactgtgcctctgtgggaaaatattgatgtacaagattttatccatcgaagattaaaagaaaacgacgcagacccaagtgcacctccatatgattcgctggcaacgtatgcctatgaagggaatgattccatagcagattcgctcagttctttggaatctctcacagctgattgtaaccaagattatgattacctcagtgactgggggcctcgtttcaaaaaacttgccgatatgtatgggggtgatgatagtgaccgagactaagaggattgtttgacttaatcaatattagtggaagtactgtctatgttattagattgagtggcctgcattctcttcctgggaggaaatctttcaaaaattgaagttacaaacaatacgtagatgttgtcaagtagggatttgcttaatcagtaagtctttgtgaatgaatacgaatgatacagatttttaaaaaagtaataaccagttcaccctctttgcctaacaatctcggaaggaaaatatatcacatcaataatcaataaaaataagtaaaaggctttttgtgccttttcttaggtataataatttataaatgttttcttaactgactttcagtcacctttacaattaaactaaatattgtgcaaccgctttgtaaattaatatgaagaagatatatccctaatgaaataggaatgactattactgccatatttatttagttgaagaatgtctttgtgttaattcattcatatttttataaatgtatatttatatttttgtatttttatgaaataaactagtatttataaaac

SEQ ID NO: 183166 - DNA, 827 bp, Homo sapiens
tctcagccttgatgtcctgcgcagcccaaacccagcccctgcttctgtgtcttccatcgagacgtacgggatttggggacatgttctcagttccatatcctgctgtgagctaggaaggtgcctggtattcacctgcctcattttctcctccttgggcaagacaaagcagagctctcttaggaaccagatgagtacagatttcaaggaagtatctagaaccttgatatcattgctgaaatcaagagctgaatatagagaacatcttggcttatagatttttttttaaatcctgctctgtttgagttgttcagtgccataccctattacagaacaaattatgtgtggattattagttataccggcaggtaaaccagtgactaaggccccatcctttaccctgggagctattatttttctgcctgtggcatggttcatttgctaattatggttgttcctcagagtcagtaacaggaaatgacaacagtaaaccatccatggtggggggtgcgcctgagtgtgagagaacgaaggagggattgagaccagtggatttcttgagggcctcccccacttcctcaagtgatttaacttctctaggttgcagtttccttatctcaaaaaccgggatgatgacccacagcttccagggtgttgagaggattggacataacttgtgggtcctgttgccattactcatgtgtgttgacatgggaaacagcaagagcaacatgctcttcaaatacccagagcagattcctggagagacagtccatgaaccaaaggaagcagtttttttttaacccttttattttgtgagtcagtgacca

SEQ ID NO: 183167 - DNA, 109 bp, Homo sapiens
tccccaaatagtgtgtctgttttcttgatcattgtcctattgcttgtcttctctgatgtgtctgtgtcagtaagtcacctctgtgaaatgcaagaacattttaaaattt

SEQ ID NO: 183168 - DNA, 153 bp, Homo sapiens
ctacaagtaattttgcaaaagtgaaaagttgaaaacaacccaaatgtacaaaaataggggagataattatggtacatttgtataatagtatgccacttggtcattaaaaatgccatagaagtatatttttcataaacttatttctagctgctg

SEQ ID NO: 183169 - DNA, 856 bp, Homo sapiens
aactcaaaatgtagcaggtgagagaccagccagggctgagctttggaggccctgagtgacacagtagctgtggagttaataggagtgatcctgattcgttacttaggatccatttctttgtaaagcacatgcatgcatggcccctctggcccccgaccctgagtcctgggggacactgcagtacacggcttgctgtcatgttctttagtcagagggacgacactaaaaagagggtttctgctagtgatggatgctgtagagaaaatagaacagggttggggcagggcaagtgtgtcctctctgtgttaggtgattagggaagagtttggagagagtgccatttgggctgagatttgatcatgaagagccagttgtgtgaatatcattgatgagcatgagggccaaggaagcaccgggaagtcccaaggcagggaccggcttggaaaggaacaccaagaaggccagtaaaagaaagaaagccaagaaggccagtaaaagaagagccccaagaaggggctcgctagtgtccagtcttgtaaagtttcattctgagtgaattagaaagccactggagggtttatgcaggaaaaggaggtgggtagctggggttctgtaagttaacacataaaataatttattttgactcatctgcaagtgtgtgttctaggtaatttcgctttaaaatggtactgtgattcctctgaagtcatttattatgcaaattaaggacagcttgtcagaacctctgggtttcttgtgtcttgcattactagctgcaattcgtatttttcccatatttaaacattttctttttagttatgttctgtgatatatggaagggaaatgttcatgtagt

SEQ ID NO: 183170 - DNA, 439 bp, Homo sapiens
agggagggaaggaaaagaagggggagggggaggaggaggaggaggaggtggtggtgtaaggtcttttcaacaaccaattcttgctggaactaagagtgagaacttgctcccaggagaatggcaccaaggcattcatgagggatccaccctcatgacccaagcacctcccaccaggccccatctccaacaatgaaacttcagtgagatttggcagagccaaaaaacccacatccaaaccacagcaggtacacccatgggaagcgctcaatggatgatggctatgacaacatcactaactcccaagacgaacaaagtatttcatctttacacagttctaattgtgaaaaatgtattccttagactgtgttagcatctatttccctttaccttccactcctgggtcctatttccagcctgggagtaaacataggataaaccc

SEQ ID NO: 183171 - DNA, 479 bp, Homo sapiens
gtggtaaatagagaccattcccctccagtcataactgctgaactgcttaatgtttcagactaatcataggtctacttgcaagcatggaagggataggatctggttcaataggatggtaccactggaggttcacatatttcagagcggcccttccctgaagctcaagaactgaaatttcctccaggctaattgcagtgttgagacttctgcttcccccatggggaataaagaaggtgtaaaccaaaaagtgtctgagactcaatccatttagaagtttattttgccaaggttaaggacacatgcccgggagacagggagacaagtctgtgcctttctacaaagatgattttgagggcttcaatatttaaaggggaaagggcagacactggggaaagagggagaaatgtttaaaaggtgtggggaggtaagaggcaagaggtcgcattcttctgagtttttgatcagtccgttcgcatgtt

SEQ ID NO: 183172 - DNA, 460 bp, Homo sapiens
cattcaaagcagtgagcacgttcaagtggctgctttacagtgctttggggataccagccacagtataggttcggtttcagaacacttaggcatctaggatgggaaagaacaggacttgaagaggccaggagcgagaaacccctggttcaaaacaagagtgcatccaaggtccagaaagtgtcagtaaaatcggctagcaggctttgtttctgcaggcaccacaaactctattccaggagtcttcttgggacaccctattatgaacaaggcatcgctgcttcagagccagggtccccatctcttactgtcagccatgcaacaaaagatcagaccagaaagggctcacctggattgatcacagaagacatttaggccaaaaagtttcagatttacctcccactgcagctatgaccagaccctcatcccctaggcacctggtatctgcccaactgaacttcac

SEQ ID NO: 183173 - DNA, 540 bp, Homo sapiens
aaatgaaagaaatctgtcaaaatgctattccaggaaaacaaagctcagtggcagaatattttcatgctcctctgcttgttgagatggtcactaatcttttcaacaacttccattaaattgcacagggaaagaatctaatttaatgtgcatactcaaattgaggatgctttcccatggtagtcatttcagacctttaacattgcaagtgttaagtttatgtgggtaaaactgataactgacatggttccgaggaagcactatgtaagccaagccttaaaagttttgttctaaataggctatttgtgaaagcaactttctatgtgacatgacttcacaaaacaaccccttaaatggctctgattctcttaggtactaaatttatatcccataaattgatgtagatgataaacaatcttcattttttaggctaatgacaaccaatcaaaggatcagtgataatcatcttacacttgttaatgaatttaccaactgacttttattcagaaacatttctggtatttctgcagaaatggtatttct

SEQ ID NO: 183174 - DNA, 466 bp, Homo sapiens
ggctgcagtgaaccattatcatgccactgcagtccagcctgggtgatacagcgagaccctttctcaaaaaaaaaaaaaagactagaaacaagatattcatcaataagataactcattaaataaagtgtgataggtccctccagtgggcttctatgtagaagtggaaaagaatgcagtaaatcgaggctgggcgcggtggctcatgcctgtaatcccagcactttgggaggctgaggcgggcggatcacgaggtcaggagattgagaccagcctggccaacatggtgaagcctggtctctactaaaaatacaaaaaaattagccgagcgtggtggtgggtgcctgtagtcccagctactcgggaggctgaggcaggagaatggcatgaacctgggaggcggagcttgcagtgagtcaatatcgtgccactgcactccagcctgggtgacagagcgaaactccttctc

SEQ ID NO: 183175 - DNA, 318 bp, Homo sapiens
cctctatccaaccctccttcccacaagtaaccactatttgaagttggtgcacatcatttgcatggtttcatatttttctacatagatgtgtccttaaatattgtgatctgtttagtttgttttaaagacttacacaaatagaatcattcacatatttttttttttttctgcaagttgctctttacactcatcattgttttcgaaatttatctgagctggtagttacagatctagttcagttattttaattttaactgtgcatagtatcccattatgtataaatcatatttcacttacccatgtcccttctgatggcta

SEQ ID NO: 183176 - DNA, 537 bp, Homo sapiens
gaggatcagttgatcccaggagctcgaggctgcagtgaaccatgatggtgccactacactccagcctaggtgacagtgagaacctatgtctaaaaaacatatatatttggtatacgggcaagaaccccaatttgaaggaaaggtggagaatatactgtaattttgacttattttgtaatgatcatgatcagactcataatgttatctgctatttggtgtaatactggtatatctggtaaaattaatttgatgtgttctgatatggtttggatgtaagttccttgcaaatctcatgttgaaatgtgaccttcaacgttggaggtgggcctagtcagaggtctttgggtcatgggggtggatccctcatgaatgggttggtgctgtcctcatggtagtgagtgagttctcactgagttcatgcaagatctggttgtttagaaaagcctggcccctcctgcctacctctcttgctccctccctcaccatgtgacacgctggctctccttcactttttgccaaaattgtaagcttcctgag

SEQ ID NO: 183177 - DNA, 176 bp, Homo sapiens
agaaaaagcaggaggaggaggaaaagaattcagagactaatttcttttcccagtccaatttaataagtgagactgctcatatgagggtccacagcctgaatctgagaaacttctgtagctgtccacagtgtttaattatcaccgcccctcagttgcttctcctatttctcaggaga

SEQ ID NO: 183178 - DNA, 287 bp, Homo sapiens
tcctgtattccacggctcagggcccagcaccactccaaactctgcttttatcatcgcatttccttctctgactttgattcttctgcctctctcttccctttactaacaccctgggagcaaacccagaaaatccaggataatcttcccatctcaagatccttatcttaatgacatctgcaaagtcccttggttacataagctaacatatttagaggttctaaggattaggatatggacaactttgttgggccattattctgcctatcacagatggttatgggcaccat

SEQ ID NO: 183179 - DNA, 436 bp, Homo sapiens
agggaggcctaattaagcaacaggatgctggattctggtttttggccctgtctcttccctgctgtgtgactctcccttctgaggcttggattcttcacttgtaaagtgagagttaggggcagatgagccaggagcggtgaggacactttgtgctctgtaacttactaaggtggtaccttgggccgtctgacagccctcgagagagagtttgctcagccgtggagtgggaatgagaacagtgccctctgaccacccctcgggctgctgagtgggctgtggccacctttgcagtggatccagtactgtgcggatgtggttgagtgaccaaggagggctccagtttccttaaccctgtagacgtgtatctttccccatggactcttgggtgtcccacagttgggcagagattgcagggagagggcagctaaaccctagg

SEQ ID NO: 183180 - DNA, 577 bp, Homo sapiens
agaagacggggtttcaccatgtcggtcaggctggtctcaaactcctgacctcaagtgatccacctgcctcagcctcccacagtgctgggattacaggcgtgagccactgctcctggctgtctttgaagggatcggtccatttcatctagtttatcgcttttgtgggcatggagttgttgtttttaagagttgtttgtattattcctttaaagtgggtggatccgtaatgatgtcctgtctttcatttctgatattagtacagtcatatctttcttaatgacaaggattaaatattctgagaagtgcgttccatggttcatcattgtgagaacattatagagtgtgcttaacaaacctgggtggtatagccatgtgggctgtatggtagagcccattgctcctaggctccacacctgtacagcatgttactgtgctgaatactataggcagttgcaacacagtgggcccctaaatatttgtgtacgtaaacatagaaaaggtacagtaaaaatacagtataaaagataaaaaataacacttgatacggtttggatgtgtggcacgtccaaatctcatg

SEQ ID NO: 183181 - DNA, 546 bp, Homo sapiens
ggtgtcccaccatgcagttcaattgtgacactagaagtttgcaaatttggaggctgccatgagccccaccctcaggttcaataatttgctagaatgactcacagaactcagtaaaacactatttatacttaacaactatcatttattataaaggatagaaatgaacagcggctgaagaggcacaggaccaggtctggaagtgccctgagtgctggagtgtctgtcctcctggagtcagggttgtggagttagggtgcaccatgttctggcacacagttgttagaaacaagtgcttggtgccgtaaagaaaaactagcacttagaagatttctcaggaaggcacatttacttctgcagaaaggtgctgcctgcgtccgaccgaccgatcgtaagagcacaccgaaaaaaggagataaagatttttatccctaacacagctcctgttgctgtatcctctcgccattggctggagtcagactgcacaatctaactaactcaattggctaagacttaaagttttctaactatgataaacatgcagtttgc

SEQ ID NO: 183182 - DNA, 352 bp, Homo sapiens
gcaaagcagccagcccggcaggggtgggagggctggacagcagaggggaggcaggataaccactgagccaggaaccaggaggggaggagccatcttatccacccaaggacaccagaggagtgttctctccaggaggctccaggccttatagccctgggtcttaacccctgccgcagccctcgctccagtgtctctctccccagtcttttcatccctctccatccctttcttgatctccgtacacactcataccacccaccctccctccctctcttctcccacttcccctctctcctttctcaccatctctcctcattatgccttctctactcgatcacccctttgcagagaa

SEQ ID NO: 183183 - DNA, 314 bp, Homo sapiens
ctccccatgtgtacagcaagaggaggtggacagcacacaggaggggaggagccatcttatccacccaaggacaccagaggagtgttctctccaggaggctccaggccttatagccctgggtcttaacccctgccgcagccctcgctccagtgtctctctccccagtcttttcatccctctccatccctttcttgatctccgtacacactcataccacccaccctccctccctctcttctcccacttcccctctctcctttctcaccatctctcctcattatgccttctctactcgatcacccctttgcagagaa

SEQ ID NO: 183184 - DNA, 245 bp, Homo sapiens
agatccacggacgcattcaaaggaggggtgaagactgcagactggactgctaaggagaagagatattttgccacaacttgagacttctccaggtcaggatgaagtaactgttttcctctcagaaatgtcagagcttctgcctgtaagacaaggcagtggttcaaatgtgtccaccaaagttcatatcttagaggcttgatctccagtgtgatggtgttgaatgtgggaggtgggaggtgctgagg

SEQ ID NO: 183185 - DNA, 836 bp, Homo sapiens
gagaatggtgtgaacccgggaggtggagcttgtggtgagccaagattgcgccactgcactccagcctgggtgacagagcgagactccatctcagaaaaaaaaaaaaaaaaaacctgcagtcaggaatatctcctgctccggtctgtgcgctctgtgccctcgagctcccaggtgatctgaacaggaagctgcactggcccctgtctctaggtaaggaggataggacccaagcattccacaggccacacccagacagttgccagccttccccatctacaaaacctcagccgtggaagttttgcgagctcattcattcattccaggattttatgaaagcatttactcagtggacgtgctgcatctaggccagccgttggtgtctggttaatcaggattcctggtaagtgagttggtatttggagtatctactcagaggtggacgttccagcttccaggaatctaggatatgacagagtacttcaggctggtgcctccagattagcggagaccctgggctccagccacactctctgtagcagctttcagagtccttttcctttgtcccttctctgtcatcctagcgctgagagagctgggcaggcccaggttcttagccccattctaggaatgcagcaacccaggctcagagagcctcaacagcctgccctaggtggcagtacccggattccatcccgtttcctgactcaattccactgctgcctctgtgctaccacaaatagcaagacttgtcttagctatgcccgagtgctggagtgtgcagctgactgctgggaagaaccagcttggaccctttggagaggggctctgtccctgcc

SEQ ID NO: 183186 - DNA, 147 bp, Homo sapiens
agctgatgggtgctatgaatataaactacgataccattgcttaatagagagatgtttagtcagaggtaacattttatttttattatctagtcttctgtcttaatttatttctatcttattcactctatttattgaatgaaattaagt

SEQ ID NO: 183187 - DNA, 799 bp, Homo sapiens
cgctcaaccccacccttgataatccctaaagaaatccacctgcatatttctccaatactgcccacccctctgttggcacaaagcattgttcaaattgagaagggtgcaacaggagaaagaggaaaatgaaaaatagtaatgaccttgatacattttataaaacaatttgaggaagttgcctataactctcttgctttcaattcagaagaaggcagatacaccaagaaatgctggaaaaccccagccaagaacttcaaaatgtgtatattttcttgtagctactgaaatgcctgtcctgccatggggtgactgtcagggcctgagaaagagccccttttcttggggatttgggaagaggaagttcttcatatcagccaaatgggcaaaatcacaagcttctgctgggataaagcattgtgatgatacatgctttctgggcctcacatccccaagaaaaagagtcctagagattaaacaagctcccaagcccatattcctgaaatgaattaagagctggaaaaatcaccttgacctggtagcagtgggggagggtgtgcgtgtgtgcacaactctgtcctggtcacgttcaagtctgaagccctttttctctgttgttctgctttgttgagtagttccagagtttaggtggggtttcccgaaggatttaggataaggctgacttggggatgagtaggatgatgataattattgccaccagatggtgaaacaaaagacaaaaataaaaccaccgtggccaggtgcagtggctcaagcctgtaatcccagcactttgggaggc

SEQ ID NO: 183188 - DNA, 469 bp, Homo sapiens
gataatgtcgtgctgaaatgagagctttaatgagatgcattgtgttttgattctgcgttttagatatctgtggttcactttcagccagcctacattgcaggtcttactgcttctttcttcgcagactggctatcgtggggcaaacatgtcttccgcttttagtaaaactccttatatgtttggccagggtacagtctctttttgggagaacaaattgtttaaaacactgtttgcctggcttaaagcatacttgagtggtttattaccttgttcataaaatctatataacattaaacaaataatctgattgtgtagagaaggaggtaggctgaaatagcagcaaattatgctaatttttgataagacagatggcagcctaagatagtgatgacaggaaaagggagtcagaagacaggccccagggaaaattacctccttgtagtattgcttagaatggactcagcaaact

SEQ ID NO: 183189 - DNA, 339 bp, Homo sapiens
atagcgacaccgtacatcttgttgagtggtctttcccgtgtgctcagaacagtgcctggtgtgtaataggaattcagcaaatgctgctttcgtagcgagtaaatgagactgtgtgtgtgtgatgtgtgtgaacgtgtgtgtatgtgatgtatgtacgtgtgtgggaatgtgtattgtgtgatgtacgtatgtgtttgaatgtgtgtgatgtgtgtaagtgtgtatgtgtgtatgagtgtgagtatagtgtgtgatgtatgcgtgtatgtgtatgtgtggtgtatgtgtatgtgtgtgatgtgtgatgtacatgtgtatcaatgtgtgtgtacttgtctg

SEQ ID NO: 183190 - DNA, 787 bp, Homo sapiens
gtggggggaatccgggggaggtgagatttgagttgtgctctaaaggctagattaaataactggaatttgaaaggaggacagaggagcctccgctggagctagggggctccgttacagatccttttggcagaagttgacaattgggtatcaaaacagtgcaaggtgtttcgggaggtaggatggattcagactctgaaggggtttgaactaaaatgtttatgttttattctgtcagtggggagccactcgacttagagcagcagagcattacagtaatgacgttaaataacaacatttgatgaggcttattatctgccaggcattctcctaagtggcttgcaattcacttaatccccccaaggctggtagtaggagcctcattttacagatgaggaaaactgagactccacaagattaactttctccttaggtaacgcggctaaaacccagtagccagaattaagtctgattctacgctgtgtggtctctgtcctgaaaatgagtttgttgaaatagcagtgttatctgctgctagcttttccaggtcatttgtggcagatgaaatagaaaggattggacaaatagattaagaaataatggacggaatagatgtagattggctaatctgggaccagagaatctccgagagattctgagcccctctactagaaatttcttgataccgatgaagggcagactaatacagtcagcatgtgttagggaagttcagtaaaaatgatctgcagttacaggtagtttatgtggtaatgtgacatcctagtaggtt

SEQ ID NO: 183191 - DNA, 185 bp, Homo sapiens
catgaatctgcattcctaagtttctgggtcagggacaacaccctgagatacactgctctaagacatctaaaagtggtttcagtgttttcttgaatccaaaactgtttgcagcactaaagttgaacgtgccttttgttcaggggacactgtagccactaccagattttcaaaggtgaccattccac

SEQ ID NO: 183192 - DNA, 490 bp, Homo sapiens
gggaaccatgttatcgcccaacacagtacctaataatgagaataattttctgtattcaaaggttcttagtggttgttaatgtcttaaaagagaccatttaactggaatggaagtgttttctttggagaaaagcaggaaacattggatagatcttaattatacagaccttgatacttaggcagaaagtagagattctacttaggaaactagaaattacttttttttttttttttttgagacagggttttgctctgtcacctgggctggagtggagttcagtgcagtggcatgattatggctcagtgctgcatcaaactcctgggctcaagtgattcctcccacttcagctcctgagtagctggtattacagatgcccagctgatttttaaattttttgtgtgggggtggctaaatgatgagagcacatggacacatagaggggaacaacgcacactgtggccttttggaggatagagggtgggaggatgga

SEQ ID NO: 183193 - DNA, 315 bp, Homo sapiens
  misc_feature (270)..(270): n is a, c, g, or t
  misc_feature (275)..(275): n is a, c, g, or t
  misc_feature (282)..(282): n is a, c, g, or t
gggaaccatgttatcgcccaacacagtacctaataatgagaataattttctgtattcaaaggttcttagtggttgttaatgtcttaaaagagaccatttaactggaatggaagtgttttctttggagaaaagcaggaaacattggatagatcttaattatacagaccttgatacttaggcagaaagtagagattctacttaggaaactagaaattacttttttttttttttttttgagacagggtttgggcccgtgcccccgggccgggnggggngtccggngcggggcatgtgataagggcctcaggtgcgtgc

SEQ ID NO: 183194 - DNA, 411 bp, Homo sapiens
tgtgctgtgtgagtatgccatgaaaagacataaaaaggctttgttcgtgatgttccatagacaatgcttggcgtctactcacaagccttctctaaaacttagagcctttgtgtcaaactctaaaaccccaaacgatggtgcttatctacacaggccacttgccctgtgcagaggggagggacttgggaacccagcctcccatgcacacgaggatgctccattaatattaattgatattgaatcaatgttagaagatctgagctgtgttagtgactcaaccattaactctgtgtgtgacctgggtgcaatccttcgtttgtcgcgcctcatttctcaaaatcgagataaccattgtccttttctatttttcaggatttcatgaagattaattagatacgtccataaaaacag

SEQ ID NO: 183195 - DNA, 318 bp, Homo sapiens
taggtggatcacacgaggagtttgagaccagcttggccaacatggtgaaaccccatctctgctataaatataaaattagccgggtgtggtggctgtaatcccagctactcggaggttgaggcaggagaatcgcttgaacccaggaggcggaggttgcagtgagccgagactgcgccactgcactccagcctgggcaacaagacccaaaaaactcggtctcaaaaaaaacaaaatgaaactactgtttttcgagttttggtgtagtagcaacaaatacccataattatctgaaaaggctacaacaacaaccctcccttc

SEQ ID NO: 183196 - DNA, 370 bp, Homo sapiens
catttctgcacactgtttctttctttctttttttctttttgagatagagtcacgctctgtcacccaggctggagtgcagtggtgcgatctcggcttactgcaacctccgcctcctgggttcaagagattctcctccctcagcctcccaagtagctgggattacaggcacccgccaccacacctagctaatttttgtatttttttagtagagagggggtctcaccgtgttggccaagctggtcttgaactcctggcctcaaatgatccacctgccttaacctcccaaagtgctgggattacaggcataagccacaacacccagcctctgcacactatttctgactgtgtcacacccaccctgcaatcatac

SEQ ID NO: 183197 - DNA, 457 bp, Homo sapiens
gtcctatgtaacagttgagactatattatgaataaattggtttaaatacatactaatgtttaaaaatctcttgtgtagtcttattggatcttccagaccttttgccctctcaaaagattggacagagccgctttcaactttgtttttatgagatgagatgacaaaatgtggactatacaactgtggactatggtctacttcttaaatgcagaggctatttagtttgtggattatccacatgccatattttaccccaaggattaagataaaaggaatataaatctgaagatagcaagcttcattttttaatacaaggaaaaagataagttgaaattcatgataaatatagattgtgttttgaaactttgattattttcctgttgtccctttaacatgttcctggggaagtttataataatgatttaggagaagaggtgggaaactgataaattagctg

SEQ ID NO: 183198 - DNA, 610 bp, Homo sapiens
gattcactaaattgattttatgcctcattaataaacagttacccacaatttgaaaaactgtattgttaagagttcccacccccatatgttcaaacttttctggaagctggaggaagaaaaataatgagaacatcattcttgagtggactatagtctgtggggaagctatatatagataatacatgataagcctagtaataaaggcacattacatcatctctggagggagaaaatgctaataatttcctaggggagcacagaaacatcttagagaggtagtacttgaacagattcttcaagaagagctaggagtttactatgtaggaaaactgggcaagtagagggaaaagcatctatcacgacatagaggcataaatatagactgcaaagaaagtgacgtgtcacttagtgaggccaccatggagggtaggtgcggccaaggctagacaggcagaaggggcatatcggaggttaacatataccagactaaagtgcttgaacattattctggaggaaattgaaaggcatcacttaaaagaagggaaggacacaactagactttcacatcagaaagttaactgtttcctggaactatctcaatgtcgactga

SEQ ID NO: 183199 - DNA, 465 bp, Homo sapiens
attgtgttaacaggagggctgggggctttccagagccacattccacacacacagaacccctctctccagttcttcctcccatttctattttttcatggatttagagaacgaggaggagagtagggaacttcaaaatgacacgcagggcgataaacctttcagatgaatgatgtcacttcataaggggtcagggggccaatttattttcacgtttcgaaacatagtttatgagcctgataaaatttaaaacacttctagggcaaaatggatgtgcaagtgacactgagttttgaactctttccctgccttctttttatttttctgacttactcttgaaacacatcagtcaacaaccagcttatactgagggtcctttgcatacaagccctttgctgggcgctgtgaaaaataatttttttatggccaacacctggtttcttccctcaaggagccttatgcctctgt

SEQ ID NO: 183200 - DNA, 339 bp, Homo sapiens
aaatcagtttacacaatgacatggaagacagtaagtactaaacaaagggaaaaaaggctatcatcatcttctttatgataccatcatcatctccagaattggtcgctatgcaaaggcaggacaggacgagtcctgctactctttcaacctgcccaggttaagcagccaccaccaagatagaaaagacatggtataaggggcaaaaaagtacaaaaggcaaaaaccagaagaggatatgacaatacaaataaaatcagctcttgattaaccatgctaatgaggttgagggaagactattattttattttaatttgtgtaaactgattgggtaccgagctc

SEQ ID NO: 183201 - DNA, 215 bp, Homo sapiens
caggacaggacgagtcctgctactctttcaacctgcccaggttaagcagccaccaccaagatagaaaagacatggtataaggggcaaaaaagtacaaaaggcaaaaaccagaagaggatatgacaatacaaataaaatcagctcttgattaaccatgctaatgaggttgagggaagactattattttattttaattgacagaatacaaacataga

SEQ ID NO: 183202 - DNA, 841 bp, Homo sapiens
caacattcagccactcaggtgaggcatggagtgggtagatggttgagtttaatctgggttggcattttcccaggtaagtgcaacagagggagagagggacataggtgaaagggtaaatataaggagaataaatataaatgatggactatataagcaaagctgggtaggaagggaaaagcccatggaagcataatggaaaatgaacaagttgttgcgtgacgaggttgaagaaatgctggagcgagagtatcagaagtgacctggaagaatatgaggtagtggtggtgaaatggacacttcagaggtgtgcagcttctagtgttgacaagacctagggcatgaccatggaccaggtggctgaggtgggataactgtaaaattgtgaggagagaggaggctgtggtattgggtgggtcatctacattcttgttgaagtcaccttgaatggtacagctgtggtggagagggagacagggagccactgatgatgacggatagtgcccaggatactggaagattgaagcaacaaggaggggggagtccggtggctaagcatgatgccatgaacttcaaggaccagggtttatgaaggataaaggaggggaaatggtttggcagtgagctgaatgagtggatggaaggatggacagatggaaatgtaggcttttattaggcagctttcagtgaaagttaaaaatctctaactgctggactcagtcctaccctttaaagccccatctttttaaggaacagacactggcaaaccaccgcctgccccgtccagcccactgcctgtttctgtgctttcgaaacatagccgtgcccattcatctgcaccaca

SEQ ID NO: 183203 - DNA, 482 bp, Homo sapiens
tcacgaatcgagctcgtaccgggagtggagagaggaggctgtggtattgggtgggtcatctacattcttgttgaagtcaccttgaatggtacagctgtggtggagagggagacagggagccactgatgatgacggatagtgcccaggatactggaagattgaagcaacaaggaggggggagtccggtggctaagcatgatgccatgaacttcaaggaccagggtttatgaaggataaaggaggggaaatggtttggcagtgagctgaatgagtggatggaaggatggacagatggaaatgtaggcttttattaggcagctttcagtgaaagttaaaaatctctaactgctggactcagtcctaccctttaaagccccatctttttaaggaacagacactggcaaaccaccgcctgccccgtccagcccactgcctgtttctgtgctttcgaaacatagccgtgcccattcatctgcaccaca

SEQ ID NO: 183204 - DNA, 363 bp, Homo sapiens
catatgccagtgctgggattgaacagcataaatcaagactagtcaggcgagagctcctggaagacacagtatttagttaaatgttgagagaaacgatgtatgtggttgacagagaagtgtatggctgtctctggtcttttccaaaatgatagactacagaaaagtatctgtgtcattattacttgaaaactggaaattacttatattccagcaattttcctttggtgtttgcatttctggagtgagagcacagttcacctagtaggccaaggaaatctattcttttagtctatttatcgaaaatataaaagtggggccaggcacagtggctcaagtctgtaatctcagcagttttggaggctg

SEQ ID NO: 183205 - DNA, 144 bp, Homo sapiens
ttctggctattatgaataatgttgttatgaacactcatgtacaagtttttatgtggacatacattttcatttgctagagtacatacctagaagtggaaaatatatggtaactccatatttaatattttcaggatttgccatact

SEQ ID NO: 183206 - DNA, 131 bp, Homo sapiens
caaattttctcaaatggaaaagagaagcagagcagcctctagtagagctgtggtctgggttggcactcgggcaccagtgctccgtggctcaagtgcatccatccatcctcatgtttcttttgtcccaaatg

SEQ ID NO: 183207 - DNA, 164 bp, Homo sapiens
tcactgtgaactgggaggggagatttttcaggagtgccacagggctctccctttaatcacatacactccctgctttcattggaaagtgtataatgatgtcagagtgccccagaatggagctagagagagagtgagagagagagagagagccagtgtggagagag

SEQ ID NO: 183208 - DNA, 350 bp, Homo sapiens
cagcctcccaaagtgttgggattacaggcgtgagccaccgcccccagccaagatttatttttaaacatgtcaccaactgtatgctttagagaaggttgaaagttaaaatttaagcttgctgttcagaaatagttgtccagtagattttcatccagtagtgacattgatatttctgtttgatggggttggggtgatttttttttttttttggtctgttctgaaaatctgtgctgtttccacatagcttatatatagttaaaagtataaatggagtgcttactatgtggcaaggactgtcccagatgctttatattaatttaattttcataagaactctatgaactaagtgc

SEQ ID NO: 183209 - DNA, 613 bp, Homo sapiens
gagagactggaattctggttggtgagattgtgtcccgcccagtttcctggcctcctgactgcaagatccttgtgtgcctgtgtcccctccagtggggaacagagagcttgagtgtggctcacactctcccctagcagcaaggccagtatatctctgccttggcttgtctaatccaaggcaagttgcagggtctggggtactgcagagtcaagaggtaatggggccccaccacttggctggtccaaggggtggggggcagggtgtatacacactgcgtgaaggaggattaaggcctctaagagctgcctcggcgcacggccactggcccggctccaggcggcgcagtctggctgatgacacgagcgctgttctcaccagctgcctgagccagtcagatggaaaagtaatcctatttgtgcttccccactgacacagattgcacaattaaagaagccgctgtcaggaatttgaagtagatgccactctagcacctaggaggggaacagaccttctgatattgatgttgtgtaatcagcatttcagcaaagatgtttctaggacaagataagatgtaaattgctgtaaattgaattgtattgagaaattaccaggt

SEQ ID NO: 183210 - DNA, 668 bp, Homo sapiens
gttgagtgttcaaggattattcggcagtatgttgatctgcatatatagagaggggggggacctggggccctgttgtggagggaagggcatggatgaggccaggaggcaggaggcaggcacatttgcaagagggagatgggtcctggggtgtgcagtacacagggaaggagcagagggggatgggctgaaaaggttctggtccatggagtgagcttctgcctgaggcaggtttctctgggacactgagattgtggaccagcaggagaggctggaagccaaggaggggtctgggtggccaggcctgggccagggcaggagcagtggccctagggaggaggggaggcaggttcatgggacattagaggctgtaactgggcaggggagagcaggagggacggagccgtcggggctcagctgtggatgcctggtggccaggtgaagaggaggtggggaggcaggatgctgacttctgacagtatgtcctgggcagaggtgcctgagagagccctggaaaggctgggggctgtgtctgtgtcttgagatgtggacatctttggcagtggtgaggtgggcgccccaggatggtgaagagggagagggtggagagcaggcagagaggactgaggcctgaaggagggaagggtttatgggagaagaggaggaggcgc

SEQ ID NO: 183211 - DNA, 461 bp, Homo sapiens
catgtctgtaatcccagaactttgggaggccgaggtgggtttatcacctgaggtcaggagtttgagaccagcctgaccaacatggagaaaccccgtctctactaaaagtacaaaaattagccaggcgtggtggcgggtgcctgtaatcccagctactcggcctacgtaggacatgatggaggcttggaccagggggcagtggaagtggaaagggggaagatttggggtatatctggaaggaggtcaaattgactggatgtggaatgtgaggaaagaaatctagggtggctcctaagtagaatgacaaaccaacccagattgcctgagactgaggggtttcctgggacatgggattttcagggctaaaaccaggacaagtcccagacaaaccaggataattggtcacattacttttaggtttttgggccaaacaatggggtgagtagctggtgccatataca

SEQ ID NO: 183212 - DNA, 699 bp, Homo sapiens
gcaaaacccaccccttgaatcttacccaggactatggagctccattaattgctgtcaacacgctggaacctatttcacatgaagctcagaccaattacaattaatgccacagtcatgactacaaactagaaaccaatgccagaggaagcttaagttaaagaaagcaacgatcacgcacatatattatgttagcaattaggcttaatcctagaatcgtgaagccaaagagaatatattaaagagagaacagtgccctcctgggaagaagagcaatttcaaatagactttttagtggctttctacattacttacttgaatatattatgctcccctagaattactatattacaattactcacgccacattttatttatttcagcaaggaaatgggatggtgcaatgagctcagtgggcagacggtttggttatttcaatgaataatttgaatgtcaacaagttggtggatgctaagatgaaaggggaagtagtaaatagcaaaggtctcaatgcctgactctgagatggagtaaggatgagctatcaggactggcacttcacttctaaatgttgagcactcaggttttgctaaatttataaaagcacatgaactaactaacatcgcatatttccttaacgagaagaccagtttatctctgtttaaaacagttctgatctactcaaatacacatttttaattt

SEQ ID NO: 183213 - DNA, 591 bp, Homo sapiens
tctagaggatcccatttcgacgaccattcaggctactttgggaagttggtatgaatgcattaccacgttaaagaggaaccagagcttctgcccaactgtcaacctgtacaaattgtggactgtgctccgtgaacaaacacgggtgaatgcgtccgtcgaagttgcaacttcgacggacgcattcactcaagacagtagaactagtccacagcaagcaaataatgttttaggtgtagtaaagtatctgcctttttgcaaagtaacttttgttgttcagttgcagtcctggtgttagctacccaagctggctggacattgtgtcatctgagtttctttctaattcacttgttcttggttggagtgttgtgtagttagtaaagctcgcaggtgtttctgatacagccaggattgagaaccaccatgtattccctcattcccttttgagatagattgacactagatattgtgcccccccaagggtagatttttacgatgaataacactactcctcacagttgaggaagtagggactgttgtgaaaatcctggcttatcagaatggcaacgaatacttagcagtgactgaatgcct

SEQ ID NO: 183214 - DNA, 494 bp, Homo sapiens
ctcgggtcccagaatgaccactgggcagtgcacgcccaggagatctgaccaggaaatggcacgggggctttaaaaactgacgtgatgctcatggcctacaggttggggattggaacttgtggcctgaaagtaagattggctgttggctaaaacaaaaatatcaatatttcccatatagcttaaataagacctagagtatcaccacataatgctcaaaaagtccaggatgcaatccaaaattactcagcatacaaacaaccacgaaaatgtcaacttgcctggaaaacccaatcaaccactgtcaacacttcacagatgttgggattatctgatgaagactttaaacagctatttttaaaattgcaaatgcttgcaacaaatgttaaaatagaaagtctcagcaaagaaacagatgataaagaagaatcaaccaggagttcgagactagcctgggcaacacagcaagtcctggtctctacaaaataaaaaataaa

SEQ ID NO: 183215 - DNA, 282 bp, Homo sapiens
cactgcactcccgcctgggcaacagagtgaggatctgtctcaaaaaaaaaaaacaactatataaatggaatcatttagtttgatttggtttgtagccttttgggattgctcttttcagtcagcataacttcttggggattcatccaagttggtatgtgtatcacctttttattgctaagtagtattccacgatttggatataccacagtttgtttaaccagcattcaagaacatctggattgttttcaatctttggccattataaataaagttgctatgaat

SEQ ID NO: 183216 - DNA, 550 bp, Homo sapiens
cacatattccagagagataggcaccatggaagtaattacattgggagcattgggagaagatgggaacatataaatatctcatcacacaaatcaaaaattaggaaatgtagtagcatatttcacatgatcttttgtaacaataaatattccattttaatagtatgttaaaaatcactcataagcctttcctttctgcagtattttatctgtttatttcactctaaagttacagaaacgtaacgtataatcaagttccttattggctgcctcttaacataatttttgttattcttcctcctcagtattggttagtgatggaatgcgagaataaagctgaatttatctattttcacttatgattaaaaaaagataaattctaagtaggtattttaaaagatagtttgacatatacactcccagtgttggacttgaaattaagaggtcagctggtattggtatgaacattaacaaagacctacaggctaaacaagaaatagtttagcctatttctcatttgcctgtgtataaagattatggatattctcacata

SEQ ID NO: 183217 - DNA, 119 bp, Homo sapiens
aaggatcctgatatatggggattatcctggatcatccgggtattctctaaacccagtcatgagtgtcccttataagagaaaggcagagtgagatttgatacacactaaaggcaacgtga

SEQ ID NO: 183218 - DNA, 305 bp, Homo sapiens
tgtgcactatgggatattttaggtcaatgggcactgtaactatgggaaatttagttaaggcaatagtatcagtggtaaaggagagacatgaataattgtcatcaaagatagtgagcaagctaagagcaagaaaagaaagactcctaggtggtggtggtcctcaactagacaatgcagttgagtctaccagttgctttttggttgccctgtggatggcaggatcatcatctactcatgactcccaccaaagtggtttgaattttaagtttgagaatgatacacacacacacaccaagagggtatga

SEQ ID NO: 183219 - DNA, 490 bp, Homo sapiens
caagaaccagctggagattcagaatctacaggggactgggatcactttgagcctctgttgagttcccttctgaggaggatgccagaattagagactctggagatcatgaagttggtgaactgcccagagaccttcgcatcagacatgaggtgcatcatgggcgagtctcctgcagtgtagggctactttgtcctggcaggaatgaactctgctggcctttcatttggtggaggagccggaaagtaccttgccgaatggatggtacatggttatccctcagaaaacgtttgggaattggacctgaaacgttttggagccctccagagcagccgcacctttctgcgccaccgggtcatggaagtcatgcctttgatgtatgatctgaaggttccccactgggacttccagaccggtaggcagttacgcacctctcctctctacgaccggctggatgcacagggagccaggtggatggagaaacatggatttg

SEQ ID NO: 183220 - DNA, 303 bp, Homo sapiens
agtgagagagagagaaagagcgagcctgggagagcgaatgcaagaacaaaactaccaaaagtattgcctcagacaaataaacatatttacattttcaagctgaaaaaaatcaagaaactatcctttattctcccaaaagaaatttttttgtatcactatttgtaaaacttactatttttccaaggcaagcagtagaaactagagtgctttgacatgctgccagcattcacagtgatttaaaagcacggccatggcattgctacaaaccataatttaaaagggttggaagctgcccttttgtaa

SEQ ID NO: 183221 - DNA, 261 bp, Homo sapiens
gaggttaaaggggaatgggtaagtgttgcctaactgtcaggaagtctgcatcttattcaatgttttgtccttttaagtcacttgaattctgtgtaagtacacgtatctctgggtgttgttgcggcagtaaaaatgtgtttgagtctgtgtagtaggttgtgctttttaaaaaaaaagtaagtcgtaagtcttctcagtttgtgtactgggtttctttttgttagattccttttaaggactaacttgaatgctctgtgtttg

SEQ ID NO: 183222 - DNA, 193 bp, Homo sapiens
ggcccctactttctattgaaaaatatttaaaatctatgcacttattctacaaagtcaaagatttttaaaatgcaattattctattgcatgtttaaattaccatctttcctttaaaaatattcagaaattcaattgtaataacatttgctctcacttcaaatgcttattctaagacaaccatggattagagagc

SEQ ID NO: 183223 - DNA, 232 bp, Homo sapiens
gtgctcttgagcaaggctagagattcacccttggagggttggggccatgctggctgtgcttatttccactggagagcagaactgtgagtggcttgtggggaggagtttttctttggtggaatgttcagccttaacctacccattatgttctagagatggagaaattgaggctcagagagccccaaggactcaaattacatgtgatggagcggtgacatgctcctagtcctcc

SEQ ID NO: 183224 - DNA, 947 bp, Homo sapiens
ggcgaagtacatcgaacgaacagcagagacgaaggaccgtcgatcgcggtgggctagagacactggcatccagaggacacttggcatccagagacacttggcatccagagacacttggcatccagagacacttggcatccagagacacttggcatcagagacacttggcatccagagacacttggcatccagagacacttggcatcgagagctctggatgcaaagtgtcagattctatctatgggagcaatgggggagcaggtggtcagtgtgctgcatgaccctcgattagttagcagctgcagggaaatgagtcagagcacaccagtgcatgctggttgatgcctgactacaatacaagcctaaagcctggcttgtaattctcattaaccctgtgagggtgggttttcccttgggcttttgccccattctaagcaacacttctatggatatttttgactacatgttttttgtagtgcacactggaaaatattctgtgtgctcaaattaatttttttccaagactgtttctcattttaatatcccagagcttctcttgcattttaggctgcaatgggtgaagaaagttatatcttcattcctttgtcaaaaatttactgagtgcctgggcactcaagtgctgtaatcccagcactttgggaggctgaagcaggaggatagcttgaacccaggagttcaagaccagcctggacaggaggatcacttgagcccaggaactggaggctgcagcgagccatgattgcaccactgcactccagcatgggcaacgcagcaataccctgtctcaaaaacaaaaaaaaccatttattgagtgcttactcaatggtagttaggcactggcctgggcactggaaaacagagaaatataacatgtccccatctttctcagcataaagcttatcagactgtgtccattgtgtttattt

SEQ ID NO: 183225 - DNA, 549 bp, Homo sapiens
ggtggcgtctagaggatcccggctcggatgcaagtgtctctggatgcaagtgtctttttcttttccaagtctctcattccaccttacgagaaacacccacaggtgtggaggggcaacccaccccttcatatgcaaagtgtaatatcccagagcttctcttgcattttaggctgcaatgggtgaagaaagttatatcttcattcctttgtcaaaaatttactgagtgcctgggcactcaagtgctgtaatcccagcactttgggaggctgaagcaggaggatagcttgaacccaggagttcaagaccagcctggacaggaggatcacttgagcccaggaactggaggctgcagcgagccatgattgcaccactgcactccagcatgggcaacgcagcaataccctgtctcaaaaacaaaaaaaaccatttattgagtgcttactcaatggtagttaggcactggcctgggcactggaaaacagagaaatataacatgtccccatctttctcagcataaagcttatcagactgtgtccattgtgtttattt

SEQ ID NO: 183226 - DNA, 407 bp, Homo sapiens
gcatcagccattctgctggaattcaggatctgaaaaacaccttaagcaattcttgggtaaaatgtccagtgtcagattctatctatgggagcaatgggggagcaggtggtcagtgtgctgcatgaccctcgattagttagcagctgcagggaaatgagtcagagcacaccagtgcatgctggttgatgcctgactacaatacaagcctaaagcctggcttgtaattctcattaaccctgtgagggtgggttttcccttgggcttttgccccattctaagcaacacttctatggatatttttgactacatgttttttgtagtgcacactggaaaatattctgtgtgctcaaattaatttttttcgcagcttgcatgccctgggtataaagctcggattcgtatcatgt

SEQ ID NO: 183227 - DNA, 228 bp, Homo sapiens
accaagtagaagaagcgatgaatttttaatgtcccattcgaactccagctcctactcaccagtctctccgcatggagaagtggccgtcatggtcgacctgttcccaagggtggccttgtgagtgcaggctctcctcaccagagctgagggctttgtgaacctctgatgtcaatagatgcccctcatcttccaggaggacaaaacagggcaaagcaagacatggggtta

SEQ ID NO: 183228 - DNA, 398 bp, Homo sapiens
tcttgcagtgtctcccagggtggagtgcagtggcgagatcacagtttactgcagcctccaactcctgggctcaagcgatcctcccgcctcagccttccgagtagctcagactacaggcaagagctaccatgcctggctaaagggaccaagtttttgtacggacattgaagaccttgcttctttccatcacaatggcctgcacgcttctacttacattcccacgttctggaatctggcttcccccagaattcccattcaaatccgattttgaatccccaatccaggaatcccagctgtctcctcaccccagcttcatcctcttattcccaggcccctccatccttcacagctctggatggctaaactgcatggcttgggcccagcccatcacctggggg

SEQ ID NO: 183229 - DNA, 644 bp, Homo sapiens
catcactgggatccgctctggggctgggcagctccttgccgggggcctgggtcttagtcagacttgcctttctttctaggcctctccattgacttctggccatgccgatgtgagtcagatgcattgtttctctctggctcctagggcgctcagtagcttcctccaccttcaggctgtagcccagtgcggggcaggctggtgggcagctgggggctgaggcagggaaacctgagccctaggccacgaggtcctgggccgctaattttagaaagcacatgtcactggaaactctccttctctgccaggaatcaacggcctggctctcctggtgctgccaggggcccctgggagcctctccccaaaccaggaacctcaggggtgtctcctggcccgggtgggtactttctgtcctgagtacatctggaaaggggctctgccgaggccctggagagccatggcttgggccagggaggtagctcaccttgtctgctctttactttctccagcccttccgggctgcccctggccatgagcagaggctgtgaagtgtgaaggcctggctggggcaggaggccacttcgactcttctgagtaagctgttgttgaagcactctggactaagcagatttgtctcttccttcccc

SEQ ID NO: 183230 - DNA, 709 bp, Homo sapiens
gggcatagactataacagcataactattacagcataaactattacagcataaactattacagcataaactattacagcataaactatgacagcataaactattacagcataaactattacagcataaactattacagcataaaccatggaagtccagaaggtttccatagtttatactgtaatacagcatcatctattaaaaacatgtgctttacaaagtcaggcactgagccagtttttatttaccattgtgtgtgtgtcccttccctacaagtcccaagcatactgtcagtgaacataagacaaatggctaagtttggagataattttaagggctaatttttaaaaagatttattttcttttgaaataaggaaagtgatttttttccatggtcccttctgtcagtaagctcattttccaaacttgtaatatgacacatatgccaaatatagaagcataaagggtaacttcaaaatctgccctcaatgtttgagtacagagacttgccccacccctgctcatcagagactccatgggagtcagtatctttatctcttgccagaataacagagatccagtcatggcatacaaatttggaaatgaaactgtaagtattaattgtaagtggacctttgagcaatacagggattatgggcacctgccctccacatagtcaaaaatccacatgtaacttcagactccccaaaa

SEQ ID NO: 183231 - DNA, 533 bp, Homo sapiens
tgaggtgtcccttctgcttgttggacgtggaccgagagatgaggccgatgaagatttcctggagatagatggtggtgatggttgcacgacaatgtgaatttccctaacggtacctaaaattgttagaataataaatttgatgttaggcatattttaccacagtttttttttttttaaaggtttctaggtttcctctgagctttacactggctgactcttttccaggactcattatggttctttcatcttggtcttgtggctaatctgctttagggcccagggaatatggggaccccagagttcaccatccaccagagtgactgcaggtagcagtttgcattggactttctttgacggagagagtgctactgcagtcctgatgtggactgtggccttatcagaggagaatttcttcatttaatgacagctgctaatgagccttctccaggcactcttggtttggccaccttgttggcaaataaacccagcatgggttctggcccagtggaaattatttaataggcaagacaggg

SEQ ID NO: 183232 - DNA, 406 bp, Homo sapiens
tgaagctgatctgatgccagcctcgttcctagttatgagattaatgcatccatatagctccccaatcagggcactatttgcattacatgcagaggctcctttacctgtctctgtcttccactatcacagagagagcctgtcattccgtttttcattccactaatattaattcacaaactctgtgtcgcacctgcaaagaatgagaatacatagaagacacctaggccacatttgaaattttagtgtttgtggaattgtggaatcaaagatgttccaagccgcctgtgtaaaggcctggaggcagaacaatgtggtaaaggagcaactgaaaggaggtcagtatgaacaagcttctcatatacgcaaaagtacctggcatcttttcattaattaaaaaaaaaaaagc

SEQ ID NO: 183233 - DNA, 281 bp, Homo sapiens
ccatggcacatagtaagtgctctagaaataacagctgttcttgctatcaatattattagagcaattctctattctacaatgctcctcactttgggaatattataatagcccttttctttttatttggtctaggtcatacaaccaaatagttataacaaataacctgatcattggattatcactaatttatgtcctacacatgacagactctggtcgctaataaaagatagacttttttttttttttttggagacaaggtcttgttttgtggcccaggctgg

SEQ ID NO: 183234 - DNA, 329 bp, Homo sapiens
cagctaaagatctactgcaagaatgatagccctgaagccctgttccagtcagctcattcatggtcagggaattttcaacagcttcccattgctttgcataaaaggcaaacaccaccacctagcaggcaagggcctcagatctacttttccagatttttatttcaatagtttcctttatactgtttattttgtaaagcaggactatatgttgtccccaaatttcttttctttcctttcctttcttctcctttcatcaccattgcctcttacctgctgacatcaaatcacatcctaactgacctcattgcctaagcctttggtacctctca

SEQ ID NO: 183235 - DNA, 429 bp, Homo sapiens
ccaaataaccagaattgacacacatctttaatagacatggactctgggactctaggtctaattgcatacccaaagtcattccaatcagatgtacattcaccattcaggagggattatttttccacatcctgcattgaacaattacttaacctgcctgaaaaatggcaataggccaggtgcggtggctcactcctgtaatcccagcactttgggaggccgaggcaggtggatcatttaaggtcaggagtttcagaccagcctggccatcacggtgaaaccctgtctctactaaaaaaaaaaatacaaaaattagctgggcatgatggcaggtgcctgtaatcccaggtactcggcaggctgaggcaggagaattgccggaacctgggaggcggaggttgcagtgagccgagattgccctactgcactcca

SEQ ID NO: 183236 - DNA, 255 bp, Homo sapiens
ttctcagtctcctcatctgtaaaatgggtatgtctgccctccttggctacttcacagggctgcggcacatgcatctgcccgaatgagtgggcatggaagcaccctgtttatggcatggtggtatgtactccatgtgaggcctgaggacggaagcagtgtggagaggctgtatcatctttataatgactaggaggccaagacattagtacctaaagcaaaaaagtaatttcaaattgcagcagaatcacctgaagt

SEQ ID NO: 183237 - DNA, 229 bp, Homo sapiens
caccagggcggacaaggctaggtggaagtggggggtcaggatggcactctttcagcacagcgcacactagcctgccaaaacaaagctgaatgtagatgtggaattttggaactggaaggggatttagttccacttaccactccacaaaagactcatcctagcacattctgataagtgggcacccagcctcctcctgaatactccaaagataggaagctcactacttttc

SEQ ID NO: 183238 - DNA, 479 bp, Homo sapiens
aaacttagctgggcgtgatggcagacgcctgtggtcccagctgctcggggggctgaggcaggagaatcatttaaacccaggagacagagggtgcagtgagccgagatcacaccactgcacacccacctgggcaataagagtgaaactcttgtctcaaaacaagcaaacaaaaaggattaaatatatataaaaaaatctagaaggaaatatatggataaagaagtttctaagcttgatagaatagaaggtatcacaagagaaaatatagacaggtttgactacataaaaattaaactctgtatatcagaaaacatttgtacgttgacaaaatcaaagggcaggcgacaatctgcagagaatgtaaaaaattacaacgaagcatgaatatctttaatatagaatttttaatacaaattgctaatgtcaacattaagaccgcagtagtttaagggacaaaggcagttgaactgactttgcaa

SEQ ID NO: 183239 - DNA, 549 bp, Homo sapiens
tgcaatggcgccatctcggctcaccgcaacctccgcctcctgggttcaagcgattctcttgcctcagcctcctgagtagctgggattacaggcatgtgccacaacgcctggctaactttgtgtttttagtagagacggggtttctccatgttggtcagggtggtctcgaactcccaacctcggatgatccgcccacctcggcctcccaaagtgctgggattacaggcgtgagccaccatgcccggcgtaaagttttcaaatgtttaagtaacacgttaaattttgttatcgggctcagcacagaaaattgaaaaagagaacttaaaaggcgcccatactcagtccccaggttaacagacaaatagaaacttttaaacgtaatctaagagtgaatacatacatttctttttttttttttaagacggtatggttctgttgcctgggctggagtgatttcttggcaacctccgcctcctgggctcaagccatcctcccaccccagcctcctgagaagctgggattacaagcatgcgcccagctttctgtatt

SEQ ID NO: 183240 - DNA, 300 bp, Homo sapiens
tccaaggattgcaggcgtgacccactgtgccagccaatcaattgatttctcattcattttcagctggctctgttcccttaagccaggggattttcgtttgtttgtttccccttcaaggaaatgattctagctacagttttgatttccttgtacaactgttttcagtagcacagggaaagaaaacatcgaaagcattcaccacctcatttgtgtgctgggggaaaaagcagaaatgtgtattctctttttttgtttcgatgaccttgttcctgacttgttactcgtgacttgagagatcag

SEQ ID NO: 183241 - DNA, 313 bp, Homo sapiens
tcgagccggtacccatgtttgaaggcagtgacaaaataaaattgataggacatttcattttgtcccagagttttgaggattgtgtgaaattgtatgttaacatctgaagctaaataagcttttttttatctttgaagtacacaccatcactttttaattgtacaaaagaaacctttatttgtatccctttctgtctaaaactcaagagaactgtcaacttagataattttcaagaagtattgaatttttctccttggtttttgtgcctttaaagtaatgaaagtagttctataaaggcaaatgggaaagccat

SEQ ID NO: 183242 - DNA, 591 bp, Homo sapiens
ataaaaaaggaaccagctgtgttttctagtgatgctgtggccagcccagtgatgaaccacacttacatgttttccctcctttcttgcctcccttccctttcccccttattcttgctgtcttgagactgtaccccttaataaagcattagcacacaagctgtacttcagaggcttgattttctaggaaatccgcggtaagacaagaatatttttcagctccttatatatcacagtggagctactaaccctgctttcccactcatgggaatgggtatgccttcaatgagcaatgccatataatatcgcaagccatgatgggacactgatagagattttagattcagtggtatggagattgctgattactttaaatatcatgccattaatttaggtatgtagcatgtacatggtaatttaaaaataacacaatagggaatgatcaggtcggttctaaacagttatgatctgaggaaagagattactatgagtctttaagccactgcattgtacaataattgatataacttgtttatgaaacacttgaatgtattcatttaacaatacgagacaagattaataataaaactttgt

SEQ ID NO: 183243 - DNA, 346 bp, Homo sapiens
acagcacaaccatgtccagtagggggtcactagccacagagcaggcaggacacaggggctcgccctcgagcaagcatgtcgctgctggggaggacgatgagggagaagaggggaggccccaacagcaatgatgagaggggaggtcccgagatacacccacagagacggacgcgtcttgaggccgtctcagggacaatggtgcaagtgaggtcaccacagaaacaatggaaggaaaatataaggtcgccgctgtgaggatggagagaatggaagcgccagagggaaggccgtgccgtgagcagccaggagggagggcagcagagtcgaggcaggcagcagagagcac

SEQ ID NO: 183244 - DNA, 215 bp, Homo sapiens
ctaaaggtgatggagctggctcacgccatcagtgtgcatgtgagtatgtttatgtctgtatgtgtgtttctatgcttgtgaacagaaggggaaattgtcctttccaggaaggcaacatacaatagaatcagtattaattactactgatattattattgccactgggatcctacatgtctggcaggaatttaggacataatgtttaattgatccca

SEQ ID NO: 183245 - DNA, 558 bp, Homo sapiens
gtctttcattgttacggaaggttcttaaaaaagttttgctacaagatatagaaactaactataagctgaatgctttgagagagagtgaaatactgtcactgaatgaattcaggtagaagttgccaggcctctctatataagaagtcagtaaacttttctgtaaaaggccagagagtaaatatttttggctctgcaggccataagatctccagggcaactaccctaatatactattgtagtgagaaagcagccatagacaatatgtaaacaaataggtatgtccgtggtctaacaaaactttacttacaaaacaggtgtcagaccggacagccctagtttgccagcctctatattaaaaagagggctggaccatatgaccttcacaccacttctagctccaagtttccataaaaagtcattaagcaattcaacaatatgtagaaataagtgaaaaagacgtatttagattgatatagagacatatcatatgcagacatatatgtacatttataaaccatatagaaagaatattactataaacatatatgggacgggtca

SEQ ID NO: 183246 - DNA, 421 bp, Homo sapiens
cggaaaatcatctcagagggatttgacctggaaattaaaggataaatgtatttttgccaagctgccaaggtagtagaggggctaagtgtttggattttatcttgaatatgaaaaggaactttttaataataaacactcttcaacaaagactgaagtacttcatgaatttatagacctgaaggtgtttaatcagaggctggttgactatttttgcagaatttatggaagaaattcataaactctttggatgaaacctatgagaaacctgaaaattttaaatttatatgattcctatcataaaattctatgagggtaaagattaaacatgattagagaatttttattagctaaatacatattactttaaaaattaaaaccatttatttaactagtagagaaacatacattttattctgatttt

SEQ ID NO: 183247 - DNA, 260 bp, Homo sapiens
agggcatcctggacaagaaaggaaaaagagaccttgttggaacagttgaaacgtgaatcatgcctatggattggattgttggattgtagtgttgtatcaatgttgactcctgatttggaggtttgagtgctaattatataggaaaatatccttgtttacgggaaacattgactagaatgtttagaagttgtaggacactgcatctttagcttgtttttataggttgggaaaaaggtctaataataagtagggtgtgtgtg

SEQ ID NO: 183248 - DNA, 642 bp, Homo sapiens
gtagcaatatccttactcttacataggaccaggtgcagtggctcatgcctgtaatcccagcactttgggaggctgagaccagaggatcacttgagcctaggagttcgagaccagcctgggcaacatagggaaaccccatctctacaaaaaataaaaataaaaaaattagctgggtgtgttggcttacatctgtagtcccagctattcaggaggctgccgtagggtggaaggattgcttacgcccaagtggttgaggctggagtgtagtggctatttataggctctatcaaaagggcactgtaacctcaaactactggactcaagcagtcctcccgcttcagcctccggagtaggggggatcactacagggctactacatccagctaatagtttattcctttttattgccaagtagtattccatgatatggatgtaccacagtgtgtttaaccatccatataatagcaatttttgattaaacatcttaatttttttgtggtagtgttagtggggcaaaaacctgtaagtttattgccaaaatcacagtgctgaagatctattgataagttatatgtgagagaaatgtggaagtcactaaatgaaggaagagtaaaggagctaaaatgtccttattgttctcat

SEQ ID NO: 183249 - DNA, 398 bp, Homo sapiens
caagccggtccggttattgagtggcatgtgattttggctctatcaaaagggcactgtaacctcaaactactggactcaagcagtcctcccgcttcagcctccggagtaggggggatcactacagggctactacatccagctaatagtttattcctttttattgccaagtagtattccatgatatggatgtaccacagtgtgtttaaccatccatataatagcaatttttgattaaacatcttaatttttttgtggtagtgttagtggggcaaaaacctgtaagtttattgccaaaatcacagtgctgaagatctattgataagttatatgtgagagaaatgtggaagtcactaaatgaaggaagagtaaaggagctaaaatgtccttattgttctcat

SEQ ID NO: 183250 - DNA, 646 bp, Homo sapiens
cctataatcaagattgttgaggggaaaaaaacctaatgagaagtagaaggtatttttaaaaacttgtagaaatgaaaaatatatctgagtttttaaaatacactgaatagtatttacagcaggttagatattgcagaaggaaagatcaatgaacctgaagagtgaaacagaaacaattcaatatgcatcacagagagaataagactaaaagaaaaagaagagatcttcagcaacctgcagaacgatattagggtaataggatccacgtatctggagtctgcgaaggaggatggagaacagtatcaagcagcctgggatccacgtatttggagtctgtgaaggaggatgaagaacagtatcaagcagcctgggatccatgtatgtgcagtctgcaaaggaggatggagaacaatattaagcagcctgggatccacgtatttggagtctgcgaaggaggatggagatgggtgtggaaaggagtgttatagaaaaagtatgtgaagaaataatacccaaacattttccacatttgatgaaaactaaaacccacatttccaagaaaagcatgaagaaaaccatgcaaagccataccataatcaaattgctgaaaactaatgataaaaaacctcaaaaacagccagaggaa

SEQ ID NO: 183251 - DNA, 321 bp, Homo sapiens
ttcctcccacctcagactcccatgttgctgggactataggcatgtgccaccaccacacctggcacattttttaaatagagatgagggtctcactatgttgcccaggctggtctggaacttctggcttcccaaagtgctgggattacaggtgtgagcctctgcgcccagccaaggcttgtttttccaccttcagtttggttgatgtcattcaaatcacaacttttgttgtaagctcagctgttttcagacttgtcataattatcagggaatgtggttaaggtgccttccccttctctgcacagcctgggagagtatgttttc

SEQ ID NO: 183252 - DNA, 187 bp, Homo sapiens
gtgacagagcaagactccatctcaaaaaaaaaaaaaaaaaaaaaaaaattgcatatggctggagcttaatgctcatggaacaaagtggcaagtgatgaggttgaacagacaggcaaaactgagatcatatgggctttacaggacttggacagatctttggatttgactctgagtaaaatgagtggac

SEQ ID NO: 183253 - DNA, 149 bp, Homo sapiens
caagaatgggggcaggagtgtgggcctagccagggaaagaggagggttcagagagtagacacacacacacacacacacacacacacacacacacacacacacagttcaccatgaaggtgcagatgcctggctcagggagaaaagagggg

SEQ ID NO: 183254 - DNA, 130 bp, Homo sapiens
gtttattggctctttgttcttttgtaaatcatctttgactttcgcattaatttataagagatcactgtgaaacaaatgactttggcatttattttacaaatatttttcccaatttatcactcatttttca

SEQ ID NO: 183255 - DNA, 282 bp, Homo sapiens
agtctccctatgttatccaggcaggtctcaaactcctggcctcaagtggtcctcctgcctcagcctcaggcatgatccactgttcctggccttggctatgtttttgagagacagggtctcattctgttgctcaggttgggatgcagtggtgagatcatagctcactgcactcttgacctcttgggctaaagtggttctcccacctcagccccctgagtaactgggactacagggatgtgccagcatgcccagctaattttgaaaaagttttgtagaagtgag

SEQ ID NO: 183256 - DNA, 679 bp, Homo sapiens
gaagacagacggatagatagttcagaagtttgacgcatatatgacataggaagtcaccaagtctaaacttcagtttacccatgtaaagttgctgagaagcacaaaggttaaataacttgcaaaacttagatgctaagctagaaaccacactttaaagcattggattctagattactgctcatcatcatatgaataattttctagtcctgtatttctagaatatcatagattgcttgaaatgagctagcaaattagtagacttccaaatcctgtggtaatccaaagatacttattgtaatgataattttacgtatgtgatgttcagctatttcccagcatctctgcactcactgaaatcccaaatcactaatttccattcatgactgagagtattaggccttggcttggctgaaaatcagcagatacacaaagcaattcatcttgctctgagatccaaccctgcctatggtttaatctatttgttccaccagtgttgcttcactacaaaatgttaagtaatattatcaaaagaaagaagttgtaaaggacccacacaatttactccaaccaacattcacaaggcattcttgggaattctgtccaaaatgcaggaaatggggaccactgggtcagaaggcattcctgccgtctaggagcgtaatggtaccgagctcgatga

SEQ ID NO: 183257 - DNA, 276 bp, Homo sapiens
tgtgaacgattttgggaggacgggagcgtctgtgaacgattttgggaggacgggagcgtctgtgaacggattttgggaggacgggagcgtctgtgaacggattttgggaggacgggagcgtctgtgaacggattttgggaggacgggaaagtctgagaacggatggtggggatggatgcaccgaatgatcctgaatcgcgcacttcaaagcagataaaatggcaacaccggccccccaacagtcacgccacgctgaagctggagacgaactcgccc

SEQ ID NO: 183258 - DNA, 649 bp, Homo sapiens
gcagtggtaccatctcagctcactgcaacctctgccttgggggttcaagtgattctcctgcctcagcctcccgagtagctgggattacaggcacccgccaccgcgcccggctaatttttgtatttttagtagagacggggctttgccatgttgaccaggctggactcaaactcctgacctcaggtgatccgcccacctcggcctcccaaagcactgggattacaggaatgagccactgcactcggcctacttctgcattccttagagtacatcctagctaggatatattcacttgtctttagagctaacagcagaagaaaggtacctagatgcttatctagctctttatctttctagaaattctagaagatgagaggggcagtggtggctccaagggagtgattttaggatggactgggacagagaggggctgcttacacatactcacacagaggccattaatttagggagttcaaggtccaggaggttgacggcatctaggcctgtggcagagtgcactcctgctttggggaatgtatgggcagcttcttgcctgtagttggagggttagagagagggatcaataatttcatggttggacttgagtttgaattagctggagcttttgggccgctcccccccttttttt

SEQ ID NO: 183259 - DNA, 1189 bp, Homo sapiens
gcagtggtaccatctcagctcactgcaacctctgccttgggggttcaagtgattctcctgcctcagcctcccgagtagctgggattacaggcacccgccaccgcgcccggctaatttttgtatttttagtagagacggggctttgccatgttgaccaggctggactcaaactcctgacctcaggtgatccgcccacctcggcctcccaaagcactgggattacaggaatgagccactgcactcggcctacttctgcattccttagagtacatcctagctaggatatattcacttgtctttagagctaacagcagaagaaaggtacctagatgcttatctagctctttatctttctagaaattctagaagatgagaggggcagtggtggctccaagggagtgattttaggatggactgggacagagaggggctgcttacacatactcacacagaggccattaatttagggagttcaaggtccaggaggttgacggcatctaggcctgtggcagagtgcactcctgctttggggaatgtatgggcagcttcttgcctgtagttggagggttagagagagggatcaataatttcatggttggacttgagtttggagcgagtggagttagatacaaattctatgtttttggagaaagtatttgatcttcttggctgtgaggcaaagcgaggtttaaaaatatttttcacttaaaaatatatatatatgcatgtatatttaatactgtctatggattgtgccaatatctatttcatggttttgatattgtgtagttatacaaggagttaccactgaacgaaactgggggaagggtacacagaatctctgtactttttttgttgttgttgcaatttcctgtaaatctatgattattttaaaataaaaaagttaaagcatacgtatttacatttgattaaatgcagtgtgatatcctgggttggattttggaacaaaacaaggcatgagtgaaaaaactggtaaaatccaaaaaagcctttagttaaaagtaataccagtgttaatttcttagttttgacaaatgtgccatggctgtgtaagatgcaaatgttagaggaaactgggcgaagaatttgagggaactctctgtactattctttgcagcttttctgtaaatctacaattattccaaaataaaagtctattaaaaatgta

SEQ ID NO: 183260 - DNA, 1193 bp, Homo sapiens
agtggtgcaatcatagctcacatctagcctcaaactccgggactcaagcaatcctcctacttcagcctcctgagtacctgggacttacaggcacacaccatcatgtctgctaatttttttggttgctgtttttaagtagagatgaggtctcactatgcccaggctggactcaaactcctgacctcaggtgatccgcccacctcggcctcccaaagcactgggattacaggaatgagccactgcactcggcctacttctgcattccttagagtacatcctagctaggatatattcacttgtctttagagctaacagcagaagaaaggtacctagatgcttatctagctctttatctttctagaaattctagaagatgagaggggcagtggtggctccaagggagtgattttaggatggactgggacagagaggggctgcttacacatactcacacagaggccattaatttagggagttcaaggtccaggaggttgacggcatctaggcctgtggcagagtgcactcctgctttggggaatgtatgggcagcttcttgcctgtagttggagggttagagagagggatcaataatttcatggttggacttgagtttggagcgagtggagttagatacaaattctatgtttttggagaaagtatttgatcttcttggctgtgaggcaaagcgaggtttaaaaatatttttcacttaaaaatatatatatatgcatgtatatttaatactgtctatggattgtgccaatatctatttcatggttttgatattgtgtagttatacaaggagttaccactgaacgaaactgggggaagggtacacagaatctctgtactttttttgttgttgttgcaatttcctgtaaatctatgattattttaaaataaaaaagttaaagcatacgtatttacatttgattaaatgcagtgtgatatcctgggttggattttggaacaaaacaaggcatgagtgaaaaaactggtaaaatccaaaaaagcctttagttaaaagtaataccagtgttaatttcttagttttgacaaatgtgccatggctgtgtaagatgcaaatgttagaggaaactgggcgaagaatttgagggaactctctgtactattctttgcagcttttctgtaaatctacaattattccaaaataaaagtctattaaaaatgta

SEQ ID NO: 183261 - DNA, 1158 bp, Homo sapiens
agtggtgcaatcatagctcacatctagcctcaaactccgggactcaagcaatcctcctacttcagcctcctgagtacctgggacttacaggcacacaccatcatgtctgctaatttttttggttgctgtttttaagtagagatgaggtctcactatgcccaggctggactcaaactcctgacctcaggtgatccgcccacctcggcctcccaaagcactgggattacaggaatgagccactgcactcggcgatatattcacttgtctttagagctaacagcagaagaaaggtacctagatgcttatctagctctttatctttctagaaattctagaagatgagaggggcagtggtggctccaagggagtgattttaggatggactgggacagagaggggctgcttacacatactcacacagaggccattaatttagggagttcaaggtccaggaggttgacggcatctaggcctgtggcagagtgcactcctgctttggggaatgtatgggcagcttcttgcctgtagttggagggttagagagagggatcaataatttcatggttggacttgagtttggagcgagtggagttagatacaaattctatgtttttggagaaagtatttgatcttcttggctgtgaggcaaagcgaggtttaaaaatatttttcacttaaaaatatatatatatgcatgtatatttaatactgtctatggattgtgccaatatctatttcatggttttgatattgtgtagttatacaaggagttaccactgaacgaaactgggggaagggtacacagaatctctgtactttttttgttgttgttgcaatttcctgtaaatctatgattattttaaaataaaaaagttaaagcatacgtatttacatttgattaaatgcagtgtgatatcctgggttggattttggaacaaaacaaggcatgagtgaaaaaactggtaaaatccaaaaaagcctttagttaaaagtaataccagtgttaatttcttagttttgacaaatgtgccatggctgtgtaagatgcaaatgttagaggaaactgggcgaagaatttgagggaactctctgtactattctttgcagcttttctgtaaatctacaattattccaaaataaaagtctattaaaaatgta

SEQ ID NO: 183262 - DNA, 374 bp, Homo sapiens
tataaattacttcttgaggcaacattaaactgtaatcataaagaatgcttttgggggattgtgtaaaggaagggaacctaatggaaggtaagggccttcattctctttagatttacattactcacatgcagaaacctattttgtctctaagattcataaatacccagtaaaataaatacaggcacattgtacttctatactgtggaatactttctagacagatcaaccctgttactgggaataactactcatattcacatgtttgaaattcatgatatacctcccttcccccaccccaagaagaaaaatagctcctcttactgtgtttaactccgtgggtagcatcactatccattcctttgtatagaagttga

SEQ ID NO: 183263 - DNA, 1035 bp, Homo sapiens
aaggtggcgttttcatgcgtaatgacgaaaaccttattggacacaaagcgttcctttattagcaaaatatagatctttctgatgaaagaacaggcccgcgataccagcccctgaggtaagccggaagaggggccgccagcgtacgtggtcatggagcgatccttccagccacacacagttcgggtggcttagagacctgaacgcgtacagcaaatccagaacttgtaggaaataacgttctagaatatcttcaggacttatgggtgggaatatatgatacaaaaacaactaacttgaagcaattgatttgactgggttacgacaaaaataatctgaccttcaaaatacataactccatgatgaacccaaaatgccaagtatatgactgaacttacaagtgataccatcttacgactgaagagtgggaaataaaatacatcataagagagaagccacacagtagaaatttgttacacatatgattgacaaaggcaattatccagaatatataggatctaaacagacaacccaatcgaaaaatggataaaattactgaacaggtgctttggcaatgacaaaatccagatagtcaacaaacatgtaaggtgcgcaagcgcattacgaatcggggaaatgcattaaaaccacgattagtttcaattgattggtttttaaaccacactcactagattggcaaaaattaagaactctggccgggcgtggtggtggctcacgcctgtaatcccagcattttgggaagccgaggcaggcagattatttgacctcctgactcccgacttgaggtcaggagtttgagacaagcctggccaacacaatgagaccccgtctccactaaaagtaaaaaaaaaaaagattggccaagagtggtggcaggcgcctgtgatcccagctactgggaaggcagaggcaggagaattgcttgaatccgggaggcggaggttacaggttacagtgagtggagatcgtgccactgcagtccagcaacctcgatgacagagtgagactccgtctcaa

SEQ ID NO: 183264 - DNA, 416 bp, Homo sapiens
tttcgttcttccaggctatagtatattaaataggttcatctttttcattgggagctataaggttatattataatgaagacacaataactccattataagagttttgtaccacacttaaggttatgtgtttttttttttaagccaccagaatggttttatttttgtcattgacaacatgtacaaacctgcaattgtataattgttttgtttggtttttaaaatactaagtacacattaaaagtatgttttaagaaatatgatgcattaaagaagttcactgtaaacataattctcaatgtattttcctgccttgtttcatgcataaataacaatctaagtagtcataaataaaactatcaacttttgtggcccagaagtatatacaaattttgaagtttggcagaaggtgttctgta

SEQ ID NO: 183265 - DNA, 461 bp, Homo sapiens
tctgacttttatctgaggtgcatttggaatggggtcaccagaaaaggttgttatcaaaatgcaatttgtttttagggtttccaaaaagtagtttttatcgatatttaaaatgtggatctagcaaccttgttgatagaggccttccatgtttttcttaatagagccatttagtttcttccacttttcctttgatctgatcctatagacaagccaaaatttgaaagcacaatataatattaagaattaattgtggccgggcacagtggctcacgcctgtaatctcaacactttgggaggccaaggtgagtggatcagttgaggtcaggagttcgagagcagcctgaccaacatggtgaaaccccatctctactaaaaatacagaaattagctgggtgtggcaatgtgcgcctgtaatcccagctactatgaggcaggagaatcgcttgaacctgggaggcgga

SEQ ID NO: 183266 - DNA, 478 bp, Homo sapiens
acctaccttccgctataaaaactagtatagctttatgccaaatagattagtgctcattttggaaacaccaaagtttcagggctttctttagagccactagcctggataactgatccagcacaaaattgtcttgtccagcctttattaaaattcaacacagtattttcactcttggaggggcctaacactatcatgttgccctgatttgtgcctaacgctcattcataaaatgatcctgacttaaagtggtatgtttggtgctttctttttctgtttgctttttaaatcctttctaaatggcggcccatttcatttacatctctcatttcccctgaagtctttgaagccttttttgtaatgtgcctttaacaaataagtctctcttttttctccagcagtgtgaggcttctcaaatatttgtgttatgagttacggacaaggcatttcctgacctgtttccttaaaaaatccatttttt

SEQ ID NO: 183267 - DNA, 231 bp, Homo sapiens
agcttggttcccgcaaagtggaattttccataagtgggctggtggtgagtctcacagtagtaaatccaattattttgaattttctacctagttttataaaaagcatgagttaatcgtggtctctgagaaggaccacatctctccacaggggtctctgatggctccttggacactctggtgaggctgagtggtttacatggagcttaacttttatttactggtgtaaacttg

SEQ ID NO: 183268 - DNA, 526 bp, Homo sapiens
aacgttgggagcaagacaacaatgtgtgaaaatgacaatgtgttctcgatagtgaaaactgtgactaagatacattttcccaaaatgtaaaggtgtcaagccaaagaaattgaaagcacacttgagatatgtagctacctatctgatatggctgcattttttaaaaaggtatgggtcacattgagacttctcattaatcttaaattcatttatcacatggattatgttgagccctgtataacagttatctgtgaactaattcaacttgtacttggtttaaagccagtataatctttcgcctcctcatatgtaatattccatgtgataaatatttcaaactgagtttaagattatagttacctttccataggtatatatctgtttaaaatacactatgctcctcattccctaaattggttcatggaagtgaatcacaagtgtggaaatagtattatagtcaaataatttctaagtatcctagattgaaacaccaagtaggttggttaacatttttaaaacccatgca

SEQ ID NO: 183269 - DNA, 386 bp, Homo sapiens
tcctgggattacaggcgtgagccaccgcatctggcccttacccagatttttaaaaaatgtttttaaaaagtgtggtaaaatatacgtaacagaaaatttaccattttaaccattttaagtatacaattcagtgacattaagtatagccacgttgttgtgtaaccatcactaccatccatttccagaatgttctcatcttcctgagcagaaagtctacccacttaagcaataactcccatccccctgactcccaagagtctctatgtggctctatggatttgactcctctaggtcccttacatgtagtatcatacggtatttctctttttgtgtctggcttatttcacttaccataatatttccaaggttcatctgtgttgtggcat

SEQ ID NO: 183270 - DNA, 201 bp, Homo sapiens
tatctcctccagtcttgttcccttcaaatccatccaaaagctgccattaggctgagcgctctaaatcagtgtctaacaagacactcctctccctacaaaatagaagccaaactccttaacctggcattcaaggctgcccatgatggggccttatctcttgacaccttcttcttagtagatatagaagagtgcactttagga

SEQ ID NO: 183271 - DNA, 513 bp, Homo sapiens
taattacatggctaacaggtgtattcagatgattcagaatgtgttgatactgttttttagactattaaaaacatgaaagtaaaatattaaatttttagagaaatgtgaactccttgtgaacagaatcttagtttgagggaaattaatataggttaattcttctgttacatccttagttgaaataactaaaatggtttgcctggagtttcaggtggtactgcttatgtcaacatagattgtaactatttcagctgaatataattgaattttaataaggctccatgattttttaaaagatggcatttctttcctataaattccattacttttttctattttactagtaaagagccatcaatcaaaatatatcagactcactaatgtgactttttaccctgtttctttaatttctttagtcttcctagcaatatgctcttttatgcttagtttagtatcccaaatatagattactgctaattttgatctgctgtaaaatttttttctctgtgtgtg

SEQ ID NO: 183272 - DNA, 172 bp, Homo sapiens
tggaaagactgcataaagccaggagttcaagaccattctggacaatatagggaatccccatctttacaaaatattaaaaaaaaattatctgggcatggtggtgcatgcctgttgtcccaactactcaggcagttaaggtgggaggatctaagtggctttcttaatagtaatg

SEQ ID NO: 183273 - DNA, 532 bp, Homo sapiens
ccaattaggaggaatctagagaagtggtctggccacagccactttgccacgcccagcccagacttcccagcctcagcactgtcaggggaaaactgcctattcaagcctcagtaatggcggatgcccctcccgcaaccaagcttgatcatatcaggtggacttcagactgctgtgcttgcaccaaaatttcaagctagtggtccttagcttgctgggtttcatgggagttggacccgccgagcaagaccacttggctccctggcttcagccccctttccaggggagcaaacggttctgtctcactctcgttccaggcgccactggggtatgaaacagccacacagttttgtgcttgaaactcagggccctggtggtttaggcacacgggggaatctcctgatctacagattgcagaaaccgtgggaaaagcatagtaaccagtccctcacagctttccttggctgtgggagggagttccctgactccttgcacttcctgggtgaagcgacaccccaccctacttctgttcatc

SEQ ID NO: 183274 - DNA, 593 bp, Homo sapiens
gttgatctagagatccccgacatttgcactgggtgtcggggctcatgtctgtaatcccagcactttgagaggctgaggtgggaagattgcttgaatcgaggagttcaagtccagcctgggcaacagtgagactccatctcaaaaaaaaaaaattagacaatttatagcataagatgagatatccagttaccaatttaagtacagtaaggagtatctcaagtgaatacttcaaagtcaagtagatctgaatataaattctagcactttccagccctatggtcttgacccaactatgcaacctctctgaaccttgtttcctcatctttagaatgtaaatgacagtgaggtgcagtggctcacgcctgtagtcccaactgctcaggaggctaaggcgggagggtcacttgagtcctggagttggaggttacagtgagctatgattgtgccactgcactccagcctgggcaatagagtgagaaaccctgcctctaaaaaataaataagctaggtgaggtgactcacacctgtaatcccaacactttggggggctgaggtgggaggattgcttgagcccaggagtttgaggccagcct

SEQ ID NO: 183275 - DNA, 403 bp, Homo sapiens
cgccccgcagtgtggtcattgaaggcctctcccagctgtgccctgaccccgaggccttggtcaggtggtgcagcctcatgggacctcggctcactccccagtagtggcaaggaggttctgtcctgccagactactcggctccccactcctgaccacaggggtcacagccctgagctccaggcccagctacagggcctcgctttcaaagagagcattgaacaaggaatccacctcatctccggggcatgaggtgagcatcctggcttctccctacccccaaggcccacctgctcgtgaacagccttcctcctagtgaagcactttctcacgctttctggagctggggcttcccgctgggtatgcagcctctccaatgtctctagaaccatggcccaagtaggaa

SEQ ID NO: 183276 - DNA, 163 bp, Homo sapiens
cgaggcattcacacaagcacctgcctgtggtgtcaaatggatgtgtgaggcttggtctccagcagctctgcctggtgaagctgcagggttggccggtctgtgtgcttatgtgttaggcaggccgcctagttgcacactcttccgaggggcaccatttacttgg

SEQ ID NO: 183277 - DNA, 156 bp, Homo sapiens
gctggtttttatttgcagttcatattcttaaacactgctgtgtcttctcacaagtccggattaagaagaaagtgagagtatgaagatttgctctccccttatccagagcaaaccctaatgggtaggagtgaagatagtggggggtggggagagttt

SEQ ID NO: 183278 - DNA, 275 bp, Homo sapiens
aatgaaataataaacaggtgagcagataaataactaaataaacccagcctcaccaggaccaattctgatgttccaatattccagaattatcatggcatttgatggacggtttgagcctgtcctcattagatgttctcatgtcctgtgttaaggacttaagactcagaagatttttcatggattccaggcacgtgggagtggtacagacaggagcaggagtgggagcccgtgtacgggattcattagggaaacagaactttgctacgttgggaggg

SEQ ID NO: 183279 - DNA, 214 bp, Homo sapiens
gtgttccatttatgagctaattcagtcctcattttaaagttctccaatcgacggctagctaccgtgtcgctgcccctggctccccagttatggagatctgaggacactggggacacccagtaggtgctcgataaatgatagtgacaactcgtggagtcctgctatggcttacatcccagtccagctgctctccccaccccaccttctagcgggt

SEQ ID NO: 183280 - DNA, 719 bp, Homo sapiens
aagaaaatatttagataatttacaaactacgtaacattctataaaagtacaaagtgtgattaaatatagtggtcaagaaagaaactgagtaaataaactttgttatatatgtctaaaaaaaaaaagaaggggcagggggctccttgcttctagtgagcaaaggccttgagcttccacagccctttgtatttactggggagaaggagcagggaggaggtgctgttggtcagctgcttgatttgtcacaggttcacatgattgctaacaggctttagttgtgcctgtagataatcacaagaaacactgcgcctggggcatgactgccctcagcattcgttttaggcggcagatgcagtttgtcagtttgccaacaatctgctttcatgagaacagtttgctgtttgctcatatagcctccagtggtatactgagttggtcaccaccctcattcttttggcctccaacacttgggaggctgaggtgggaagatcttttgagccaggaggcgaaaggttgcagtgaagctgagatcacaccattgcactccagcctagggaacaaagtgagaccctgtgtcagaaaaaaaaaaaaaaaaaaaaaaggtttgattgatagtttgtgaccgtttgtgccacagcctgaaaataccattttcttaaatagtttgagggaagggaggatgctgtgatggaagacagatagggaaaatagttgatctt

SEQ ID NO: 183281 - DNA, 560 bp, Homo sapiens
tattgagtggtccatgtgatgatttaactctgtagaagttgtggatctgcgtgattctgcattgggagggatgaaagaaatgaaaagccatttgacaaggtgatagcaacctaaacaaacaggcttttaaagaaaaggatgtttatttgggatagagcattgcagtgaaaatacatgccacatgccatagtagactgtgtggatattcgcatattcagggaggtaaaggaaggcaagggttttgtttatgttttattttttgagacggaggcttgctctgtcacccaggctggagtgcaatggcacaatctcggctcactgcaacctccacctctcaggtccaggcgattctcctgcttcagcctcccgagtagctgggattacaggcgcccaccaccacatctggctaatttttttttttttattttttaagtgaagttggggttccaccttgttggccaggctggtctagagctcttgacctcaggtgatctacccgcttttgccttccaaagtgctgggattacaggcgtgagccactgagccccgcctggcaaagg

SEQ ID NO: 183282 - DNA, 335 bp, Homo sapiens
  misc_feature (203)..(203): n is a, c, g, or t
  misc_feature (221)..(221): n is a, c, g, or t
  misc_feature (232)..(232): n is a, c, g, or t
  misc_feature (276)..(276): n is a, c, g, or t
  misc_feature (292)..(293): n is a, c, g, or t
tattgagtggtccatgtgatgatttaactctgtagaagttgtggatctgcgtgattctgcattgggagggatgaaagaaatgaaaagccatttgacaaggtgatagcaacctaaacaaacaggcttttaaagaaaaggatgtttatttgggatggtattgagtggccatgtgaaatggtgcagcatctttgtaaacagttggnctgttcctcaactaatcnacgtagagtgnccgtatgacccaataattctactcataggtataagaacaggcanatctacagaatgtaannagatcagtgattgcctaatgctgaataggcagaggggaccgg

SEQ ID NO: 183283 - DNA, 480 bp, Homo sapiens
agcatgttagacatactgttctcattttgctttatttaataatgcatcttggattttgttccattaccactgcagaacttcttcattcttttaacaagttgcacagtatattccatggagtaccataatatactgattcagtctcctattgatgacaattaagttgtttccagtcctctgctattataagtattgatgcaataactatacttatgtcagtcattttgctcaaatgaaaaacacaaatgtaggaaaattccttaagtggaattgcttagtcaaaggatacatgcatttaagttttttttatagattggccttcacagaagttgtatctaacaatttatcattccaccaaaaagtataaaaccaactgctttctcaaaccctttatagccagttttgatcaagcttctttatcttcaataatatgatatatcatgttttccatttaattttcatcaggagggaagtctgata

SEQ ID NO: 183284 - DNA, 435 bp, Homo sapiens
cagcttggggaggaggaggaagagggaggaacttcatcagcttaggaaagcagaggcttctataactgccagatgccttaggtgtcctccaactgccagtgcaggacagaagctggcttgaaggcagggggaaggttgggccctaacacaatgacttcagattcatgcagaacattgtcctggagctaaacctcaaagccactcttagccaacagccataacacagctttcttctagccttcccaggggaaggacttaagtgctgcttaccaactatcaaggaggactttacaatactgccagtaactagcgtgtatggaacatttgctttgtgcttggcacttgcctgggataattccttacagcaccctagtgtgaggttagtaatagtagtatccccactttacagatgacctggtcaagatttgaacccaa

SEQ ID NO: 183285 - DNA, 549 bp, Homo sapiens
ttcttcttttgatttggattttgaaggatgaattagtttactagccagagataagaaagaacactaaagaataaggtgcaacgtatactgaaaggcagggaaccatacaattcagttctggatttcaagatcttcaagtgctagaaaggggccattaaaaatgactgtggacagggagaaagggcctattaatacaaggccttgactttatcccgttgaagggttttaagcaggcaagttatataatcagatacgacttttagaaactcaacactagctgcagtgaaggatggtacagattggataagaatgtgtaggcaaagattactgtgacagtccaagtaagagacgaaattatgctattatgaactaaagtaaaacaactcagtcattatcttcctattactatgtagtaatgctcagttaaattcattttgtcatactaattttagctctgaagcacaactgctttaatagaaaatgaagccttcggccgggagcggtggctcacgcctgtaaatcccaacactttgggaggccgaggcaggt

SEQ ID NO: 183286 - DNA, 390 bp, Homo sapiens
atatttgaacaatgacagggaaactctctaaccctaagggtcatcataagcctatggtcttctatgtggggtcccagaatccacagaccagcttacctttcatgatgggggcatcacctagggacaggatgttggctccccttcatctgcacagcctgcagagggaagggagcagccacccaagctgagggaggtcaaccccatggtccagcctgttcccaaggagacaatccctccacggcagaatatgcaggtgcaggttgctggggtgacagcttaagggcccgagccttctctgcaggaggaaggggctggaggtttaggttccgggggcaggactggccgcagtcctagcaggggtgaccgaggctgggccaggctctgggagaa

SEQ ID NO: 183287 - DNA, 604 bp, Homo sapiens
ggcaccaccatgaccctgatctgcagcccacattcaacgtggttgtgaaatcttggtgggtggatgatggccccaggttccagggcaaagtagcatggtctgtgtctagtttaggaacaagtgaatgggaatcctgggcatatcgttatgtggatttgctacagacagttgggacagaccaggcggcccctgatttctgcccggattcccctgtgttaggagctctggagaataagactttaaccagagccaaagatgatcatgattaggaagggcaggcccagagtgcattccaaaggcaaatttaaaggaaactgttatctgccatttagatcatttacgtgtgtttccatgtcctacacctggggagttgaaaagccgcagaggcagaacactagtgtgaaaaacatgagtcttacagcctccacctgctgtcaccctacagagcatttgatgcctgctagagaagcttctctagtgatttgagacagtgtgggacacatacccgatgaggggaccattatactgtctgacttatggttctggtttttattttttgatagctctcaggaccaaccccaaacaagaaaatgttttttacatt

SEQ ID NO: 183288 - DNA, 367 bp, Homo sapiens
ctcactagggctgcggtatgcaaacgtgctgaggtgaccccagggcactgaggagcatttaaatattcaagagaaacaaggtgcatgtgccagacaccaaaagaactggttcgggtggctgctggaccacagcaaactgcacagcgtctcttctgtcggcatcacatacatacaaagctgggttttccgtaacgctgtaataaacaagcagtactctctgaaaatcaacatggacaagaagtcagggctcccagggtctgaggagctcggaaaggcccaagaggcacaactgtcccagcagacagcagctgtgattaagaataaaatgaaagcttcagttttccatcattttatgtgtactattttt

SEQ ID NO: 183289 - DNA, 234 bp, Homo sapiens
gtttctttaaaagaatagaaatgatcatttctgaacctcacaggcatggcaatgagtaaatgaggtcatctgtgtatgaaattcattggaaactgaatgttttaaattcaaggttaaggtgagaatgtaccatattattactagtatttaaaaggtaagaatgtggaatattattacaggtatttaaggggtaaagatatatttcaaaaaatattaattcacatacaactcttg

SEQ ID NO: 183290 - DNA, 421 bp, Homo sapiens
catctagttttccttttgtatatcttctccttcatgttcccaagcgaaatgtgaatttccatatattgaaaaaaaccctagaagaaaacctaggcaataccattcagcacataggcatgggcaaggacttcatgtctaaaacaccaaaagcaatggcaacaaaagctaaaattgacaaatgggatctaattaaactaaagagcttctgcacagcaaaagaaactaccatcacagtgaacaggcaacctacagaatgggagaaaatttttgcaatctactcatctgacaaagggctaatatccagaatctacaatgaactccaacaaaaaagaaaaaaacaaacaaccccatcaaaaagtgggcaaaggacatgaacagacacttctcaaaagaagacatttatgcagccaaaagacacatg

SEQ ID NO: 183291 - DNA, 282 bp, Homo sapiens
ctctgacaagagaggacccctgccccctgctccccggactacagcgaggcaggaaccacactcctcccaggtcctcactatggcaactgtggacccccgccctggtacccatggactaagacactgaaggaccgtgaccccaccacgccgtgaactccagcattggaggaccactgccttactgcggactcaggcactggactatcgcagggcaggatccctgtcccgccatgccctacactatggcacgggaggacccagcctcactgtgctctggactcc

SEQ ID NO: 183292 - DNA, 786 bp, Homo sapiens
cattgtttcctgtctgaacaatttcagttgcctcctaactcattttcttgcctctattctcccactcctataatctatcctctaccctgctgacagggtgatcttgtatcacacaatttcatcattaaccttctctacttaaaacctttcaatagctccctgaatgccacaagatgaagttaaaacttctttgcatggcaatcagggtccaacatgattgttccctgcctgcatctacagcatcgtttctctgtactcccctactacacataagtgatagtgttccccagctctgccatgctatttctagttaactgcctttgcccctgctggctcccttactgaatgttcttcctccctctgaccatctgggaaaatccttccattcccagcacggatttatcagctcttctgtgaaacttcctctgatcccccactccaagatatgttcagctgaacactcactgtgcctccatggttccttgaacatccttcagttacggcacttagcataatggtattaccccaacttgtttccctatctgcctctcctctagtgagcaacttgagaccatgttgtattcatctttgtattgtaaatgacaaagccaatgccttcacaacagcatattagggcccatgtgatcagacacccttgtctcccttacttcatctcctactagtctcatgcttacccactcagattctgccacacagacttccttgttgtcactcaaactttccagatacattcatgtccaaggcctttgcacttgatggttccac

SEQ ID NO: 183293 - DNA, 382 bp, Homo sapiens
ggctgagggaatgtgtactgactgtcgtggttgctcatggagttgaagcaggataaagaaggaagtaaagttatgaggggaatgagaggacagtgaaaggcagtaagatgacagtagactacagtaggtgtgaatgactgactgagttgggctactagagagactgagcacctagacagagagggagatcgtggtgggaaataacatgggacagctattctctattaagcaccaacattaaactagttacttcttttatatcacctcatttaattatcagaatgactctgaaagatgggcattattatccatccctattgaaaagatgaagaagttaaagctaaggttaaataacttgtccaagaccaaaaagctgctaagt

SEQ ID NO: 183294 - DNA, 123 bp, Homo sapiens
aaaccggtccgtgatgtatcgcccaacactatagtaaggccttaggttttcacttcctgtaggacaaaaatcttgtaaatctcttaacttttcttaactatttgttcagtgttggggataaat

SEQ ID NO: 183295 - DNA, 391 bp, Homo sapiens
agaggtgtgaaatatgtaggtagaatagacagactttggcgatggaatggatgtggataggagagaggtcggtgtccaggattatttgcagactttggctgatgtacctaggcaagcagtgggatcatttactgagaagataaaacactggattggctgtgggaagatcaaaagttcagttttgaaagtgttaagtgagagagacaagtggagatgtcaagtaagcaattgcatgtatcagtgtgaaactcagaaggaaggtcttccagcatctttccagcttaagaaggaatatctttttttgaaagaaaactttgaagttgaaacatgtttacattttcttgggtattttagcaacaaacctacctatttcacaatcgagttatcagaa

SEQ ID NO: 183296 - DNA, 254 bp, Homo sapiens
cccagcactccggctgctgccagtggaggcaggagcctcgttaccacctttctgagaaattcaagtgccacacagtggtcaccagcattgtagctgccctgatgttccgggctcagctgcaatatagcacatctctaccaccatccccagagtgacctccagaactgtaagggacccccgcctttggtacagagatgggagttaaacacaggtgtccactggagtcatgattcctctattccctggacaaatat

SEQ ID NO: 183297 - DNA, 171 bp, Homo sapiens
ctacaaaagccgctcgcaagagtgtgccctctactggaggggtgaagaaacctcatcgttacaggcctggtactgtggcgctccgtgaaattagatgttatcagaagtccactgaacttctgattcgctaacttcccttccagcgtctggtgcgagaaattgctcaggact

SEQ ID NO: 183298 - DNA, 438 bp, Homo sapiens
ctatgagcagtaaaccagttacacatttagatattatgctaacttaatagttgctttgcctgtatctacaaatatgtatctttgattctgaagtagaagtcttatgatacctgccctcttgacataagttactaaatccttggataggtgatcacttcaaaattttgtttcttcagtttttctatattttcttccttcctttccggtttcaatttgtgactttttgtacctttatttttattctctttctcaacatactcatttcccttctttattctcttatgtgccaattcacttactctttctgcttccaattttcttcctacttttgttctttttaaattttctcctatttatctctctctaaactgcatcttcattctgtatctgttattatttgtgttactcattctctcactttttctctctaggccttta

SEQ ID NO: 183299 - DNA, 369 bp, Homo sapiens
gatgtgtaagagcatacctgttgtaaggaattataattttaaaatcattctaaagaagcaccattgtttctaaggtgatttctactgaacaagcagttcaaacaaagtagacagggaagagaaatggctatcagtgatgtatggctcaacaggtaaaacttcctgccttctaaaatggctctacttgtaagattctgaagattccattagaaatacttgtatttaaagggtaataatgtgggaaaatgaatatgttgatttgcttgattataagaaccacttcactagaaataattatatcaaaacataatgttgtactccttaatgtaggtgaagaaaactaaaataaacaaaaaaaatctaggaata

SEQ ID NO: 183300 - DNA, 408 bp, Homo sapiens
cacctcggcctccctgagtgctgggattataggcgtgagccactgcacctggcctcatttccttcttttcagtggataggacatcacaataatccagaaaatactaagtcatctagaaaagtatttcccattttgtatacttgttttacttgtttccctgttcaaagttgcaaagagatattccattactccttgcataacttattgtgtaataaggtcaatttcagcttttcagaatagtgaaatagctctgtttttatcttcctatggaaacagtaagcaagtagttctgtcttcggtttcagtttcaggattgcagcaatctcttttcacggttatatttctaattttctattatgttctttgttatgttgattagtgacccaaatctgttgatttgagataagt

SEQ ID NO: 183301 - DNA, 486 bp, Homo sapiens
gggtttgtgggtgtttgcacagaaatgacatttcacatccgaattttatgtcagaagcctaaaagtacagaattcagctgggcgcagtggctcacgcctgtaatcttgtcactttgggaggcccaggcaggaggattgcttgaggccaggaattggagaccaccctgggcaacacagcgatactccatctctagaaaaacattttttaggccggtgcagtggcacttgtaatcctagcactttaggaggttgaggtgggtggattgcttgagtccaggagttcaagaccagcctgggcaccatggcaaaatcccactggtttctacaaaagatggaaaaaattagccaggtatggtggtgtgtgccatgtagtcccagctactcaggtggctgaggtgggatgatcagctgagctttggaggttgaggttgcagggagccaaaatctactgcctttcagcctgggtgacacagtgagaccctgtct

SEQ ID NO: 183302 - DNA, 274 bp, Homo sapiens
agaggagaactgggtagcggggggacagggaagagaagactttttactctatacctttaatacattttgaattttgtactatatggatgtattacctactccaataatagcgactaagaaagtgaaaagcacaacataccaagaattgtgataaatgctaagaaggagaaatatagaacagttagaacaaacaatggggagccaatctagacttgtttggacagggaaatttttcctgggtaagagatgtttaaaatgagacctaaagggtaag

SEQ ID NO: 183303 - DNA, 345 bp, Homo sapiens
cagtaagagattggcaagagcagccctgctgatgagcctgtcacagaggtaccatgataatcctggaccagtgagttatctttgtagcacaaagaaggttggaggcacagattgctgtggactgaagtaggaggggagggagatgctctcgtaatctcatgttgcctgagtcagctttgccttgctattggcggatggggctggtggcctgtcatgtgtgcagatgagtcagaggaagtgggccctccctggctggtggcttgccccatgccttggggcatagctaagcagttgcatgtctactaaacagtcttatctggaagcaaatatggaaccaaacacctg

SEQ ID NO: 183304 - DNA, 194 bp, Homo sapiens
tgggtgacagagcaagactccatctcaaaaaaacaaagtcttttgcggtctttgattgattaataaatttgagagaagcagataactgagagagaaagagaaagagagcataaactaacaataaaatatcccctcagtctaaacaaactcaacattgatacagaacttttgattttggccaagtgttgaccaat

SEQ ID NO: 183305 - DNA, 355 bp, Homo sapiens
ctcccctaccccacaacccctgctttcttattacaaacttttgtgtctgacttcaccaaagtatgagctttttactcatttctcaacgtattgcaaacatggaggccaaaaccctcttttgattaacgtaacctcttttcaagatttccaatattcgagcttcctcctctctaacctgatcaaactctatttacatcttctttcctagttgatctgattacagtagagacttaatttttaaaaattatgtctgagtaaaactagtgttatctatcagtaggcattataatacaaaagtgctgggaagcactttaaataatgccgaagggaggaagggaagtgctgggtagaggag

SEQ ID NO: 183306 - DNA, 309 bp, Homo sapiens
aatgagaggacatttgcagagttaaaatggaatccggttgcattataatgctaataaggacaacgttatttgacaattctctaaaacagacaaagctgataaatggacaatttctagcatcaaatgttatctggttatctaagaacttgatgggatttttaaaatgagtttatcatatctttatgttagagggtctcaatgattttcaagttggattttcaaatacctgcatagttttaacaacactgaccccactgatcacagctttcctggtaacaatgataattaccatatattgagtgtaaacct

SEQ ID NO: 183307 - DNA, 184 bp, Homo sapiens
attacaggtgtgagccaccgctcctggccagagtgacactattctgatggcatgcttgtgataaacttcagtaaaaaacatatcttagggaaaaagaggcttggatttgagaaagttgagtaagaatttgaacatatttaacatgtttgcttatagtgttcaataaagttgggagcggtagtaa

SEQ ID NO: 183308 - DNA, 536 bp, Homo sapiens
cgcacgtccccctcaacctgaaatcaaagtgaaaaaagtaggctgggggcggtgattcataatcccagccctttgggaggccaaggcgggtggatcacctgaggcaaggagttccagactaccctgatcaacatgctgaaaccccgtcactactaaaaatacaaaagtagcagggcatggcagcgcacacctataatcccagctacctgacaggctgaggtgggagaatcccttgaatgcgggagacagagattgcagtgagccgagatcgcgccattgcactccagcctgggagacaagagcaaaagtccatctcaaaaaaaaaaaaaaaacgctacatgactacatgtaacagctactgggaacattttattgaaattttttaagccctttaaaatgttagggtagtgtcttaggaaatcagggatttccaaaggcaggacttcacgacgccaacttgagtgtgagaaggattcctttctacgtagaaggtgcatgcctgctctaggcttccacaaatccccgaaacctaataa

SEQ ID NO: 183309 - DNA, 404 bp, Homo sapiens
gaatagggactgttggaggagctaggatgctaaatggaaaactttacattgcattggtaacttaagtaaagcagagatgctgacccattttttaaacattccaaataaccaaggttttgctttaagagattctggttaaattgcatttagtgtcatcaaaagcggtagcttgattgaggtgaagatgtagtctgtgccaaggatgataagaagaaaagcaaggaaatagatggttgaagatagagagtagtgtgaagtcgttcttttagtaataacttgatggattgctatgtaagattacagacagttccatgaacaggatgaagtctttgatttgtgtatgtgtgtgtgtgtgcttgtttgagtacctttccttgtgaactcagcaggagacagtaaataca

SEQ ID NO: 183310 - DNA, 794 bp, Homo sapiens
ggccttcagcctccacttcctgccaaagtcaacaaggaacggccactcgtggctccccagtggtttgctgggacgtttaaatagcttgacagaattatctgattcactcaaaaatatgctaagagggcctgacttcatgaccaaatttatttaccctggctcagagaagacgccgaatagggtattttttttcccagccttgtgcgaggtatgaagccctcagtctgccaggctagtgaggttttatattaatttttataggttccagttgaagcaaaaatatttgatttaggaatcatttgcatgactcagaggaggagctccagaagatcttttttgccttttaaagggttcaggtagagcagcatagcctcaggcgtcatgtctgctgtggagagagttgtgttctgtttaatttcaccagctgtgaaggtggcaaatgtgaatttatggtggagtgagacaggaaaaacaaacttttgaaaacacatgttttttccccttcatatctggttcatcttaatcctgcaatgctgttaatctctgggatttgcaactgagaagattcagaaactccaaaaaagacaaagcaccaccgacgagcaacagcgccgcaacagcaagcaccacacgccacaacgcgagcaacacaagcgagacaccaacaacatcaggcgccaccgcacagcgaaaacaaccaacaaactggggggcgcaccccaagacaagcgatcacgtaaagcgaaggaggaatagggtggtcccaccaaaaacggggggcggggcacacacgc

SEQ ID NO: 183311 - DNA, 523 bp, Homo sapiens
gactggaccctttgaacacctctttagctgagcttctaggtcagccagcaggagagaaggaaagagggctttgagaggagagaggagcagctcgacaagaggagtgaaggcccctatcagctggctgctgagctccagtgtcaactggttgcagggatgacctacagggagggatttaatgaggagctgaagttgctggagcaaagttggaagatgctgcaccctttaaggcaagtgggcttccagtgacaaaggtgatggatgatgtcatggtgagtcaatcattactgatcatttgagttggccattattttaacagattggcaaataggtcatgggaatagggttcatgaagttggggttatttcttctgtgaaaatagcctggttaagaagagtggaggtgcaaataaaccttcacaatgagaatgcgtatgcatcggccattcctggtactggtaagctaaaccatgttttgagtaaaaaacattgtgtcactgatacccacatctgccaaggagaac

SEQ ID NO: 183312 - DNA, 221 bp, Homo sapiens
gatcccagggaatttacaatggagggcatattatcagtttctattggcaccataattctgcacaacaacgaactgaacctcaatgtggcaaacaaaaatacacatatttaagttcatgaatctgcagagttcagctgatctgggcaggcttgactgacctcactcaaggcttgcacacctgtctggtcaatctacagtggcttcagttggaatgactagga

SEQ ID NO: 183313 - DNA, 308 bp, Homo sapiens
tgtttcactatttcccaacagaactctcactcgatggcatcaattacaagaggaaaagatggttaatcactatctaaacttaaaacatctgtttaaaagtttttattacaagagctatccaaaaactgttagggcacagaaggaaaactagaaaatcactgaggaccgggaccgaatcttacctaccttggcagccctatggcacttagcgcaatccctgcatctaacagctccataatacagttgttaatggtttcacttagtgtaggaagtggatttttattttatctgtattaatttttttcaat

SEQ ID NO: 183314 - DNA, 454 bp, Homo sapiens
ctgacatggagaaggcaggaggaagggagaagcatttggagatggaggtcaagagtactgtgcaggcgtaaattagggatgtctattagatgttcaagtggagatgttgtataggccattgggatgacccaactgtagttaatttggttgaatgaatatgaataaatacatgctcagcagcaatatcattagaaatcttgaagtcaggagttgatgtgattatgttgcctttctctctagtttaaactttctatcaggtagacatcattttggtggcctgtgaactttgtcttttttcccacagttgcaggagagtggtagaaagcccgatgtgtcttctgtgccagtgctacagtgagacaggtccaggcctggagatcacactgtgggaaataggccagtttggccatggagtaaatggcaattagtttattttagtccatttctctccaat

SEQ ID NO: 183315 - DNA, 711 bp, Homo sapiens
gtggggagaggctggaggtgaggctgctgtgctaggagcttaaccaccagtgaagggttgaagaaaggaggtgggggcagggggaatgactgagtgggcaatgacagaggcactcacgtgactggccaagacttgtctgcaggagaccagggagctatagccaggcagctgcagggccattgatagaagctgccatggcttgagcacttgctctatgcatactcacgcaagcgcattcgtatatgatctcgctcatccctcacactgaggtcatttgtgggatgcaaatggccagccttatgcttctgccccatccacacaggtcaggggccatactctgtgccactgccagggggatcctttcataacctgcatcagatcatttcgctcctctgcttgaagctctcccaaggtttccttcttgcccagagtaaaaagccaaagtcctataaggccctgcatatctggctctagccatctctgtgtccccttctcttacactcccttcctccttccctccctctgcttcatccacacaggaccccttgtcattcttcaaactcttgctttagggcctttgctcttctccttcttccgggaacattcttccccagatgtgagttcttcttattagaaaggtcttccttcatcacctgagtaagacactaataacccgggccagcgcattccattttccctcactctgtgtta

SEQ ID NO: 183316 - DNA, 431 bp, Homo sapiens
gcgcctgccagagaggagcaactggctggttcccgcattcgtttgctctgattcccacactcactcactcgcttgcacactgcctcttgcaaggggtttgagtgtgtggtggccgagtaaacgagccacgctccgagccatgagggggtcaagggaattatccagtctcatctcaatccgacttccctcttcactgttttacttttgtaaaacccttgatgaacttcccattgtcaattcagggtctttttagctctcatcctgccagactgttgataacacctctgatttgtgctccacttttggcttctgtgtcatattgattcctgagttttcttccttctcctctattctcttaatctcgttttctggttttctcccatcacctgctggttaagcttaggggttatttacacttctctccttggtca

SEQ ID NO: 183317 - DNA, 475 bp, Homo sapiens
ggcaattataagagctataaatatttgtgtacaggtttaagcaagtgctttttgaatgaacaggtgaataaatgatcagtataatttcaaccatgtggttttatggactgctatacataagcaaaatttgtgataagcctcattggaggcacatagagaaatggacatatacataatatttatatatattttatggatacacaaagattatatataatgaatagttctaaaatagacatacaaacaatgtttttttcagatttcaaaaatggtggggttacttctggctagttgtggatgtgggtaaggtatcatcaacattatttggattctgaaatcaaacaattacttcccaaactcagaggcttgacactacaaaccaaagaaatgcatgaacctgcccaaagatttgtttattttgttatttatatagaattaattgactatttttaaaatgcttccaagaggtccaaaa

SEQ ID NO: 183318 - DNA, 394 bp, Homo sapiens
gtgagaaggaccgtctttggagtggtaaggactgtgttttcaagaaatctggcaaagggaagaaaaaggtcacaggatatttgactatgattataaagagaaagtgaagacacggcagagagaaatacctgatgaacataggtcccaaagaggcctgagaagccaagaataaagaagttatctggagcagggcatttcctaacatatctgagctggaagcaaaagtgaacaaggggagtgaaaaatatggagatttttcaggtagagaacgggcaagcagaggcaagttatgtcagagattttactttctttgtaaagtgtgagccaactttgagttaattccaaggcctgggaatcaaatacattagaaaagtttgaaattggcagattggag

SEQ ID NO: 183319 - DNA, 240 bp, Homo sapiens
accatgccgggaatcctcaagagataagcagcaggccttcaaccatggtatcggacgtggatatctacaagtgaacaaggggagtgaaaaatatggagatttttcaggtagagaacgggcaagcagaggcaagttatgtcagagattttactttctttgtaaagtgtgagccaactttgagttaattccaaggcctgggaatcaaatacattagaaaagtttgaaattggcagattggag

SEQ ID NO: 183320 - DNA, 520 bp, Homo sapiens
ggcttcagcaattattgagaaattcatcctcatcatattaaggggaagcattttcccctcacttggagtcataaggaaatcttgaggagcttgtccaatccaataaaaccaggccagggcctctgagtctcctgggacttatagtgaattgctttctgtgcagcctgtttgcatccaggtttatggggacctttgccaagtatcctaagtgtgagcacctggttccacccactctaagcatgtcacacatccatcttcccagttgtgggtcacttcttgcaaatggaatacaggtcttcccaatttgaagagcaccatcgccaccactgacaccaaaactgccaccctcttcttggctctgggaagtcatccactcccctcttcctgcgcaattaggaacttcctcctttccccttctggaggtaagtccagacgtcttttccagatacctttaccttctaaccccaatttagggagagagtcttcagagtggcctctgtagcatggggataccattaac

SEQ ID NO: 183321 - DNA, 291 bp, Homo sapiens
gggctgttggggacatgacagagtagccctgtccaagggagacatactactcggtatgtatttctaatttaatatagccctatattttcttaaaagaatccaccaaaatgacatttcagaagacacaaaaaaactaaggagaaaaactgcttgtgacagaaagtccagagttcaaagagctaaagtatatagtggtattcagagaactaaaccctaatgaagtcaaactctcaaacaatcttactataaaatacagaagcatgtgtggtaaattagaaatacataccgagt

SEQ ID NO: 183322 - DNA, 171 bp, Homo sapiens
tcggcttctgcagttatgcatgtgtgtagagaggacacagggtcgtatgttacagatgtatccagccgagccaatcctgggctgcagagacacatccacatgcaacatgtgcctccctgtgggtaaccgggacaggtgcacgggatgtgttagccaccaggagagaagaga

SEQ ID NO: 183323 - DNA, 457 bp, Homo sapiens
ctactctggcaaggaccagggttaccttcagacatacctattgaacctactcctatgtatggacactatactccacccaaaaagaggataattgtgactgaaacggacaactcaagatgtgactcttaaaaagctgcaagatatctattgagcacttactgtgtacacagcagcatgctaaactgtatttggtatctcatatttaaaaatgtaactgatgactaaatgcctgtgtaaatgtctcttacacaaaagagaggtgtctatgaaactatgaatttcaaatgttatttcaagggcagtagaggaaactgatattttagaaatccaggatatagaaatcctcttgcaaaatgaagagcttatataatgccagtaattgccctctgatttatctgatttgtccatgatgaaaataatacagtaattgtagaaaatatatcatttgtttattttt

SEQ ID NO: 183324 - DNA, 804 bp, Homo sapiens
caaggtgataaatggaaactgacactcagctctaacgtcaaggagacagtctgcagtgatgaggactggggaaattggagagttcatgctgtaactgaaatcagtagtcagaagctatttttatagtggcgattgtattgtacagtgtcaccatgatgtatattgttataatttacatatatattatctgttggattgtatcaataggaattttcatttcctgatattcattaagcatccttgaaatttgccccaaagtgttactgattcaaataatcaccctttccaccaaaaaaaaccctggtttcctgttaacagtgaaggaattttagggcttgatggggtgttatgttccttggtacagacagctgtggaagacttgagttctatgttgaaactggttttaacttgtaatggtgtggctgatgttacccgaccaacaccagatttcatttcagttaattaaataagtacttaatgagaggaagaaagaactgagcagtgttttatttaggacttggagaacatgggtgagtaaacagtaacaatgtcctaaatgggaaaggtgttctaatttcccaaaagtcttcttgtaattatatttgagacatcttacaatagtatctggctattaaggcagaatgtatttgcagatttaaatattttgcaactgcccaaagatatccattagtgtgggggataacatcacgcaccaaatgtaacaagtaaagaaagagaacagaaacatgaaaagtggctcaacagtcaaagacaagtttaacttctggagaataaacctgagag

SEQ ID NO: 183325 - DNA, 260 bp, Homo sapiens
caccttataagatcccaggcccacttcagtgcatgcaggcccccagatattccagtggaaggaggaaaccctctcaaacattcccagtcatgaagctgctcaccacacacctcaaacctacagagatccctcaatatcgccacagatgtcccaagtacaatgccccaaacatgctcagagcccccacatatgtgtctctggacactacaaccaaatctatagagacgttctgatattctaaccttaggaggcccttccaa

SEQ ID NO: 183326 - DNA, 264 bp, Homo sapiens
atactcaaacttaccaactgtggccactcttggcctagtcaaagacaaaatatatattcattttaaggatacaaaagctccagtttgggaaatcctagaccttccatggaaccagatgtatttctcttataataacagtaacgaggctgggtgcagtggctcacgtgtgtaatcccagcactttgggaggccaaggcaggtggatcatccgaggtcaggagttcaaaaccagcctggccaacatggtgaaatcccatctctatt

SEQ ID NO: 183327 - DNA, 557 bp, Homo sapiens
accaggatcttaggactggggagaacggtgggggcagagagcctgcagttggtgggcccaacctgtagatgagaggctgaccccaaggcagggcaatccagggccgtgacctgcagagaatgcggcgtatttgggaacaaagaccctcagtggagactggcagtgggaccctggcttcatgctccgcgttcctcacctgagtccccacctcctggtctcggacctccacctgtccccagaggctgttcagcactgagggggcaccgccaccctgcgttggccagatgcgcccagcttccccggcagctctcagggcggcctcacccatgcacacggttctagcggccatgtgtatcacaccacacgatgggacacaggccctggggcgtgctcaggcctttgggggccgcgcagacctcctcttgccctgtttgtgcctgatttctccatcagaaactaatgacacagccagattcccccggcatggtgccttccttatctgtcgcgagtgctgacagaggaccaccaagttgggcagcaggaattggagcgggcgg

SEQ ID NO: 183328 - DNA, 301 bp, Homo sapiens
gtctatagtctgaaaattcctgcttttgtgcctctgcttaactccttgcctgaaacactattttcttctctctccacctatccaatttccatttcctttgaggaccagctcaagcccctaattctttcacaaagctgggaaagcttgtctaccacagcccatagttatccttttctcctcacaaatccaaaagcactttcatgtggtcatttggttttaatactattgattagatacaatgaacacactactcaaatgcttatcttttttcctcttcagttatccttgaggaatagcttaa

SEQ ID NO: 183329 - DNA, 425 bp, Homo sapiens
accccctctatcatgcagaatgagttttcttctcaccacatgctcaccagcattcagtgctatcattgttaataatttaacaaattgactgggtgtggtggctcacacctgtaataccagcactgtgggaggctgaggcaggagattgtttgagcccaggagttttgagaccagcctgggcaacatagtgaaatctcatctctacaaaaataaaataaaataaaataagctaggatggtgacgcacgcctcagctactcaggaggctgagttgggaggactacctgagcacaggatgtcaaggctgcagtgagctgagaaggcaccactgcactttggcctgggcaacagagtaagatatgtcttcaaaaaacagtaagtaaaaaattagctgtgcatgataggagggggggggtaccgagctcg

SEQ ID NO: 183330 - DNA, 219 bp, Homo sapiens
tatctcagtgtctagttacttataacactgagttagtttggatgcccacagccatcatgtcctggtgattgaatggtgttccttttactctctttgagtcctatagtcatagcccttggaaggcaaaagtcacctcagagtttatgtagcccagtgacctcatgttacagatgaaggcttttggccttaggttaaatgagttgctgcctagtcgtgaac

SEQ ID NO: 183331 - DNA, 410 bp, Homo sapiens
gaataaccttgaagaagactcccttgcaatgagcaacaacagaagaagcaagggacctggaatctggcagacctgggtttgaattctggctctgtcactttctggtgaagtgacttgagtaatgaacatgagcctttctgggtagcgtttacagctcccggagcctccatctccctgagttcaggtatcttcccacctcagcctcctgagtaactgggactattttgggactacagggaaaaatttcaaaacactttgcaactttggggtaaaagttaaataaaacactgtagccccaagttaagttcccactgaaatgatacttttgctcctttttttaaaaaaaattccataaatagtaaataatgactgttttgagattaatttagaaacaatccctatttaagagc

SEQ ID NO: 183332 - DNA, 1462 bp, Homo sapiens
caccacgcctggctaatttttgtatttttagtagagacagggtttcaccatgttgaccacactggtcttgaacttctaaccatgtgatctgcctgcctcggcctcccaaagtgctgggattacaggcttgagccaccacgcccagcctaagattttatgattaaaaaaaattcaagctcaatacccacataaattataacgtttctcaggaagtagtcccttaaccaaaacgtctctgagaagtgatgcttaggtaatctctgggatccgattttcccacatgtctcactccacagtatgctaaagaagaaaaagtgagtgggcacaacactttgaccctctggctaagccctgggagtccctgacaggtccagaaacttctctgacacccattcaccagggtgctgagataggagaaagtgctcatttataatgtgtattctgtgcagctgttctcagacaagaccggatcttgtcatcttaccttttgctttacaaaaaaggcctgttgaagtcaatgctgtcttgccccttgctgtttcagcaggttagactttggtcttcactgcttatagctgcattggaggccaacgtagctgatgctcagggtcaggcctcgccccttcgccgcaggtctcaggatcggggataacatcgctcccaccctgctcatttagagatgggaaacaagcaagagcttgacttgcctcccatccctcagcctgtctgtggcagagcctgcaccaaaacccagagcttcttccctccgtgagggccacgctgtcaccacagtcctcccagatgggttttggattagcatcagtcctgtgtcaccaagtgccaaacagctgaggggtagaagtgggactcctttcccgagccccagcatgaggctgtggtgtcaggtttaggcctctctcaagtcagaaaaccccgggctgagacctccacagacaagggctccccatgctggccattggcaggggcccaagaagttcagtgaccaactggtccttccacaccacaccagctggtgctgcccatgtctgtcgaatcataacggaaaattccccagatcacgtttggatttaaaaactcatcccttgtcgtgcttcaatgcatgccatttgtcacttaccatacttcaccatggccgagcttcatgtcacatggcctggcgattgtgcttgttcacactggggccaggattttcatactaaaacgtcactgacaatggggctacttttctcctgaatagctcctctgggcttgttgcagttctagttttcccagtagttccatggcaggttcaacctctcagtgtcctgaaaaatggaaccacccactaaccatatgcactggctgccaggtggctgcactccggggatcacgtttcagtactgagttccttcacgcacttggttcaccaccatcactcttgagttttggacaaaagaggtgg

SEQ ID NO: 183333 - DNA, 413 bp, Homo sapiens
gggctgggggtaaaggagggcagatttgggaaaagagtcctggccctcggatcagccaccgatagctccttaggggagaggatcctggttgtgggaggaagtcaagattgacctcaggtgtggccatttgggaagaagatggggagaagttttcacagaggtgggcagcaccagctggtgtggtgtggaaggaccagttgctcactgaactcctctgggcttgttgcagttctagttttcccagtagttccatggcaggttcaacctctcagtgtcctgaaaaatggaaccacccactaaccatatgcactggctgccaggtggctgcactccggggatcacgtttcagtactgagttccttcacgcacttggttcaccaccatcactcttgagttttggacaaaagaggtgg

SEQ ID NO: 183334 - DNA, 619 bp, Homo sapiens
  misc_feature (589)..(589): n is a, c, g, or t
  misc_feature (591)..(591): n is a, c, g, or t
tggaattacaggcgcgcgccaacacgtccggctaattttcgtatttgtagtagagacgggggtttcgccaccttggccaggctggtctagaactcctgaccttaggtgatccacccgcctcggcctcctaaagtgctgggattacaggcgtgagccaccgcccctcacgcctggctagtttgtccttttcatggggactttttattgtacgcgggttactctgaaaaagatcgcgattcgtcccctcgccctgcaggcgccgctgccgcctcgcctcgggcgtggaccctgcggctcgggcctgcgcgtgtgcaccccgaggttgtctcacttcctgttcagggcgaccagcgctgcgccctccccactccacagatgaggaagctgaggttaaagtcacttgccccaggtcactccgcaagttgaagcgcaaccaggatactctggaacaggatgcctgacttcagaggagaggcgcgtaaccaccaggcaactggccccacgaaaacaagtcccgcaacttcccttctttggctcctacttgctcccggaagaaaagccttaaacgacagcagatcaggagcacgcngngcgcacgccggggggcaggaggagaggg

SEQ ID NO: 183335 - DNA, 1454 bp, Homo sapiens
tggaattacaggcgcgcgccaacacgtccggctaattttcgtatttgtagtagagacgggggtttcgccaccttggccaggctggtctagaactcctgaccttaggtgatccacccgcctcggcctcctaaagtgctgggattacaggcgtgagccaccgcccctcacgcctggctagtttgtccttttcatggggactttttattgtacgcgggttactctgaaaaagatcgcgattcgtcccctcgccctgcaggcgccgctgccgcctcgcctcgggcgtggaccctgcggctcgggcctgcgcgtgtgcaccccgaggttgtctcacttcctgttcagggcgaccagcgctgcgccctccccactccacagatgaggaagctgaggttaaagtcacttgccccaggtcactccgcaagttgaagcgcaaccaggatactctggaacaggatgcctgacttcagaggagaggcgcgtaaccaccaggcaactggccccacgaaaacaagtcccgcaacttcccttctttggctcctacttgctcccggaagaaaagccttaaacggtattcaagccctttaggatctgatgtcctaggactccactctgggcttccagcctggggtggtactggtccctaggcatggaagctcctcccactgccccttccttcacccggccacctcctcccacaggtgtcttcctggtactcttgcacaggcccgagtcccttaccaccacggccttagcctgctctcgtgctctcagtaatgttttctccatttgctgcctttcattctttccagagattcttgctcaacccaaccaggccagcccggggactagggacatgtagggacaatagtccctgcttcaggcagttcagggcagaccacagagatgtgacattacagaccattgtgagcagaggccttgtcccattctgtgttgcatccctaagccaggaacaaagtccagcccaggcctggctccaggggacacgcagtagtatcctctggcctgtgcaagtgtatctgtagcctcacatgccaccatgtgagtctgcaatctgtctgtgaatgccctggtgtagaagccaggagtttggaggtgggagggagccctacagaatgatagccagtgctaactcctgggaatgtccagccactaagacctgcccacagccctgccatgccaatgtcctccttttcacgggagcagcttgcacagactttcagcgcacagctggcattgtcttcccaggagccatcctgtaacccaggccaggtgaagggctcctccctgggaccccacagccccgttcccatcatccttttgtggtgatcaaggcacccatcacacagtattgccataaaccgggtcaggttaacctttcattcccttaggagctgggtgggggcagccaaaagtatttgtaggaggaagagaga

SEQ ID NO: 183336 - DNA, 1232 bp, Homo sapiens
cattccaggttgactccaccagcgagaatcacaggcgccgctgccgcctcgcctcgggcgtggaccctgcggctcgggcctgcgcgtgtgcaccccgaggttgtctcacttcctgttcagggcgaccagcgctgcgccctccccactccacagatgaggaagctgaggttaaagtcacttgccccaggtcactccgcaagttgaagcgcaaccaggatactctggaacaggatgcctgacttcagaggagaggcgcgtaaccaccaggcaactggccccacgaaaacaagtcccgcaacttcccttctttggctcctacttgctcccggaagaaaagccttaaacggtattcaagccctttaggatctgatgtcctaggactccactctgggcttccagcctggggtggtactggtccctaggcatggaagctcctcccactgccccttccttcacccggccacctcctcccacaggtgtcttcctggtactcttgcacaggcccgagtcccttaccaccacggccttagcctgctctcgtgctctcagtaatgttttctccatttgctgcctttcattctttccagagattcttgctcaacccaaccaggccagcccggggactagggacatgtagggacaatagtccctgcttcaggcagttcagggcagaccacagagatgtgacattacagaccattgtgagcagaggccttgtcccattctgtgttgcatccctaagccaggaacaaagtccagcccaggcctggctccaggggacacgcagtagtatcctctggcctgtgcaagtgtatctgtagcctcacatgccaccatgtgagtctgcaatctgtctgtgaatgccctggtgtagaagccaggagtttggaggtgggagggagccctacagaatgatagccagtgctaactcctgggaatgtccagccactaagacctgcccacagccctgccatgccaatgtcctccttttcacgggagcagcttgcacagactttcagcgcacagctggcattgtcttcccaggagccatcctgtaacccaggccaggtgaagggctcctccctgggaccccacagccccgttcccatcatccttttgtggtgatcaaggcacccatcacacagtattgccataaaccgggtcaggttaacctttcattcccttaggagctgggtgggggcagccaaaagtatttgtaggaggaagagaga

SEQ ID NO: 183337 - DNA, 406 bp, Homo sapiens
taataattccatctttcaaccctcactcctgttttcttctggttcctcaattatgttttcttcagcgtcagttaaaaaactttcttgtcatgcttcacattttccttagatggtaggtgatttttggatgcctttttatattaatgatgagacatttgggaggtttattcattaatacgcttctcctttatgtgagtagatagggagctggctcttacacttgagggtttttcattttttaaaatacagataaagcagactttaaaggataaaggtggtggttatcagtgttgattaatcaagttgggctcaaggatttcacaggtcttaaatgccatcacacagactgccatgccaagggcattctgaatgccaattacagattgaagttccttcagaaaccaag

SEQ ID NO: 183338 - DNA, 645 bp, Homo sapiens
ttaccagtaagcacaacaaataaaacagtgaagtcattcgtaggaagatgtgagaaagtgtttaaaacacaacttttgagagttagaaagacctagaaagagtatcactggttcccttggggatttcaccagtccttagctacaacacagtcagttgtatagagctttcggatgtgcgtatatgtacaatttcgaaaaagttcaattggttcaattgcagaaagctgccccaatctgcacatgggccaatttccatttggtgctgaaacagttttatagaaattgcaataatgtagcccactcgctgcatggacagaagctgcctatttcaagttaggtgttcattcaattttcttgtcctttatttctatatttagtttattcccttccaaagatgtgtaacgataagaaagagagaagaagtaaggaaggaagatattttcttttctctatatgtgtgttttatcaacacagcctcagcttgagatctcttgggaaaagcatttcaagacaggcagaatgatgtccttcctgccacaacataattttccagttgccaggggaaaactacatattgtacccaaaacaacaaccgagagaacagataataatcactccctaagagcacttgcttcagcttctctc

SEQ ID NO: 183339 - DNA, 202 bp, Homo sapiens
tttaaaggcagagccccagcctcagagacaaataggtttcatcatggaaacttttgagcagaacattgagtttgagaatcctgaaattgagcctatgagaaagagactcattttttaagaatgttttccaagtgacattttcagtgataatggaggtttccctgtgaagcatccccagcagatccttgttttgcccaaaaaa

SEQ ID NO: 183340 - DNA, 383 bp, Homo sapiens
cagtgagtaaattccaagttgtagctctttaccttggcttgaagtgattctgtggggtcttggtgtggcttctggttatcatggatacatttcctgtattctatgtagaattctattacagagtatagctaggtgacttggctttttcctttctttgtgaagcaaggcatggtgcagaatagtccattccaaatcaagctctattttttgcttgtaagaaattgttttaatgacttctgattaaatgtgttttcagtgaggttgaccttgtctctcattacagaatcatgtctttctcgactgtcttgattgaactttacataataaccggtggaagaaaaataagttagtagaacccaaatattcagtcttgggcatgcaca

SEQ ID NO: 183341 - DNA, 236 bp, Homo sapiens
tgagtaacgagagaaattagaaaggcatcattcatttaacaaagatggaaattcacatcaaacgttccttgaccaggcagctattccctgctattcccttagaacctttgttttaaagaaggaccctgaaatgtcactgcttccaccaaagtctatgaaaaggttactgaactgaagataagggtgcatggctgggtccaagtgggttctcacgctgatttctctcggtacaactt

SEQ ID NO: 183342 - DNA, 151 bp, Homo sapiens
ccagaaatatgccaatgatgaaatgttcaaaagaaagataatttgctatgttggaagcaccattaaataagtatgacccattaacacactttcttgtcctctaacttgcagccagatttaaagggccttgactctctcctctaggccctga

SEQ ID NO: 183343 - DNA, 302 bp, Homo sapiens
tggcacgaacaggactgagtagggacaggtatagccccaccattccggtcttgggtgcgtgccgcggttccactgtgcacggattggaacccggctgtttaggccaggcttgtgctgagaagtttaggtgggaaaagtgtcagcacagtgctgggaccgaacatcattttaaaaatggacttctatgtgtctttgtggaattatgcgagcaccatgttttgttccagaaattatatttccccagagttgcttgtttgcgtttaaggggatcctcatttacagagacttgtgttcgatcctat

SEQ ID NO: 183344 - DNA, 983 bp, Homo sapiens
  misc_feature (793)..(793): n is a, c, g, or t
  misc_feature (824)..(824): n is a, c, g, or t
agcgggcgcgcaagagaggcggggcagcgctcggcatggcggagccagatctggagtgcgagcagatccgtctgaagtgtattcctgggacgatgccggagtgtgaaggagtttgagaagctgaaccgcattggagagggtacctacggcattgtgtatcgggcccgggacacccagacagatgagattgtcgcactgaagaaggtgcggatggacaaggagaaggatggcatccccatcagcagcttgcgggagatcacgctgctgctccgcctgcgtcatccgaacatcgtggagctgaaggaggtggttgtggggaaccacctggagagcatcttcctggtgatgggttactgtgagcaggacctggccagcctcctggagaatatgccaacacccttctcggaggctcaggtcaagtgcatcgtgctgcaggtgctccggggcctccagtatctgcacaggaacttcattatccacagggacctgaaggtttccaacttgctcatgaccgacaagggttgtgtgaagacagcggatttcggcctggcccgggcctatggtgtcccagtaaagccaatgacccccaaggtggtcactctctggtaccgagcccctgaactgctgttgggaaccaccacgcagaccaccagcatcgacatgtgggctgtgggctgcatactggccgagctgctggcgcacaggcctcttctccccggcacttccgagatccaccagatcgacttgatcgtgcagctgctgggcacgcccagtgagaacatctggccggggnttaccaagctgcactggtcggccagtacagnctccgggaagcagcctacaacaacctgaaggcacaagtcccatgggtggcggaagccgggctttcgccttagctggcactatctggctcatgtaacgagcctaagaaaagggcatagcggtgaatgcctggaaaagtccttatatagcgggcacgccca

SEQ ID NO: 183345 - DNA, 948 bp, Homo sapiens
  misc_feature (758)..(758): n is a, c, g, or t
  misc_feature (789)..(789): n is a, c, g, or t
agcgggcgcgcaagagaggcggggcagcgctcggcatggcggagccagatctggagtgcgagcagatccgtctgaagtgtattcgtaaggagggcttcttcacggtgcctccggaacacaggatcgggcccgggacacccagacagatgagattgtcgcactgaagaaggtgcggatggacaaggagaaggatggcatccccatcagcagcttgcgggagatcacgctgctgctccgcctgcgtcatccgaacatcgtggagctgaaggaggtggttgtggggaaccacctggagagcatcttcctggtgatgggttactgtgagcaggacctggccagcctcctggagaatatgccaacacccttctcggaggctcaggtcaagtgcatcgtgctgcaggtgctccggggcctccagtatctgcacaggaacttcattatccacagggacctgaaggtttccaacttgctcatgaccgacaagggttgtgtgaagacagcggatttcggcctggcccgggcctatggtgtcccagtaaagccaatgacccccaaggtggtcactctctggtaccgagcccctgaactgctgttgggaaccaccacgcagaccaccagcatcgacatgtgggctgtgggctgcatactggccgagctgctggcgcacaggcctcttctccccggcacttccgagatccaccagatcgacttgatcgtgcagctgctgggcacgcccagtgagaacatctggccggggnttaccaagctgcactggtcggccagtacagnctccgggaagcagcctacaacaacctgaaggcacaagtcccatgggtggcggaagccgggctttcgccttagctggcactatctggctcatgtaacgagcctaagaaaagggcatagcggtgaatgcctggaaaagtccttatatagcgggcacgccca

SEQ ID NO: 183346 - DNA, 202 bp, Homo sapiens
agatagaggaatgctgtgcagtgattcaaaagaatgcagctgatctgtatgtatagacatgaaattgtgcacaaagcacagtgaccattgatttctttacttattcacttatcctacatgtataaatgctaccagctgtcatggtgacatgacattgtaagaagcaatgggaatgcaggaatacacaacacgtagcccctgc

SEQ ID NO: 183347 - DNA, 421 bp, Homo sapiens
tactcagtcctatgtggtctagacagtcaaaggcaaacaatggatccaaaatgataaatggttagacagctaatcacagcatctctcttctaggtgttaccaaattttggaaacttaatggaaacagccagagtaaatgactggggctaaaagtataatctaaagactaaaataaagctaaatataccctatctagtctatatcagcttaaagataacaaaatgtctcatcacacttttaatcgtatctttagagggtgaatattgttggggaaaaaagatgcttactcagagacaacaagatagacaatatcctgtcttcaagagagcttatcatagtaaaagaaatgttataaacaatcaatcaaaagtgaaaaaaattataaatttttataattgcttttcacaaaataaacagggtt

SEQ ID NO: 183348 - DNA, 465 bp, Homo sapiens
ctctctacagccctggccctggtggggaaacctgacattcttttattggatgagcccagctctgggatggatccctgctctaagcggtacctgtggcaaacaataatgaaggaggttcgggaaggctgtgctgcggtgctgacctcccacagcatggaggagtgtgaggctctttgcacaagactggccataatggttaacggcagcttcagatttaccttccaccagcttagcaaacaccacccactcccagcaagaaagaccctgtttccccatgctcccagcagatgtcttaggccatcctcgggcctcactgattctgtgagccagtgcccacggccaggagaatggaatacactgacctagaggggacagggactctagacaggcaaaactccactgtcagaagcagaatcctaaaatgtcagaactgaaagtaggcccggaaggatgcacaacccggaa

SEQ ID NO: 183349 - DNA, 525 bp, Homo sapiens
ctctctacagccctggccctggtggggaaacctgacattcttttattggatgagcccagctctgggatggatccctgctctaagcggtacctgtggcaaacaataatgaaggaggttcgggaaggctgtgctgcggtgctgacctcccacagcatggaggagtgtgaggctctttgcacaagactggccataatggttaacggcagcttcaaatgtcttggttctcctcagcacatcaaaaataggtttggtgatggttatacagtcaaagtttggctctgtaaggaagcaaatcaacattgcactgtttctgaccacttgaagctttattttccaggaattcagttcaagggacagcacctgaatttattagaatatcatgtgccaaaaagatggggatgcctagctgacttgttcaaagttatagagaacaataaaaccttcttgaatattaagcattattccattaaccaaaccactttggagcaggtatagtatcttgaatgattcaggaggttgaatttt

SEQ ID NO: 183350 - DNA, 426 bp, Homo sapiens
  misc_feature (13)..(13): n is a, c, g, or t
  misc_feature (96)..(96): n is a, c, g, or t
  misc_feature (100)..(100): n is a, c, g, or t
atttcgccatgtnggccaggcagttctcaaactgctggcctcaagtgatctgctcacttcagcctcccaaagtgctggtgttataggcgtgagctnctgntgcctagccagcaattgactaattttaaaatattaagtgcagtggctcaatcttggctcactgcaacctccacttcccaggttcaagcaattcccctgcctcagcctcccgggtagctgggactgctcaccacacacggctcaatttttttttggtattttagtaaagatgaggtttaaccatgttgaccgggatggtctcgatctctcgacatcgtgatccacctgtctccacctcccaaagtgctgggattataggcacgagccaccacacccggcctgccagtttttttaaatagggaggtttcacacagaatgtgctctttg

SEQ ID NO: 183351 - DNA, 246 bp, Homo sapiens
tattctcagatgacatcattatttagaaaatcctaaggaatctacaagaagatactagaaataataactgaatttagcaggatctcaatttacaaggccaatttacacaaattaactatatttttatataccacaaaggatcattggaattcaaacttttaaaaatactacttgcaatagcattgaaatcatttttttaaaatctaggcatcaatttaacaaaatgtacaagacctctactcggaa

SEQ ID NO: 183352 - DNA, 649 bp, Homo sapiens
gtaaatgttgcggtggaaaagtacatttgctttaggctttacctatttcttaagacaatcctcaatcaccccctcccagcatatggcacactggttgcttctctcattgatcatgtccacaagactctccagaacacacaagcttgatggctccatattcaataaatgtattatcgagacccactgaaggaagccgactgctcctgcaggacccaggagacaccccaaatactgtgagtgccccaactgcggaagtaggaaagggagaccctcctctctcaaacacacacccccgcactggagaagctgaaggtctgtttgctggagaagtttctcactttacccggagctgagtcaatttagagagccaagggaaatacaggggtagaggaagaagcagaaaggccctaggagctcactgcatcccctagcagcccatttctgcctggcaccacagggatccatcaggacagtggccagagaagcaggcggtaaatctccacagggagaaggaattctctagctaaagtttgtaacaacttgaacagggtgagaagcctcctggcgagaactcaggggagggcacaaatccggtgtgcagactccataggcaggggaagaaccaagcccttttctttctagcctgcaa

SEQ ID NO: 183353 - DNA, 395 bp, Homo sapiens
acaaagcatatggatgtatctttttatatacacagggagggcatcttcaccaggatattgggatgggtttattcctagtgttaagtaaatccatacaaaacttattttcaataataattcagttctatttttactgaataacacattttaatatttcaaaggtggcatcaggaacacttgtttaatcaatttccacagtggctactgtatacaaaaagacaatttgggagcattgctgggagaatctaaacccaggacccatctgaggaaatgacatattttcagatttacgaagttatgaatttttttttttttttttttttgagacaaaatcttgctctggtgctctgtcacccaaactggagttaggtggcaccatcatggctcactgcagc

SEQ ID NO: 183354 - DNA, 403 bp, Homo sapiens
gctgcaactggcaacgcactgctccagttccagggtggcgtccaccaagtagttgatgtcgggtgcattctgcaggtcctccgggaggtccttgtcgacttgcatgggctccacagccgcctcctcagagtagcgtacaggacgacaggctggagctcaagattaagttcctggccatgccaggcaggaggagactcatcagcaatcagaaggttgaggagagatgccatgctgatctgaactgcagcaggcttcactctgagcacgtccctgtggatgaggtcaccttagatgcctgctcgagcaatcatcctccaacctgtgactgaagcaggaactcaactggatgtctctcacccactattcacatcttcaatgactaacaggccattaactgcacaac

SEQ ID NO: 183355 - DNA, 294 bp, Homo sapiens
tttatcattaggaggtgagttttatcattaacagctctgattattagagtggatatttggcaaattgtgtaatgtgttcttgttttaaagaattctctatcatctagattcacagataggatttgtaagtaattgctattaaatagctaacttaatatcctgtgcaagggcatctaatgcccagcagtagagaagtttctaattggacaggccagtgagatacattgggtagtatctggagccactggtgttactttagataatacctacttaggtactacatttccaccataa

SEQ ID NO: 183356 - DNA, 251 bp, Homo sapiens
caggctggtctcaaactcctggtctcaagcaatcctcctgcctttgcctcccaaagtgctaggattacaggtgtgagccactgcacccagcctaaagtttaaatcttatctaagtggattcttaggacatttattactttactttcattttcttcatcttggttctcaccataactacttgaaaaggatgatatagacatgtacagtacattctttaggctttaagtttattcctttaacaagcatgaatt

SEQ ID NO: 183357 - DNA, 316 bp, Homo sapiens
ggataaggcaaataaggtaaaatgccaacagtagggaagcctcagcaaaggatatgcaggtgttctctgcactcactttactcttgcaacttttccgggagtttgaaattatttccaaataaaagttttctttttgtcaagaaaaaaaaggaaaattcattagctagtgaaggtagaaagtatattacatcactttccaactaaaaaaaatgaacctgttaacccaaaagccaaatctaccagtggacaaactctacaaagtgtcacagtactggctacagaggaaagcactccaaactcaggaggatttggcaag

SEQ ID NO: 183358 - DNA, 282 bp, Homo sapiens
agaataagtgtttagaaagttgtataggccaggcatggtggctcatgcctgtgatcccaacactttgggacactgaggtgggaggactgcttgagcccaggagttcaagactaacctgggcaaaatagcaagatgctgtctctgcttaaaaacaaacaaacaaacaaacaaacaaaacttttatacacattcaacaatgccatgacatgcaagtgcacgaccagtgatttgtcttgctgaacagagagtaataacctatctaggtgctgtcaagctcacatg

SEQ ID NO: 183359 - DNA, 444 bp, Homo sapiens
cctgacctcaggtgatccactcgcctcagcctcccaaagtgcagggattacaggcatgagccaccacgcctggcccaaagaatctttcttaacaatggaagccagctacttcgatagttttatttaactcaaaaccaacggccgcaagtagaaagagaaaggacatgttcacctgtgttctccaggatgggggtggggatggaaaaaaacaaacagaggggctgcttgcatacatcagtggtgaggctggaatagggcttccagtgtctgggctgaggccgctggggtgtctgaactgaagccttggcgtgcccaaggccattggagattggttaggtcaactcctggcagactgggcacagagaactcaaatggctcacccaaggtcacactcccaccttctttcttacttttagcacccagcaatttaggtcggaaggatgg

SEQ ID NO: 183360 - DNA, 595 bp, Homo sapiens
gcacgacactgagctgctgagcctttggaagcaaggatttggcccaggggtcgggcggcaggatgaggatgaactcctgcgagttacacaggcatgtgggtgtgtgtgcgtgtgcatgagtgtgtgtatgtgcatgagtgtgtgatgagtgtgtgcgcccatgcatgagtgtgcatgtgtgtgcgcatgggtgtgtgcccttgcatgagtgtgtgatcagtgtgtgtgcttgtgcataagtgtccgtgtgtgcatgtgtgtgcctgcgcatgtgtgtgatgagtgtgtgtgcccatgcatgagtgtgcatatgtgtgtgcatgggtgtgtgtgcccgtgcatgagtgtgtgcatgtgcatgaatgtgtgaggagtgtgtgacgagtgtgtgtgcccatgcattagtgtgcatatgtctgtgtgcacatggctgtgtgcccgtgcatgagtgtgtgatcagtgtgtgtgcccatgcatgaatgtccttgtgtgcatgagtgtgtgcctgagcatgagtgtgtgatgagtgtgtgtgcccgtgcatgacagtgcatgtgtgtgcatgagtgtgtgtgcatgagtgcgtgtgcccgtg

SEQ ID NO: 183361 - DNA, 837 bp, Homo sapiens
tcagctcgtaccccatttatgccgtgtgtgcgcccatgcatgaggtgcatgtgtgtgtgcatgggggtgtgtgcccatgcatgagtgtgtgatcagtgggtgcccgtgcatgagtgtgtgtgtgcatgagttatgaagtgatgagtgtgtgtgcccatgcatgagtgtacatgtgtgtgtgcatgggtgtgtgtgccctgcatgagtgtgatcagtgtgtgcatgtgtgtgaggagtgatgagtgtgtgcccatgcatgagtgtgcatatgtgtgtgtgcatgggtgtgtgcccgtgcatacgtgtgatcagtgtgtgccagtgcgtgtgatcagtgtgtgcccgtgcatgtgtgtgcttgtgcatgagtgtgtgaggagtgtgtgatgagtgtgcgtgcccatgcatgagtgtgcatgtgtgtgcgcatgggtgtgtgcccttgcatgagtgtgtgatcagtgtgtgtgcttgtgcataagtgtccgtgtgtgcatgtgtgtgcctgcgcatgtgtgtgatgagtgtgtgtgcccatgcatgagtgtgcatatgtgtgtgcatgggtgtgtgtgcccgtgcatgagtgtgtgcatgtgcatgaatgtgtgaggagtgtgtgacgagtgtgtgtgcccatgcattagtgtgcatatgtctgtgtgcacatggctgtgtgcccgtgcatgagtgtgtgatcagtgtgtgtgcccatgcatgaatgtccttgtgtgcatgagtgtgtgcctgagcatgagtgtgtgatgagtgtgtgtgcccgtgcatgacagtgcatgtgtgtgcatgagtgtgtgtgcatgagtgcgtgtgcccgtg

SEQ ID NO: 183362 - DNA, 776 bp, Homo sapiens
aagacaccggaccaacatgcgaacggactgatcagtgggtgcccgtgcatgagtgtgtgtgtgcatgagttatgaagtgatgagtgtgtgtgcccatgcatgagtgtacatgtgtgtgtgcatgggtgtgtgtgccctgcatgagtgtgatcagtgtgtgcatgtgtgtgaggagtgatgagtgtgtgcccatgcatgagtgtgcatatgtgtgtgtgcatgggtgtgtgcccgtgcatacgtgtgatcagtgtgtgccagtgcgtgtgatcagtgtgtgcccgtgcatgtgtgtgcttgtgcatgagtgtgtgaggagtgtgtgatgagtgtgcgtgcccatgcatgagtgtgcatgtgtgtgcgcatgggtgtgtgcccttgcatgagtgtgtgatcagtgtgtgtgcttgtgcataagtgtccgtgtgtgcatgtgtgtgcctgcgcatgtgtgtgatgagtgtgtgtgcccatgcatgagtgtgcatatgtgtgtgcatgggtgtgtgtgcccgtgcatgagtgtgtgcatgtgcatgaatgtgtgaggagtgtgtgacgagtgtgtgtgcccatgcattagtgtgcatatgtctgtgtgcacatggctgtgtgcccgtgcatgagtgtgtgatcagtgtgtgtgcccatgcatgaatgtccttgtgtgcatgagtgtgtgcctgagcatgagtgtgtgatgagtgtgtgtgcccgtgcatgacagtgcatgtgtgtgcatgagtgtgtgtgcatgagtgcgtgtgcccgtg

SEQ ID NO: 183363 - DNA, 351 bp, Homo sapiens
gaaagacacatgaaataattacgccattcattagcagattgtgctagatgcctcactggaaaaataaaggacatgatggaaaactctgtagggtcagagaaagggatcattagagaaggttctttgaagaaatattttttgaaatatgaaggataaataggaattaactaggtaccaataggttaggagtagagctttccagacagagggactagttcttgggaaggtctccagacagaaataagtgtggcttgtctgaggacctcttattcgcctattaaccttccctccccagtaaacactcctgggaacaacacacattgtagaaccacgttgtggtgctgttcagta

SEQ ID NO: 183364 - DNA, 336 bp, Homo sapiens
tatctatagtccagtgaattaaaacttttaggtaaatagagggcatgtattacttattcctagggcagttccttttgaatgatttcacttattgagaactgtcattttgaaatgtttcaaaccaattaggcatctttagatctaaatcttccagccttcagctttagggaatacatatttggatttgcaagaatgtgaagatttagccaggtagtcacttcctattagctgtgagaggtcttcggactcaattgactggtgcttgttaaatatctgtttttttggagaatttgtttccctcccgaagagagaaccctcatagtcagtggggcccat

SEQ ID NO: 183365 - DNA, 108 bp, Homo sapiens
cccaagctgcttttgttgggctaaaatcagcaaaaaatgaattgagaagtacaaagtaaatttcacttgcgatcaaattctacctacgtgtgtgtgccagctgcacca

SEQ ID NO: 183366 - DNA, 444 bp, Homo sapiens
acagagaggagaatggtggttgccagggactgggaggagaaggaatggagacttattatttaataggtacagagtctcagttttgcaagacgaaaagagttctggagatggatgatgctgacggttgcacagtaataagaaattaagcaatgccactcaactgtacccttaaaaatggctaagatggtaaacttcattaaaaaacatttaattttaaagctactactctgaaatcgttatttgtcagtgaagaatgaaaatgcattttccaaggtaagttttacaagattcaaggtgtgaaaatatcagtggctgacctgctgttaatgagcaccatctctttcacaggtaacagacatctattcatgcttctgttgaacagacatagaggcgaggcccagagatggtgggtggtttgcctagattgtcaaggagcctcagcat

SEQ ID NO: 183367 - DNA, 446 bp, Homo sapiens
tgctgggattacaggtgtgtgccactgcttaatccagtcttaaggcacgctggagagcacccaccttcccagcccaccccagcgtcgttcactgtttctcacaccgtgctcaggtgaagagctcttttctccctttctctctcctcttctcaccagtctatccattctttctctttctgtctcagtttcactacaaaactatgtaactaacctcttttagttataagatttcagctttatcatacagcttgtgggaaacaatgaagtcacatcactaggaggtgtgattatagtgactgtggcttttataataactgtggctggagttctctcccaataataagtaatggaataaattccacatcactcctgtttggcttctgttgtcagcatttacaaaagtctggtcctttgtaactgttctgaccatgaaaatgctgatcatg

SEQ ID NO: 183368 - DNA, 348 bp, Homo sapiens
atatttgcaggaaattcaagtgtctcccccatagattgcttattagttgcaagtagaaaaccagcaatttatacagtggagaaactgggatcaaattaacatcactaatgagagacaaacaatatcacgtgcctccaaatgtggtctcttggaaagaatataacctcatgtatgtaatattacaatcaggaatacataacctgaatctaatcatgaggaaacacgagacaaacccaaagtagggaagattctgtaaaataactggcccttaacacacacacacacacacacacacactcctaagagtggtgacaatgtgttaatttgattgttgtaatcatttcacaa

SEQ ID NO: 183369 - DNA, 379 bp, Homo sapiens
acatagaggatccgctggagtggcatataactcacttctaacttcatatcaaactagatcaccagaaaactatttagtcctatattttagtattgtttcctcatattctgtcaatttttgttagatgcatttgtatgaagaatatttctgcatctgcgatgaaactattgaatgcattgtctcttatgatactctgttccctttataagaattaatgtgataaattattcaagaatttagtttcagagaaaagtttctttccttatgatatggcatacttccttctatcagtcattaagaattatatattctgttgagtttttctgtttgctttggctgcaagaaagcttggagttatatgccactcaattatagtaac

SEQ ID NO: 183370 - DNA, 197 bp, Homo sapiens
aattgagtgtgtggaattgatgagaaaattgaggactctgagcagcctgttagttgaggtgtaactgttcacaccctcccttttggatcctggactgagaattgccatttggagttcccttctctgagacaaaggtagcatttatttagaaggggcggagctctgccctgtgaagcggagcctaaggctgtgaacac

SEQ ID NO: 183371 - DNA, 329 bp, Homo sapiens
ccagccctcccagtccagctctaccaggcaagtcctcctctcctacttaagcacagaccaagagctgacatgggattaggtgatatgtggggcctggttcctgccattgcagagcatgacagacagggagagggtgtggcttgaaacctgggaaccttgtttctggggatgagcaggatgtaggaagtcaggaaggcagggagcttttctggagtccctctcaaagcagccactccctttactggtctgcaggaccaggcagagtgggaagtgggaggtggctgctcagcactttgctacctgttgtctttctgaactgaagactcaga

SEQ ID NO: 183372 - DNA, 387 bp, Homo sapiens
atgtgaggtcttggagacccaagaggacatgggatgcctatgggaggagaaatatcatgttttacaagttgggagagtggagaataaagagggaagaaggtatagataaatctgtgctgactgagtagatgagattgcaatattcccaaagttgagggacttactaaacttttctgagaggtaagagacaagattttggctgactatgaaagctgaggtgttagggttaatgacttgagggtgtggtgaaggtttgaactactgtgaacaatacaaggagatattgcttaggaagaggcagaagggtagctggacaggttggcagctttgaatgagctgaaggaaactgtaaacttgttgtggcaccactctactcattctttgatg

SEQ ID NO: 183373 - DNA, 543 bp, Homo sapiens
cagagttaagatccgtatactgtgactgttcaaatgcctcttaaatctcttttattctatagagttttggggggaatttttgttgaacaaactgggttgctagccccataatgctggattttgccaattccatcccgctgtgttgtttaacaacgttcctccatgctttatatttccaataaattgacggttagaaacagaggtttaattagattttaatgttttttatttttatttttgccaaaccatttacaagtagatattcatgtttcaccacttttaacacattttgaagaaaagaaaaccaatttgagtataaaatagctttaaatttttttttccctgaaaagaaacacttcccttagtgtctttgctgtttagtgtacagtaactaaagtataagatttggtggttagtgtaaatttaaaattacaattaaaccaaatattttgaagcactgaggaatctttaaaaaaatactctttcaaatgtctttcctatcataaagcatatgcttatactaaattcctagtatcctagtcc

SEQ ID NO: 183374 - DNA, 709 bp, Homo sapiens
gcttccagacctcactagatttacctcctcatctggctcttcatttgtggtacttttaatgcctcagaaaaggtatgtttgagaccatgcgtattctgatgatgcatttgtattaagaagaaagaaagattatcaaccccacagcttgctctttcaggaggaagacattaattttcataagaaatatgacatttataagaattgaaaagtttaaaaggaagtgcacagaaattgcttgacagggaacattttaaaacagtgctcttgagaagagactatctcaatgaatatctacttgggacctcctcaaaggaaagtgagatgacaaaattggtgatgtatgtgactccatactctagtgacagagaagataattacggtgaggtatctggaatgatccaaaggcaaattggaattttccaagagagaatgaagatgtatttgtgaagagaaagacagttggaaggaaatgttattttagtatatattctggccatacatgacttaacaagtatgaatttcaagaggacaataaaagagaaattatagtaatcaagataggaaatgattaaagaatgggagaaaattttagctgagagggaatgtgaagattaaatacaaattctaacagcctggttgacaagttgatgagcacatttacagatgagaaatgaagaaggaacaaaagaatgacttcaacagttttgtg

SEQ ID NO: 183375 - DNA, 148 bp, Homo sapiens
ccccagaggcggcagcagatggctggcgggcacccctcactccagaagcctctttgttcaggccccgcctgccctgacctgcctccctgcccggggagaggtcctccaggaagtcggccaccctgtgaagcacatctcctagcaacgc

SEQ ID NO: 183376 - DNA, 537 bp, Homo sapiens
tgatctgcctgcctcagcctcccaaagtgctgggattataggtgtgacccaccgcgcccggccagctccatattttctgctgcctgaattgtaattattctattcctgattttatttgctgattccattgtttttactagttcatattaaatgctaatgacagatatctttacctaaaacattctatttctcttgtcatgagcattatgaaacaaacctacaattgttctccattacctagtttatgacaattaaactcttctttcaaagaaataaacaacatggccaaaatactttccagcacagttgtagcaattcccacctcctccatcagcagtatgagagttcttgcaccatattctcttcaacacttggtattatcagtctttttcatttaagactttctaggggttgatgtaatgctatcctttgtggttttaatttgtattccctggctactaagaaggttaaacctttttttatgtttattaaagctgatttcctcttttgtaaatgatgctctcccatttctattct

SEQ ID NO: 183377 - DNA, 131 bp, Homo sapiens
attctgtctgaatgacattggataagttaccatgctttctcatctgtaaaatgagaataacataatatctatcacagagggttgttttgagccatgtaacgctctcagaacagttcttggtgcatagtaaa

SEQ ID NO: 183378 - DNA, 710 bp, Homo sapiens
agagtggttaaaaacacatttgaaagactcacgtttagaagttatcaatcagcaggatagtaactttatcacagctcttgaattagcagtacgttttgggaaaacccttattatacaagagatggatggtgtagaacctgttctttatccattattgagacgagatctggttgctcaaggaccacgttatgtggtacaaataggtgacaaaattattgactacaatgaagaattccgcctctttttgtcaacaagaaacccaaatccttttattccaccggatgcagcttccattgttactgaggttaactttactacaacaagaagtggattacgagggcagcttttagctttaaccattcagcatgagaaacctgatttagaagaacagaaaacaaaactattacaacaggaagaagataagaaaatacagctagccaagctcgaagaatctcttctagagacacttgccacatctcaaggcaatatcttgggaaaataaggatttgattgagtctttgaatcagacaaaagcaagcagtgcacttattcaagagtcacttaaagaatcttacaaactccaaatttcccttgatcaagaacgggatgcctatctccccctggctgagagtgccagcaagatgtacttcattatttctgatttgtccaaaattaataacatgtaccgttttagtttggctgcttttctc

SEQ ID NO: 183379 - DNA, 930 bp, Homo sapiens
  misc_feature (529)..(529): n is a, c, g, or t
  misc_feature (561)..(561): n is a, c, g, or t
  misc_feature (585)..(585): n is a, c, g, or t
  misc_feature (597)..(598): n is a, c, g, or t
  misc_feature (895)..(895): n is a, c, g, or t
agagtggttaaaaacacatttgaaagactcacgtttagaagttatcaatcagcaggatagtaactttatcacagctcttgaattagcagtacgttttgggaaaacccttattatacaagagatggatggtgtagaacctgttctttatccattattgagacgagatctggttgctcaaggaccacgttatgtggtacaaataggtgacaaaattattgactacaatgaagaattccgcctctttttgtcaacaagaaacccaaatccttttattccaccggatgcagcttccattgttactgaggttaactttactacaacaagaagtggattacgagggcagcttttagctttaaccattcagcatgagaaacctgatttagaagaacagaaaacaaaactattacaacaggaagaagataagaaaatacagctagccaagctcgaagaatctcttctagagacacttgccacatctcaaggcaatatcttgggaaaataaggatttgattgagtctttgattagacntgatcatgaacggatgctatctcccctgctgnagtgcacgacacgtccgtcatatnctgattgtcaannatatacatgacccgttagttggctgctttttgacttttcacgagtctacaacaaccagatctgaaatctgacagggatccagcctattagtatttcacattgatatgaatttatgccgtgccattaagtgatagtatgtccttgcattgttaagatgctctgactcttagaaagatgggatcgttagggcggctgtggaaatgtcgaaggtccttaacacatacgagaagtccgctggatatagaataattggccggcacctaagatggttccaactttaaaccttgttagagcctnttggggcgttttaaatcaagtgggaaagtcctttt

SEQ ID NO: 183380 - DNA, 605 bp, Homo sapiens
gatattactgaaatcacttgcagtcttaagagtgtccgcttagtctaccactggagccgagacacccgcagcttaaggaaaacagaaagccctaactaattacatcgactcttcatgatgatcctatttttaaataaatgttatgaaatgcagggttgaagctgtacatttcaaatgttgaacagccacaggtttgaagtccgtgaatgggccctgactggcctatcagtgaataggattgagagacatcagctcctgcgcactcttcctctgttgtcctgtgattgaggggattgtttcgtgttttgctgagagtaattctttctttgaacatatctttacctccccaaatcaaacaagttatacatatgataacaccttgtatttaaacagagcaatgttataatattccagttaaaaatcagcttagtacagttcccatgacctatctcttaggtcccacgtctattaggaaacactgacttttaaaatttaaaattttagaatttttaaataaactttattttccaaaataagggatctcatgagtttttcacgaaagtcaatgggggaaactcttgagtaggtctttttcagtctcttgg

SEQ ID NO: 183381 - DNA, 187 bp, Homo sapiens
tttccccccataacaatgctttgaggcaggtatggcagtgtcctgttttgtagatgtgaaaaagattcagaagataaatgacttcttcaaagtcattgagcccagattgtatgcttcaaaattttattttatttttttaccttatcacaccactgtgtatgtatctatgtttataaacaaaaaatta

SEQ ID NO: 183382 - DNA, 633 bp, Homo sapiens
tccattttgacttaagttttgggacgggtataaaatctgtgcctagattaatttttttgcatgtgagtatccaggtgtttcagaattatttgttgaaaaaactatctttgctccattatattgcctttgttcctttatcaaagatcagttgactgtatttatatgggtctatttctgggctctctgttctgtttcactgatctttttgtctgttcttttaccaataccacactgtctagattattgtaactttagataagtcttgaagtcagacactgtcagtctcccacctttgttcttcaatattgtgttggttattctgggtctattgcctttccatataaataaaccttagaatcagtttaacagtatcccgaaaataatctgctgggattttgattggtattgcattgaatctatagatcaagttgagaagaactgacatctagaaaatattgagctttcttatccatggacatgaactatctttcagtttaattagttctttttgatatctttgatcagagttttgctttgctatgttctagagtctttttacaagatttgagatatcataaatattctaaatgaaacaaagaaattagatattttttttttggagaggatccctcg

SEQ ID NO: 183383 - DNA, 343 bp, Homo sapiens
gcaggcgtgagccaccgcacccagccaatactcaacaatttcttagctcattcatacattttcctctgccaggaatgctcttcctccccttctgctaatctgggttgcttttacttgtccttcagaactcagtcgaaatggcatcctcagagaagccttgccttatattctatttcatggcagctggtttttcttttttctagcacttatttcagtttgcaattatgtatttatctgtgtgattatttgtctcatgccttaatcccctctgcactcctacttctgaggaccagatctgattcatgctcttctgtagcagccccttacctggtgactggcacat

SEQ ID NO: 183384 - DNA, 511 bp, Homo sapiens
tgaacatcatgcacaattattttacctcataattgaacatctggttaatgtaagtattataagcttataaatattacaaaaacttgcataatactgtactctagactcatacatgtgtcagccaatgagctaaaaaaatcacaagtttcatacatgcattagcatgtatgcatctatagtacaatattatggtcactatctgccttcttggtggagagaaaaggaagagtcgggaacttttggttgtgaccaggaaatgggaagaatgggaatcagtattaaaactgtgcagtgtatggttagagtctttatgttctctaaggagcttgactatcaaacactttaagtgttttaagcctggtttttccttataatggacacgtaaaacaaggagaaaacataaaatctcagatctccagactatgtcttccttgagccttctacttgtctagcagttgggtggggtatataataggcttggtaatcacaaagcaagatagttctgtaaggg

SEQ ID NO: 183385 - DNA, 288 bp, Homo sapiens
tagagctgaccttagagactccaagaacacatcacctgtcactccctctgtctgcctcctcaggccttctaccctgatgacttctattgcagagatgggtgaagagtagatggtagatctggtggcagaaagctatgagcttatgtcaatccagcctagtgatgcccctggaaaaatatgttctttcctagcattcatctaaaaatcttaagaaatggttgtcattgacccaatttggataatgtattcattcctgaaccagtaactgaggcaaggggatgaagagct

SEQ ID NO: 183386 - DNA, 348 bp, Homo sapiens
agacaggttctcgctgtgttgcccaggctggagcgcagtggtgaaatcatggctcactgtagccttgacctgggctcaagagattttcccacctcactctcctgaggagcagagactataggtgaacaccactacacccagctaatttatatttttttttgtagagatgggatctcgccatgttgtccaggctggtatttatatcttatatataccacttaattgctttattttcatttccttcgtaaatgatatctaggtgaaattaaccagccttttttgaatgaatgatccctaagtttgaattggtggggtctgtgtaaatggatgagggccatttgaatagac

SEQ ID NO: 183387 - DNA, 535 bp, Homo sapiens
gagctaaatgtatagttggaaacaagagcctggaacagaacaacgtgtgtggtctggaggattggggaagactttctggagaaaaggacatcagagatgacacctgagggatgaataagagttcttcagggtaatcagaggtgggaatttcaggctcagggaaaggagagaagagcacttcttgaggaatgagaagcatgcagcggagagagggaagcaggacagaagacagataacaaggctctgcagactgtgttaaaggtttggggagaatggaaagccattaaggaagtcgcattttaccatctttattacactgtaaattccctagagcacagggattatgtcaaactaaaagaaaatagcctatcacccacaaaattctacctgcaagtaataattctaaaactttgcccaaggttctctaggatgcctaactggggttctctatttataaatcttttctaaaatgcctgatctcactttgcaattttgttcaggacaatagatcaaattccaccaaacctcttatttg

SEQ ID NO: 183388 - DNA, 457 bp, Homo sapiens
gttaggggccagcaatgaaattgctctgtcttccccaggctgtggttcctgccgcctccctcccttctgtcttcccgtctgtctagtcgaggatgcaggtctctaatctctgtcctcgctgtgcaggcttgaaggactcgtgttttttgagaaaggcaagggggagtaaggcttgcctcccctagagcttgcctcctgagtagtttccacatcagagagcagggtgtggggtgtgtttgtgaatgagagtgacccagcccctctgcgcccccaccccgttgatgcttagggggctgggaggaagctgcggcccagggcaggggcagctgccattggtgttgggtgtgaggtttgttttttcttctttctgtctgggcttccttttccctcctgaatgaccagtgggcagaagaagagattggaggcagtgcccagccccacacgctgctgaggtcag

SEQ ID NO: 183389 - DNA, 380 bp, Homo sapiens
acccataaatactttatctcttttctatttcacccataaatatactcatttctaactgataagcacactttaaaaatgttttaatagtattattactttttaagagacagagtcttgctacgttgcccaggctagcctcaaactcctgggctcaagtgatcctcctgcctcagcctcccaagtagctgggactccagactcacaccaccacacccagccagaaaacatgttttctaactagtcaacataccattatgccacctaacaaaatgaatggtaagtcctcagtatcatctgacatccagattgtatcttaattttcccagttgtttcaaattttctttgttgcagttggctctagatactatatttgcttacta

SEQ ID NO: 183390 - DNA, 2608 bp, Homo sapiens
  misc_feature (76)..(76): n is a, c, g, or t
  misc_feature (94)..(94): n is a, c, g, or t
  misc_feature (122)..(122): n is a, c, g, or t
  misc_feature (127)..(128): n is a, c, g, or t
  misc_feature (132)..(132): n is a, c, g, or t
  misc_feature (136)..(137): n is a, c, g, or t
  misc_feature (151)..(151): n is a, c, g, or t
  misc_feature (177)..(177): n is a, c, g, or t
  misc_feature (191)..(191): n is a, c, g, or t
  misc_feature (193)..(193): n is a, c, g, or t
  misc_feature (202)..(202): n is a, c, g, or t
  misc_feature (218)..(218): n is a, c, g, or t
  misc_feature (247)..(247): n is a, c, g, or t
  misc_feature (359)..(359): n is a, c, g, or t
  misc_feature (371)..(374): n is a, c, g, or t
  misc_feature (378)..(379): n is a, c, g, or t
  misc_feature (381)..(381): n is a, c, g, or t
  misc_feature (384)..(384): n is a, c, g, or t
  misc_feature (386)..(387): n is a, c, g, or t
  misc_feature (496)..(496): n is a, c, g, or t
  misc_feature (506)..(506): n is a, c, g, or t
  misc_feature (517)..(517): n is a, c, g, or t
  misc_feature (629)..(629): n is a, c, g, or t
  misc_feature (644)..(644): n is a, c, g, or t
  misc_feature (706)..(706): n is a, c, g, or t
  misc_feature (716)..(716): n is a, c, g, or t
  misc_feature (719)..(719): n is a, c, g, or t
  misc_feature (726)..(726): n is a, c, g, or t
  misc_feature (732)..(732): n is a, c, g, or t
  misc_feature (735)..(735): n is a, c, g, or t
  misc_feature (1889)..(1889): n is a, c, g, or t
  misc_feature (2543)..(2543): n is a, c, g, or t
gtggagctggtggccagcaccaagaacacttttcaaagtcaggagaaacttataaaggaaatggactatttatggnaaatcaatcaagagacangaaacaatctaaatcaggaaactagcanatttnnttcnttannggactatgtgtcantaaggaagaggataatcactattcantatcaaaagatgcntntatttctcnatgaggaggagcaacngcatctgcaggcactggaaagagaagcanaagagcttttccaacaactacaagacagtcaagtgagaatgacccaacatttagaaaggatgaaagacatgtacagagagctgtgggagacatgccacatgcctgacgtggngctgctccaggnnnngagnnangtntnngcaggactgatttggcacagatgcaaaagccccagccagtgaacccagagctcacttcatggtgcataactggagtcctagacatgctcaacaacttcagagtggatantgctctgagnacggaaatgantccttgctatataagcctttctgaggatgtgagatatgtgatatttggagatgaccatctcagtgctcccacggatccccagggagtggacagctttgctgtgtggggagcncaagcattcacctcnggcaagcattactgggaggtggatgtgaccctctcctccaactggattctgggagtctgtcnagattccagnacngcagatnccaatntcnttattgattctgatgaaagattttttttaatttcctcaaagaggagcaatcactatagtctctccaccaactctccacctttaattcagtatgtgcaaaggcctctgggtcgggttggggtgtttctggattatgataatggatctgtgagtttttttgatgtttctaaaggttctcttatctatggttttcctccttcctccttctcgtcccctctgaggcctttcttttgctttggttgtacatgaaaagttggtttcatgatgatttattgtgacctcccatatataaggcaaatactgtcctaagacactatgtgtgagagcctgtgagcgcactgtaacttcatggaatgtgattactttatggttataaatgggataaccaccttgaatgtatacattcattaattaagttattttaattaataaattattgtggaatctttactagaacatcaataatggctttttttgtacaagttttttgagattcattcacttactgtgaaagtcatgttctaatgtatttaattcagagattgttagtatatcacacttgagcagccatcagagctctcttctgcctgggcacttttatcacttccagaagaatcccaataccccttaacatttattctgcattcaccctcccccattccttcagaacacttaatctactttttatgtttttgcattcgggtaaataaaatcatacaacataagttctttttttaatctgatttatttttcagagagtatgttttcagtttgtgcacactgtaaaccatttgtcttacttgtatatttgaaccaggctggggtagaaaaatgaactggtggatatctcatcttacaaagaataaagaagtgtgcttattttctttctaagtctgaccaagttaagttgacctcacagactttattatttctcaacatcctagttattaatctcatttcagctcatacaaaagtttttcagtgctgggttgctctgctattacatcttctcaagtatattatatcagattataacattcagaaaactcttatacttattactaccagattgaaaagtccaagggggcaatggcagtatttgtcttctttgctaatatattaccattatcgaatgcgatttttagaatagattanacaataaataagatgaataaatggattaagtagaggagttagtatgtataaatattattctaacattgagaaacttttccaaaatgtacgtaacaaaataggatagaacatactaatgaatatctatcaaaagataagacataaattgattttcagattgatatcaaagataatactattatgttagggtttaaaataattgtagcataatttttatagggttgatttcaattgtcttaggttttttaatataaacctttgaaagatgaaggttcctatataagatgatggggtagaggagcaggacttagaatagtggagactggccttaaactgacatataaatttaattacttgctaagcataaagtggtataaaccttcctatgcagtagaaagaacaaaattagtttacactttaaataagaatccagatgggctgggcgcggtggctcacgcctgtaatcccagcactttgggaggccgaggcgggcggatcacaaggtcaggagatcgagaccatcttggctaacacggtgaaaccccgtctctactaaaaatacaaaaaaaattagccgggcgcggtggcgggcgcctgtagtcccagctactcgggaggctgaggcaggagaatggcgtgaacctgggaggcggngcttgcagtgagccaagattgtgccactgcaatccggcctgggctaaagagcgggactccgtctc

SEQ ID NO: 183391 - DNA, 184 bp, Homo sapiens
tattagtattcagtgatttgactccaataaggaagcaattgcaacagcccaggtgagatacagtgagggtctgaatttgggcagtgatcctcaagaggaaggggcacatgccaggtgcttattatatcaggcttcagtgggtagcaggaattactgtattgttactgattccttggactaactg

SEQ ID NO: 183392 - DNA, 195 bp, Homo sapiens
ataatcccagcactttgggaagccgaggtagaaggactacttgaggccaggagttccagatcaacctgggcaacatggcaagactccaacacaacaaaaaatttgtaaatgagatgggcatggcggcatgtgcctctagtcacagcacttggaaggctgacatggggtgttgcgggctacggtgagctatgactg

SEQ ID NO: 183393 - DNA, 313 bp, Homo sapiens
ttttttaaaaaacacattttataacataaactaggaaataaaattattttggaaatataaaggaaagattattagggtttgcttgcagtagttaggaggtttctgagaggggaagagtaaaagttgggaaagcgaggcagcagagtaaaaggtgatcaagctatgaaaacaacatgagccaggagtttactgaagcagagtttttcaaagtagaaagcagtagaatatacgagtgaaaagataaagggggctggaggatgaggataagccagacagaaatcagacctgactctacagtgatggacactcctga

SEQ ID NO: 183394 - DNA, 459 bp, Homo sapiens
gtttataaagagtgggtcctgtgtaacttagtcaagattaggatctgcggttagcaatgtgtaaactatatttttttgtcacctttatctcagaaacatcaacatgtattctctttgatttaattcaaagataattttaaattagaaatcaatgtctttatatcaagaggcttttgagagacaggcttgtattgtccaaactgctactttctaggtatgtcacccttggacaggttacttgaccactttgtcccttttttcctcctctgaaaatggggcatgaactagacctgactcagagggttattgtgaagattaaatggaataatccaagaaaaacacttagagtaggaactgcatataatagtcttcaataaatggcagctgtttttatgatgaagaacacacctgtgaaaaattttatattctgtaataagattaataaaagcaatgagcaaa

SEQ ID NO: 183395 - DNA, 577 bp, Homo sapiens
cgcctgcctttgcctcccaaagtgctcccagcctccttgcttctttaaactgctgaaggataaatgaatggtccagtgaatatgtgtctcttatcaccttcccagcactgaaataattattctttgaggcagtattaagcctttatgcctgaagcttaggctttgcgatgtctatgcttactgaaatctactttgacacttctatagttaaactgttttgaatagtatacaacagtaatatccttctactggagtctaggtgatcacttctccagagggatttcagtactacaagctacataaaattagcagctactttcccctcagtgctacttagaggtaacctctaggggaaggttaaaaagccaagggaaggcagggcacagtggcactatcttgggttactgcagactcaacttcctaagctcatgcaatccccttgcctcagcctccggagtagctgggactaccagagagtaccaccatgccctgctaatgtttgcattttttttgtagagacggggttttgccatgttgcccaggctgttctcaaactcctgggctccagtgatccact

SEQ ID NO: 183396 - DNA, 194 bp, Homo sapiens
gcacgatggcgtgcatctgtagtcccagctacttgggaggctgaggcaggagaatcacttgaacccaagaggcggaggttgcagaattaaaaaaataatacagccctagccaaaatgtatttctccactagaaaattttaaagctacctgtataaataatttttatattaaaaaggatatcggcctggtgaggt

SEQ ID NO: 183397 - DNA, 318 bp, Homo sapiens
ggagaaaagccagggccaagatctccctgttgctaggctccccatagtgggtatctgggaacaagtcctgcagtcagagtactttaattagtgcacaatacttgcacaggcaggcaggcatactcacatgcagaaaagaaaacatttcagccattcaggcaaaagtctgtatttcacctgaatcgtaaagactgtgcgttttcaactcgtttttgtgtcagttttcatctaaaacttagcccccccaaaaactcaaaaggctttatcataattaccttaaatgaatttttgtcaagaggatttttacctgaattatca

SEQ ID NO: 183398 - DNA, 600 bp, Homo sapiens
aaagtgcaagacaggaaattgttagagataagactagaaagagggaggaagcagcagatttaaggctagaatttagcttgggaatattttgtgctttatctggcagagtagggaaacactagagggttttaagcttgcacacagcaggtctgctttgggttgcatgttaggtggatcgcatggtgacaaggctgatggaagaaaggtcatttgtatggtgcagatgtccaagcaagagatgaaacatcacaagtagcagtagttctgaactacaacagtggtagtgatcgtgagccttgcagatggattcacgaaacgtttagtgtgaaaaattagcagttccctaatcccagcactttggaaggctgaggcgggcagatcacgaggtcagaagattgagaccatcctagctaacacggtgaaaccccgtctctactaaaaatacaaaaaaattagccaggcgtggtggtgggcgcctgtagtcccagctactcgggaggctgaggcaagagaatggcgtgaacccgcaggcagagcttgcagtgagccgagatcaggccactgcactctaacctgggtgacagagcgaaactctgtctc

SEQ ID NO: 183399 - DNA, 569 bp, Homo sapiens
taattcgttatcgccctacacctattttacatatacctaccctaccgaattggctttctacatcatcatgcccacctttcagtggtgcctttgctttagtctctctttgaatgcccacaaaccaatcagcatgccctcccctgttctgagcccataaaagcccaggactcagccacattgggagagaaaccaccccagcatcatcccctccactgacagctattccattgctcaataaaattattctccaccctcctcactctttattggggtgtgttggggataacatcacacaccagatttcatttcagttaattaaataagtacttaatgagaggaagaaagaactgagcagtgttttatttaggacttggagaacatgggtgagtaaacagtaacaatgtcctaaatgggaaaggtgttctaatttcccaaagtcttcttgtaattatatttgagacatcttacactagtatctggctattaaggcagaatgtatttgcagatttaaatattttgcgactgcccaagatatccattagtgttggggataaatcagggatcctctg

SEQ ID NO: 183400 - DNA, 558 bp, Homo sapiens
atatggaaaaaagactgaatgctatcaccctaagactaggaactaagcaaggacatatcctctagccacttctattcaacattgtactggaaatcctagagaaaaaaataataacaggcacacagattggaaaggaaataataaaactgtctttttgatagctggcatgattatttataattatttcaatgtaaggaatctacaaaaaagtaaaacagaaaacaacaacctaccaaactaataaatgagtttggcaaggtcatatgattcaaagtcaatgtacaaaaatcaattgtattgccatgttctaagaacaaataactggaaattataattcaaaagtcaatgcaatttacaatagcaaccaaaaaactggaaataattgggaataaatttaacaaactatgtaaaagatctgtacaatgaaaactataaaatgttgctgacaaacattaaagacatcccacatacatgaagagatgtactatgtttatggatcagaagatcccatactatttaaagatgttaattatcctcaagttaatctatagatttgat

SEQ ID NO: 183401 - DNA, 342 bp, Homo sapiens
aacaatgagatagtgaagaaagagagaaagagagagaacagcaacaaaagcaaatgagataaacaaatttgtaaatactcataagatacatcaattgtgatctgtgcaacattgggatcccaatttcaaagaactgtaaaacaaacaaattgaagttataacttttattaaaccattggaatttctaaactgactggatatttcctgatattagataactattattaatctattttatacataatgttaaacataattctgatattttaatgttataaaagattaagagatgaaaagatatagtttgaattagtgtctaagtaatataagggagtggatgat

SEQ ID NO: 183402 - DNA, 382 bp, Homo sapiens
ttgaggagttcctgaggatgggggtcagggtgaggtcttggtgagtgttttagtggggttagcgatggaggtaggattggtgctgtgggtgaaagagtatgatggggtggtggttgtggtaaactttaatacagcataaactattactaatgctataaaaatgctagaatattatagtgtgacagtgagggggaagccttgctctatattttcatggaaaagtaagtctccccatgaactccaaccaacactaaaacaggactactgtctcaaaaggaaattttttagtgaaagaatctcgacgtcctctggccctccagctttccttgtggaattaataaactgcagatgtcttcaaagtgaagaaaaagccagtcatgct

SEQ ID NO: 183403 - DNA, 878 bp, Homo sapiens
caaacgatgaagcagaacttttatggagaccactaacatttactttcagttcttcctgagaaaagtaccaaggcataggttccttaagtgatcttaaattgtctcgtaagcattttatatgtgggaagcacttaggaaataaatgttcaatgaatgaattaatgaaggaatgaatgcaaaaacagctatgaaaaaaagcttaaaaagattctgcctgcttatgcaagatgctaatcatagcattccagaatgctaatggagaattagcccattttgaattttgggaagaggaccagtctgaccatacatacacacttttctcagacatgaagacagtagcatcctagcagccatcctgtatttctgaagatgaatgagtgacaccaaggatgaagaaagtgagtgtggagtcctggacttcccatctccagacctcttaccaggaacagaggaaaaggaaacctgtgtcttcttaatgtcatgattattgggttttgttcagagaattctgcaaactaacactcatttaaaagcttatcaagcaattattataaatctattgagtgagcactttctattcttaaaattgggatttgcctttcattatagtagaaatatagaaattatcttgtcttttaaaattcttaagaatagtgactagccaatgtgtgtcacttcgtcgaatacctaactaataaatctacttttgggggccttccatgattccttaaaaacgcgaggtctgacacaacgggttctgcatgggtaaaagtagtggcacacaaaaaaaaatgcggcgccaatataattgggcgaaataattaatgaaggtgcaacggcgagagttggtgtatatgacactgtgtagaaaagaatac

SEQ ID NO: 183404 - DNA, 831 bp, Homo sapiens
attaagtggagagccgatagtgaataggtaggtagttactttggtcttgccataggtttttggctgtttctgatgagctactgattgaagacccctggggtaggggtgaggcctgcattctgggtccaagtctaagagtggcgactagaaatgagcaagttatttaaattgcctgggccttggtttcttcatatgtggaatggggtaaagcctgccttcctcatagggctgttggaagatgaaaaggaggaaggaaaagcaccgtgaaaatgttaacgatggttagaaggtgggctctgctggtgacagacagagccttgatatcacctgttggttggtcacctgcttccccaaggccacgccctgcagccttctccttgaccatcccagccctgctgatgttccttgtgatttcacaatggagtacttatataaaattggtaactgctttccgggaaattgacttcccttcccctcgtcctgaaaactcaggcatgggcatatttcttggagattttctagttgaatcagaacttcctcttggtttgcgtagattccatttagacctgcattgtccagtgtggtagccgcttattgagtaagccacgtggcttattgagtactggaactgtggcttgtccgaattgggactgctttaggtgtaaaatatacactagatttccaagacatagtatagcaaaaactctgtacaccatttcattaataattactatgttgataacatgttgaaatataacattttggatatattagattaagtaaaatgtgttcttaaatttcacctgcctgtttcctttttattcttttttt

SEQ ID NO: 183405 - DNA, 606 bp, Homo sapiens
tcggtcggtccacttctacccacgtagcaaatgcagaacttctataagttttgttattggccagatgcttccagcaactgagaataggacctgctttcatctggtgcttggctttggctgctatcactagccacccttttctccgtggctacctgggatctcagaagatgagggctttctccctgtgtgctgcctcatacactaggggcattgaaagatttgacagcccaccaggtgacaccatgtcctagccccctcaaccatgagtacaaagccatctgcttgtctatgtgatgcctatgaggacaatgggtaggtcatacctctaccctgaccgctcatcctggccctctgaactcctatgagacaaagccatcccttagtccctggaggagttgcttttccctgccctgacccagaacgacctgcctgtaggtgtagtcaggtatgggccataggctgaagtcaggaacacccaaagatggtgggggcaggcaggggagtgagaagtcttgctttcagtggtgtgccggatgctttgtttcacaggcgcataaaagaggaacttcatttaacagacctttccatgacactgttggtgagcta

SEQ ID NO: 183406 - DNA, 366 bp, Homo sapiens
acactccctccccacagccacttcagtgacagctgagttaaaagttaggcagaaaagtcctaaagagggaaagctggtatataagccaatgctgtactttcaatttgctttttaaaaatatggtttttttctttttttccttttttttggaagggtttgctatattccagtataactaaaaagtgctggaaaatcagttaacctattttctataaaattatccagtccttgcacagtagtatcgaacctgctattaatatggctttctgctcctaaacttccatacagaatacagactttttaaagcctgtattctttgtatgaaaactggcagtatattttatttatcttggacgtatcggaggt

SEQ ID NO: 183407 - DNA, 501 bp, Homo sapiens
acagtcttcattattgagtatgcacatatgaaaaatgaaggtggaatactggtttattaaaaagttacgcttgtttagaaactctatcagaatacagagccattcagaaatctgtgactatctgtgtatggccagaaacaacagccacagctattgaaagaattggttttcttcaatactcatccatccaaaagctattgcttttgaaatcagtcagtttaatgactggtcttgaaaagaaatatatttattctgtaaaattcctgtataacccaccatgtttgtttttctgtttttgtttgggttttttttttaagctattgaattttttctaactgagataacattcacgtaacataaaattcactatttttaaccattctagtgtacatttcagtggtttcagtatattcaaaatgttgtacagtcattaccaccatctaattccacagcattttcaccactccaaaaagaaatctcatgctcactaggcagtcactt

SEQ ID NO: 183408 - DNA, 142 bp, Homo sapiens
ctgtggttgttaagcagagttacctaaagaaggaacttcaagatacaagtttaaagcaacactctgtaattatttgtattatagtataaggttgttaagtttgtcttcaccctttgaaagagttctgaacagagttagtgtt

SEQ ID NO: 183409 - DNA, 235 bp, Homo sapiens
gacccaagcttcttccatccatggctcttccatctcccaaacgtgtcatgttggtctgcacccagtcagcaggaaagggtaagagtggaggatcttgcaggggagcctttgggaccaagcctgggatgctccccacttctgttcatagtccacaggcaggggtccagcaccagatcggggcatcggtcacaagagagaagcttggggcaaaatctgggaatttccaggaacacag

SEQ ID NO: 183410 - DNA, 440 bp, Homo sapiens
cctggattgtgagtagagtaaccagaagaaactgcagcctgtgaggggaagcttggcatggaagaaatatttcagaatttatgttcttaatacatatcagctccaccactttactaagctctctgcttcttcttgcttttccctctataccattatgagtggagcccttcaaatttaatgttaatttgaacattaaatctatatgcctcaaacaccaattcctttatatctataggaaaactagttgcaacatgccatcctgacatagacaaacagtaaatagacatttgcactccaactttataaccagctgcaagtttctttctttctttctttcttttttttgaaatggagtcttgctctgtcacccaggctggagtgcggtggtgcgatctcggctcactgcaacctccgcctcccgggttcaagtggttcgcctg

SEQ ID NO: 183411 - DNA, 438 bp, Homo sapiens
tggagtgcagtagtgaacacagctcactgcagcctcgacctcctgggctcaagctgtcctccttcagcctcctgtgtagccaggagcacaggcgtgtgccactgcacctggctaacttttggatatttttgtagagatggagtctcactttgttgcccagactggttttgaactccagggctaaagtgatcctccttggcctcccaaagtgttgggattacaggtgtatgccatgtgcctggcctctgtatcttttcaatgggcatagtcctcttgtatttatgtagtttactttcgcttgttgcagaaaggacataatgtggttaaatagggctatagtaataattcgtgtcctcagggttgttgtgaggatcaaagaaatgtatgagaaggtaaactgcaaggttcagaatagtaaaaataagcccccacttcatg

SEQ ID NO: 183412 - DNA, 642 bp, Homo sapiens
taggattctctaaaataccaacaaaattgacaaactcttagctagacagacagaagactcaaaataactaaaatcagaaataaaaggagacattgcaactgatgcttcggaaatagagatgataagagactgctatatacaattatatgccaacaaattgaatcacctagaagaagtggataaattcctagaaacacaaccttggtgttcagtcacagtcttggtgactgaattatggagaaatagaaaatctaaacatatctataaccattaaggatattgaatcagtaatcaaaaacctccccataaagaaaacctcccaataaagtaaaacccatgaccagatggcttcactagagaattctaccaagcatttaaagaagaattggtaccagttcttctcaaaatattccaaacacttgaagaagaaggaatacttccaaaataaatttattaggcaacattaccctgatacgaatagaaaaaatacaacaataaaaaagataactgataaaaaaaattgatgcaaaaatcctcaacaaaatactaggaaaccaaattggattatacacttcagccatgtgggatttatccctggaatgcaaggatcattcaatgcatgaaaatcaataaatgtaatgt

SEQ ID NO: 183413 - DNA, 168 bp, Homo sapiens
cagcatatgggtcaagtctagaaaattaaatcttttccgaactgcattaaaatttttaagccattttatctttatcaagaaacactttatctacacttacatgttttttgtttttagagtttaaatttcagcacctacataattttcatacccactgcaatatttcca

SEQ ID NO: 183414 - DNA, 157 bp, Homo sapiens
aatagaaaataaacattataggtaagtttagcaaactttcagcagttgattaagttagagagaggaatggaaggtcaacatagactcaaaaactatctggatatcgtcatggataatccagcactaatagtttttaaaggaactatggatgcattga

SEQ ID NO: 183415 - DNA, 370 bp, Homo sapiens
gtcccttcctacatgtgaggaggcagtgttcatcccctctggaggatgcagcaacaaggcaccatcttggaagcagtgagccctcaccagacaccaaatctgctggcacattgattttggaccttccaatctccagaactgtggtaaataaatttattttatgtataaattaccaggtctggggtattttgttataagagcaggaacagagtaagagatagacattatatagccattaaaatttaagtttttcaagaattctcaatcactacagaaaatatttgtataataatattaagtgtaaaaacaggacatagtatagttacactatcatttacattttattagaccgacacacatgccattcaac

SEQ ID NO: 183416 - DNA, 298 bp, Homo sapiens
caggggcggggcggggcgaggaggcggcagcgcgtttaagtgacgtcttggctgtccgcgccggcagaggcgagggttctggggtttctgggactgtctggtgtgttttctgtctattgaaccctttcctttcgacgtctcttctgaatattgactcatcgggttgtagaaatccagggacagagttgacatcactgggcattttagccaaaaagcagtgctcgggactgcatgtgccagaagtaaacttgtcaaaactcagattgtgtttcccctaaagtcagcttaaagtgcaatg

SEQ ID NO: 183417 - DNA, 323 bp, Homo sapiens
tcccctagtaaaagtttctgcaaaaagcttggccagccatgatgccattgagcattgacccccataatcaatctccctgtgactctcacggagaatgctgaagcaaattttctgtagtgagggatctgtagaccatggcatgcagcctccagtctcactgtgcagactgaggacagtgacacaggtcattgacacacggctgacctaggcagtgattctccctacactaatacagtgattctttctgtgagagactgcctgcccttaataagataacatgcccctttggccgggcacagtggctcacgcctgtaatcccagca

SEQ ID NO: 183418 - DNA, 743 bp, Homo sapiens
gtgtgctgtgatctagaggatttcctcctatctgcatacagagccattggaggcttccttgttgcttacctttgttgcttacccttgttgcttcctctttggaaaggggcaacatacatggcagatgccattctctgtctctttggaaaactttgtcagcacatttaaggtttttttctagccacagaaagccacctgcttcaaagtctcatcctccacaaatggcaagcacacaatcattaatggaggggaggggtacataggctttgccatttgattcagttgggacaaataggggaggatttcttagctctacagctctgtccgtgtggccaggtgacaatgtcaggctgcactgccattagacttgtccctttgcacataaggcttccctccaatcctttccacagatgtggatcctcacatcacttcctaataaacatcctgcacactaaacttcatctatatccagttccctgggaaccaaacctgtgacaaaagtgaaaagtttctagggaaaatagggtttccttatcagacaggaatcaaattctgctgagctagaaaataaagtaaagtctgatgccatctcatgattttttttattaagacattaccactgccagcaagaattatgtgcatcaatttgtggggacaaacatcatattggagtgggatgagattgctgtcggttgaggagaaatgctgatgaatggactttaccctcaacctggattcaggag

SEQ ID NO: 183419 - DNA, 405 bp, Homo sapiens
ctccctatgagcattctctgtcatgtgagaactgggaggcatttgggagtaagtgcagcagaagagaggcgaagaaaatccatcggcttttctatttctcttgggagaagactgaaacaagtgtacttagatccccagtcagtattaaaacttgtgatttctccagattgttctgaaaacttgtcgccagtccagtaaatacttttgtcttcacagatattaacaaggcaatgcagaaattctcttggattgtgttatttctgtgtctctctcaaccatttgagagtaacacagcaaaagttgggaaagctaacgttggcacacagatccccagcctggtcctgactcgctcaactacccaggagcacctgcttggcccagcgtcccctcatagtttcccttcat

SEQ ID NO: 183420 - DNA, 405 bp, Homo sapiens
tatgcagtaaacccctcttctccatccctcggactacagctctgctctcgtagcactcgaacacccagcctgtgggcaagagggctgcctgtgaaagcggggaaggctccagaaggaaggagttgaggggccatccatcgggacctcaggaagagaggagagctgactgctcttagagatagggagaagaagggaaccacacagccacatctctagggtcctcctgcccacctccccagacaaaggtctaagcccccagtgctgactagaccccactgctctccaggcatctccgcatcccaggactctaatcccagccattgcctctggaagggcaatgctggggtccttgttgccctgtccccctccctttcctgcagaaagagtttccttccagaggctgtt

SEQ ID NO: 183421 - DNA, 569 bp, Homo sapiens
atagttcaaaagtaaaattacatctacgaataggctttctacgcagtttccaatattgttattcctgttatctagcatttttatttttattggtgttaagaaacttacttaaaaccttattgaattttgctgcaatacttcttttgtgtacatgaatgaaatttccccagagccagttgcattgtgggaaaattatacaaaaacttccttagtgtgaggttcaagttccacattcactctattccctgttccctctgctttgtaaaaaactgacaagcacataccaacaccttactgatgaaagccataacccatttctattacattccttcagatttgattttatgaaaactttaatcactttatttgcttttcttttaacaatgagtttcttcacatccatctcaacacagagagaccctaactgtgaacaacattttaatgaaacttcccctgagtgaggatggagggaagtcgtcccaccaatgctactattaatacaaagaaatgaaacaggctccatgaaggcagcatgctttatcacacaggaagattgttctgggggctta

SEQ ID NO: 183422 - DNA, 208 bp, Homo sapiens
catgggaggatagggggtgttagctaaagggtatgaggtttctttttgaagtcatgaaatgttctaaacttgactggtaatgtttgcgtatatctccgaatatattaaaaaccattgaaatgtaaaaagtgcaaagaaaaaacagcccaagttgcaattttattcaacacttgattggctttaaaaatagattccaggctgggcatgg

SEQ ID NO: 183423 - DNA, 489 bp, Homo sapiens
acgttagtgaggggctgtaggcaagaagttgatagaaagaagctgttgtcagcagtcacttttttagaatatattgtattgtactaggtgtaatgccttgggttaaatgctgccttgcacacaagaatttataatctgtgagaagataaaaatagacgaatgctgattagaaacactgtcttgggtagcatcataaaaggatgattcattaggaaatcaggaagtctataatgcaattttgatcatttaggttgtatttttacaagtttttttttggatttctagtaattttgttgcaattccacttctgagatcatcactgatgaatattatttagaattatggggccaagcttagtggctcatgcctgtaatcttaacactttgaaaggctgaggcaggaggatcacttgaggacaagagttcaagcctggacaacatagtgagaccctgtctctacaaaaaataaaaattaaaaaaacttagctga

SEQ ID NO: 183424 - DNA, 570 bp, Homo sapiens
gatgatacgggatgatcctattggtgcgggggctttgtatattatgggcgttgattagtagtattactggttgaacattgtttgttggtgtatatgttgtaattgagattgctcgggggaatagtttatgctgtacagcaaaactattctaaaaggtttttttaaacattttaaaaagacttaggaaaccaaatgtttgagattcaaagcttgattctcataatttgaaattagacaacaaaaaagaacagacaaattataaagaaataattattatttctccatggttttacaacaaaattttttattaagatttcccacacgcaagagaactttcctgctaaaacaggagaattgagttcaagtaggaaataacctttttaaaatagaagaacaagtacactgggacaaagttcacagcaaaagacaggcctcgccatgaaatttcccacacctaatgaaattaggacttttatggtaaaacaaaacaaaacaaaacaaaaaacagttcttattttcagtttcccaaagaaatcattttcaaagccagacactctccctctccccacc

SEQ ID NO: 183425 - DNA, 328 bp, Homo sapiens
gccaccttcccttctgcattccaccaggaattgaagcagcataagaccctcaccagatacagatgcccaattttgaacttgccaaccaccagaatcatgagccaaataaagctctttgtttaaataaactgtccaatctcaggtattctgttacagcaacaaaaaaataactaagacattcatatagttagaatcatacactatgcagcctttcatattggctcctttcacttagtgatgtttatttaagtttctttgatgtcctttcatggcttgatagctcatttctatttggtgttggagaatactgctttgtctgaatgcccca

SEQ ID NO: 183426 - DNA, 519 bp, Homo sapiens
aaaaccaccccacgtagaaaactgatagaagtgggattgtttccactggagcagggctgggggctcagagctctgccctcctcctgtgcccctagacaccagcagggagcatagcttgaaaattcaccaatgaagaaaccaccccacgtagaaaactgatagaagtgggattgtttccactggagcagggctgggggctcagagctctgccctcctcctgtgcccctagacaccagcagggagcatagcttgaaaattctccaatgagaaagacccttttagggcctttatgcagggggcaggtgacatttattccggctcatttagggcttcctcctcgtttgggtttctcttcaagtctctcaaggaagaataaagtcacataattgccattgctgcatccaaggctcctggaaccagactgcccaggttcggatcatgaatctgtcactgaatagtctcacgagagcttgggctccttaccgaactcccccaatgcctctgatgcttcacctctaa

SEQ ID NO: 183427 - DNA, 450 bp, Homo sapiens
tgttatattagagatgcagtattgtttgggaaagctgtggagataacattcttaatgcagtggtttggaagaatcttaagtaattatgaagggttttgtgtgaaaatatctgttatgcttattacatggcagtacatgaaaaaatgcatttcaagtactaatttatttaattttatcacacttctacatggacgctatcatcactcatattttacaagttcagaaactgaggtggttaaacatttttcccagactattcagtaatctgtcagttgcttttctcagtagatatttctgtctgactgaaccaatgtctaaaaagaaagatctgggatcctcgtcgttttgccttcaaatagccctcttttggacaaatcacttgtgttaagtaagatgatattcaacttcacagaaaaaatgctgagacaataaatgcaattcagagaaaag

SEQ ID NO: 183428 - DNA, 268 bp, Homo sapiens
agtgagctgagatcatgccattgcactccagcctgggcaacaagagagaaactcaaaaaacgaacaaacaaaaaaaaccccaaaactgaggggtttaattcctgaatagaagaggataagaaaatacttagcccccactctagaaatataggactcccaaaagtataattgaaatcccatttcctaccagccaggctcaaaagagattgtgtgatttagagaagattattgtgaggattaactagagtgtgttcaagtggttggtaag

SEQ ID NO: 183429 - DNA, 351 bp, Homo sapiens
ccctcacacgcacttggtacacgcagctcggtgaaagaaccatgcacaaaaggtcacagggaatgatcccatagatatgacatgtctaggtcttatctgtagaatagatacatacactgagacaaaacacagattgtctttggtgaccagaggcagaggggaagggagaaggagggaaactggttaatgggtatgaggtttccttttgagatgcaaatgttttgaactggatagagttgtgggtgcacacaaagggaaagggtggatgccgaggggcaagggagtgaacggtactagacgtgttctgtttccttctccagattcgctctcttctcctcttccctctcctct

SEQ ID NO: 183430 - DNA, 699 bp, Homo sapiens
tagggcattcaactgcggttggacctcagtgccattgagcaatctttgtctttggtcagaaccctcttctataaacattcaccacttggttccaactgcttactcacccacgtgcctaatagataacctcacctcctaattcacagagggaggaaagttcaaaatgcaggaactttcacttcccactgtgagcctccaagggagtgtgtacatctgcatcctgctgcctcatgcatggagatagcctttctgttcaacctgtcatctgttatgatcccacttcatcccatcaatgggatcttactccttcagccacccccttggcacctgtactttcagctgctcagcctctactggtccgttgccctcagccaaaaaacgccccttcaaccctgcactcctggttattaccctattgtttctctctgtggacaatcttcttgaaagaattgtcactccccttcctcagcttagaaactggtttatctgattgcctgacttttggtgctgttggttaccctctcattttctgggataccactatcatcatcttctctttcatgtctttgctgtttttgtatcccctattggattgagcaaagtcatcagcctagtcaagtcaccccccaacaagatgaaacacaacagtcatcctagactccttcctcccatttatcttccatagccaattgccaaatc

SEQ ID NO: 183431 - DNA, 343 bp, Homo sapiens
ttttctatgggaagagctcaccaggtgtgtgctgtgtgccaaggaccacagcaagcagaggctgtccaaacatgaagaatgcctctgcacaggccaactgcatgttccgcaggaccatttaggttgcaccatctccctctcgacagcctggcacagtggcattccggtgtgtgctacccgtgcctggctggtgaagagcctttctcccactccacctggagctccacgagggaagggcttcaccctttttatctaacccaaagcaagtgctcaagtaacaagagaagacgacaagggaagggaagagaggaggtgctgtttgtgctggatcccgaggtggaga

SEQ ID NO: 183432 - DNA, 1102 bp, Homo sapiens
agcatccattccaggccgtggagggacgtgatgctgggctgtgtttactaaacccatgggttttcagcctcttaagcccagctccgatctccaattagttgagagcgctgggttgactaacctctggtatctgagcacagacagagggtgctgtgggtctgctgggtggcagaaatggttccttccggcttggcgttctctcctggccactcttcctgctgcctctgactactcagccttgttttcggtgtgtaggccccagctgcccactggaactgccggctaatgcttgctctcccaagatctttaactcctcctggctgcacctgggtagggatggtggcatcgatgcccctctgtctgctgaaggacctgttgctgcttctgtcttttcacccctccttggctgatgacccagagccctctgatgatggcattctcctggcaagagaaaaagacttaactagacttctgaacttgaacagtttcaggttatattttaatttttttttttttgtacaggttctgattctaatacatttcaacatgcttttgtcccccctcgtgtcaatatttgttatagactaatcgccggggatttttcacctggttggagggtgggggtggggtggggtgtgtgtgtgtgtgtgtgtgtgtgtgtgtgtgtgtgtgtgtgtgtgtgtttgtaggtcctggactgattaaagttcattgaggaaaaagcacattttacaacaaaaaaataaaagtgtagatttaatgtatgtgactggggtttggggttgcaaacctggtggatcttgaggggctgggattagggtggttcaggaaaatgtgatgctgtttccccatgtttagccatggtcaaaaaatggatttctcctttttctaaaatgtccagcaactgcctactgttgatcaaatgttgaagtattcttgtttcccttttaagccaatccatgtgcccacataacattatgcccaagtggagagttcactttaatttccaaagtatgtttcatgcagccccctgtcagctgctctgtggaaaaggggttctgttatgaaataaatgttgcactccctgcatcccatatcctca

SEQ ID NO: 183433 - DNA, 1072 bp, Homo sapiens
tgtcattgctcttatataataatactatatttattgtaataaattaaattagaacttgcaataattttatcaagaacaaagtctaaatgatttctccttcaaatttgagatgcaattaaatgtatgaaatcctaatatcagaagttaagatcttttgacataaatatatcaagaaaatccttcaatccctcacatgtcaaataagtaaactaaggttaagaattcagttaagtaaaaagattggttaagaatttatttccttgggcttttcaaaataaaatccctttataattgcatggaaaatgttttccaatttatttggcttctggggactctgaaattttacagttcagtagatgtttctgttggtttctttttgaagaagagtggaattttagtttctgaaatataaagtgggagcactggatcctaatttcagtgtgttcatttatgcgtgttcctgagtctaaatttatttttttaaaaaataaaggtaattatccctgatctgcccatctgagaagatgttgtatagggcaaacatgaaaacatatgtgacaaggactatgaaaactgtgtaaacttctagataagcatgtaacagatacttaggcattttttcttataaaatcaatttcaacacagatgacataaattatcaaattactttgatttcattgagttttatagctttccccctctagtataaaagtgctgattactcatgatattcatagcgtgttttcatagccccagtatattcacaagagattgactagatataaaaacacccaccactaaattaataagtacccaacagacatttggttttgcacattggttccttcttctggtcctccccatggggccggttccattaattataagtctccctagtggcacagacgggaatggtctgagaaaggattaaccctcgaagattttaactgtgccacaactctttactttaagctgcctgctcgtgacacaggtctcagggtttattggggactcctaatggtaaggccttactaacagaaatattggctttataacacaaaagtgttgaaat

SEQ ID NO: 183434 - DNA, 310 bp, Homo sapiens
tttcccttatgggatctttgcaacttagaacacaattattactcattgtatccgggtcatttaacatcttgtcagaatgctaacattaaataaaccaggccaggcgcggtggctcacgcctgtaatcccagcactttgggaggccaaggcgggtggatcacgaggtcaggagatcgagaccatcctggctaacacggtgaaaccccgtctctactaaaaatacaaaaaattagccaggtgaggtggccagcgcctgtagtcccagctactcaggaggctgaggcaggagaatggcgtgaacctgggaggt

SEQ ID NO: 183435 - DNA, 199 bp, Homo sapiens
tatggtgaagccctaacccccaatgtatttgcaggtacggcaagattaaacaaataacaagaaaagatagtctcttctcttctggttcaacagggattattcacttatcaccaacatatccaaagctgtcatgaaatcctatgagaaaattatcttattccttcctcaaaagaagtcatcccatatttccatcaagtcg

SEQ ID NO: 183436 - DNA, 463 bp, Homo sapiens
gagttggaatgaactgccccattcagccatatatctggaaaggctaaccaatgccatcttagactaatttttcaacatagacaatggctaaacaacctcctgaacttagtcttgcaatgtatctctctagagctaaccttagcattagatggtaactagtacacaatgaatgggagggtgggtgtgtgtgctggtactctaagctcccctcccatttggcttcaactttaaaagcttgtctcttgagggcacactgaggcagttgggaggagagagccaggttctccttaactctcgagtctgctgcataaatttgatgagtcctaagtggggcttggggagaggacatagggaagctacatttacccacaactgtgactgagccatattcctgctgtcatggcctcagatctaggttgaacatacctactacttgggcacagggaaccaagttataggtata

SEQ ID NO: 183437 - DNA, 145 bp, Homo sapiens
gtgggtagcggtcagggtgggccgcactgaggaggtgactttgagcagggacttagaggagcaagggaggcagctaagcaggtgcctgggggtgcattcctgtctggttcattctgtggagagggcttacccgttccctcactgt

SEQ ID NO: 183438 - DNA, 413 bp, Homo sapiens
gagtctcgctcttttgcctaggctggagtgcagtggtgcgaacagaactcattgcagcctcgaactcctgggctcaagtgatcctcctaccttagcctcttgaggagttaggactgtaggcatgtgccactaagccaggctaattaaaacaatttttttttttttgtaaagacaggatattgatatgttgtccaggctgatcttgaactcctggcctcaagcaatcctcctacctcagcctcccaaattgctgggattacaggagtaagctacagtgcctgaccaataattggcatttcttaggggttctctggtgatgtcactgcagctggcttgggcaccagactttgagaacgactattttagccaaactcagttcctgtaggtagacactccagatatttttaaaagac

SEQ ID NO: 183439 - DNA, 177 bp, Homo sapiens
ccacaccgctgtccctcccaaatctatacttaagtcagtcatatctgtacaagtcagctcctttttgaaattctcctctaccaggtcagcccagagagagtaagtgctctcacttctacacccacagaatatttacccaaatgctgctctgttatttgactaaactagcggtgaggg

SEQ ID NO: 183440 - DNA, 236 bp, Homo sapiens
cacatttgggcagacacgagacttcagcaaaggcagatttctacagctatccagtgttcagtaatggtcgtttacaactgttcttcttgttcagaaaaattccgttctttgccctgtgctcagaagatcacaataaaacttcaccacatcaagctgctgtgggatagggcaaaccgggatggttaagtccatgagtgcatgaagtttactgttggtgctactggttcagtaacagg

SEQ ID NO: 183441 - DNA, 251 bp, Homo sapiens
tacaacctcaaagagctcccagttccttggttcttatcttaactgtatgggtctcatgctttatcaaccatccaaaagtagcaggaactcccaacaaatgaagtgatgaagtgagatagtaccagggtaacaagttgtatctggccttcttagggatgaactattcaccagagggccagctctaagggaatgtcaaatagaggcactagaaaagaggcactctggcttccaggtaatgacagtataatgag

SEQ ID NO: 183442 - DNA, 812 bp, Homo sapiens
ttgctgagttgatctagaggatcccagaaaaggggaaaattgcatgacattggatttggtagtgatttgttggctatgatacaaaaagtaaaggcaatgtgagaaaaaaataaataaacagatctttaccaaaatgaaactttaaaaaaatcacttttaagttatgaagaacactatgaagagagcgaaaaggcaatctacagaatgggaaagcatatttacaaattatatgtctgataaggtattaatatccagaatctataaatgactcctaaaattcaacaagaaaatcaacatccattcagataaaacctctcaacaaactgataataaaagagaacatcctaaaaactgataagaaacatgtataagtagtatacaactaataacataattaatagtgaaagtctgaattacttcctcctaaaatcaagaaaaagactagcgtgtgtggtttcaccactaaggtcaacattgtattggaagttttatcaagtgcaataaagaaaaaaaaagaaagataaagaagaaaagagtaaaaataaaaagaaataagacatctagcatgaaagagaagtaaaactatatttggttcggtagaatgatttattttcctttgggtatatacccagcagggggattgctgggtctaacagtagctctgttttaagttcttttagaaacctccagactgctttctacaatggctgaaataatttacatttctaccaacagagtacatgttcccattactctgtagcctcactagcatctgttaatttttgactttataataatagccattctgactg

SEQ ID NO: 183443 - DNA, 405 bp, Homo sapiens
caaggatgtggcccaggtttgctgtctgtgggaatgtggaaatggagttattcttcagttctctggttaattagttaattgttagaggatggtgagcaatatacaggtatatcaaaacttggagaattttaaccagttttttttttaatgccattacttttaatggcaaaaaccacaattacttttgcaccaacctaatataaggttggaaacattctaggagctgcagttgaatattctgtagcatgacagtccatgaaagcagaaaatctttgttaaacaagggtggctgggcaggtatgtgaagatgaagtagatgaagtccctctcatattttggtttccaaaacagggcctttatttattcttttggagtacttgatacttgtgaaatggaaaagtgcta

SEQ ID NO: 183444 - DNA, 697 bp, Homo sapiens
  misc_feature (14)..(14): n is a, c, g, or t
  misc_feature (16)..(16): n is a, c, g, or t
gatctagaggatcncngattgtgaaataggtaggtgtaatgaagagaaacagagaaggaaagagaaggaaattttggtaaaaaatgatgaatactcctttttagacattcgaatttaataaatcagtttctgttgatgttcatcagtgaaactgtattaggcaaaaggtcaagtgtggagataaagttctcggtattgttcacacaaggtagacagctaaagatatgaatatataggagagtacttacaatagaaagctgctaaagtaatagcttttggaagttatgatgtaggaaggctatgcaaagcagaagagtggcagattctactaatttcttcccttttcccttagtaagagcccctattttgtgcggggaagtaatgtatccagctaaaaggctaaatttctttgccttccttgcacacagggtagccaacaagatgtaagcagaagtcttatggtgtggcttctgggaaacctctccaaaggtaacagactaagatgggaggcaggtgctttttctcttctaccttccttttctttcaagactggaaagtaaacatgatggctggagctacagaagcaattttacaataaagaagtaactttaaggagcctgaaacagtgattccattgcgatgtcatcataccagccctagactacttacctacctatttcacaatcgttctcttata

SEQ ID NO: 183445 - DNA, 509 bp, Homo sapiens
aaggcggaccgatgtgaataggtggcagctaaagatatgaatatataggagagtacttacaatagaaagctgctaaagtaatagcttttggaagttatgatgtaggaaggctatgcaaagcagaagagtggcagattctactaatttcttcccttttcccttagtaagagcccctattttgtgcggggaagtaatgtatccagctaaaaggctaaatttctttgccttccttgcacacagggtagccaacaagatgtaagcagaagtcttatggtgtggcttctgggaaacctctccaaaggtaacagactaagatgggaggcaggtgctttttctcttctaccttccttttctttcaagactggaaagtaaacatgatggctggagctacagaagcaattttacaataaagaagtaactttaaggagcctgaaacagtgattccattgcgatgtcatcataccagccctagactacttacctacctatttcacaatcgttctcttata

SEQ ID NO: 183446 - DNA, 447 bp, Homo sapiens
gcaattatttaatatggtaggtaaacataaactgccattgaaatttagtagaaagcatattatatgcagtgacgataataccttcatgaaattctttacttatcattttttcttttcaaatttgttttacattaaagtaggatgaatgtcttatcctttttactacattgcccaccataatggttctcaaatgcaacaacattttcatttttgatagaactgagtttcatcatttactttgtgttacacttttccctagaccaaggacctatgaagtgagttatccatacccttaccacataggcagaaacagcttcttttacagaaatcaatttcctgattctcaaactcgatttgatctccttcctaaaactgatctgccagagaaaacttcgaagctacaagcttccagctagttatccttttccacttctcttttcacaatct

SEQ ID NO: 183447 - DNA, 177 bp, Homo sapiens
  misc_feature (153)..(153): n is a, c, g, or t
cattgtaaactatacctggatgcagaaattatattaaaaaataaaactgactaggataaattaatgagccctcagtcagaggtccatttccctgtggactactcagtgccagaagaggctaaacccttaactttggccagcccctgggcacanacgaggtgatcgttctgcatggat

SEQ ID NO: 183448 - DNA, 484 bp, Homo sapiens
gctccttgtccaccagggatcaggcccagggccttctctcttggaggcaaataaacataaatgatgttcatttgagcagctcctctgtgcagagctgagatcaagtaattgtaaatattttgaggttaattcacaaacaacctcacagccaaatagcacttatcctacttattgaaaggaaattgaggcacagggagacagtcactaacaagggtcacacaggccataggtgtcagattgaagtcacatgaggtctgtctgtagccacagccccctcctctcctcaactgggggtgggtggggctgtttgttgttaggcatctgcatctgagaccagtcatgggcttgcgttcttttgtcttgggcatccacagctcagaagcggagattctggtctggagagtgataagtaaatggagaaataatcagttttactctagaactagatcacctcaacagtcagggtcagtgccgggattgtcca

SEQ ID NO: 183449 - DNA, 480 bp, Homo sapiens
gtgagcgctttctaaatttactactcacacacattgcttctcctaacttggcatcatttctccctttatgtaattgacacacctaagagttcctctctgaccggttctgcctctccctgagatccacagccccctcacatgacctcaaatcctgtgtttcccgatgtgtcagtgtcactcccacggaaggataaaggaaaggacttcgctttctctccccactcacaccctgtgccaacagaggcccaaagtgagacacacgcttgctcagtagctctctcatgaaggggggaatgagtgaaggaatgatccataacctctatagagactggatcctggatgcagaatcctgggaggttctgaccacacctgttccgtgtccatcaggggctgagatccatgtaccattcctctgaccccctgtcccgaaagccaccctatctcatgtgactctggggttccttggccatgggagggttt

SEQ ID NO: 183450 - DNA, 574 bp, Homo sapiens
aaagctgtctcttgtggggaaaatctacattctgtagcgaatcccatcccctttccacatcttttcctgttccaagagagatttaactaagagtctggcacctttactgtctaatctctctgaagcctgttacctggaggcttcatctgcataataaaaaccttggtctacacaaccccttatctcaacccagacattactttctatggattccacatctttagataataacttaactctttcaaccaattgctaatcagaaaacctttgaatgcacctgtattcaaaatctattccaaaatccctttctttgaatgcacttgcattcagagattttggaaatccctgcttcaaattgttctggctttctagaccaaaccaatgtacaccttaaatacgatattgactgatgtctgcctctaacttctgtccctctaaaatgtataaaaccaagctgcaccccaaccaccttgggcacatgttcacaggacgtcctggggctgtatcataggccttggtcattgatatttggctcagaagaaacctccttaaatattttacagagtttgactct

SEQ ID NO: 183451 - DNA, 351 bp, Homo sapiens
aggagagagaaagggatgtggtccgcctcgtgtcataggaaggccagaccttctgagtgtccaagagaagccaaaaatgtggaattttacatggaagttcaccattctcaaatgctgggccaacactctacaggacaaatgagacgcgtctgcagatgacatgaggcctggggcctaggcggtgaccatttgagcggagaggccttgcggagctggaagaggatgtggtccgcctcgtgtcataggaaggccagcctgggccagtggggagggcatgtgggttctcctaagactggagaaatgagcagcaggaaagggctgcagcgggaggggtctcgtcctcactccacc

SEQ ID NO: 183452 - DNA, 332 bp, Homo sapiens
ccagcaccaggcagaaaccttctctagaggaacacgctatgaacctcaaaaaaacatccaagaaggacggacataaagtcacaatcaagaaccatgggtagcgggagtaagtcccggaaagacctcagttgtaggaaaatcaggcactgacccaaaacacatacgaaggacactcgacaaaacaagagaggtcatccagggtcaggctggagctagaggcctccagatcctgtcacttagtgactgtacaaacctggtggcttcctcaacctccctgtgccttagcttcccatttgccaaaaagggggattagaagagcccacactctccct

SEQ ID NO: 183453 - DNA, 126 bp, Homo sapiens
cagtggccgctgtcacagccacatgctctcatcctcactgactgaatgacgagaaatgaaagctgaagtggtctacacagcagagagctgtggggtggggtcagccctggccacctcttactttgc

SEQ ID NO: 183454 - DNA, 436 bp, Homo sapiens
actaataagatggttcactaaatgaggagggaaagaactgcataatgggactggagatcggcgaggcttctctgaatgaaccttgttttacagttttgactttagaaccaaaaaaaaggttttaaaaacaataaaaagaaaaggcaacacctaaaaattgaaaacatactgaaataagtaaacctagttatcatgtggatggcataaccacacaggaaaaaaatatcattgcaagcgattttaataagagtagtctgttcacccctaatggaatatggtctaaggataaaaagcatcgccaaggaatgttaggctatactcagtgatcttaatgttagtagtaatacctgaattgttattttgaaatgattgcatgtatatggtaggataaagaaaataattgttaacgccaccaagattttcagtgtaaagaatt

SEQ ID NO: 183455 - DNA, 583 bp, Homo sapiens
ttttatcaagtgattattagccatttacatatcctctttggtgaaatgtctattcaaatgtttacttcattttaaaattagattattagtcttcttattactaagttatgagttctttgtatattttggatataagccctttatcacatacatcagttataaatattttctttcagtctacatcttttcaatttattatggatgtcttttaaacccaaaagttttaattttgataaaatccaatttgtcagctatttttgtgaactgtgcttttgatgtcatatttaagaactctgcctagcccaaggtcataaagattttctcctgtgttttcttttttaatatgaaactctatttttcttttttttttttgagacagagtctcgctctgtcgcgcccaggctggagtgcagtggcacgatctcagctctctgcaagctctgcctcccagggtcacaccattctcctgcctcagcctcctgagtagctgggactacaggcgcccgccaccacacctggctaattttttgtatttttagtagagacggggtttcaccatgttagccaggatggtcttgatctc

SEQ ID NO: 183456 - DNA, 397 bp, Homo sapiens
tgcagtgactacaggcttaggtcacaacactcaatctgctttgatttcctggaaagccccctggagagtgacaggaatgaacaaacccaaactgtgaagactagctcttcgatgcctagacatcaatgaatatccacaattatcaagaacatctaggaaaacaggacctcaccaaacagactaatcctggagcaataaagatacgtgaccttttagatgggaaattcaaaatagcggtcttgagaaagctcaatttaattcaagataaaagagataaaaaattcagaattatatcagagaaacttaacaaagagactaaaatgatgaacaagcagaaattctgaagctcgaaaattcaacaagctgaaaatgcatcagtctcaacagcagaagaata

SEQ ID NO: 183457 - DNA, 457 bp, Homo sapiens
gaaaaaaagaagagagagagagagaaagaaacgaaaagaaaggagaaaagaaaaagagagagaaagacagacagacatgttgcaacttcctttgtcacaggacatgctcaggaacaaacagacccgacccattgcttcactttcccatctgcactaacggtcagctccatcccaagccctgacctctgttctctcagctcctgagctgaaggacacaaacacggcctccctgtctccctgcatgcagtctgcccactccttcacctagaaggctaaactcaagaaggatgagattcttcagaccaaaagagaagccatatgagggcccaaaggaggataaaaagggctctgccacagctttagcccagccatttctttttcttgcctccttcgtgacttctcctggctctatgtgatgcgttggttcacaccaatctcaagcattgcctattaccag

SEQ ID NO: 183458 - DNA, 436 bp, Homo sapiens
cctattgatcagtgtcctgcagatttagaaaactatatgtctatgttagcgatgctctgagcttcagttttcattttggaacatgtcttgcatcataatggggtggccctcagttattctgggggtcttggtttgagctgtccgaccttctgtattttgagacaattggctcttcttagatacccttcttttttgagaggccaaggtgggcagatcatatgaggtcagcagttcaagaccagcctggacaacatggcgaaaccccgtgtctacaaaaaatacagaaattagctgggtgtggtggcgtgagcctgtaatcccagctacttgggaggctgagttaggagaatcgcttgagccctggaggttgaggttgcagtgagccaagattgagtcattgcactctagcctgggtgacagaacgagactccatctc

SEQ ID NO: 183459 - DNA, 195 bp, Homo sapiens
gggcaactccagcagatgaacagcttttgcaagacacctgtgtggagcatgtggcaccacctgagcgtcctccccaggtgcggctctaacacaggtgcaggttatgttgggagatagagagccagaactcaggagtgccttgggtgccttgctgtaagatttgggctttccctttatttctttttttttgagacg

SEQ ID NO: 183460 - DNA, 135 bp, Homo sapiens
aagtattgggaagctgtcgggctcacagtggtcaatacacgttttctaaatttgagttttctcttgaaagtttgatttttatcattggtaacatactgttggttcttttgtttgattttgtctgagatagcatct

SEQ ID NO: 183461 - DNA, 335 bp, Homo sapiens
tgggcagttgggccactcctgaaaggtgttctttcttcctttccttttctttctttcttttcttgaggcagagtctctctatgtcagtctggagtgcagtggcatgatctcggctcactgcaatctctgccttccaggttcaagcaattttccttgcctcagcctcccaagtagctgggaatacaggcgtgcgccaccatgcctggttaatttttttatttttagtagagatggggtttccccatgttggccaggctggtctcgaactcctggactcaagtgatccacccactttggcctcccaaagtgctgggattacaggggtgtgagccact

SEQ ID NO: 183462 - DNA, 590 bp, Homo sapiens
tatcattggattccactggactatgtttggggctgacttgtgaccaattctttatgatgtgggaaaatgctcatgatctagtattgggtaggaaaaaaaaattaaagatattgcttattagaagtctttatgttaagatttctaggctaatactaaaaaacttggtataatataacttccaaactagcagaggggaagaaaaatgaaaaggaaacacaaatgaaaatgatagaaaatgtgtcagttaaaaaaaaatttatggttgtgatatcgaagaaaataataaagattaccatttcttgagtagctcttgtattaatcactttgaatcattaatctttataatttcatgtaatatatgtcagaatgacaagcccaaagcaggtatttaaaaattatagtttctgccctgcctctagcacttttttccaaagggggacagaagcctgtgatctactgagaggagaaagtttcaaacaaagcaaccctagataatccttctacaagtacattagcaaaggagcaatgttccctgtaggttctagggagtggatatgggcagcattcgctggcagtctggagtaaggttc

SEQ ID NO: 183463 - DNA, 191 bp, Homo sapiens
tcaccgtgtgcctgcatctgtgctttctgtgaattatcgcatgcatgaggctctgcgaggcaggtccagtaagtcccttccaaggatgcagaagctgagtcaggaagtgtggaaatagaacttgaacctggtccttgcacttcatggcacgccctcttgtctgtgtagtgtgtgaagcctgtgtgtgttag

SEQ ID NO: 183464 - DNA, 363 bp, Homo sapiens
ggcaacttcaggaggatactcaaaaagctgcagtggaacaaggaagtagcaactggccacaaatgagaatatcccacaccagacatccagggccactctacccccagaacccactcattgagggcacgaaactattcaagcggatggttactacagagaggggtagggacaagcgaaagagttatctctttgcagactgcactacgtccaacacatccagacaataccagctttgctggctaactatttttcctgtgtacctatcatgtactgggcaccttgaatgactctctacatatctgttcattaaagcctcacaggagcccactgagatgggtacagttattccaacagtatagatcc

SEQ ID NO: 183465 - DNA, 215 bp, Homo sapiens
tggggggatcacttgaggtcaggagtttgagaccagcctgaccaacatgatgaaacctcgtctctactaaaaatacaaaaattagccagatgtggtggtgcacacctgtagtcccagctactggggatccagaggtgaaatgtccagatattaaagtgctctctggccctggatcatctctaatttatggagtgaggaaatggcatgtcccaaac

SEQ ID NO: 183466 - DNA, 374 bp, Homo sapiens
ggtctcactctgtcatccaggatggaatacagtggtgcagtcatagctcactgcagcctcaaattcctgggctcaagtgatcctccctcctcaacttcccgagttgttgggactaaagggacacaccgtcacgcctggctaatttttattttttgtagacataggatcttgctatgttgcccaggctggtctcgaactcctttcctcaagcaatcctcccaccttggcctctcaaagtactgagattacagaggtgagccaccatgctctgctggatgtatcttaattgtaaatttttcctccaaaatgcactttttaatggatatctaaggtctgaagaggaaaatggaagacttgacagaagaaggtgtacc

SEQ ID NO: 183467 - DNA, 450 bp, Homo sapiens
cgacggacgcattcacagtcagttctgggggatatggcctgaaatcctcattaagttaaataactactttcgtatcattcatgtctttcaccttgaaaaggttaatggcccggatcaatttgtttcatttaattcgttgctaccattagtttctgtaatgaagtcatgatcctcagtgatttcaagaatttctagttaagttctttaagattttcttgcatttgaggcataaaatgataaagaagacaggaattaggattcattagttctccagggaatagaggaaccattcttaatgaaaatggattatgcagaccttttttttattgaacttgtcaatatttgattaatgattaaagtgtgaactcaacataaattattgttaacactttttaaaaaccatgtgtatgtttaatttaggtgatgcgtccgtcgaagtggtaccggcta

SEQ ID NO: 183468 - DNA, 589 bp, Homo sapiens
gcacagcatggtgaccatatttaataatgcattgtatatttaaaagttgctaaaagagtagattttaaagattctcaccaccaaaaaatgataaataggtgaagtgatggatatgataattagcttatttaatctttccattaggtatacatatatcaaaatatcatactgtagcctataaatatatataattattgtcagtcaaaaacattttttaacatcatagtagcgtaaacccaaattaaaagtacagtaacagttcacaaatagctcttaaatgaaaagatgctcagtctcacttatgtgacatgcaaattaaaaatacaatgttatcaaaattactaacactgtattgttaaatgtattcactcatattcttggtaatttaaaatgcatacccttgacccagcaaccttcctaaagtataggatagcaatggcttgatatcctgagtacaagtgaagtgacaagtgcctgggagatttaagaagcagtcatgtccgggtctacttcagaccaactaaatggattgtaactgcatatatcacacgtctaaacaaacaggccaggcatggtggctcatgtctgt

SEQ ID NO: 183469 - DNA, 537 bp, Homo sapiens
tctcaggctttccagggcccgtggaggccggcaagggcggtcgatttctcccaggagcccctgactcacgcccaccttcagaggcccccgggagtgaagaagacagccttcccacccgtttccagcagggctggctgcatccaggaagacagcgctgctggtgagtggttcggctttgtttcagaccactcaaagaaatcatctagaacaacgtccgcaagactggcggtgcaactgtcccccttggaacctctcgggaacacagcctctgtctcctcaccgcagagcagctgcgtcagactcccagacggcggggcctagggatctgtgttttggttttgggatctgtgcaaatccacatgactcaataatccaaacatacagagagcctggaaacccttaccccgctctggcgccctatgtgtccgctttcattggcttcttgtatttccggcttgttttctttagggaggcagcaaatacaagatacggtccacttttatctttccccgcagaaaataaagataccacagccca

SEQ ID NO: 183470 - DNA, 245 bp, Homo sapiens
agagcattcatattttatagagatctatgtatatccattacataatcattttctagtcaaaaagacaatggtcttgctttaagaggacccagcgaatatttcaaatatatgtgatattttgtgataatatgcaagagcattcattataaaacattttaataatttgaagggaaaatcctaaaggctgtaatgttattatagaactcataatacatatgcataacataaactaaatattggtcaaa

SEQ ID NO: 183471 - DNA, 407 bp, Homo sapiens
ttatatatatgaaacaaacatatttgttttatttttaccaatatatgtctaactatccagattgatttgaaatttcctttctcttccacttaacaaagttatttaccaaactcttactatgtgccaggcaatgttaggtgctggaaattcatcatagtcactcacattattgaatactactgtataccttgtaatgggccacgtacattatgttcctgatttcattcccttaataaacttaggagggtaaattctccctaatctgggatgtaggaaagttgaatacattgactaaaattatataggccctgcaagtaaagtgctgaattagaatgtcatataatcactgtatttacattttaatattcttgaaggtaacaaccttttctttaaaaatctatcataca

SEQ ID NO: 183472 - DNA, 110 bp, Homo sapiens
actgaataaatacatgtgtagtactatgcctaaataaatatgcaacaagttttcttttagttaatgtggctcagctatagatttgctgcagtttggagccaattaaagat

SEQ ID NO: 183473 - DNA, 289 bp, Homo sapiens
gctgttctcaaacccttgagctcaagctatctgcccacctcaggcctcccaaagtgctgggattacaggcatgagccacagcacccggcctgaattttggattagtgatgctcaaccagtaagtataacacaaatgttccaaaatctgaaactgctggtcccaagcattttggataagggatactcaaccgctatcttaagctgggacaatcctgtgggtgcactcctggagtgccatatacatgtaatcaatccccaaggttgtgggaggatcttttgaggaaagaca

SEQ ID NO: 183474 - DNA, 356 bp, Homo sapiens
gtagctccagctcttataccttcctacgtctgattgtcagacaatgcgaacctaattaagttcttggagcatccaggataaaagctgctgtagctcgcagacatcactgaagtatgacacttttgttttttctttctatcccacttactctccctctatcagctgactccaagctcccagcttgtccttccctccatatttaatttattcagccacttttattaacctctgttgtctccaggggctgcagtcctcatccctctctgccctccttgagcccatttaacaaaataggcatcgtattgaaataaatgagccttgcagccagtcaacctcctcaggattaagggtcttaa

SEQ ID NO: 183475 - DNA, 608 bp, Homo sapiens
ctgaggcttcgcaaagcaggagccctccgtagcagggcttcggtgtcggggctccgaggctccggcctgacttctccacggggtacacaggaacgtctccggacgccaggacctgaaatgggccgactaggatgacgaaaccacaggcagagtccggggaagcagcgcggcatcccatcttcaggcctgcccggagggtgttcgggatcaagatgaccacactccagccaaggataaaagccccacaggagctcactgtcctgcaggagaggagcaggcccacgtccaagaagatggctgtatgttttcacggctcttctctgagaagtgaagccacaccacgatacagtcttgaagaggaagccaggaatgggagatggcaacaagccctgtcatggtggcctctctgaacaagttacccttttggcacccctccccttatgcccgtggcggtggcacagtgctgtatcctgcctgggctctggcccctgctctgtcctccctcttactctgtctcccttgtttctgaggggcctagatgcttctaggtctggctgaatgtcttcaaaaaagatcacttcccagtccatcagggagacagttggtgg

SEQ ID NO: 183476 - DNA, 456 bp, Homo sapiens
tccctttagttaaaaaagaaaacaacaaacccaaaaacctgaagataaattttataacatggcgtgaactggaatccctaataaaaataggcaatatcctctcctactgtttagtgtgcaaatcctctgacgtactttgaccagtttttagctccatgctgtgttttccatacattcaataaaattcatgggccacctattttctcattgtcaatttctgcatgtgctcggagaagatttctaatttttccataagtaaaatacaggtaaatgcaaatctaggatttttttccccccatgtgttttccatacattcaataaaattcatgggccacctattttctcattgtcaatttctgcatgtgctcggagaagatttctaatttttccataagtaaaatacaggtaaatgcaaatctaggatttttttccccccataatgtctaaatgcaatca

SEQ ID NO: 183477 - DNA, 418 bp, Homo sapiens
ggaggaacacaagagctctttgtcaaaaacagtcccagacttttttatggcatgttcccattgttgtccttcatcttttgaagggtgacagtcgactcagtcatttttctgggcacataagtgtaatgctctcagtgggtcaaactgaatgcccagctgactctaggaaagttacatcctgttgagactgcagaaagctcagggctttcttctccaacagaaaaagtcaaatctccctaaaagcagactttcggaattgggcacaagccaagagactacatgttagaacatttaaaaaggatgcatactgaagcaaacccaatatgcatttagcaatccagcctcctgcccacaaaggttaagagcatggcagagtaatctatatttaccagagattagacaagttggctttacttga

SEQ ID NO: 183478 - DNA, 545 bp, Homo sapiens
cattgtttgaagccgtgggtcaaagttccaggtctatgtccgagggtgaagtacatcaaactggggtgaaccaaaagcaggatgagggtcatagggatgactgacggccttcaccaagccttggcaactggtgagaaatggtcccagggaccaagcctggagaaacagtacagaaggggtgtgtgtgtgtgtgtgtgtgtgtatgtgtatatgtgtgtgtgtatatatatgtaaaaaccagccttagctcactggctgtacaaaaacaggtggtgggaagagtttggcccgcgggcctgtagttcgctaacccagcattcaagggcagttttgcccaagagaagtaccatgcacgctatgtctatcactttacgttttctagtgatcacatcgagaggtaaaaggaaacacgtaaaattaatgttaatgatagttttatttaatccagtatatccaaaatccaaaatgttaaacgtgtagatgacaagaattactactaagtttttttttgttcttttttttttttttttttttttacacaaaat

SEQ ID NO: 183479 - DNA, 475 bp, Homo sapiens
gccagcccattggtgggcgtgcggtgcggggaggcttaggcgggaagaggaggtcttgctcagatgagtgttattcctttgtttggacagaggaggttgggcaaattggagtgtaggatatttttgcctggagatttttacttgatgaaatcatcccatgaaaaaaatccccaatttttaaaagcatgctactttgacacattaaactcatcattttaacattgatagaaagtatttaaaatgggcctttgcctgaaaataaacgtcagtggattggaagcactgagggccttcgtccgttctgtcccaacctttatgggcgctgcacattttcactgtggaatctacagggacgaactctgtcttgtgtttactttctacttgtttctcttgaacacacacatgcattaacactgtaatgtatttattactttgtatgtcattaataagaatatatttagataatattgaaaca

SEQ ID NO: 183480 - DNA, 481 bp, Homo sapiens
tactcaggcgagtagtgtctaaactccctgactttggaagagggcaatcactactgatgggtttttttttctcatcttccctcccttctcccctgcccttcccctccgcctccaagggtagagagaaaggaaagggcactggggtgggaaagcaagacggactgagtgacattacaactagctttcctcctgacacttagaaggttgggaatcattctccatagagtctgaataatccaaactagtcaggcaggctgggattaaggacatccaaatggattaccccatcgtcataaacaaggtaaaccatgaaagcattctgtaaactgctaagcccttacagaaatgtgagtttttattgttgttattgtcattattaatgttttaacttgatccaaactgctcaagaatcttgggttgtttttggacaatgagtaagtactcaataattgttaactattttaattaaaacaaatatggc

SEQ ID NO: 183481 - DNA, 236 bp, Homo sapiens
cattgaactgctaacaatctctcccacccttcagggctgtccatcatccagccatcccacctctccagtctcatcccttgaccttccccctgccagcctcactcatcttcattcgattcctcaaggatggcatgactctctcatctctaggtctttgctcatgttggttagtccacctggagccctctctccctcactgttctagccattcacccagccagccagccatccactca

SEQ ID NO: 183482 - DNA, 114 bp, Homo sapiens
cagtcagcctctacagaccaagctcatgactctcaatggcctatttaggcccataccctacgtcacggcagcctccgcagatgaggctactcctcacaacagcctccacaggca

SEQ ID NO: 183483 - DNA, 462 bp, Homo sapiens
acaaactacatacccattaagatgactaaaatatacatgactgcaaacaactgattgttggtgagaatgtatagcaacacaacctcccatgtattgatggtgggcaggtaaaacagtacaaaaagctctagctgtttcttataaagttgcacctatcctattacccagtgattccaatcctaggtatttactcaagagaaataaaaacatatgcccacaaaaggcctcatacaataatgttctgctttattcctaatagtacgtatgtggacaagtgaaagaaaccatgtatattcataaaacagatcacttactacacagcaataaagagaaatgaaattctggtatgtacaacaacctagatgaatctcaaaaacattatcgtgagtaaaggatgtcaaggacatttatggtcacctaaatgtaaagttctaaagcaggtgacagtaatttatgtttatt

SEQ ID NO: 183484 - DNA, 732 bp, Homo sapiens
  misc_feature (566)..(566): n is a, c, g, or t
gaaattttcattactttcatttatttgctttcagtaacaatgctacaataattgtgagtgtccaaattactctttatatgaccatatgtgtgagagttcatatttttgccggattttattgatttaggtgttcaccttcatactcataccaaattgctttaattctttagctttgtatgttttttgaaatcaagaactgtagtgtttctgacattgttactctttttgaagattgttgagtgcttcattgtttcttgaaattccatataatttgggggttgctgtttctttttctggaagaatttaattagaaatttgacagggattgcatttaatctggagattgcattaaggaatttagacatcttctttttaggcaaaattgttttatactgctttcaagtcttctattcctttatgaatattctgtcttgtttcattattcattatagaaattggggtattgaaatatcctactacaattacattgctccctatatcttgctttaattctgtcagtatttgctttgtactccagcctgggcaacagagcaagactgtctcanaaaaaaacaatagttgggtgtggtggcacatgcttttagtaccagtcctcaagaggctgaggtgggaaggatggcttgagcctagaattttgaaagctgtgtgagctatgaatgtgcatgtatccagctggaaaaagagaagaccccatctcaaatatatatgtgg

SEQ ID NO: 183485 - DNA, 664 bp, Homo sapiens
gaaattttcattactttcatttatttgctttcagtaacaatgctacaataattgtgagtgtccaaattactctttatatgaccatatgtgtgagagttcatatttttgccggattttattgatttaggtgttcaccttcatactcataccaaattgctttaattctttagctttgtatgttttttgaaatcaagaactgtagtgtttctgacattgttactctttttgaagattgttgagtgcttcattgtttcttgaaattccatataatttgggggttgctgtttctttttctggaagaatttaattagaaatttgacagggattgcatttaatctggagattgcattaaggaatttagacatcttctttttaggcaaaattgttttatactgctttcaagtcttctattcctttatgaatattctgtcttgtttcattattcattatagaaattggggtattgaaatatcctactacaattacattgctccctatatcttgctttaattctgtcagtatttgctttgtatattttgaaccctagtgtaagatacacacacacacacacactcacacacacacattaatatatgtatacccacatttatcatgggttctaagtaaatgaacttgtttattattgtttaatgtcttcctttgc

SEQ ID NO: 183486 - DNA, 573 bp, Homo sapiens
tgggaggctgagcatgaaccttatttagggagcgggcttcaggagtgcatgtactcctggtcctcaactgcagcttgggttggaatgctcccctctagcaggccagggcacagtggagagagcaggccactgggaagagcttctgggaacaggactctcagaacattacatgggatgtcggtcatggctgggtctctcctcctctatgcaaagcgtggaccagtcctggctgtgggtcagctatccagctggcctgtggtctgtctacgccttctctgcttagcactctcttctagctcagtgggaagattcagctgagttttcagtccatctactttgtctcaaaggctcacctggattagagcagggatttttgtttcgtattattcaactttgttagggtcacagaccctttaagaatctgataaaagctatggaatctcttgccagaaagtacacaatgcacagtttttaaactgcaatttcaagtggctcagagaccctgtgagctatccatgagtcctctaagggtcccagaattccaggttgagagccccacattagagagacttt

SEQ ID NO: 183487 - DNA, 360 bp, Homo sapiens
tctcattaccccaaggtcatgttgcatgctattggaacatcttccctttagctccctcttcttttaacattccataggttgaccagtgaagtcatcgtttatttcaatgttccttcctattcccacaatccaggacaataattagtcaatggcacgtctgcacggtcatgttcatgacttcatgaaagatgttaagatggtttgaaaaaagttgattacaagtcctgtctcttggaccaatttcagattattgaaaaacatttggaagggaagtttgaattggccacagcttttatttctaacctcttgaattagctgatgtcaaatccagctccattgtcaagacaggaaatggtgtgg

SEQ ID NO: 183488 - DNA, 506 bp, Homo sapiens
gcccctcctagtctgccctcctctgcttctccttcacagacaacagtacctattgggaaagtcctagaaacctgaatcctgtcaccactctccactcattggtttcctgtagctctgggcttcagaggaattgtctctgtcccaccattttctcatttgctaagaagatgacagtgatctgttctgttgacctcataggtttgctgaagggataaaatgatgttgtggatgcaacagaactcctacaatgtaaaataatcgttcacatttgaggggttcttatccactttgcttatttcagccacaggggctaggaactcaaccagggtactcaggctaggccccagctccagtcgcaggttcacaagttgcgcaccctccaactcacctggtccctctgactgcacgcctcttcatgtgcccacacatggttctgctccagccaggtggggctggcccctccccacgtaagcacccacacctgcaggcagtcctccttctggtct

SEQ ID NO: 183489 - DNA, 140 bp, Homo sapiens
aacactgtctgtgtttgccttctgctgctactataacaaatcatcaaaatgtagtggctgaaacctacacagacttattctcttacagtgctggagtgcagaagtctgaagtgggtttcatggcctaaaatcaaggtgct

SEQ ID NO: 183490 - DNA, 654 bp, Homo sapiens
acacttgtcccccagttttctcttctccagatgcccctggctgagtctggcagatgtgcctcctttttgagccaacagatcctgaccgagggtcagggcagcttttagacaaaggacagctggtttctcccacccactgcttctctccagactcgcagatcagcccctgccccaggcagcaatactgccctgattaccaccactgaggcggctcccaggccactgagggaggccctaaaccctggctagacaggacaaaaccaagggtctggccaggcccctcacccctctggcctcagttcctcatctgtcaagttgggcaatgcttcattggctgcctcactaggctgctgtggggtctgcactctggaggggtgggggacactcacactgctcatgagagctgctggcgtcactcagctgtggacaggaatgggagatacccccatgtaccaccccagtcctggtgtggagtaagggccagagggacaggggcagaaaaggggggctcaagactgagagagacaggggcaccaagaagtagaaagggtaggtgctcagagggccctggggatctgggggacttgtgtttccttgggtgtagggcggagggctgagtcaatcgcatgcctcagtttctagccatgcacggcc

SEQ ID NO: 183491 - DNA, 247 bp, Homo sapiens
gagggagggagggaaggcaggcaggcaggcaggcaggcaggcaggcaggcaggaaggaagacatcctttaataccagaacaaagagccataatatcaagaagaacacaacccagaagattttattacattaatagcccagctaagagatttaggagtccatgcccacttacagcgtcatgtcattaaggctgatgaacacagggtagacagacgccttgctattttctatcctatgccctgctacaa

SEQ ID NO: 183492 - DNA, 256 bp, Homo sapiens
ccacacattgcatttcattaggtgtcttaagtcacttttgttttaaacagtttcgcctcctttttcctttaccctagcattgctttatcagaggatatgaatcagcaatgctttaattcctttttcaaaaataaatgtggtaaagtgtcaagatttgatgaagctgactggtgagacatgactggccattatatcatccattatgcttctttatattttcccccaattttttatcttgaaaattttcaatttttac

SEQ ID NO: 183493 - DNA, 538 bp, Homo sapiens
tgcaccattcagactctttgttcatagtgcatgcttaacccttatttaaaattgtttagcttatgtgatggaattttcatgaagattagattatggaaggagccatagtcccagagtctttattcttgtctaagttctgactttgagaaaaattggagggagctgccagggtggcagcagtcagattttaagctccttatgctcggcctaacatactcgtttttgccttttttgggagagtaaggttggggatggagaggctttggcagcaaccgtttcagactttcagtctctggcagcttagaggaaagtcagcttagaaagaaagggtccacgtgaagtttgtcttagactcttgggcatctgaaactgagccatgcagagctctgcaaggccagtaggggatacgtatggttcacgctaatggatacaaagactttgtgattttctgtttccagctgagcaatgtaaataaacatcagggttgtaatggaatgttggggtaatcagcatacttttcattgagtacagaggtatg

SEQ ID NO: 183494 - DNA, 129 bp, Homo sapiens
tcaatggcttctgggtttccaggccccagagtcaaagtttgcctcatagagcataattatcctggtagcttgtcctcctgacactggtggttgaagagaagacatgattctgagtgggatgacagcaca

SEQ ID NO: 183495 - DNA, 522 bp, Homo sapiens
ggccttcatctcctccacttccccacaggccagcttagcttccatgatgtctggattggatctctctctcactactacaggctctgatgctcttatgggggcaccccctggaagtggagctagttcagccaccctaagaatcagcttccaccagtctttgctcccaggctgaaggagggtcaggagagtctcacctagagagggaacactagggaggcttcaggagggacacaatgggagccaggtgtcaggatgtctagatcctcgtgacaaagagtttgcacggcaggtgtcatcccctggcatggatgggagagagtgctcattcctgggcttcagttcctctctgtctagttgtttcctagttcctcaaactgagactcggagggaaagtaagatcattctcccctgttggacaagaggagaccacggccaagagaagggcagggcctgccttcggatgccaccatgggagcaaagccactgacagtctctagcttcacttcttcatggttcctaggc

SEQ ID NO: 183496 - DNA, 342 bp, Homo sapiens
aaaatataggcaagggtttgttttggtttttgtttgttaatgatgaaaacatttaaggacgttgagttaactggagataaagcagcagcacgaggagtaatggggagaagggcctgatgagaaggtcagagaagccttttataagtgtctggcttgcactgaatgcccagaaatggaagcgcaaggaaagtgttgtgtgaggaccagggtaattatgcagtgtcaccactactcacagggattatggcctgagaaactaaaatgatacttcttaggtgaccagaggatgggagaacttcttaactggtttggaggtccacataaagaataattggggtctag

SEQ ID NO: 183497 - DNA, 238 bp, Homo sapiens
ccttctaccccatccatcctcccacttgggtgggaaactcacactgagcaaagtcttcagaccacctgaactgcaaagggaaaggtgctgccaggttccaaaagggctggattctaggacagtatcctctgcagctggaccagacagtgaagcagggttaggatgagggggcagggacaaggcttttggggtagcatccaagatgtagtagcaggtatcctgacaggtgggtagaatg

SEQ ID NO: 183498 - DNA, 623 bp, Homo sapiens
agctaccatcgaggacataagacaactgatttaaacagaataatggttgatctcaacactccagactctcagataatagaatgtgagcataaaatcctctcttgaagaaagagctaagacagaggtgtaatcaaatgtaaaaatacccattaagccaacttaacttttctgaatggccgtgagattgtttcaatggttttgaaatgaaaaggcacagaccaatctttccctttaacatgtgaggaacacctgccctccctaggtcagccgaatgcttctgaaggaaaaaaaaaaaaccgtctctagggaaggagagtgtggcttgctcaacagccccagaatgtggacctgctgctagagggcagggaggtggaaggactgcactgatgcactccaaaactcaaaatcatttcaaaattatctcctgttaccaagtgaaaagtgaagaaatgaaggcagtttcttgggcactagaataaaggtaccatttcctaatcattatttctacagggctctatgtagaaccccttttgaagataattaatggtataaaaataattgttgaaattctccagtggtaaaatgttgttgtttgttgatgaaatagtccaaacaaacttcct

SEQ ID NO: 183499 - DNA, 353 bp, Homo sapiens
ccactcttgctttcacacacaaagtgtggtaggtctgtgaattcaatcaccttatcacactgtatttctgctccaattctgctctatgaattgtcaactgtgctttggggcccagacatttttttctattttactatgagctgtttattgatatttttaggagagataaaagagtgtcaaaacctgaagctgctcatcttgatcaaaattctgctaaattttttaattaaaaagtaaaattcttgccttgttcaggagagaatatacttattcaattcagataatgatagaaagtatgttcaaaaatatataggcaatggccaggcatggtgtctcatgcctgtaatcccagc

SEQ ID NO: 183500 - DNA, 550 bp, Homo sapiens
ggtcttttgtgaatggcttttttcactcagtatgttttcaaagtttacacatgttgtagcatgtatcagtaattcatgtctttttatgacaggtaatattcccattatatgggtataccacattttatttatccattcatcagttgatggacatttgggttgtttctactcatatagtattatgaatagcctattcatatagtactgctctgaacattcatgtacaagtttttgtgtggatgactattgatactttgggcccaataattgcttgtgtggggctgtcccgtgctttgtaggatgtttaggatgtttagcagcatccgtagcctcaacccaatagatggcagtagcatttcccgagttgtgacaatccaaattgtctcaagacaccaccaaatgtcccaagtatacaaaattgttcctagttgagaatcaatgttaaagagttatgatttgttttctttcttctcctttttttttcttttttagagacagagtctcactctatccctcaggctagaggtagagtgcaatggcgtaatctcag

SEQ ID NO: 183501 - DNA, 650 bp, Homo sapiens
agatcaggagaagaggcaaagacagcaaagttttaaaagctagaaagcagatgaacaagtggtaactgacttagcagaaccaaagaactgacttggcagaagcaaaacttaagccagtaaggaaagctgagaagcaaaccaatgtatttatatgtatatcagaatccctataaggctcagaaagtagaagtaccatgtacctctggaacctgagatgaagacaaggctaaaaactggaagagaggttcaaagtctgtttaagaagcagttacactcccagaagactcctccctcttattgcaaagcctgaagagaggaaaacaaagttctctgggctgggagataccaggtgtggttagagggttccataatgaaaaacatgtagatgaattaaaggcttacatgtttggccctcagaacactgacatcaagccaaacatgtaccctcaggcagaaaagtagaagagttggtgctgcaaactgactacatctaaggtagaacaaaagactcaaaaggattctattaggcattctctaagtatatagcgcagccagatcaccatgtgataaatagcatagtcaattggccctgcccttgctcagagagcttgcattaagttttattgtacctcactcttgaatagaagcag

SEQ ID NO: 183502 - DNA, 195 bp, Homo sapiens
cgcttcatcatccactcccctccggcttccccaggggctccaggcacttccttctggtcactgacccaggacctttggcagggctgttcctaacacctgtatttagctgtctgccatcattagccctgcctgctcctccctccgcttcatcatccactcccctccggcttccccaggggagcggtggcgcaatca

SEQ ID NO: 183503 - DNA, 197 bp, Homo sapiens
cttttcccaccatcccaccattagagatactaagattgatccctggattagggagaccacttatacttccattgcgtatttacgcttttccctcatcactagaacatcatctcttttgcaccgtcaaaatatctagttttccattaagcattcacgtgatatttttaacccaattgataatctttcctaaatcagta

SEQ ID NO: 183504 - DNA, 371 bp, Homo sapiens
cctattccaaattctgcagtaggttgttttttctgtgttttatttggagggtaagggaaaggcttcatttttttcaagtcattccaaagcattccatttacttttcatagaaaaataatttttttcacactcatgtttgttggtttacataataattgaatttcctaattatagttacaagtagcataaacagattcagaactgacttttgttaagcatgcaactccactggtaggatcaaacatgagctggcttgctagaggaaaagcataactgacaagctgggacatcaggtgattttacagagggaatggaaggcatgggtgaatctgaagaggggaggttggtaaagagttctgctataaagaggg

SEQ ID NO: 183505 - DNA, 242 bp, Homo sapiens
agattttaaggggaaaaatgaccttagtgaaggatatatttcatttacaaatcatgaaccatatacacattttatacataattacatttttggcagatgtggataaaattctgttcgatctgatttaacaaataattattggccattatggcaagcggtatccccagatttggtggaacaattaagctgaatatttacagtgaaatacacagatgtatgcatttgtcctttaaaattgtaat

SEQ ID NO: 183506 - DNA, 330 bp, Homo sapiens
acagcacttagacaatttgaaattaccttacttaagtggcacatagcgcacttaagaggcacttcttatagtctcttcccaatatgtaagctccatgagacatcactgtagctaaaacagtgcctggttacctaataggcgctccatattttttttttttttttttttttggaaaggggtcaaaaggcacccacaaacgggccttttttccccgtggcattcagcatccccccaacttctgcaccctcccagattttggtggacaacaggaaattgcgcccaacaacacccacacgtgtgatttggcccataaactcacatgtgtcccct

SEQ ID NO: 183507 - DNA, 235 bp, Homo sapiens
caaaagtgcactcttctatatctaccactgtgaacttacatatccaaatagtaactcccctgagtatagaatatgaccagttctgtgtttatacacccctttcagaatttcttaagcatcaatagaaagtgatctcaattctgcacaccaaactgcacctgctgcactaaatgagggaatctcctggacatttagcctgtataaatgatacgtagatatagaagagtgcattgta

SEQ ID NO: 183508 - DNA, 682 bp, Homo sapiens
tttgaaggcagggagatgtggaagagggatcactaagcaaaggaagagaggaagggctacttccagagggcctgtataggggccttagaaggtctggaaattagaaccaggaggttgggtgttgggggaggtgagagtacagagtgacaataagacacatgcaggccatgcagctcttggaatgtcttcatgtcatggaagtgagcatgtccagtggaaggttacagagatgattctgaagcttgggagagacctaaggtctggagtttgagaccagcctggttaacatggtgaaaccctgtctctactaaaaacacaaaaaactagccaagcatggtggtggatgcctgtagtcccagctacttgggaggttgaggcatgagaatcgcttgaacccaggaagcggagattgcagagagctgagatcatgccactacactccagcctgggtgacagaggaagactctgtctcaaaaacaacaacaacacacacaattggagcctggattataggactatctatgaattagaacttttagaaatttgatttgttgctgctgtgttgagttgaaaagaggtataagactggaagtgtgcacattgttgtcataatgtaggtgtgaggagataatggcttaaactgagccttcaaacataatgctaacttcagttctcttacata

SEQ ID NO: 183509 - DNA, 473 bp, Homo sapiens
gcgtggtggctcacacctgcaatcccagcattttaggaggctgaggcgggcagatcacgacgtcgggagatcgagaccatggtgaaaccctgtctctactaaaaacacaaaaaactagccaagcatggtggtggatgcctgtagtcccagctacttgggaggttgaggcatgagaatcgcttgaacccaggaagcggagattgcagagagctgagatcatgccactacactccagcctgggtgacagaggaagactctgtctcaaaaacaacaacaacacacacaattggagcctggattataggactatctatgaattagaacttttagaaatttgatttgttgctgctgtgttgagttgaaaagaggtataagactggaagtgtgcacattgttgtcataatgtaggtgtgaggagataatggcttaaactgagccttcaaacataatgctaacttcagttctcttacata

SEQ ID NO: 183510 - DNA, 412 bp, Homo sapiens
cagaggaatgtcaagtattgtcctcagctcagcaggaccagatcagtgatgagcttgactttacctgtgaagtgcttcctatacacacctcttcttcctcataaagggtgcactcccttgtctccacatagtcattaattcttcccttcaattttcctcctgtaagttttggtcagaatttaagatgtttccaaaatattgaaaaatcaaatagcataatatgttaaggtttttaaacactttttctacatctttcttctggtactttgcaattaaaaaaaaagttcaagtcctattaactgggcaactgctagggtaaacaaagtctaaaagcggtctcgttgaatatctcatttagtcctcataacggtgctgtaaaggaggaatcgttatcctcattctataattcagg

SEQ ID NO: 183511 - DNA, 303 bp, Homo sapiens
agaggaaaaccattgaaaacttctcaatataccttatgttgggattacttctctagaaaagcaacacgtaaagagagcccagtgacaaagagggtgagagggagacagagagagaagagaacctagtggagagagtggaaatggggagaagagagagtgagaaaggagaaggaaaggaagagagagagagagagagagagagaaggaaagagagagctcagccagagaacatcctaccattctccccaaacactggaccaatatttttatctattgcttgattcatgtaaggggcaatttcac

SEQ ID NO: 183512 - DNA, 433 bp, Homo sapiens
gaactattattatccctggagttattttttaaaagatatgaactattattatccctggagtacttagctatcccaagccaaactgctaccctaataatcagcatccaattgcctgatacaggcacagtctagagaggaactgtcctcaaggtgacatcaaaacacccaaacgtggccagatgatgtgctgtggctccaccacccacaacccacagattcacatgaatgccacgaggatctcatctatgtcatctgtagccaaaatgttcccaaatctagctggacctgcttttttcttcttcccacagctgtccactgcccactcaccgtgaggaagctcggacccctcctctgagatctctgctgatctggggctctcttagcaggaacctgtgcttggtgctgactccggatagagggatagactgtccag

SEQ ID NO: 183513 - DNA, 713 bp, Homo sapiens
ctgtgaacaagttttcatttctcccaaagggtccacaggttctgatatgtggatttcagctcatgaacttttaacaggacaaacaagtcatacagattcatctgaacaactataacacaggacaagttctagggcttgtaaaatccattattttaattttcgatgcttgtcttgtaaatctaatggaaggatattttacctcagcttatgaataaaaataataattgtagctcccagtattaagtgactaacaatggctggtaatttactaacgtcatctcacttcacccttgcaaaaaactccaagaggaactaaatacctcattttacagacaaggaaatgaaagcccaagtaggttgagaagatttgcccttagctgcagagtgagacagacaaagcagaaatggatttaaggtctttcagattccacttccctatgtcatctagtagccccgtgacagagatgcctactgtgttctttcaccccagcttcatctgcccaatcctgggaaagctgaaagactggctattctattaccatgttattatggaagaggcagagaaagatgctgtcttgaaactcaaggcatgcactgcactgctggccaggccaatttccagcccctgaagcctttgcccgatttttgcatcccctcgccctcagtgatgtttaagcaagttttctgagttgcctcacatttctagttttcct

SEQ ID NO: 183514 - DNA, 968 bp, Homo sapiens
cactgcagagggaggcagggaagactgattctcgagggtttgcagcctggcaaggataacctgggccaccacttgacaaaggcctggctcagctaatccttgtcacaatcctcaagggtccaaaggagggtttattttgcagggtggacccttgggagtgctaccaggacacctggcagacgacctgcagcgtgttggaacaccaccgggacctcatgaagagggtgactggctgcatcctctccaatgtcaacacaccttccatgacacctgtgatcggacagccacaaaacgagaccccccagcccatttaccagaacagcaacgtggccaccaagcccactgcagccaagatcttggggaaggtgggagaaagcctcagccggatctgctgtgtccgcccgccggtggagcgtttcacctttgtagatgagaatgccaatctgggcacggtgatgcggtatgaagagattggtgagtgggactgcgaaagtgcggaaaatggggacatttggagctccctgccttcacgacaggcaacatggggagcagagaggcttgaaaacccagggactgttttgcagcagggtctcctctcggaagagggatcgttcccaggctaagattgcattcgtagttagctccctttaacatctcttaactggactccagccaactcccaagagataggactggatcatttggtgatttttccttcagagcctccactccctcctctaaaaaacatgaaagttgagctttggcaccagctggaaagacccttcttttgggcacagacactgcacacaaatgaggcagaagagcaccccggccttcctcattcagtgcttgtagatgaagaaacagagaggggactgaaagccacctccacacctcccttgcagccttgggcagaggctaaggcacttcactgtctgtgtgagggctgcctgcccaacccaatacca

SEQ ID NO: 183515 - DNA, 1130 bp, Homo sapiens
gacacaacgagacacaaaaagagaggcaacccctagaccaccgcgaaggacccatctgcaccatgaccgagaccaccaagacccacgttatcttgctcgcctgcggcagcttcaatcccatcaccaaagggcacattcagatgtttgaaagagccagggattatctgcacaaaactggaaggtttattgtgattggcgggattgtctcccctgtccacgactcctatggaaaacagggcctcgtgtcaagccggcaccgtctcatcatgtgtcagctggccgtccagaattctgattggatcagggtggacccttgggagtgctaccaggacacctggcagacgacctgcagcgtgttggaacaccaccgggacctcatgaagagggtgactggctgcatcctctccaatgtcaacacaccttccatgacacctgtgatcggacagccacaaaacgagaccccccagcccatttaccagaacagcaacgtggccaccaagcccactgcagccaagatcttggggaaggtgggagaaagcctcagccggatctgctgtgtccgcccgccggtggagcgtttcacctttgtagatgagaatgccaatctgggcacggtgatgcggtatgaagagattggtgagtgggactgcgaaagtgcggaaaatggggacatttggagctccctgccttcacgacaggcaacatggggagcagagaggcttgaaaacccagggactgttttgcagcagggtctcctctcggaagagggatcgttcccaggctaagattgcattcgtagttagctccctttaacatctcttaactggactccagccaactcccaagagataggactggatcatttggtgatttttccttcagagcctccactccctcctctaaaaaacatgaaagttgagctttggcaccagctggaaagacccttcttttgggcacagacactgcacacaaatgaggcagaagagcaccccggccttcctcattcagtgcttgtagatgaagaaacagagaggggactgaaagccacctccacacctcccttgcagccttgggcagaggctaaggcacttcactgtctgtgtgagggctgcctgcccaacccaatacca

SEQ ID NO: 183516 - DNA, 1187 bp, Homo sapiens
tcaaattctcccaagctggaggtagtggagcaaacaagatcagcaacaatgagggagcagctgcaccactttgtgttactctctgatggccagcacagggctgcaagtagtggctgcaaaaaccagacaaatagatggaaatccaggaactagaggaaattcaggcctgccaggggctctgggaagtgtttgttactctctcagaaagagccagggattatctgcacaaaactggaaggtttattgtgattggcgggattgtctcccctgtccacgactcctatggaaaacagggcctcgtgtcaagccggcaccgtctcatcatgtgtcagctggccgtccagaattctgattggatcagggtggacccttgggagtgctaccaggacacctggcagacgacctgcagcgtgttggaacaccaccgggacctcatgaagagggtgactggctgcatcctctccaatgtcaacacaccttccatgacacctgtgatcggacagccacaaaacgagaccccccagcccatttaccagaacagcaacgtggccaccaagcccactgcagccaagatcttggggaaggtgggagaaagcctcagccggatctgctgtgtccgcccgccggtggagcgtttcacctttgtagatgagaatgccaatctgggcacggtgatgcggtatgaagagattggtgagtgggactgcgaaagtgcggaaaatggggacatttggagctccctgccttcacgacaggcaacatggggagcagagaggcttgaaaacccagggactgttttgcagcagggtctcctctcggaagagggatcgttcccaggctaagattgcattcgtagttagctccctttaacatctcttaactggactccagccaactcccaagagataggactggatcatttggtgatttttccttcagagcctccactccctcctctaaaaaacatgaaagttgagctttggcaccagctggaaagacccttcttttgggcacagacactgcacacaaatgaggcagaagagcaccccggccttcctcattcagtgcttgtagatgaagaaacagagaggggactgaaagccacctccacacctcccttgcagccttgggcagaggctaaggcacttcactgtctgtgtgagggctgcctgcccaacccaatacca

SEQ ID NO: 183517 - DNA, 230 bp, Homo sapiens
gtgtgtttcacttccggcagagcatctcttgttttttatccacatcgcccctttgaatctttgccatgctactatctactgcccattgccactctctctggccttcctccaagctgcttttctttcctcctcattttgtcccctttccttaacccatcttcttttgttttaaactttcacaccagcagcttgtgtttttatagccactgacacacaatgagaggccctct

SEQ ID NO: 183518 - DNA, 465 bp, Homo sapiens
aaagcacagagctgggccccccactgcacagatcagacctattacttctggggagggaatgacatcccagtaacatgagtgcattcggggaggcgacatcctagccccagcggtcagcaaacattttccgtcaagggccaggcaagtaggtgtttcggctctgtggcccatatggtctctgtcacagctgctcagctctgacacctggcgtggaagccgccagggccaatacaaaccttgggcatggctgtgtcccaataagacttcatttacaaagaccagcagcgggatatggcccgtgggccatggtttgctaacctctggatgatctccaggaaatgaggccctcttggtctcctcagagaatcaccctctgtcagtaaagctctcatctgtgagtccaggactgtcccacaaagactggacagtcagcctactctcaggccagcaaacactcgaatgata

SEQ ID NO: 183519 - DNA, 654 bp, Homo sapiens
agaaatgttggaaaaccagtgccttaagagtaagggtatattcaggcttcctctttgtcagagctctaactctcctggggggcaggtaggctggggcaggtagggtgagaagactcaggtagttcaccgagataaaactttgttgaggttggctggggaagtgagccagttgtcttgggaagtgggaggtgaaaatgaaactccctgtgtgaccacttttctctatcaaaaataataaattatttcaaatgttctaaataaggaggctttggatagattttagtcagcttgttagctattcaattctggcaacaaccgtgtgtacatctagactagggagacgtttacaattaaattcactgggtcttgtggttggaagtaacctgaagggatatctatgcaagtttccatcctgtgtgtgcatcccttctgtaatacctctgcctggcagttcagcatctgcacttgcgtacgtctcctggaagggaattcatgaactctcttgggatcccagttcttgtcagcttcttcatgttgaaaccctcaggcttcatatatctcagggtttggattggcattagttatctatcgctgtgtaacaaattacctcatcattaaggggtatgctcttatcgggatcctctagacgacccc

SEQ ID NO: 183520 - DNA, 489 bp, Homo sapiens
tctcccttgtcacttaaaaactcacattctgttctccaggaaccgcttttgcaattcagttttcctatctgcaaaatgataggaataaagccattaggtgaatgaatagatactagtatctccatttaacagaagaggaatcaaaaccttataggattgttgtgatatcacattagattatttgtaaacagctttcaaaaggctgcaaaagaacaaaaaagaatgttgttgcctgctgagcccaggggaacactgtaggtgaatcagggtatttcaggcccctgggctgctttgagacaggtgctcttaccaaacaccatcaattgttgagtgtgaaccctggaatagagtgaagcttacactgaagccagtatttccacatcccatatgatctggtgcttatgtttttcatttccttacctccttgccatatactttactgttacttgttaagattatggcaaggaggtaaggaaatgaaaaaaaaaa

SEQ ID NO: 183521 - DNA, 144 bp, Homo sapiens
tgatctagaggatccacatgattggtccacgctcccactctaacatgacaagaagtgtctgtcccagaagtaatctgattgtgcacctagagtacctgttttctgcctggggaagaatgcacactgctggacctggagcggtgg

SEQ ID NO: 183522 - DNA, 488 bp, Homo sapiens
tgtattgagtctgtaatgtgagtcttgctatctggtcccctgaacactctgagtctgattttatttcagtgataacctccagcaagctctgtgctcataaggatctctgaaagtagacgtttcatcagcggaaagtgtgatagccattatgtcaccctaacctccagcgagctttatttagaatgccagccacacaagcccatgttctgattctcatagttggggcttaggctgccagtttcttctatgaagctaaactctagagcctcccttctttccatgcccgagtccatctccaaaacagtgcttctcagattcctcttttctggcctggatccacaggtagtgaccagagttaacagagttcttgggccaggcacagtgtctcaaactggtaatcccaatactttgggagactgaggatggaggatcacttgggcccaggagatccagaccagcctaggcaacatagtgagacccagtctcta

SEQ ID NO: 183523 - DNA, 414 bp, Homo sapiens
gtctagcccacctccctggctggccggtctggcctttgcaggtagcgctgtagggtctgctggggctgggggcttctggactctgagtggggaaatgctcagggaacgtccaagggtgggtggccactcagcttccccattccgggactgtgaggtgaagggctgggagcatgcagtggcttctcccctctagctcgcagtcttcaggagacaaccccgccctgcaaacgcctccttcctggacccagcccctctgttccccagtgagtgtcatctaggggtttgaccgggagaatgagcatctgctgggcctcttgccactaagccttggggtctggccctataccctggggacccaggaggcactaggctggctcctgagaggcagggtggctgccagagccacggtcccca

SEQ ID NO: 183524 - DNA, 507 bp, Homo sapiens
caaaggtcctgtggcaggaggaagcctaacatttacgagggcctggggaaaagccagtgtggctgaagagtagagagaaagggagatcctggtgaacaatgaggctggggaaataggaaggggcctggatgagcagggcattgtagaccatagacagatttatttattcatgcattcataaatcaaacatttattaatgtctccaggaggggcattgagctacgtactgataaggtgaaggttaccattattttcaaagctttttttattcaggtgaaattcacatgacattaatcactttaaagtgtaggatcaatgccatttagtatattcacattgttgtgcagccactacctccacctagttctaaaacattttcctcatctcagaagaaaacccctcatccattaaacagtcactattccgccctcctccaatctgttttttgtctttatggatttgcctattctggacactgcatataaataaaatcatatgatatgtggt

SEQ ID NO: 183525 - DNA, 261 bp, Homo sapiens
gggtcatctgaatcaatctgagctggggccggatggcagtggatcttaagcacttcccaggtggatctaatgggcagagccactgccccacatgatacatccctcctgccatgctgcctggctcactgtgccctggcctcactgcctctcactcattctcaagtacgttcacctcagggcctttgttggaatactctgtccctggctgtccacctggcccccttacacaacatagctcacttttttttttttttttttttt

SEQ ID NO: 183526 - DNA, 597 bp, Homo sapiens
ctgaggatgaaagaatgtctaaatcagaagaaagaaagtttatcattaaaatctcattagtttagaatttccagacatggtaggactgaaatttgcctagcaaattctttcttttatggtttagatgaatggtgttaagatgcctggcaaacatatactttgaaggccagctgttttcaggcatttttggaggacatgttcatggaagaaattgatacttaaattttacatcattatttatcataaaggtccccatgtcccatcagaagccacattctggggggttcacatgtctttcaccgcagcatcatgggcctaggtgaatggctgtgggttgttggcacacgtgggtcctgggccctgccagtgcctcctaaccccaagttgcctgaggtacctgggggaggacaggtattcagaagggtgtcttcgtccttccaggcaggctgagttgttgtgtggcttcagtaggaacaggttggctgtgaggggttgcacaggcctcagttggccctgtggtaatgcgcacagtcactgtaaagtggggtggactcctgagaccacatggtgagattcaccattttttgatacccctcc

SEQ ID NO: 183527 - DNA, 163 bp, Homo sapiens
atcttagctccaattgcctactgggcatcccactaaagttatggcctcatctaggatagaactcattattggaccatctgagcagattattgtcagtcttcattgtttcattactaagtcctatcattcttatattgattcttttcttttctttttttttttt

SEQ ID NO: 183528 - DNA, 341 bp, Homo sapiens
gcatgcatgggcccagacagacgatgctgttgaaaaggagatctgaacctcatctgctctccttagaggcctctggtgggggcagatctctgctctcagcccctgcttccagcagagcggggtttcaggccaccctctccctggccctctccccaggtgggcggtggagaccctctgctcgtgcccctccgctcgtgcccctccttggtctctgattccctctcctctcagggccaggtgttttagagctcaaagagggaaactgggatagaaaacgtgtgacagccttagcacctgctgagtgaattccagctctttccccttttccatcgcttcctcct

SEQ ID NO: 183529 - DNA, 131 bp, Homo sapiens
attgcttttgaaaaggagcatcagtagcttgtgttatttctaataaaatgctccaggtcaagaccagcggggtatttgaaacctagtcagagtaaggagcagacaccctggcctgtgagaatgacctctga

SEQ ID NO: 183530 - DNA, 165 bp, Homo sapiens
aaaaattttcctattctttgttaattgttgtaaaaaaaaaactaaaaattctatgatggaattctttgcaaataaaataattcaaaggaattgctccaatgcaaataaaaaatgaaatacccttttctatgcttagcacaataggtaagtccctaaggtttctct

SEQ ID NO: 183531 - DNA, 376 bp, Homo sapiens
aaaatggtggaaataaagattacactaaggtgcttatagcctagcaagggacataacattgccaagaagtataaagtctgaggtactccgagatagaaggaaaacaatccctttttggtggtaggaaagatttaccagttttaagctgagtgagaaagggcatgagtagagctttggcataatcctgaatttccatatttacatatagaatataaaagagaacagagtcaaggacgtccccaaggttttttggcataggaaactgaagaatgaagttgtcattcactgaatataaagacagaggagcagggtattttgtagccaggtaaagttgagagctctgtctcaggcatcttcaatttgagatgaatattgg

SEQ ID NO: 183532 - DNA, 474 bp, Homo sapiens
tcacagatacggagaacagcagattttaatattcatgcagactgtcacatgcaggaaagcttaatacgcagcaagaatagggacatacaaaagagaaacacctgatttttataacaaatatctcccttttcttctcctttctactgcagtgtttcccttcagcacttcctgcacagactgccttttctttctttctttctttcttttgagatggagtctcgttctgttgcccaggctggagtgcaatggcgcgatcttggttcactgcaacctccacctcccaggttcaagctattctccctgcctcagcttcctgagtagcaggcacctgtgatcccagccaccacgcccagctaatttttgtatttttagtagagatggggttttgccatttgtccaggttggtatcgaacccctgacctcaggtgatccacccgcctaggcctcccaaagtgctggaattacaggtgtgag

SEQ ID NO: 183533 - DNA, 330 bp, Homo sapiens
actatagacgatcccttttcttgtaagagacaggtcttgctatgtagcgtcaggctggttttgaactcctgggcaacatagcaagaccttgtctctacaagaaatacaaaaattagctgggattacaagtgtgtgccaccgcgcccagctaatttctgtatttttagtagagacaggtttccccatattggccagactggtatctcttttctttcatttcaaataagagtggaactttttttttaaggtctgtttatctacatggggttaaataagttatacttgttggacctattgaaagaactaggcctacataacaaatggagcagt

SEQ ID NO: 183534 - DNA, 712 bp, Homo sapiens
aaaaggttaaacatgttatcatatgacccaacaacttcaatcctagggtatatacaccaaagagaaatgcaaacatctcctcatatgaaaacttgtccatgaatgtttctatcacattactcatgatagccaaaaggtggaaataacctaaacgtccatcaaatgataaacggataaatcaaataagctatatccattcaacggaatcatattcagcaataaaaagaaataaagtactgacacatgccacaatatggacgaacctttaaaaagttatgctaagtaggccaggtgtggtggttcgcgcctataacaccagcactttggggggccaaggtgggtgaatcgcttgagcccaggagttccagaccagcctgggcgacagagcgaggctctgtctcaaaaaaaaaaaaaaaaaaaaaattcttgacccagctcaccagcatagttagtttacttttctgtgcttccttgcagaatagcttttaaaccaaaatgcttaattatgccttcaaattctgggattcttcatattgcagaagagcctacaataaggcttaaaagcaactgtgttttaacatcagtgggagatcaaggaaaatttcagagtttgcagtttggtaggaagactgaaaaactttgcatttgtactttaatagtgtggtttcatgatggtttttgaagaactgtaagttttaaaaatatcagacaa

SEQ ID NO: 183535 - DNA, 179 bp, Homo sapiens
gagaaatttatctgaagagcaatcagttagatggacatggaagaggccctctctggggttttacctggtctgtcttaaaaggaactcactcgagttttaatccctaggattataggctgtaaagcaatggtcagcttagatccatttcagggccaatacatctgtctaaaatattttga

SEQ ID NO: 183536 - DNA, 519 bp, Homo sapiens
tgttggtcccttgagggttagagatgccagtctgtccttgataaaactgcagctttcattagtcattgtgcaattactttttgtagccagaatcgataaagcttttaactcctggacaatgatgaagctgccttttgaatcgttttttctcttctttgtggtttttgcttttgaaaactgtagcttaaccagtgtctatttcctgctgtcaccaattaactattttttaatcatctgcttttacttcagttaatagatggttaaaaaaataatctcattaggcactagtgtctggccgcagacgtggctcagatgaggcctcgtggaaagagcagagggagggtctcaggatgacttctagggaaagtaggggaagaaagatacagcctaagtgctaagtaggagcataacactttgctgcgcatctttataaaggtcccttcattttatatcagctcctcagacagtagtaacagtattttcattttagagataaagtcagagttagagaaaattaag

SEQ ID NO: 183537 - DNA, 318 bp, Homo sapiens
tcccttccaaagcctcatgagtaaccttcagaccactttgcaacctgggaagcagttcacactcttcctcaccaggcatcagggtgaatttcatcaggcaagagtttacttgaagctggatatccgctgattttgcagattatgttaattggctactgtctagaacaaggtataaaacagataaatgggaggtcgaggcgggtggatcacctgaggtcaggagtttgagaccagcctggccaacatggtgaaacccagtctcttctaaaaatacaaaaattagctggacatgatgacaggcacctgtaatctcagcta

SEQ ID NO: 183538 - DNA, 782 bp, Homo sapiens
ggagccattgtggctccggccgattgagcctgccctcgggctctcaaggctaggcgagggtgtgagggactggagttcgaggtcaacctgggccccattggtaggaaaaaaaaaaaaaaaaaaatttttgtgggcggctgcccgaaaaaaggttcagacccaattcgttttggggcgctcggctgccccagttatggtaaggtcgaactggtggccatgagggtgttacaccagggaaagcccggggcagggcatagtggctgtggttctccccacaataaaaaagggccgggggaaacacgatgggtgtctgaaaacaatctcaaaaggaggatccgggagagacacatgcaggggggtccaccacaacggggggttccaagaggcgacggccagatattaaaaattaacgccccggcgcgtggaaaaaaagacaggacgaaagacgacgaagacgacgcaaggggccagaggagaagaaagagagagggaggcgaaggaggaacgaggtggagagagaggagcggcgaggcaacgagcaacgacagaaaggagactgcagaagacgacagacgaacgagcagagacggagacagagacggagggggagggagggagagcgcaaaacgagaggagagcagagcgggaggagagcgaaaaggaagagcggagcgacgaagacggacaggacgcgaggcgcaggagcagggcgagtgaggaacagagctgaagagcagaagagccccgagcgagaaggccggaggcgggagaagacagcagca

SEQ ID NO: 183539 - DNA, 172 bp, Homo sapiens
actctgaagcctgggcaacaagagcaagactccatctcataaaaacaaaaaattgaaaaataagaaaagagcctgggagactagttagactaggttatcgatgatgggagcctaaatcaatatcttctagttactggtctcccaggctcttttcttatttttcaattttttg

SEQ ID NO: 183540 - DNA, 674 bp, Homo sapiens
aagaagtctagatcagctgacattgccacaagaaacgcaggttagttcatcacactgtttcagttttagaacaggtctaaactcagataaaaagaatgaactatttagcccattctctttaaatgcagcatggcatagtttaattagtgcaatgtaataatctccaattgctcatagaaaggaactaattctgtcaaagtgttttcttagtttcccccaccatgaaatgcattttattcattttgaagcatctgaaaaataaataagcagctgatatccagaaatgaccataaaataactgtgtttaaagagtttaaaacaaaatacagtaaagcacacaaagacaatattcacaaaatgctaccaaataaacacattcaacttcccacaggtttcacacaggataacttttgatataacatcagcagctgtaaaaatataaaaatcctatgtaattggcatcgtattctagaaaaatagctaactgagcctatagggaacgtttttggtctccagattggaaagcatttggatctgatagagaggtgctcctgattagcagatgacataagcacagccaaagctttactcagaaattcccagtcaacatcactgtccttcactcaaccttagggctgctgcagaagctgcaaatgtcgtggggtctgaacaga

SEQ ID NO: 183541 - DNA, 322 bp, Homo sapiens
atgagagctgactgtgcgctggagactgttggacacttggtgtatattacctcacttaatcttcactgcaaccctgggaggaacatattgctttcccattttataaatgaagtaacagaggctctgagagattctcacttcctcaaattaaacacctagtgaatgggggaagttgggatttgaatccaggtgtgccttgttaaagagtaattgcggtagggagactttgaccttttaaaggctatgtaatcagagattattctttcagcattcagttaatcgtgtcctttacagaagaattttctccttgtagattgatgat

SEQ ID NO: 183542 - DNA, 596 bp, Homo sapiens
aatagctgaccagtactcctcaagactgtgaaataaagcttatttttttaaatcaaaaacaaaatagcacctcctacttgtcttattacatctaaagagttatttttacttgctaattgttaatgctgttttatctataaagtggtaaagtattcactaaaacttaatttttctaaaaataaagttattttacagcaccacagtttggatatctcggtgaaattcagcataatggaactttatttgtacagttataatgaaatcttaataacaagagcaaaaatattatcatctctatcctgcagaaaaggatagagataataacagatctaaacagaaaatgttttacagtcacacaaaaattagtgataaaagcagatttagaattccagattctcaatcaaaaagtgattactgcaatattcatttttcttccctcacacaaagaatctctttttcttcctcctatgtgaataagggtgctctcttgaactggagacttccatgactggctaatgtaagaagcaatgcctgttttcattaacgttttaatttttcatagagcatctcaggaagtccacagagcttgaatttgt

SEQ ID NO: 183543 - DNA, 295 bp, Homo sapiens
gaagcctgcccccaaagaaaagggtttgagttagccatgctctttgccaactgtgttaggtactaaagaggaaggcaggtcacttcaacagggagagaaacatttaggtctacagtggcaggagcttcactgaacaaacctctcataaacccactaactgtgcctcataacaggggggtgcgacaaggtggcaccagggagattttaccaacagttgaaatgttaaacttctctcctactagttggtaaagagctgcctccaaccccatcccattactctgattcctcctccaaa

SEQ ID NO: 183544 - DNA, 652 bp, Homo sapiens
cacagtggcctgagtttgaattctgactctgcctctttggaaggctctggaaggttaaaggagcttgtgtgttcaaatcttagcctggtacctggcatatactcagcatgtatttttttcccctttcctgacaatgttccttgccccgaacacttgaatagtggagagaggaatgtttgcttttcctctccattgaaccaacactcgcccatccactgagcccaagattcaccttaggattgtctgttggactcggctcttttgtgacctaacagtgcaggggccttgtgctgagctgcacatgctcgctctcgctggtgctccctctctctctctctctctgtctgcattatttatagtaaaccatattagaacagagtgttaaagaggaaggatgagtcattcccattgaaaccattgatgacataaataaaagcaaaatgcttactatgtgttttgtgcagtatttaaggccaggttgtgctaatttgaatgctcccaaactggatctgtgaaagcatacatatgtgggaaaaaattcaggtttaactagagggaagttatttattgaaaatccatttcagtatctgctttctcccttctatttacttcagatccatattcatatcatgcttgttgttctggctaacga

SEQ ID NO: 183545 - DNA, 167 bp, Homo sapiens
cttcctcctactttaacaaaatgtgactgaagaggaagccagatgtgttctaggacagaccagctgactaactcttactgtcaacatacactgtgcaattccaagacacaagggcaactgataaagaagattagcttggttttccagaaataagttctgctctgttc

SEQ ID NO: 183546 - DNA, 126 bp, Homo sapiens
catatgattaatttttaaaattagtttttttcttttcctgagaatgaacagccaggattaacccatctttagggattacagaaaatcagctggagatgacagaagacctaagtacactctggctct

SEQ ID NO: 183547 - DNA, 210 bp, Homo sapiens
tgggacccactcttagactgcagagccaagtctccagtctcgtcccacacaggtctgttctctgttcatgcctgccaaagggactggttttaataagactgaggaccaggacaatccttaccactgccaatcaaatcaggcagtctgggctttttttttttttttttttttttccttttttttttttgtttaaatgccaccgggggtccc

SEQ ID NO: 183548 - DNA, 480 bp, Homo sapiens
acatcacttaaatatattgctgattagaagaatgtctaattttcaggtcaacacacaatacatttataattaatatcacagtggactctttgaatttgggaaagcagtacaaaaaggagtcagactttgagatatttaacttagagttgtttatgcaatatctgaatttaggatagcagtacaaaaaggagtcagactttgagatatttaacttagagttgtttatacaatatctcagatcgtttctatgttaactttgtggagagacagaaccaatattttaccacaagtaccagtggttccaggattcagatgtcattgctatggtgagcagtaggtttaccactcatcaattggaccccaaaattatagtagtggactctcacaaaggaccttattcttccgagctccattttcagactaactgagagcagataaaatagattttaacaagtcctaaatgaaattatttacaatgac

SEQ ID NO: 183549 - DNA, 115 bp, Homo sapiens
cttaaccacgatgtccctgcctctcagtgcaaccacagacctaccaagacaccatgtacctttccagtggggtcacagacataaccttagcatcaagaagaacaaatacattctt

SEQ ID NO: 183550 - DNA, 495 bp, Homo sapiens
ctataaattcctctgcatacttggatgatcttcatttgatctaagttgttgaacacacttcaagtcttattttgcctatttaggtccggctaccctatcccacattactctctatctggtcaccatttttgtaccctgcttcctatggatcttattgctttcaactacttccctctggcctcttcagaggccaacaatgcctggaaaaatatgtgcattttaatttgctgaactgccaagaatcattagctcatttaatcaaaaacagtatctcaaggtaaatactgtgagagtaatctctgagaaaacagtaatacctggggatattactaagacattttcagcctatgaagaaacaaagttggctacttttagaacacattatgttaactgctatgtttaagtattagaactaagaatacctaagaccttgtacatcatggtgggaaaatgaataattcaatacatggtactactaggtagccatctttttca

SEQ ID NO: 183551 - DNA, 610 bp, Homo sapiens
gcatgagctggtaggttctactgtgggtagaattcccaacctccatatttccaagtggtttggttattccttatcatctcaccaccatcaacaggagttccatgccctttcagagatgatgagaggaagaatgtatgtgtatggaattcagaaatctggaaactattggcaatctgaggatatagccatataaatattgtacatctaaccatattttccttaggaaaaaaaggagacaataagcatttctttaaagagcaaaaaaagtaggttttttttctgtattccactgaaaatataaaatgtaaacaaatttttcattatcacattttatactctaatacaaataagctatgtctataataatgctaatagctatcattaactcaactcttactattcacctatgtatcagtaactatgtgtacctaggtactaactgtactcagcaccgttctgaatgttttaaatgtattaacctaattagccattataacaatccagtgaggagggggtggttatattacatctacattattaaaagctttagcaaatacgttatattacaactatgttatattaagaacctcagttagcctttcaatttaac

SEQ ID NO: 183552 - DNA, 560 bp, Homo sapiens
ttctcctacagatagatcctctttacattctagatgtcatttcgtgacagttggtgaataacagcagacaagcccaggccaggtggcagagtatctgtgtctgcattttgatgacacctgtcatcagagaatctaggcacacaggctggggcagcatccatggacgaggcagaggaagtgggtagcctagaaactccaccagctgaggagttgtttcgtggtctcaacagcttgtagagtgttgatgtaattttgcaggtagacccaaacctttaagcaacttgcattttaccaagagttgctcatcatttcaacctctcactcgctattctcaccatcagatgcagaatcctgttgcaataaaatcataaatgaaataaaagcacagtcaaaactgtgccatccctctgattaaccaatgttgttagctcagggtctagagtattaggtatatttttgttactttatggagcctaagcttgctgctacatgggagggagctctacttgctttacttcctgccaaaacacaagatgcactttatgacaatactgatttgg

SEQ ID NO: 183553 - DNA, 646 bp, Homo sapiens
  misc_feature (495)..(495): n is a, c, g, or t
  misc_feature (497)..(497): n is a, c, g, or t
  misc_feature (499)..(499): n is a, c, g, or t
  misc_feature (522)..(522): n is a, c, g, or t
  misc_feature (525)..(525): n is a, c, g, or t
  misc_feature (527)..(527): n is a, c, g, or t
  misc_feature (530)..(530): n is a, c, g, or t
  misc_feature (532)..(532): n is a, c, g, or t
  misc_feature (537)..(537): n is a, c, g, or t
  misc_feature (543)..(543): n is a, c, g, or t
  misc_feature (566)..(566): n is a, c, g, or t
  misc_feature (573)..(573): n is a, c, g, or t
  misc_feature (580)..(580): n is a, c, g, or t
  misc_feature (583)..(583): n is a, c, g, or t
ttctcctacagatagatcctctttacattctagatgtcatttcgtgacagttggtgaataacagcagacaagcccaggccaggtggcagagtatctgtgtctgcattttgatgacacctgtcatcagagaatctaggcacacaggctggggcagcatccatggacgaggcagaggaagtgggtagcctagaaactccaccagctgaggagttgtttcgtggtctcaacagcttgtagagtgttgatgtaattttgcaggtagacccaaacctttaagcaacttgcattttaccaagagttgctcatcatttcaacctctcactcgctattctcaccatcagatgcagaatcctgttgcaataaaatcataaatgaaataaaagcacagtcaaaactgtgccatccctctgattaaccaatgttgttagctcagggtctagagtattaggtatatgagagctgcactgttatatgatttattatacatcttaggtncncnacccttataggattattaggagnttncnatngntagtnacatanagggcttagtattgtacgtggcncgctgtnactcctnttnagcattggctctcctcctcatctgtttctattacactggttgcaatgtgtttctgtgctgaat

SEQ ID NO: 183554 - DNA, 731 bp, Homo sapiens
ttcttttaggtgtaacatcataagaaatcacaaacttgtattcaactcttttcagttttaggcaaattccatttttaggaataatagttaagcagtcacaagaccacaggttaatattgagtgctctctctcactttaccaatcccaacaatgtttaactcttatttattagtgtttgagtgttttatttgtgtacaaagttaaatattctaagttcttctgtatggctttactatttctaatgtaaatttactccattggaattctttggtttttggcagtaataggaattattctgtaatctgtgtgagaaatattaggaaatgaactgaaagtaattgaaagaggaggcacaagtaaaccatcagaaacgcttttgaccataagaaggggaaattaagggacagaacggaagaactgtgctcctatcagcaatctgagggttcgctctacctgcttaaaagcaagaaatatttttaatatttcttctctctactctgtactaattttatctgaaaaattgctgctgaaacttaggagccattttgaaagcaacggtagtaatcaaaggtataatcctcatgctatataatgttttagattaccaactgctttactatgtggagcgttttctgcccgttactgagggttagatggagaacactgttcccatcttagaggtgaggaacctacagatggcaagaatagcatatggctggctccaagtcaca

SEQ ID NO: 183555 - DNA, 372 bp, Homo sapiens
acagtgggggagagttgtgcatattgggggagtgaagaggggttttttgtgaaccctctatacttactgctcaatttcgctgtaaatcttaaacttcttttataataaaaggaatgaagtattaataaacaaacaacatgtatgaatctcaaatgcactgtgcttaataaaagaagccaggctaaaaaggttacatatcaaatgattccgtatgtatgacattctgagaaaagcagaaccacgaataagaaaacaggtcactgttgctaggacctgaggttcatgaaaggaatgatcaaaaagggtatgagggaaatgttaaaactcttctatattttgattctgttgatggttgcacaacggatgcacatg

SEQ ID NO: 183556 - DNA, 349 bp, Homo sapiens
ctcggccatcacctctggcacatgaacaggtaaagatgttccaaagcgtaccgtttttgtcagctgagaccatttcatgcttacttgactgcatcgacataactcttgaggattaagatagctgaaaattgaggggatctatctgcacgactcactctttttttttttttctgattctcaggttgattaatactgctaatgcaaatgctcaagtagatgtttaaaaactttacaaaatagattcaagtgatactttcttttaaaagtgaagagttgatgattacacatagtaaattcatgaactacagtaggtttgtatcaaacaattttttttaatgaaaatctgttg

SEQ ID NO: 183557 - DNA, 348 bp, Homo sapiens
aagatctcaaactgttcctattttcttagccagtgagtcagaataaaccccttttagtgacattgttttctctctgcccctgttgaggaatacattgtccaagatttaatgtgaattcaccttggggatgtttttcagaaatacttgttacaatattaaaatttaagtgatgatattgaccaactatttattataatctcatagtcctaaaacaagctgtcattttttaaatgtaaaacctttggagcatattgtcttattaagtaaaaattatttaaacatatttaagtatgcagtctctgcccttcaatgaccttttttctctcaagggaaattttgaaatatata

SEQ ID NO: 183558 - DNA, 164 bp, Homo sapiens
tcaatgacttactgttttcaaaccttaggtcaggggttttgttccctcctgatatgaggaagagaaagaggtggacttatagctggtagacagcagatgatgaagcggtgcataacccatagctaatcttagctcttttttttttttttttttttttttttttt

SEQ ID NO: 183559 - DNA, 334 bp, Homo sapiens
tacaagaatgtataaaacaaactactcagaaaagaattatggcccatgagataaaacaacactcacatcatgacagtggtatgtctgtgtaaaaatgcctctatgttgcagcaaccaagacatgcacaggaaacctgaatccaacaagagattaactttcaaaataatgtttactttcaataactgctgagatatatggtgagggcacccttggttttatatttttgaataagtggtagctatgatgtaatcatgctaactacttgtgggtacatagaagtacatttctgttcaagttctaataattgtccagtctccaaaaactggtaaaatt

SEQ ID NO: 183560 - DNA, 219 bp, Homo sapiens
aatcaataatccagaacagatttggttaaaatattgttagtaatttgtatcaatattttaaataatgttttaggctagtaacacatgaaaactaaatcatatcttgtttattcttccattaaaattagtttttcctctggtaatgtaacaggagaacttatgtatataagatctgtgaaattctgacaacaacatatagtgtgattgtcctctgcttat

SEQ ID NO: 183561 - DNA, 355 bp, Homo sapiens
ccaccttggcctcccaaagtgcttggattacaggtgtgtgcctgaattttatgttgttttatatgctttcctttatattccgaatttctcacaatgataaagaattacttttataatcataaaaaattaaagattgctgttattttaggcaccagcaatataaatatggtctaataatggaggccacagtactgctctactttgtaccacgcctagactgctgagttcatctgggtgtcatggtttctttttttttttttttttttttttttttttgagacggagtctcgctctgtcacccaggctggagtgcagtggcagaatctcggctcactgcaagctccgcctcccaggt

SEQ ID NO: 183562 - DNA, 550 bp, Homo sapiens
aaatttctgctcaagcgccaccccctcctggaggctttcactgctatcctcccctgtgctcctgcccttcccatctggcatctctgacactgtgggctccctggggctgggctgcccaatgtccataggagacatgggcttcagaggccatgtctgggtgcttggacgttgacttaagagcagtgggagtcctggaggtgtgctgcgttttagaagaatctttgcagttgttctgtgggggaaaatactggacggggcaagagtggaggcaggagaatagttgggaggtggtgcctgtggctcaggggagaattgatgatggcttgtggccatgctatccagtaaggtagccagtagccgtgtgtggctcttttcattgaaaatacaggaaaataaaacaaaatttagttcattcacactagccatatttcgagtactcgctagccacatgtgggtattttagcccctattgggcagcgcagatacagacatttccatccctgcagaaagttctgttggtccactctggcttggactgtggtggtggagt

SEQ ID NO: 183563 - DNA, 266 bp, Homo sapiens
ttcgttactgacacgataccctctgctgttgcccttctcctctcgcaggctgtgaggctgaggcagacacactgggtaggtcccacgtctccttgtggcatttagatccagtcttactgaagggcatgctgaagaggagatggccctgactcctggggtatggagggacactgctgccagcccaggctgcgtggcacatcctgccagctgcaggtgcctcccaggcatggggtaaagcttagcagtgttctgtctattctgataca

SEQ ID NO: 183564 - DNA, 341 bp, Homo sapiens
tgtgaggattgcttgagcctagaagttcaaggctatagtgacctacaaatgtgccactgaacttcagcctgggtgacagagcaagaccttatctccaaatttctcttttttcgttgttgagacggaatttcactcttgtcaccgaggctggagtgcaatgttgtgatcactgcaacctctgcctcgtgggttcaagcgattctccagcctcagcctcccaagtaactgggatacaggcgcccgccaccatgcccggctaatttttatacttttagtagaaatggggtttcgccatgttggccagggtgatctcaaactcctgacctcaagtgatccacctg

SEQ ID NO: 183565 - DNA, 199 bp, Homo sapiens
tttttactcacatatgcccaatagaagctgtgtgtaatgcaagcaataaaatgaatgactttctaccaaatggcactcttcatggctgcaaacgtgaccctaaactacagcagtctataatgtggcagactcaagagggacacaaagttaacactgccccatgctttcccctggaaacaccaatgccatgcatgaaggg

SEQ ID NO: 183566 - DNA, 207 bp, Homo sapiens
cagggggaagagggtgtgcaagaaagaaaacaacagtcatgttatacagcgagggccttgtgtagatagagtttatgtagtcataataatgcaagcactgaatgttgagctaaacaaataatataactgtaaggaggatgtgaggatggaagtatttctgttttgggaagccgcagggtgttaaatgatcagttaaattgtcatatt

SEQ ID NO: 183567 - DNA, 527 bp, Homo sapiens
gctccccaagtatccggcctatcctaagcttatcctgacgccagataccacttaacgcatgttataaaatgccaaagaccattcatggtcattatggtgtccacaaatatgttacacaaattcttgacactcccttcagaagggagaacctaatccctctctcctggagtgtggctggacttaaattattttgcttctaatgaatgaaacaatgaagaaacgaaggtgtgtgatttcgatagtatgtcatgaaatgaactgtggcttcctccttggtctctcttgaagctgactcaggggaagccagctgccatgtcatgagaaaacttaagcagccctgtggggaggtccatgtggtgaggaactgaggcctccagtcagcagccatgggagggagccacatatgaagtagagtctccagccccagtcaagccttcagatgactgcagcccacttgacagcttcacggtagccttatggaagagcctgagccataaccacccagctaagctgctcctgcattccct

SEQ ID NO: 183568 - DNA, 517 bp, Homo sapiens
tgcgttttacaagtgtatcatctacaaagccgtgtgaggatttactactgaggtgacacatcacaaaaaaaaaatgggtataaagatcaaaagttgtcatatttctaaagattggtgtcacttaagccacatttacttaggtgtttatgaaaatgctaaaattccctgatcctttttctgtgaagtctcacaaccatgtttaaatattacaaggtaaatgagaagtaaacaatacttacttgtaaagattcatttaaaagaagaatacatagcagaatgagagcatttgagaagataccaagagtacttgggaggtttaaaggatgattaataaattatgacaatgtctattttaagataatccacaatttggtttgtgtcagggattcaggcaagagaagataaatcttgcaagatgcatatgctgaaaaggggtgattttaatgccctagatttgagtgttttaatccaatgctaagtgtgagttctaaaaaacaagcagagaatgactgcattc

SEQ ID NO: 183569 - DNA, 515 bp, Homo sapiens
ctcaaggattgttttaagccttgaacgacaaaggctgtttagtctgggatgatttatttatttatttacttttaatgatagtagtggtagttgcttagttggtttgttgtggcttgaaggaagttgacagtaagttcactcaaaaatgtaaaaattgacttttgatctgtttgctttcagtcaggtccatgtgccagctataatacccaaagtagcattgtcttttcctctgcctttcaaatctcaagagaaatcctctcactggaagacatttaccagaatcccactggcagaagattctgggaaatacagtttctgggctttaagcctggcagtacaaagctatcttataaaaattatatgaaattatgtttcaaataagcagaataaaccatatgtgctgttaaattgattagagctggcttcatggaggagacagaatttaagtagaaaatttaaaaagaagaactggaaattggccagaggaaagatttcagttagaatgacataagcaa

SEQ ID NO: 183570 - DNA, 113 bp, Homo sapiens
tgaaaggcatgtgaggtttgggtaatggagatgatgggatatggggactgaaagggaacataacagcatagcccatcctgtaagtggcctggttgcctactaaagcatcccca

SEQ ID NO: 183571 - DNA, 190 bp, Homo sapiens
ctctcctatctgaatcagatctcctatctgaatcagatcgccatgatgacaaaaatgagacggatggccatgtactttttatacattattccatgtgaaaataaagatcatccatttctctcatttcttttcttattactcatgtaaaagcaaatgttctgagaaacatatatctggattaaacctaaga

SEQ ID NO: 183572 - DNA, 155 bp, Homo sapiens
ccctggttaagtctgttgattagccagaaagtcaagtcgatccagtctctaccaacttggtcattttccctctctaagtcatacgtcatgacatttggcatttacccactccagcttacattatgataatttatgaaataccctattaacggccc

SEQ ID NO: 183573 - DNA, 176 bp, Homo sapiens
acacggccaagtccgacagcccagcctgaatctcagtctcccacttgccagctgtcaattctggggcaagtgactgagcctacccttcccattcccccatctgtgaaatgcggatgaggacagcacctccttcgaacagggactgtgaggagtgagtgacataataaatgtacatg

SEQ ID NO: 183574 - DNA, 503 bp, Homo sapiens
aaccattgccaaaattgctcaacatcttaattttattttatttttaattgtattaatctttttaatgtgaaagttttggtcaagatcaaaacactaattctacagctttgggtgaaaaccatttttgctgggatctctgggagcacagtagcatagtttgtggcctgccttgctttctgggatgaaatgaaaggtttttccatttgatatttttagtgtctattttccaaatagtattttataatttttctttgtttctgtttaaaaataaaattttgggaggggtggggagaagaaacaacaacagtaaaacaaagaagaaaagccacttgattaagcatagttagggagctcagtgaagcatgtttcgtcctggtgccaaatgacgctcactaaaattgcagcaatttttgatgcacttgccaatgtttgtgttatttttactttaaagatgtaacagattgctccaaaataaataatttaagcctaatgtttcaaaagag

SEQ ID NO: 183575 - DNA, 295 bp, Homo sapiens
atcaatggattgttcaattatttaatcagcattacctctgtaggttcagtatccataattcatttgaagctgacaccagagagagaaggaaagtcatttctgcttcattattttagaaccagttaaagctgaatccagagacagagcctttcaactgacccctcagaatgccctgcctgcacccacacgtgcccatgcccacccccctactcccactcttaggtctccaggcatgctgcctttacaataaacactacctttagccattgaaacgtggaagcttttgttaattcta

SEQ ID NO: 183576 - DNA, 248 bp, Homo sapiens
ttgatacacggttggttgaatgcatggatgcggagggccaactgtacagatcagtgataggatgagatctaaagccaagttgcagagcactgagacgtgagggcggatatgagaaaagtaaacgcagacctcttgagagacatggtcatgaacagaggagttagagggtagtagctaagggtagagaaaaaaggccaagagaatattggtttattttaggtggtgagcatgtttcttgttgatgagaa

SEQ ID NO: 183577 - DNA, 349 bp, Homo sapiens
ctagaggactcgtgatgttatccccaacacaagaaaatcaattgatgaaatatatcacattaatggaagaaaaaacatatatatcatctcaactgatgcaaaaaatatatttgacaaaattcagcactctatcagaaaaacctttagaaaactttaagaaaatttggctgggcgtggtggctcacacctgtaatcccagcacttggagaggccaaggtgggtggatcaattgaggtcaagagtttgagatcagcctgaccaacatggtgaaaccccgtctctactgaaaatacaaaaattagccaggtgtggtgttgggcgataacatcaggatcctctagaacagcac

SEQ ID NO: 183578 - DNA, 419 bp, Homo sapiens
tctatgcagtgaaagaagctgggctacatcaagaatggcaaatagggtccccgttgcatgccaacaacaattgattattagtggctgtctctgagctcactgggaagactaattacgctagggttgattagcaatgtctaccacggtcaaggcaatgaggagtggcagcacatgtgtcacttatttgccatcccagaactagatgaacttcaagttctcttccaactatggctggctctgattctaattataaaaacaaaaaaagggggaaggggcaaatggagaaggaaaaataggctaacattttccaacatgggccatggctgaattcagtcaaatcaaggctgtctgcccagccagcccctcatgctccatgcacacagccctgccacatgggaggaagtggaaaacatcagatc

SEQ ID NO: 183579 - DNA, 537 bp, Homo sapiens
ataatggcaggggtgcagcaggacacaccctggcatggacaaggcaggtcctggacccagagtgagggacaaatgaggtcagcctcataggggcacaacagggctgctcccagtgcaggccagggttggccacgaggaggggatgtcctcaccaggcagtatcctggtaggcccctggctgggctctctaatgcccacgctggggcaggtgggaggacattctaagtaatgggagaatcagagccatgagcactgcattgattttgagtgtcccagtctctttttttttttttttttttttgagacgaagtctcactctgttgcccaagctggagtgcagtggtgcgatctcagctcacggcaacctccacctcccgggttcaagcaattctcctgcctcagcctcctgagtagctgggactacaggcacctgccaccatgcctggctaatttttgtatttttagtagagactgggtttcactatgttggccaggctggtcttgaactcctgaccttgagatcctcccgcttcagcc

SEQ ID NO: 183580 - DNA, 328 bp, Homo sapiens
ccttcttgcccctccctgagctcagcgtacagcccataccgaacagggtagaaggagtaccagcagcaaccccgatgctgggatgttgggcaatagtggagcacgattagtatgcccatgcctcactcactagggtggttttcagtagacctccagttctgactaagctcctctcaacaagattcagccaggcactgtggcacacgcctgtagtcccagctacttaggaggctgctgcaagaggatcgcctgaacccaggaattcgaggctgcagtgagctgtgagtgtgccactccagcctgaacgacattgcaagacaccagcctc

SEQ ID NO: 183581 - DNA, 451 bp, Homo sapiens
gggctgggtcgtctagatgatcctcacacgcacttggcttgggcatttttagcatgtgttttggtttttgtatttttgtccacttaggaccattagtttcttgagtatgttagataagaagcccttccagattgacagtttttcataattttcttctagtctgcaagatgccttttatttgggttcagtattttctgtcctgtgttgaagctgcgtgaagctctgaagttgtccttagtctcacatggtcacattagcttttgttagtggtgatttctgtgtccctttgagaagaaaagtgagatggcgaagccattgtatggtctatgggtatttggttcctatgtcttccttttctgtttgtggcttaggttcacaggttcaagtttacccacagtagacacacaccctacgtgttttccttggagattttggtttcaggattgaactt

SEQ ID NO: 183582 - DNA, 225 bp, Homo sapiens
tggtaataactgacttagcaggctgaggaatttgcactttaagtgaaccctaaactggggttaggacaggccaaggagtataatctatactgccaaatccctgaaaggtgctggcattaatagcctaagtacctctggaaatgagagtaaagctggggctgaaccccaggaggactagggtaagaagggcttaaatcctcaaatgtccttgcggccgggcgcagt

SEQ ID NO: 183583 - DNA, 267 bp, Homo sapiens
accttaggaaacattaacaaaagtatgtttgatttttaagggtctgcctatataaatgtacaggtcggttaatcagttcagcagtctttggggattcatttgactaatctttggttaatatgaatgcttatacatatcatgtcatgttcccactattttccatggctggtgttttcctcctgtgcctttgctctattccaattttattataaaatccaattataagttggaaacaatgtagtctgtgtttcttagtactagccattg

SEQ ID NO: 183584 - DNA, 550 bp, Homo sapiens
ataaagggccgtccttgtttttatataattaatttgaatacactgtgatttttattgtgaatgatctctagtaatcagtttcccttagtaaatggctatgtgttctctcttttctctgctttttaactggtaggcttgaatgttcttcctgttggttatctccagtctcagtctattcttttcttaaaatatacaagtaacattagattgaaacttgctaaaaatatggtagttcttatagagaaagactttgagagttgacttttctttcctgctaagtaaagagtattcgtggttgagtttccaggattgggttgagataaagatgtactttggaaagaacagattaaattttgttttaacaagtgtgaggttcaaccatgtacttcctgtactttattttaattggcactttgtgtgcagcgaccatttgtttttgtttaatccagaaaacttcctccaaattcatgattgtaggagaattttgttctgttgattgatttttaaaaagagctctcatgagtttgttttggaagcctttttttttaaa

SEQ ID NO: 183585 - DNA, 436 bp, Homo sapiens
aattctttctgagaaacattctatccatgaagatgcaaacaaattatgggaggctaagaacacggtacagctaaaatcagcatgcacgctcatctaaacatcataaattatccaaaatgcaccagaaatgtcagtctggagctcttgtgtgggaaagtgctccattcactttggcactggctcacactcatctgctgcagcccacggcctgcccggcgggcgggagacccacgcctgcctcggaagcacacagccaggtgtctagggtcccgggcccgcaccaagctctggtgctgccttgaggggagctgcgtggttgggttgtgagatggaaactgaggattccatggtcttccctgcccactcctcaggcctgctgggagccacagggatgtggtcgaagggtgtgcacgctgcccctcggtgtgtggctgtg

SEQ ID NO: 183586 - DNA, 232 bp, Homo sapiens
ttctgggcaaggggctaagaatacaaagatgggtagatggcattgtggacacgattcctgtccacggaaacgcgcattctagctgaagaagatgagcaatgcaccatgatagaacagggggagcagtgtgctagggaatccacacaaggcatgacgcttgcatagaccaggaccacgtggaagatacggcccatcctgtagtgcagcatggttctggggccaacagcaacct

SEQ ID NO: 183587 - DNA, 452 bp, Homo sapiens
ttcctctttttctttggaccctttaaaagtatttacttttaagaatgtgtattaagattgatttttttctgcctagtgttgcaaaatattgccttttaacttttggagggtacttttgattaatttatcatgtgttatggaactgatgatgattcacaaaaccaagtaaaattactgatgctaagagttcaataacacatgataaattaagatattttctgcaaagtacctgctgatgaataacacaatgaataaaccaccttacattttcacaggttttgtaaatttgtccaattattcttccgctgtacacatatttttaccaccaccagctgtaaaagatactagcagattacactttaggttgtactgaattagtgttttcttagctgaggactcaccgacagtcaggaaaaaccacatgaaatcggccttctttttgatgatgtctg

SEQ ID NO: 183588 - DNA, 376 bp, Homo sapiens
aacaagtctacaccaacattactggtgagagtcccaagaatctccccgattggacagctcaggtaccaggtgcccctctgaagactgtgactgtgctcaggagaatggactgtgccaaccagggaccaccccaggagctgagggtagggtccccttcccctgcagatgtggacatagaagatggataggctaccaacaatatccatggcacaatagttcctggcctgctcacacctgtaatcccagcaatgtgggaagctgtagtgggcagaaaaaggcttagctgtagcgggcagagaagattggatggcccaagaccagtctctacagagagactttagattcctcccacccatacccagagcccccaagggct

SEQ ID NO: 183589 - DNA, 565 bp, Homo sapiens
ccctgaggcagggagaactaggcaacatacagaagagaacagctggccaaggaaataaccaagccagacagatgacattcatttaacctatgtttttcactccctaactatgttccaaacttggtggaacacataagcatccctgggtatttgtagaaaaacttggggaagggaactctataaaagataggtcttcttttttttttaagatggagtcttgctctgtcacccaggctcccaggctggaatgcagtggcgcgatcttggctcactgcaacctccgcctcccaagttcaagcaacgattctcgtgcctcagccccctaagtagctgggactacaggtatgcaccaccacgcctggctaatttttgtatttttggtagagatgggggtttcgccatgttggtcaggctggtctcgaacttctgacctcaaatgatccacccgtctgggcctcccaaagtgctgggattacaggtgtaagccactgtgcccggcctaaagacaggccttcctacaggtcaaggaagcttgactaattgttattagggattaaattgaaaa

SEQ ID NO: 183590 - DNA, 412 bp, Homo sapiens
tgtttcatttttacttgtgcgtttgatgtgcatctggatggatggcaccgggcacacttaaaataaggagaaataaatagctctgagatgtgacagcatatgtatttgctcaagagtgaatggcagagatctgcatttcatttttacaggatttcatcagacatatggtaaaccatgataggtgatttttatttaaaagtcagtcatgccgaattcaaaacttattttattatttttttgagatggagttttgctctgtcacccaggctggagtgtactggtgcaatctcgactcactgcaacctctgcctccaggattcaagcaattctcctgcctcagcctccagagtagctgagattacaggcacaggacaccacacctggctaatttttgtatttttagtagagacga

SEQ ID NO: 183591 - DNA, 731 bp, Homo sapiens
agaagagccaggatggccacatccccagagttgcagcacaaaggtggcagatgaggggacctcagcatcccctggaggctaccgtgctcccgctgccctctggaggtcccagtctgccttctcaatcactggagaagaagccctgaagaccccctccagtggaggctccatcgaggcagccaagggaccaaggccaacacccgagagcagagtctgctctgcccagctggaagagtgtggacaggctggatgaaacaaacctggccccagttttgcagagccccgacgggaactgggtggccctgaaggatggcgctccaccccccacccgactactggcccctaagagcgggacgtttcaggccctggaggtggcctccagtgtggcatctgcctacgatgagatgggctccgatagcgaggaagactttgactggagtgaggccttgagcaagctgtgtcccaggtcccgggccctgcccaggaacccccagcctcagcccacacaggcccagagctctgaccaaggccccatagctgcctccccatcctctgcactctcccccccctgaggccatgtgctctgactcggagacctcctccgcaggctcttcccgagaagttgggcaccaggccagactgtcctggttgcagaggaaggcccccaggaaccctgcagctgagaagatgcgcttgcatggagagctggacgtgaacttcaacccccagtt

SEQ ID NO: 183592 - DNA, 467 bp, Homo sapiens
cacatctccattatttttgggtaaatatttaggaatggaatgttggtcagctgtaggctccattttacaagaaactgccaaactgtcttccattctacacttttgtttgcaatgtatgaaagttctggttgcttcctatcctaatcaacatttggtgtgggactacaggaacatgccactacacctgattaattaaagaaaattttttgtagagacagggttttgctctattgcccaggctggtcttgaattcctggcctcaagtgatcctcccacctcagccactcaaagctctaggattacaggtgtgagtcgccacgcccggccaaaatttattaattggtagttggcaattgttgatggaaaagaaaaagcaggttacaagcaatgtactttttgatgtctttggtattatcacaggcaaataaattatatatgtatatatatattatgtatattatattatg

SEQ ID NO: 183593 - DNA, 167 bp, Homo sapiens
aggaattgcattgcaaaaagatagtgatatgcctttaaatacttaaagacatcattcagaagttagacctcccaaattcaatcttgtctttctactagttcttccctttccaaagctactttgttatcaaataattttttctaacttagttcatatttatcaaagta

SEQ ID NO: 183594 - DNA, 692 bp, Homo sapiens
accatactcccactgtctgcctttcctctactttctgtgtggtttaagtacacctgaaaaaacaaaacaaaacaattacagctcagtttatgtaacttgcatatttaacaggagcatcttttttggttgttatgaatcttccattttgtcatcataggaacttagtttatgtaaacaacgatttgtgggtgtgtctagatgcatatggtttatgtgttgtaaagtaaaatacataaataagctgatcacgtaaaagtgattgtgactatagtagctctttggtgcaccctatcaaagcttttagagtggagtcattttagaaatcaaaagcacaatctctgcttttctgaaggcatttcagggagatgacatcgggagaagacagagtgctagtgtaaccctgaaaaccttgtgttttaggaaaatatcaatctttggtctcaggagatttctgggttctgcaaaatgtatgctttatttatagattacactcagccacattaatcaagaaaacaacatccagtctccccaaatcacgatatttgtctttggggatgctatatatttgtggttctcatgaacatggtggccctgcacgaagaccacagtgggttcctggtgggtgtacgctgaatgagcctcctgattgtgccttgcttcaatgaattgtcagttttgctcatattccctga

SEQ ID NO: 183595 - DNA, 652 bp, Homo sapiens
aaacctagaagaaactgatatattgctggacacatacaacttatcaagattgaattacgaagaaaagaaaacctgatgcaggtcaataatgagtaataaagagttttccatcaaagaaaagcccaggatgtgatggcttcactgctgaattctaccaaacttttaaagaagaactaataccaattctactcagattcttcaacaaaatgattcccaatgtgttctatgaagctggcattactctgatatcaacaccagataagaacacaacaaaaaaggaaaccactgactaatatccttgatgaacatagatgcaaaaattctgaatgtaatactagcaaactgaatttaacaagacattaaaaagatcattaaccatgatcaagtgggattcatcccagcaatgaaaggattgttcaacatatgcaaaacagtaaacacgatatatctcattaacaaaatctgggacaaataccaccttatcattactattgatgctgaaaaagcatttacaaaaatcagcatacctttataataaaaaaaaccttaaacaaactgggcataaaagggacatacatcaacacaataaagtgaatatacgacaaatccacagctaacatcatcctgaacaggaaaaagttgaaagcctttc

SEQ ID NO: 183596 - DNA, 356 bp, Homo sapiens
ggtctagggctgtcaccaaggttaaggttagaagagagcctagatggactgtgaattgaatctttggctctccagatgaagaaactgaggcagggctaatgaagcccttgtctgtggacatcctgagtaattctcatcccacgtgtagtgttctttccattgtactatattatgtctctttacatattatctctgtaatatgacctccatattctgaagacttgtatttaatatttaataccaaatccctatctcacattcattctttctcatactattgagacttacaaaatcctacgtaagaacttttaataatattcagcaaaccattacttttccttctacaacataaggac

SEQ ID NO: 183597 - DNA, 318 bp, Homo sapiens
ttctgggattataggcacaaaccagcctgactctttgcttgactctattgactaggctgtgagtttcctgaagccagggactctatcttttgtctctgtattcttaggacagtgtttgacacacagtacattcttgatatatttctgttgaatgattgaataatacagccatgtgtagtaaagtggaatgaatttgagccttatgtcagatagacatagacttgggttcagttctagctgtgctacttattggtatgtgagcctaatatctccaaattacagttcctacatttataagatgggagataatgtttccct

SEQ ID NO: 183598 - DNA, 624 bp, Homo sapiens
atagacttaaccacttcaagccattctcttactcttttttttagtgaattcttcagtcacctgtgaatactaagatattactatagatatatatatgtatatatatgtgtgtatatagtacatatttgaatcttgcagagttaattttaattgtagttatttctatctcacaagacattttagacaaagaaatagtgttgtaattgttggttatgatactacaacccacaaacatgatttaagtaagtagaagagtttaattagtgtattattgaaataaaaagaacagacatccattcccaaagccatcccctgtacttttttattacttggaaatgttaaagtcttaaattccagtatgccattatcccatgtgttttgatagatgttaattttatatgtgggttaacagttgtgtgaattgatgctgctataaatttatcatgtccagcttcagctggactctcagtgctgggaattcctttgtgtattcttggtcgacccctgcagtttaccacaatggctctttagcctctatatactcttacttctctctcagctgatgatcttgtcacctgcagaacagtgaaaatttaggctattgaaagtgaatattccacagca

SEQ ID NO: 183599 - DNA, 422 bp, Homo sapiens
tgtgagaatgttgggggtaattggttaaagtaagattgtttcataaaatgcagtaagtgtaattctgatgttttcggttgagcagaaactagatcaccagatttggtatggttttaaagatgttcttttctgttgtgaaaaacagaccttgagcaatgaaagcaaagagttgaccccagtgctctcagctgtaaggaggatttcacctaaatgtagcgtaattgttcctgttaaggagaaaaaaaggaattggtatctagagtgaggttgatcgcaagaaaatacgtatgcagttctgtgagtcagatgactttttttgtctagtattatccagaattatgtaagggacaccattgttggaaacaacgttattaggaatttcccttgagcatagtctaatcacttagcaaaataaatgggtt

SEQ ID NO: 183600 - DNA, 547 bp, Homo sapiens
aacggtttgcatattctgagcctataacatttatctttttaggttttaaagttgtcttttacatttaggtctttaatccactggaaatttttatgtttggcgtaaggcagggatacaaggtacaatttcatttttctcatgtggatattcacttgtctctccattctcctttcgccatttatctgcaatgtcttctgttttatattgcatttccaaacatgtgtgactacgattctaagccctttagtctgtttcactggttagtctattccacaccaatgccacactaaattttacttgccgtagtactgatatttggtagagcaggtcctcaaatctatcatctattctttccttctttattattattatttttttttttttgagacagagtattgctctgtggctcaggctggggtgcagtggcgcattctcagctcactgcaacctctgtctcctgggttcaagcgattctcctgcctcagcctcccaagtagctggggttacaggtgcccaccaccatgcccagtttttacattttttagga

SEQ ID NO: 183601 - DNA, 306 bp, Homo sapiens
cctgagaccagggaggttgaggctgcagtgagccgtgatggcactactacagcgtgagcaacagtgagaacccatttcaaaacaaacaaaaaaacttaaacatcaacaaaaagaacccaattttaaaatgggcaaaggcgtgagccaccgcgcctggcctccaaagttttttttttaaagttattatatgatcacgcaatcccacttaggatatacctaagagaaatgaactttgaaaatgtgaaatgtgaaatgtgaaagaagccagaccccaaagaccacatgttgtctgattccatttatatg

SEQ ID NO: 183602 - DNA, 279 bp, Homo sapiens
attgaaattaggtagcatgagttctccacttttttcttctgtgttgtgttgactatttgatatagtttggatgtttgtccttgcccaaatctcatgttgaattgtaatcccaatgctggaggtgaggtctggtaggaggtgattggatcatgggggcagattcttcatgggttggtgctgtcttggtgatagtgagttctcatgagatcaggtcatttaaaagtgtggcacctccccacaactctctgtcccttgttcctgctttttccatgtgaagtg

SEQ ID NO: 183603 - DNA, 370 bp, Homo sapiens
tgcaacatgataccctggtttaccaaggtcttcttggctcctagagaaaggatttgcgacaactttactgaattatgtttgcttaaagtgaactacaccttgatagcaatttaagattctcaacatgtaagatgttattagtattccataaaacttggatttatgagaaaccaaaaagtttaaagtattttagaagtatttttaaagctagtttcatatcctgcagcaagaaaaccataaatttctctctgacaaaggaatcagaatctgttaaaagcatttgtcagtgatacattaatattcacgatagctcatgcaatattgcttagtttttggtttgtttttccccccaagttgagactttgaatac

SEQ ID NO: 183604 - DNA, 174 bp, Homo sapiens
tatttccttctttcctgttcctcaccctgataacacttggtttattgatggcagttccaccaggcctaatcgccactcaccagcaaagggaggctatgctatagtatctttcacatctatcattgaggctaccactctgaccccctccaccacctcttcagcaagctaaactca

SEQ ID NO: 183605 - DNA, 168 bp, Homo sapiens
taagacaatcccccagcataattaccaaaaagtgtctcctttcacttttagtagtatctggttgtggacaacatattccatggtcaccccaattgttgctaatttattgaatctgaaagattctacacagtgccagggtaaagattttggattatgaatctaaataat

SEQ ID NO: 183606 - DNA, 444 bp, Homo sapiens
gaaatgatagaactgtaatgtgaccagttccccaccagactacttaagggtatatgtctgctgcttaaacttcaaaggccagctggcaagccaaagccatcatgcctagcagaggagcaggtcctgagaacccaaacattgcagggcatagctgggaacataccaaggaaaacagtgtcattgcatatacgcagtaggcaaagagccaaaaaattagcttactagcaacttaaatatgggaggtggggtggatttctagagctgtcctgatgctgcccaggagtgtcttgtctgtaagtcctaataaactcatctacttgccaagatagacctgtccgagtcattctttggtctctccgctccctcctagtttaatcctgggtttttctcataacaggacagagtgccatattttgccagaggtcagatctcaagcaccaacaa

SEQ ID NO: 183607 - DNA, 359 bp, Homo sapiens
atacctggcagggtggtccattgccatgagtgtgcaggtaactagttccagccctccccagcaaattccatccagatccaatcttagcaggatagagcacctctccttctcttggctcgtccagtattccatagcagcaccattcggtataagaacctagacttgggaagattacagtttgtttccccagagagattcaggaagtctgttgtctgtcctttccaccctaccaagccccatcccacccccagtggactgtcatcagccccatcttgcatttaaatgtctgtcactgccttctcctatggaaaagtgacttatcaatgccaggtccaagcctggtgtctctcccatactgt

SEQ ID NO: 183608 - DNA, 369 bp, Homo sapiens
tagcccttgcagtggcacataaaagtgagctaattctggacgtgtttagttggtgagggggatgcagcagggtaatctccacaattaattgcagtggaaagaacaaggaggctggaatcacacagagactccagtttttaccacatatccatgtgggctcatttctaagccagttttcctgatctgttaacaagcctccataaagcagctctgtaaaaacgggtggaggaggagatctagcacacctacttatgtgggggccaaggtatcttgttaagtgaaagattcactactgatgggataaagggtcagtatgtaaggaccacataagtggggtctgaatcccagttggagcggacctgaaacaag

SEQ ID NO: 183609 - DNA, 277 bp, Homo sapiens
cctactccatgctcctcatagcacacaccagcttctcatgcactgtgtgatctgcttctgttatgtttatggtctgtttgtccccactagaacatacgctccatgagatcagggatttctttctgtgtttttctctactgtattcccagcatctggcacccaacatggcacacagaaggctcccaacgagcactgctggaggaaaccaaagtagagaggaatatcttccgattatcccctgtcccctgcctccagcaaggcagagaattcaagaaca

SEQ ID NO: 183610 - DNA, 459 bp, Homo sapiens
cccaacacacaaataaattatgtgatacctaaattcccacatcacattcatcaatcaattcagcttcaaatcagtggctaccaaaggcagagtggtgggagagtactgctctcctgtgggtacaaaacaggtgtattttctgtagagaattttgaaacaataataaagatgactgaaaggtatacgcttgttatcctacacttagaaattctaaagcgtgtaagtgataaaatactcctcactacttccaccatttcaaggctcagcccctgctctcaagatatgaatgaacctaggcatggaacagggcattatgtttggggtgtgtgtgtgtgtgtgtgtgtgtgtgtgtgtgtgtgtgtgtgtgtggtttttttttttttttttttcttttttgagaccgagtctcactgtctcccaggctggagtgcagtggtgcaaactcagctcactgcaacc

SEQ ID NO: 183611 - DNA, 161 bp, Homo sapiens
attgcgcccggcctatctcattatttctgtggtttgggactctgagagtggtttaattagacagttttggctctgaggctctcatgagattgcagtcaagatgtaggctggggctgcagtcaatctgaaggcttgactaggcctggaagacccacctccaa

SEQ ID NO: 183612 - DNA, 517 bp, Homo sapiens
aataaggtgacagatatgcccaatttgatcattacacattgaatacatctatagaagtatcactgtatgccataaatatgtcaattaaaactaaatatatatatacatatataaagaggagaaaatcaacaatatggttaaacagaaaaaaggctctgcatattaaaaaagatacacaaatatgagttttacactttgttttaaaagacttgaattctagcattgaaatctagttttcttgcttgaaataaagataactgctttatgaatagaatattccaacaatgagtgcactgtcaattgcccagagtcaattaagtgcctgataagagtaacatttaggggccaggcacggtggctcacgcctgtaatcccactacttggggggccgaggcaggagaatcacttgaatccaggaggcagaggttgcggtgagccaagatcgtgccattgcactccagcctgggcaacaagagtgaaactccatctcaaaaaaaaaaaaaaaaagaagagtaac

SEQ ID NO: 183613 - DNA, 446 bp, Homo sapiens
cataaaccaaggaaagcatcagctccgtggtacactaaccatttgcaaataatagttcttcctataaaagtttgctctctctttttgaaggaaatttctgggcaaacaacattttgagaaagaaattcagatatgggaaagtaaagatcatggggagcaggaggctttaagaaacctggcttgtgcatgtggtttacacatgttgaaaagtatgaagattaatgaagccaagagcatagaagatagaacaatatcagatttgaattacagctgagttacccacttgggagtcagttttagattggagctggtatgagggaatagggccaaaatatgaaatcttgggtaatcaaaagctaaaataagattcatggatttatgaattgtgttttattttgaataaatgcttatctaacttcctttatgacacctgggggatcctctag

SEQ ID NO: 183614 - DNA, 367 bp, Homo sapiens
cctgaggtctcttccccgcccttgcttgggtgggtgcagtgagtggaatgtgtagtccctgatgcaccatctccggcccttacagtttatggctcctcactgggctgtgtccagcaacatctatcctgctgtttcccctactctgggccgtccctgctcttgccgctttcctggggagtgggtgaggactgagggacactcagccccagcctggggacccagggacgaggagacacctcgggagggctgggtcacttcaggcaattaccttcacctctctaagcctcttgaaaatgggcagaatgatccctaggtgtcagaggtatggagagcatcatgggagatgacatccctgaagtgaggcaca

SEQ ID NO: 183615 - DNA, 170 bp, Homo sapiens
accgcgcctggctcttgttctcttttgaaagaagttgagaaaagttccaagaggtggaaggggcacgaggaatgactgctgcgagctgacagtggctgtgcagccgacagcagcctcacaccagtggactcatcctgaggctggagattggctttctccagctcagttgt

SEQ ID NO: 183616 - DNA, 346 bp, Homo sapiens
aaatgaaaagaataatgttttgtgatgtgtaaaaattacatgaaattcaaatttcagtgtccataaaaaaagttttattggagcacagctatactcatttgtttgtttatgtatgtccatggctattttcacactagaaggtcaaagtgagtagttgtgcatgcctcaaatatttactgtttgttcctttagaaaaaattagctgatccctgaatgagactcttggttttctgtcaccatagtaatgctcttttttttttttttttttttttaaaaacggggtcccattttgaccctaaggggggggtgcaaaagggcattttgggcacacggaaatttcggcccc

SEQ ID NO: 183617 - DNA, 450 bp, Homo sapiens
tatcataatttgagtacccaagatcctaaaattccttgtccaaatagctccaagacactttcatgagtattctaccataaagacatgtgcacacatgaatgttcactgcagcactgttcacaatagcaaagacatgaaatcaacctaaatccccatccgtgacagactggataaagaaaatgtggtacatatataccatgtaatattatgcagccataataaagaacaagatcatgtcttttgtgagaacacagatggagctggaagctatcatccttagcaaactaatgcaggaacagaaaaccaaatactgtatgttctcacttataagtgggagctaaacattgtactcacagacataacaatggtaacacagacgctggggactactagacaggggagggaaagaggagcaagggctgaaaaattgttgggtactacgctttggca

SEQ ID NO: 183618 - DNA, 189 bp, Homo sapiens
cttctaagagtagactaaaaagaaaccatgtctgaggctttttctaagagaacagattggtccatgtcttagtccattttctgctgctgtaactgaataccttagactgagtaatttataaaatataaatattcctaacagttctagaagcttggaagtccaaggtctagggagtgtaccttgagagag

SEQ ID NO: 183619 - DNA, 161 bp, Homo sapiens
actcatagtaaacagaaacactgattactatttatcataaactgtgatgtacacagagggtgggagaaagggagacagaggttgtgtgagagctaaacagtatattattattgcgttttcttctttttacattttgtttttcctaaaacgaattgtttgcc

SEQ ID NO: 183620 - DNA, 638 bp, Homo sapiens
gtggggaattctcagaacctttacttaaaagggaaagaccttccagcactttccttaaccctcctgagccttggtttctctatctatataatgggcgtcataacacccctcaaaggtaagaattacctgagttggagaggtgatgccacggtaaataggattgctaataaaatgagacaagtaaatagtaatgctgacatgctggttactggtattttgactgttttcatttcagaggaggaaaaaggacaaaattgcagttccaaggaattatagtgagttgctcaaggcaagggtgactaagccagccctgaaatggggcctcaggctgccctcggctagacaacaccatgggtaatattgcagcctacatttcttctttttgtcagcaacatgatagaatctcttttttgcctggccagttcatggggccctgcaattcagaggaccagtggcacacagcaaacacaaagccacgaggtgtactggggtgcagccaaagacagttgccacataaaataaaggatacgcagtaaatctgaatatcagataagcaaccaataattttcatttgctaaatatagtaaccttagaccaacaagagtacaacgttccggtggagtacaacctgccggtgg

SEQ ID NO: 183621 - DNA, 918 bp, Homo sapiens
tctggagtcataatgcatggatagttgaaaagttgatactctttggaaaggtggggctatggccctagccagcacatgaaatcattctctttatttgtacaataagattgtctcatagcattaataatgatgaagtatgcttgattactagagcaaatataatataaaaggatacttctaaatttttactctgtgaatttcagtttctgtgacactcacatttgaagagggtgaacatcaatcagtctactccttgacatacactactataaatagccttggctaaaccgtaaaagaaaaatgaaggccgggtatggtggttcacgcctgtaatcccagcactttgggaggccgaggcaggcgcatcacccgaggtcaggagttcaagatcagcctggccaacatggcaaaaccccatctctaataaaatacaaaaattagccaggcatggtggcacatgcctgtaatcccagctattcgggaggctgaggcatgagaatcgcttgaacccgggaggcagaggttgcagtgagctgagatcatgccactgcactccagcctgggtgacagagcaagacttcgtctcaaaattgccaaagttaaggggatcaacctccctcagagattttgaaaaaatgtataatcattgtattttactaaatataggaacattatggtatgtaacactacatttacattaaatttaagacaaaacatgaagctaaaaagaattctagcttgggaccaagtttttaaggcaattgttcactcctctctgctactaaccatacttttgtggaaaagtttgaggtagagtgactttgatgactattcaagattggtatattaatacctctactagttacaaagatgaatggtggtgatggttacaacataatggatgtatttaataccact

SEQ ID NO: 183622 - DNA, 483 bp, Homo sapiens
gagtacaatggtgggatcattaacccggacagggacaattggaggaggctcatggcttttgagagagagagagagagagagagtgtgtgtgtgtgtgtgtgttatcatgccactgcactccagcctgggtgacagagcaagacttcgtctcaaaattgccaaagttaaggggatcaacctccctcagagattttgaaaaaatgtataatcattgtattttactaaatataggaacattatggtatgtaacactacatttacattaaatttaagacaaaacatgaagctaaaaagaattctagcttgggaccaagtttttaaggcaattgttcactcctctctgctactaaccatacttttgtggaaaagtttgaggtagagtgactttgatgactattcaagattggtatattaatacctctactagttacaaagatgaatggtggtgatggttacaacataatggatgtatttaataccact

SEQ ID NO: 183623 - DNA, 569 bp, Homo sapiens
ccaacccccacaaaaggtacagtaaatatatggtattgtagtcttgtgagacccctgtagcatatgcagtctgtcgttgactgaaacatcgttatgttgtgcatgacggtattagaaattatagaggttttactttctctaaatttacaacatagcttataaatagaaaatatttgttataacatctaaaaaatgtacataagccatgtatgaactctcagtgtatatgactaggggtaggttctttattcttcattgagaaaaattttatatgattttttttaatgaaataagtatggcataggatcctcttttcccttcttaactctggtaaatttctgtgagtagtgaaagatctattcactattggaagatctattcccaggatgctaagtgggaattttcctgtaggtactaagcactgcacaccctaaagagaaagctatcaatcatggagccagacacctagttcggggtttacaaggaggcagtgtgaatcctgccctgcccctgtcagctacctctccacataggcagaacattggttagtgctggagaaggacagggaa

SEQ ID NO: 183624 - DNA, 150 bp, Homo sapiens
cacaaggaacagcttactttttgccagatttcttaattccacctgtggccaagggccccttccccgcggccttcgcttttagctcctcgagtttcttctgctcctctttttgtttctgcttgaaagccttatcttcctcgtcatctcctt

SEQ ID NO: 183625 - DNA, 150 bp, Homo sapiens
cacaaggaacagcttactttttgccagatttcttaattccacctgtggccaagggccccttccccgcggccttcgcttttagctcctctttttgtttctgcttgaaagccttatcttctcgtccaacaatgggtgatccttagagtcgac

SEQ ID NO: 183626 - DNA, 591 bp, Homo sapiens
acaggtggagatatctgggggtggccatgttgggcagatctagtttttaatccacattagcatatcagtacttgctagcctagcccttcaagccgtttttctgctagaaaataaacatttctggagctgcttttattacaagaaaaaaacagcttgccaaagaccccttatcctatcgcctaaaataatttctgaataactcctataataggggcatgcacctgtaatcccagctactggggaagctgaggcaggagaatcgcttgaacctgggaggcagagtgtgcagtaagcccagataatgccactgcactccatactgggcaagagagtgagacttcgtctctctctatatatatatgtgtaataaaataaattcctctcaaagttaattcagccaacacccaggaataaacaaggacagcttggaggttagaagcaagatagagtcccttaggtcagatctctttcactgtcatgattttttcactgttataatttttgcaggagtggtttcaagacagagggaagagaattagtaattagtgaacttgaaaatagatcaatagaaattatccagtgtgcaaaaca

SEQ ID NO: 183627 - DNA, 263 bp, Homo sapiens
atccctcaatttataccaccaatctgactgtcttacatattcatttatccctgtagtttcattctttgctcatttaatacatgagcaagactgacatacaacacataaaatgagaacatctcaatatcatggttttttttgtttttttgtttttttttttttttttggagacaaagtctcactcagtcaggctggagtgcagtggcatgatttcagctcactgctacctccatctcctgtgctcaagcgatccacctgcctca

SEQ ID NO: 183628 - DNA, 459 bp, Homo sapiens
catactttgaagacagtggggggagatgggatatactgattgactttgaaagtctgagtcctttggcctggtaatggggtcaactaatccaggaccatatggattattaaaaagaggtatagaaataatgggaaaatgaaaggaaaagtggttgtcagaaagcaagcacatgtctgttactattacccggtacactcttgtgtttattgactggggtacagagtccaagtgagactcagagattccaaggaaaaaaatgcctgatgtcctctaaccttcagtccagagctctttctatcatgctgatttcttcacaatccttctgcttagtttcttctaaacctttctaataaaatcgtaggtcattttccattagagttgtaaaatagtagtaagtaatgaattcttagttgtattctactgctcattttcttgtgttaatcactgccttgcattaag

SEQ ID NO: 183629 - DNA, 469 bp, Homo sapiens
attttgtattttcattgcaaaatgccagcctcttaagtaactgtaactcatcatatgacaggtggaataaaatggctaccagtaatgcagagttaagctaggaaatagtttagcttttagtgttaattttacttcaaggaaattagagcattttatacatttataaccatcagtcttggctgaaatacttaatggaggcatgataacatatcttgtacctttatagatgttgtagctcaaaattatgtttaaaagttgcttttccaattaggagatcctaacttcgttggcaaagaaataatacacggtaaaacaaacaaaccaccaatataggcattatgaaagaggaaaaacttaataatcggcattgcaaatgggtaattatctaattatctacagaagaaaatgttaaatgacataataaacagaattagaaaaactgggcaagatacaaatattagcttttcag

SEQ ID NO: 183630 - DNA, 164 bp, Homo sapiens
ttgaattccgacaccagactcggaccgttcctgggactgggggaagccccatcgtcagtctatttatgacactcagtcgtaggaagctttgaccctggttggacaggaatgagctagagcacccaaagccactgggcatggtttcttgtgtgctgccctaggca

SEQ ID NO: 183631 - DNA, 343 bp, Homo sapiens
ctttgttgaatatagtgagttttcataaacttttgttgaatttgaaggtgtacctccaccagaaaacaggcagggtctgcaggaagagaaggatccatcctgcagaagcttcatacaaatgatgaacagtgtggcgagacatcaagatgtaggttttggctctctgtgataattcagctgatgggtgttgatttatacatatttgttagtttggtttatttattaaaagaggaacagaaagaaatatattagatcagggtacactttccttatgcctttcctgagacattcctgtcctttggcacttggactaatgacccatgtccccagcataatagccatg

SEQ ID NO: 183632 - DNA, 429 bp, Homo sapiens
tcagttcctcacttaggcacacaggattgttctcatgcttgaatgttcctttcagttttaaaattccatggtcttatgaaattaatgaaacgttcacatactaggaatctgaccattatccctagtttctatgctaacgactcaagagtgagaaatggggaaaattctaaccatttgtagcacataagaaggttttaactaaatttctactgatgctatccacccaggttcttaagggctggctgatcaggcttagattagctggaagcagcagtgtaaacagagagtccattggagggaaaagcatctgcaattgctttaaattccaacgcaatgagatggaattcccgcctagggtctttgccagcacaagaccagcaatgaactctgcagctctgggatccgtggcctcacacatgaagaacagca

SEQ ID NO: 183633 - DNA, 211 bp, Homo sapiens
tcacgtcagacgatgagcttcttgggagtccttgatctcatttctccctattctgatggacctttggcttctccttatcttatatatcccacagccaatatgggataaatatctcttaaggaccagagaccagggcagcaatccaccccttgctcaatgctcaaggtgcggaggtgtcagccccactgccaagcctggtctctggtcctta

SEQ ID NO: 183634 - DNA, 293 bp, Homo sapiens
acagggcaaaaaggcacaggcccaattcctgacatctcttatcttgttgagccacccagctccagatgtgcccagtggatgagctgaggcagcaagtgggctgtagttcaacttctgcccagtgctgcatcgctcccgccccacagctctcctcaatagcctcctgatgcaagtctcgacctcagagtgtttcccagggaatctgatctgcaacacccctcagttactattaacatgccaagtgcaggcctgttgctggcaagtggagaccagggtaactggtaacatccatg

SEQ ID NO: 183635 - DNA, 366 bp, Homo sapiens
tttgcagctcccatttgtatctggctgagacgaatgtgaactaaaaagaaaaacactcctgggcaagacggtgcaagggcctaagaattcccgagcgggagggggtggagcagctaccttggtataggactaacagggcccagcatcttgctgaggatggaagagtacagaggactggaggggtgggagtgtgcttggagaactgcctgccatatatgaaggaagccatggtcccaagagggagtgaaggccacatcatcctggaggagcagggaacatggggctcaaaggggaaagagcaaaacataaaggaagaatcctagagtgtcacaaatgccactctttccaagaggattcagtgtgata

SEQ ID NO: 183636 - DNA, 416 bp, Homo sapiens
tagcatagtaaaggactgactgcgtggttgtagctctgtagtttggtttcttctctgccactaatttggttatgtcagccttgccagattactaaacttgctgaaacatggcttgcttacctgtaaaatcgaggttaatagtaggttcatattgggttttgttttcaaatgcaagaaatcatccatgtaaagaaagtatttagcacagcttagggcatagactatgcactttacaatgttagagcaggtttctttatagtagtcttcgtcagacctggagacccaaacttttgtgtcccaagtagtgattctcagctttccaatatgaatagccccttgttaacataaagatctcactttttcttattagaatttgtacctttgtttgattaaggaaataaaagatgaatgacaaa

SEQ ID NO: 183637 - DNA, 379 bp, Homo sapiens
tctagagcgatccccagtactacctatgtagacattcactaacagccttctcaagttcttccagtttttactcactttccagctccaagcctcctccacattttaggcttttgttacagtagtatcccatttacagatactaaatctctattagtcacctattgctgtataaaaaattaccccaaaacttgagtagttaaagcaataagcacttattatcccacagtcttgttagtcaagaatttggggcatggtctaactaagtgattccagctcagcgtttctgataaggttgtaatcaagacatcacatggagctgcactcctctgaaggctcatctggtctggaagatccatctccaaaatacttacctacatgc

SEQ ID NO: 183638 - DNA, 402 bp, Homo sapiens
ttagagttagattgactgcccttcctttctttccttccatgtttacctcttaacatatacacatatgtagagagaatagtataaaccccttttctcaaccagtttcaacagtcaatcttgcttcatcatatccccgcagtcctagatatcctttaaccgttaaatagttcaatatgtatatcttaaagacttaaacaaaaggtaaacatgagtaccactatcacagaaaatgaataattccttaatactttcaaatatccagccagtgttaaaattgtcagaattctcattttttttcttaacaatttcaatcgatccacatgctatctatacagtgtgactcattttaattgatagtttcccctccatatttagttttctcttgtaatttatttatggatg

SEQ ID NO: 183639 - DNA, 596 bp, Homo sapiens
agctgctggttaaaaaacatatgttggcagagggaaaacggtttagctcaagaaaatttggcagaaagtgaaatgatagagcaatgattatctgcaaaggcagcataacgtaaaagatttggatgtgcataggcaggtgagaaggaaaataatttatacttcaaagagtttatacaatttttttaagaacagtaaaaataaaagaacaaatcattgaaataaatgatccaggatagcagataggctgaagcattaaagtatgtaaacgtctaaatcaaaatataataaaacagcatgggaaaaccaatgtgtgtgtgtgtgtgtgtgtatgtgtgtaatacacacagacacatacataaatgcacattgtttatatataaacacattttggtgataagataaaaatgtgaatgtttaaatacataatatatcaatatattttatgatacatctgggaagaaagaataaatataaaaatatgtattagatataaaaatacttgaaaagtttaaagtactgcaaatgtgattcttccccattcctcacatgatgaagtcaaagaaggaagagagttatattttctccactgtcatttc

SEQ ID NO: 183640 - DNA, 489 bp, Homo sapiens
tgactccctcatcctgccacacacacccccacgccaccccgcagctctgaaacggcttttctttcttagccagccgcacgctgttgccattccaggctcgtgtgggagaagattgttgtgcgcctgggtctgtccgcccgggcggctccagcctctggtttataaaaggtgcagatggttaaaacacaaacgtgtgacgtcagggtcggtttttaaaagtctcttctacccactacatcagttgtgtctcttgggatggactttagagaatcgattcgagcctaatggcagtctagagaaatggagatcttcgtcaggactatcagattattgtaatgctgcacttataacaaaaaacttagatttagccacgcaaaaaaaaaaaaaaaaagaaaatagagtgcaagataaaaaaacacacctgattaactgatagtacgacccttccaatattctttgagatatccatgctatggttccattgaaaca

SEQ ID NO: 183641 - DNA, 593 bp, Homo sapiens
agaggaccccgaacaatcacttagcgggggaacatcacttagcggggaacaatcacttataaatgagtcagataggtgatggggctcaggacacactaccccaaaatatgactgcaggagactagaacatgtcacctcaggatctatttctttggcatatattgagctgattattctgagaaactgcagacacaggagcagctctgaaaagctgccctttgatacaataaattgaaatctacaggttgattatcccaaatgtgaaaatccaaaatctgaaactttttgaacacagacatgatgctcaaaggaaatgctcattggagcattctggattttggatttttggattagagatgctgaaccagtaagtagaatgcagtatttcaaaatctgaaaaaaagatccaaaatctgaaacacttccggtcccaagcatttcagagaagagatacttgatctgtgtaaaggaaagtgactatcataggaccctcatcaaccagtgaagttttttttttttggagacggagtctcattctgtggcccaggctggcgtacagtggtgtgatctcagctcactgtaacctctgcctc

SEQ ID NO: 183642 - DNA, 489 bp, Homo sapiens
atgttgctcaggctagtctcaaactccttggtttaagccattttcgaatctcagcctctgtatctctgtgctccctgtaacctgggattacaggtgtataccgccatgcccaatttcatcctacaccctttactcatacacttttgatcaaaaaactcaactcttgacccatttttcagtctgaccacccatggtgagtgacagccagttctgagccaactcagaactgtcttttaggtccaagagacataatactcttaggtccaagtattagctcttcattatttctgtcctcagaatattacttccaaagacaaagcagagccaaaacaaaaataaatttagacagctagaaatagataaaggtagaaatacattctgtttctggcagcaaatatgcttaaagtcatcctgccatgattaccaccctcctataccgacaagaattctggccaattcctaaggtgtttttgccttgggaaaaggtgg

SEQ ID NO: 183643 - DNA, 905 bp, Homo sapiens
  misc_feature (834)..(835): n is a, c, g, or t
  misc_feature (847)..(847): n is a, c, g, or t
  misc_feature (853)..(854): n is a, c, g, or t
  misc_feature (866)..(866): n is a, c, g, or t
  misc_feature (876)..(876): n is a, c, g, or t
cccagcggccttgggagctgaggaagcagtgggggagagggaggagcgggtgccaccttggcagtgtcgtgagtttcagctggagtccgccagccctctgcttcactgtcataggcagtggtcgccatgtgggaaggggcaaaaagaagccgaagctcagagaggaacaatggatctgtgtgtgattgatctacccatggccactcgctctggtgggaccctcgtgcttgtggggctgggctctgagatgaccaccgtacccctactgcatgcagccatccgggaggtggatatcaagggcgtgtttcgatactgcaacacgtggccagtggcgatttcgatgcttgcgtccaagtctgtgaatgtaaaacccctcgtcacccataggtttcctctggagaaagctctggaggcctttgaaacatttaaaaagggattggggttgaaaatcatgctcaagtgtgaccccagtgaccagaatctctgatgttaatgggctctgccctcatccccacagtctcgggatctcagggcacaatggatggacacgagtgggctctgatgcagaactttctcttttgaatgttaagaataactaatacaattcattgtgaacagaagtccttaagcagaggaattggtgtgccttaaagatacaatctgcgatagtttgggggaacttgtagccagaatgccctgttcatgctgagcaaagttcagcaagtagagcagagtttggcaggcaggtgccaggaactccccttcttcctggagtgcttcttggggaaggaatctggccctgggtttcctggttccctgtactggccgggggannggggggtttaanaaatcnnggatatgcccanggtttgaatngccccgggggggggcgggtcccctaaccg

SEQ ID NO: 183644 - DNA, 255 bp, Homo sapiens
aagtctaaatgctatttgttgcttttatttcaatttaggcaaatcacaccgataaacagtgttatctattttttaaactatacaaattagtaatacattcttgtaaaaaatttcggcacagataaaatgaaatgttccctttgagcaccctacacaatcccaccccctttgggcaaagttaccaataaaattttgatgtacagatgctcaatttgtaacacagctgcatccagataatcctatcgtaaatataat

SEQ ID NO: 183645 - DNA, 235 bp, Homo sapiens
gaacagtacctttagagaacaatttgcaagattcataaagttaaatctgcatttactactcaactgatgacaattccacttattggtatatagcctagagaaatgctcatatgtatacacaaggcagtttgtgaaagtatattcaatgggatgatgtttgcagtaccaaattatggggaacagcctaaaccactatcatcactgtgtaaataaaatacagtctagtcataaaatg

SEQ ID NO: 183646 - DNA, 223 bp, Homo sapiens
atggtaaataaatatatgagaaattactctccatcttgcttctaataaatgcacattaaaccaactataaaatgccaattgttttgcctaagaagtgggcaaagtaaaggagtcaatgaaaatgcagagaaatgacactcttttatgctgtgggaagtgtaaactttcttttcttttttttttcctttttttttttttttttttaaggcagacagttctcagt

SEQ ID NO: 183647 - DNA, 711 bp, Homo sapiens
gaagatcccctggcttgatgtcctgctagaatccaggcaggtctgctgatccttgaccaccaaaaacaagcatccctcaccaccaaaaacaagcatgttacacgggatgtttacattatgctgttaatggaaaaaaacatagtaaatactgggtaaagaaaaccattaagcctacacacatacacacacacacgacttgccattgttatactctatcaaatctacatgaacactgtatcagtgaacactaaaccactgttcctaggggaaatgcagacgtaggttccttctagcctaacatcttcctcaactgatcaatacataattttgttttatgtatgcttctgttcagacatcatcttcaatatatattgctgattcactaacactgaactcacagctgacagcactgtaactcatgactgaagggaacttatctaacatgtacattttctccataaggcacattacggccttcttgcatttaaggaatactagactgcactttaacattatgcttgtgggccattttaaacagtgaaatcaccaacaaaaagcacaaaatgaaaacttataaaacatagagaacatcacagcaacactgacagtaatttctttccaaaggagacatgctgttttttccctgacaatgaagagttgttcctacccacagaccaatgaatcatccaacagtaatactgggatggccat

SEQ ID NO: 183648 - DNA, 356 bp, Homo sapiens
tgaatctgtaattatctcaaaataaaaatttttttcaaaatttcaaaacaactagtctagagctttgttaatcaaagttttctctgaggacctgtagcattttggttatcacctggatcttattaaaatgtagattctcaggctgcatattggaattcctgaattggaatccgcattttaacaagatttccaagtgattcatgtttaaagtttgagaagcactagtctacaacaatgacttttaacctttcaacctactctaacacacttgaaggccataacaaaattcacatcaataacagttgctcggttggacagtgactctcaacacaaatgagtgaggaaaggtggggact

SEQ ID NO: 183649 - DNA, 366 bp, Homo sapiens
tacaatgaatggtcagtctatcatgtaagataagatacatgtgtaatagcttgcactgtgtgatagaacccatcacatgcacagatggcttcatgcctgttatcccacacattgtggcgacggccaccacagagggaagatcacttgagcccaggagtttgaatctagtctggcctagacaatataacaagaccttgtctctttatttattttttatctttatttttaaaagtcttgatttaataagacttcaatgatcagttcaacttgaatttttaccatttaaaatgttaagacgtagtaaaagagaaaaatagaaaaagtcacttgacataaaagtataacttacgaggaattgtatataca

SEQ ID NO: 183650 - DNA, 420 bp, Homo sapiens
gtattttataggtttcatgcgctcgttgtaatagctaagattatatgcttatggagactacaagtaaatttaaaaagcacattatttgtgattttctatctgactttctaataaaaacatttagcacatacattttgccatgagagatcatttttgactatgaaatcaaatattgcttgaatttcaaaagtgtattgaatgtcagaaattcagcattttacaatttctcctatgttagagtgcatgtaagttcatcaacattttcatatatgaacacttgagatcagggtataagattctgagaccagtgagcttcaacctcataccccgcctcctgcaactggactgttcatgtatgtcacagacttcattatttacgtcttttatcacatatactgattcttggggaagaaagtgaga

SEQ ID NO: 183651 - DNA, 115 bp, Homo sapiens
aggcgtcatgctctttctccaaggctgcagttatttatctgcttgagctcttgttttttcccttgctttaaagtgaaatgcgcaaacactcccacttcaaagggaaaaatcctca

SEQ ID NO: 183652 - DNA, 273 bp, Homo sapiens
taccaagagcagtatttatttagaaaacagtctagttagatcgaaggccagtgcaactacaacattatctggaagacatatgggcaactgagaggagacacactgggaattgataatcttcgggttgggctagactaatggaggtgaaacagcagtgttgtgaaccagctcattgctttgtgacaactcagtgctatatgttatgctactataatatctaaggccacatcctcttttagacacctacctaagtaattcccaatagttgatggt

SEQ ID NO: 183653 - DNA, 362 bp, Homo sapiens
ttaaaagtagccaggtatgctggcatgagcctgtagtcccagctacttgggagactgaggcaggaggatcccctgaatccaggagttcaaggttgcccagcagctatgatttagccactgcactccagccttggtgactgagaccctgtcttaaaaaaaaaaaaaagaatcagcagtcatgttattataattgataaataaacttagcaaagtctctggttataagatcaatatataaaaataagttacattttatatccactaattaaaaaattagaaaatagaaattttagtctataccatttacaataaattcagaaacaccaaatatataagaataaacctatcaaaatatgtacaag

SEQ ID NO: 183654 - DNA, 851 bp, Homo sapiens
ctggcctcaacccgccttggcatcctaaagtgctgggattacaggcatgggccaccgtgtccagccaacaaagctttttttcagtgagtgattccagcccttgatgcataggagggtggggtccataggagtgtagccttaactgatgaattaaatctctgggtgatgtgagatatgtgccaggttcttggcttatgtctccctctagtactttaggaacttcccaactagatggaggcagtaaaaatgggccctgccaggatgtacctataacagagacgttcaaccatacccttgtgctgtctgcctttaatcacgaagattatgagctaagattcgtggatgcatttttattttttaaccaacatgtagcaatgatcactcagataggcatcttaaatccattagtttgggttggatttaagaccgttgtcattcctatgaaagggaagatagcccagattgctattgagaaggctttgtcagatgcattccagaaactgttgattgtggttctaggtaaaactttcttaatcgtcgttgaagtacttcagtttcagtgagcaaataaactcattttgaaaagttaattggataaaaatatcgatatctaaaacactccctaggatgctttcatttgctaagttctttcacagcgacaggctcaaatttgttctttgtgacatttgtagaaaaaatgacagcaaatattgtccctagtttatagctataaaaggacttgcctcaggtcacacagaaaatgtttgaggcaggtcttctttaattgcatgcctatcgtacagaatagtgattataagccctggacacatggatttgagtcctaactctgt

SEQ ID NO: 183655 - DNA, 383 bp, Homo sapiens
cttttcccagcccctaaagtaagtgctatcctgaacttgtttccatcttttctttttaaaataccacgaaatatgattgtttgatttgaatttcataatcatgtttgtaggctttttaaagcttgcacatatggtattttattatagaagaaaatctgatttacaaatctttatacatttcaaggaaaacatttaaacatcataaaagatgtttgagcagacataaaaatagacagaaatatctcagtaggcaaattcaaatttataaccagaaaataattgtggagacttatttttggactctgtagttattgctgtatcatagacaagtaaacatttctgtacactagtttctttattgtgtgcagaaatgtttccataag

SEQ ID NO: 183656 - DNA, 290 bp, Homo sapiens
aatattataaaactaattaggtctcagtcaggaggaaaaccaaatgctcaagtagagttaaaaccagaagcaatgtaaaagacttttttctttttttcagacttctaaataagtaaatgatttcaaaaggcaatttaaaagactgacagtactgtcacagttggataatcccatctatgaggttgcattcttttcccccacttcaaagttctctgcaattatccttcccacaatgaaaatgcctctcctcctaagatgaattgatttaatcaatgtttaaggccacttaa

SEQ ID NO: 183657 - DNA, 1847 bp, Homo sapiens
gtcagggatcctagggggttccgtgactctccccctaaacatctcagtagacacagagattgagaacgtcatctggattggtcccaaaaatgctcttgctttcgcacgtcccaaagaaaatgtaaccattatggtcaaaagctacctgggccgactagacatcaccaagtggagttactccctgtgcatcagcaatctgactctgaatgatgcaggatcctacaaagcccagataaaccaaaggaattttgaagtcaccactgaggaggaattcaccctgttcgtctatgagcagctgcaggagccccaagtcaccatgaagtctgtgaaggtgtctgagaacttctcctgtaacatcactctaatgtgctccgtgaagggggcagagaaaagtgttctgtacagctggaccccaagggaaccccatgcttctgagtccaatggaggctccattcttaccgtctcccgaacaccatgtgacccagacctgccatacatctgcacagcccagaaccccgtcagccagagaagctccctccctgtccatgttgggcagttctgtacagatccaggagcctccagaggaggaacaacgggggagactgtggtaggggtcctgggagagccagtcaccctgccacttgcactcccagcctgccgggacacagagaaggttgtctggttgtttaacacatccatcattagcaaagagagggaagaagcagcaacggcagatccactcattaaatccagggatccttacaagaacagggtgtgggtctccagccaggactgctccctgaagatcagccagctgaagatagaggacgccggcccctaccatgcctacgtgtgctcagaggcctccagcgtcaccagcatgacacatgtcaccctgctcatctaccgacctgagagaaacacaaagctttggattgggttgttcctgatggtttgccttctgtgcgttgggatcttcagctggtgcatttggaagcgaaaaggacggtgttcagtcccagccttctgttccagccaagctgaggccccagcggatacaccaggatatgagaagctggacactcccctcagacagcccatcagtggaagatatgaggtatttgaccaggtcactcaggagggcgctggacatgacccagcccctgagggccaagcagactatgatcccgtcactccatatgtcacggaagttgagtctgtggttggagagaacaccatgtatgcacaagtgttcaacttacagggaaagaccccagtttctcagaaggaagagagctcagccacaatctactgctccatacggaaacctcaggtggtgccaccaccacaacagaatgatcttgagattcctgaaagtcctacctatgaaaatttcacctgaaaggaaaagcagctgctgcctctctcctgggaccgtggggttggaaagtcagctggacctcatggggcctggggctcacagacagaagcacctcagaatttccttcagtgcctcagagatgcctggatgtggcccctccccctccttctcacccttaaggactcccaaacccattaatagttcagacacaggctccttcttggagcctatgggcttcagatgtctttgccccatttgtcacctcgcacacttatagcgtttcctcctcgaaattctaccaagactggtcaaatgttgctgaggggcctggaccagctgtcctttacaccaccttctcaacactgctgaaaagaacccaagagaattgtcacacatgacacaagatgtacataatatcatgctcactgcagtgttatttaaaataaaaggcaggaaataaacaaaa

SEQ ID NO: 183658 - DNA, 2118 bp, Homo sapiens
gtcagggatcctagggggttccgtgactctccccctaaacatctcagtagacacagagattgagaacgtcatctggattggtcccaaaaatgctcttgctttcgcacgtcccaaagaaaatgtaaccattatggtcaaaagctacctgggccgactagacatcaccaagtggagttactccctgtgcatcagcaatctgactctgaatgatgcaggatcctacaaagcccagataaaccaaaggaattttgaagtcaccactgaggaggaattcaccctgttcgtctatgagcagctgcaggagccccaagtcaccatgaagtctgtgaaggtgtctgagaacttctcctgtaacatcactctaatgtgctccgtgaagggggcagagaaaagtgttctgtacagctggaccccaagggaaccccatgcttctgagtccaatggaggctccattcttaccgtctcccgaacaccatgtgacccagacctgccatacatctgcacagcccagaaccccgtcagccagagaagctccctccctgtccatgttgggcagttctgtacagatccaggagcctccagaggaggaacaacgggggagactgtggtaggggtcctgggagagccagtcaccctgccacttgcactcccagcctgccgggacacagagaaggttgtctggttgtttaacacatccatcattagcaaagagagggaagaagcagcaacggcagatccactcattaaatccagggatccttacaagaacagggtgtgggtctccagccaggactgctccctgaagatcagccagctgaagatagaggacgccggcccctaccatgcctacgtgtgctcagaggcctccagcgtcaccagcatgacacatgtcaccctgctcatctaccgcaggctgaggaagcccaaaatcacgtggagcctcaggcacagtgaggatggcatctgcaggatcagcctgacctgctccgtggaggacgggggaaacactgtcatgtacacatggaccccgctgcagaaggaagctgttgtgtcccaaggggaatcacacctcaatgtctcatggagaagcagtgaaaatcaccccatactcacatgcacatgcagcaaccctgtcagcaggagttcccagcagttttctttctgagaacatctgttcaggacctgagagaaacacaaagctttggattgggttgttcctgatggtttgccttctgtgcgttgggatcttcagctggtgcatttggaagcgaaaaggacggtgttcagtcccagccttctgttccagccaagctgaggccccagcggatacaccaggatatgagaagctggacactcccctcagacagcccatcagtggaagatatgaggtatttgaccaggtcactcaggagggcgctggacatgacccagcccctgagggccaagcagactatgatcccgtcactccatatgtcacggaagttgagtctgtggttggagagaacaccatgtatgcacaagtgttcaacttacagggaaagaccccagtttctcagaaggaagagagctcagccacaatctactgctccatacggaaacctcaggtggtgccaccaccacaacagaatgatcttgagattcctgaaagtcctacctatgaaaatttcacctgaaaggaaaagcagctgctgcctctctcctgggaccgtggggttggaaagtcagctggacctcatggggcctggggctcacagacagaagcacctcagaatttccttcagtgcctcagagatgcctggatgtggcccctccccctccttctcacccttaaggactcccaaacccattaatagttcagacacaggctccttcttggagcctatgggcttcagatgtctttgccccatttgtcacctcgcacacttatagcgtttcctcctcgaaattctaccaagactggtcaaatgttgctgaggggcctggaccagctgtcctttacaccaccttctcaacactgctgaaaagaacccaagagaattgtcacacatgacacaagatgtacataatatcatgctcactgcagtgttatttaaaataaaaggcaggaaataaacaaaa

SEQ ID NO: 183659 - DNA, 127 bp, Homo sapiens
gtacccgttagacatccaagaggaattgtcaggtaggagctacatttatgagtctggcattccagagagaggtcagggctggagataaagataaataaagattttggaatcaataacgtataggtct

SEQ ID NO: 183660 - DNA, 229 bp, Homo sapiens
tgctttttcctttggtccagctcggtccagcccagccatgctctgctctgcaaatatatttctcacgcatattctggcacagggaaatagtgactctaagtggaaacacccagcccccaacaggtccgacctcatggactcctaggggaagtcaggcaacagaggccagtcgaggtaggtgactttgcaaataactcacggccccagacctcaaataactggctgtttg

SEQ ID NO: 183661 - DNA, 335 bp, Homo sapiens
ttgaccacagcatcaaaggcctttatctggggcgctttcgcatttacatggggtgtatagtgatatgatagattttctttcttttccacctctttttctcatgtggctccccctccctgcccccgttcacgataaccggtgcctgctccacacacaaacaaatccaggcacccaaaagaagaaaaagaaaaagaaaaagaaaaaaaatttgagtttgaggattaagatcttcatttttttttttttttttgcttgtgcattccaattgttcttaaaatatttggcaatgtcaattagtaactgagcagagttagctgatgaacacaattttccag

SEQ ID NO: 183662 - DNA, 815 bp, Homo sapiens
gtaaaatacaatatttccatggtatttagatcttggggataaaaaaggacaaatgatttcaaattagggccgtcatggaacatctgagatgtatagctggtctcgagctcctgacctcaggtggtccgcccacctcggcctcccaaagtgctgagattactggcgtgagccactacgcctgcctggcccctctttgccttctcttacactacttcttcaccctggaattcccttcctacctcattgccacattataacatttctctctttcattggcctagctccaagctgtctgtaagctgtctacttaataccgtaactggaacagatctttgcctctgaacttccctagactgttattgacgtccctgacttgaattttaattattggggtacatttgttatctcctctgctgatctgtacatttttttaaatcaggaagtatttagttgaaaacaagaactaaattatcttctttcactcagtcactcaaacgtgcctcatattgtctctgagcagggcccagtgctaggtgagtgctggggatagagcaatgaacaacacacaacctctgcctcaggaagctcagtctgtggtggggaagctgaaaaagaagcaggcacggtgcttccccacagtgttcgccttgaggtattacagttcacagctagttgaataagtgaacgacttcctccagccctcagagcctcctgtctggccttcccccagctctgcttagccactctgcctggtcaagtgcctgaaacagagccaggaccttccactcatccacgccaccaatgtgggagagcag

SEQ ID NO: 183663 - DNA, 152 bp, Homo sapiens
aaattagggccgtcatggaacatctgagatgtatagctggtatgattatatctttgggaaagatgacctcaggccagagcctcctcttgcccctgagtgagcaaggaaatatcaggtgaggctgcagagaaagcaggggcagatcataaagg

SEQ ID NO: 183664 - DNA, 453 bp, Homo sapiens
gttcaacagatgctgtcagaatagacgtcatagccttgttcctgatcttagataaaaaatgttccatgttccacctgtaagtatgatgttagctctgagagttttaaatatagatagccttcctcaggctgaagaagttccctttcgtttctattttgctgataatttgtatcatggatggacactgaatttcgtcataccctttgtctgcatttattgagatgatcatactattagctccttgagtctgatcattgatttcacatctttcttctttactaatatatgcatttagagcactaaacttccataagtcgtgctttagtagcatcctaaaaacttttgtgctaggttgttgtcttgttctattcaagctgctatattaaaatgccatcaactggctggcttataaacaatagaaattctcaccgttgtggaagctggggagtcaag

SEQ ID NO: 183665 - DNA, 274 bp, Homo sapiens
ttccccttgaaataatgacttcagcaccttgagcagtatgaactccaccaacattgccaggaaatgctttatatgtttcaggaataattagttgcttcaaatataacagagtcaaaggtttactgtaacctagggaaaataatattttgcaaaaatgcaaaaatgcaactaccctcaaaggtagtccaaataatatagttcatgagcaaagttttaaaggcttaagacaatagagtaaaattctgaagatcaagtacaatgcaaggtggtgaca

SEQ ID NO: 183666 - DNA, 549 bp, Homo sapiens
gggacatctgctctccaggtgggtccctctatataccgcctggctagagaatatagagttttcagagaacattcttttctgtgtagtgatacatgtggactacctcatctatggggtgtgtaagatgttttcctcaaggacatggaaaattaggttgactatggggtaagttttgtcctctaggattctaggagggagaggaccacctaataggtttgtttgccgggagttaagtttgaagagcctttggagaaagggaaaatgaggaacaaacattttctagggatgctgaatcaaatgttcaaaattgtaattccatatagctttaagactatataaccaattaccagctttctaatgagatgtggagggtagaaagggtgacaacacatacttgtttcaagtttatactgggatgaaaataggtatttgggttggttattcaaaatctgacatttgaaaaaattttaaaacagcagaatttggaaaatatagaaggaagagaaaatacattcaagaattgaggactagctcttaaggatgttctag

SEQ ID NO: 183667 - DNA, 340 bp, Homo sapiens
tgccaaaatcagaagaggagagagagaaggaagtaacaggagcgtggaggaaggaaagaaggaaagcagaggagaattcagtccactgggataatggaaaggcataagtgactgggaagcaggaggctgagaatccattccatgcttctgagcagttttctgtcaaataatccaggatagtattaatgtacttgtaagtctagggagaagactctggattgacctgctgcttctgttacatagtaattgtaactattaaactttgacgtcagtgtgatgatgaggattgttccctttgaaggcccagtgggtcggctgttcccttctcacctctgacctt

SEQ ID NO: 183668 - DNA, 322 bp, Homo sapiens
tcgagactcgcccccacgctcttgaacacacccaacatggtgaaaccccgtctctactaaaaaatacaaaaattagccaggcatgaggccaggcgcctgtagtcccagctactcgggaggctgaagcaggagaatcacttgaacccaggaggcagaggctgcagtgagccaagattgtgccactgcactccagactgggcaacagagtgagaccttgtcttggaaaaaaaaaaaagtgaaccagacatacttcctgcttacatgggttttgttgctgagtgagactcagggaagacaatttcagcaatttcaattcttggtg

SEQ ID NO: 183669 - DNA, 366 bp, Homo sapiens
aatgcatattagaaagcagggccttactttccctgaactgttacaatgcctagcccagagtactctggtaatagtgacttcatggagttttgtacacacacccatgtgagaaaggatacaagctaagctactcatccacacctcatgaaacctatgggagttagccctgactcatggttcatttacgaatacagaagccccagttaattaaattaacttggtctcccaatccatgatcttgagttttaattgataagtataaaataaatgacacacttgaaaatttctggattcacatcacaccaccagtacatggccttttccattaatgtccgcattgaccaacctttcatactatgttggttc

SEQ ID NO: 183670 - DNA, 348 bp, Homo sapiens
ccatgattctgaggcctccccagccatgtgaaattttaagtccaattaaacctcttttcttttccagtctcaggtatgtctttattagcagtgtgaaaatggactaatacacctggcaaaaatattttgagctcagattgggacatattgaatgtgcatgctctgagacaaatgtctcaagtaggcagttgcctatctaggtctggagctcaggtgagatatttgggcaagagatttaaattggaaagttattgggttatggacagcataaatgagattcattaagaagaaagcagccagtgagaagtggcctcggacctagacttgggaaatggggcagggaaggag

SEQ ID NO: 183671 - DNA, 171 bp, Homo sapiens
ggaggccagatgtacagcccacgggaaatgagggcaaatggcagctggcaagaggctgtgaccccctcttcagtgacatccccaacggagggaccagggagtgttcactctgatacctccaactgatcttgcccctcagggtcacaggggtgggggctctcacaaggcgac

SEQ ID NO: 183672 - DNA, 492 bp, Homo sapiens
actgggaagagccctttttggcagtgtagtttctcttttaatagctgtgatcagattatacctttaaatctctttaaacacttcccaccactgaagtctttggtttccttgatttgatagtttttaccaggctgttcaaaaagtcaagcagtgttcttttaggtcctttttggttctgtgcgacagttaatgaatagtcatgtgcatttgacccctaaaaggaaggtcttttgctttttaaagagactgtattaagaggaataatggaccaagtacaccaggagggaatgaacgagaaaaataaaagaaagaaaatcacacaagaccaaataactaattttgaatattttctgagacctttggtttagaatctaaactttgttgaggctgggcgcagtggagcacgcgtgtaattctagcacttagggaggccgaggcaaatggatcacttgagctcaggagttcgacaccagcctaggcaacatggcaaag

SEQ ID NO: 183673 - DNA, 149 bp, Homo sapiens
gaaatcttgtattcttggtattttagttcaggtttctttcctatttctcaaatcttgtgactctaggatgagatttagtttgcatagattgcaatttttattttaaattattgtaggtagccatggctactttttacagttggagagag

SEQ ID NO: 183674 - DNA, 231 bp, Homo sapiens
agccactgcgcccggtcccgtattgtcttttagaaaaactgtataactatttaaatattttcagtcaccaaactaaaaaacaaatactaaagttgaagtttattgctccccagaatgaaactacaaattacatctgatggccatttttacagtttaaccaataattagttctctatcatattatctttgtttcgttttcctttaacagaatacctaagactagtagttgtt

SEQ ID NO: 183675 - DNA, 335 bp, Homo sapiens
aaccctacccactgtgaagctgtgctgatggagaatgtatccaaaacagagcaaggaacttaggagggagaagaacagctgacctggtcaaggctccagaagtcaccatccctgtcgggccaagggtcagcactctgagctagctcctcagcagaggacaacacaggatttaggtaagagtgaatggtcttggttgttataaggaagaaagccaagtccagaacgttctcttttaagtagccaaaaatttcctttgagaagggaatacaggtgggaggggatttccttaaaactcagctaattttttcattgaacaaggggattgaatgtgatag

SEQ ID NO: 183676 - DNA, 319 bp, Homo sapiens
aacatctcggaaagcagggtaatcttctagtcagtggcacctaagacttgaggaaacacagacaccagcaacccaggtgattcttaggattaggtaagtttagcggaaaacaggtccctagggcagtacttcccaatctttaatgtctttagagtcacctgagatcttgttaaactgcggattctgaatcagaagttctggattaaagcctgagattctgcatgtctaatgagcttccgggtgatctgatgttgctggctcttgatccacattttgggcaacaaaattctaaaacatctccacctgaggaggctccgcc

SEQ ID NO: 183677 - DNA, 282 bp, Homo sapiens
tgtctgccaacaatcctccactcaaaaggaggaaatacaaggcagtaacatttctctggaatgcatttaggaatgctgggaagcatatatcaaatgtaggaaagaggcctgtgtccacaatgaggtcccttttaaacagattcacaatctgagtgaacacctaacccaggaagtaaggcagtctagtttcctggaaagaattaagaactgggaatcagaaaaatctagacttggctggctgcggtgactcacacctgtaatcccagcactttgggaggtcga

SEQ ID NO: 183678 - DNA, 435 bp, Homo sapiens
ggcaggcctctaaatatgaagatcacttttaatttgtgtgtgtgcttgagacacagtttcgctctgtgcccaggctggagtgcaatggcatgatctcagctcactgcaacctctgcctcttgtattctagcagggatggcaatatctttgatttctgttttcctccaacattttattaggaaagatttcaagcatacaaaaaagttgaaacaattgtacagtacagtgagacctatatgtccatcacctagattttacatttgttagcatttgcttaattgctttgtcacttctttccactaatcaactcattttacttttttcgtggtaaaatatgtataacataaaattttatcatcttaatcatttgtttttgtggctacatttcacaatttatttacattttaagataaaccttgagctcagaatgacata

SEQ ID NO: 183679 - DNA, 360 bp, Homo sapiens
aactcctaccccacgcttccaatcactctcgtgcctcagcctcccaagtagctgggattacaggcacccaccaccatgcccggccactttttatatttttagtagagacggggtttcaccatgttggccaggccagtctcgaactcctgacctcaggtgatccacccgcctcagcctccgaagtgctgggattacaggcatgagccactgcacccggccaattttttaagttttctacatcatctcgattgtgttcacttagtaactaagacttcagtgacatttaaataaaatgttctgaccttttctttagagctttatcctcttcatggtaagctgtcatacttgagactcttgagg

SEQ ID NO: 183680 - DNA, 662 bp, Homo sapiens
ataataaccctacaatctgtataataaagagagtacaactactatagcagggtgggaacccacaatctaaatggtatagaagagagtatcaataagataactatcactgaaaaagaagtttagaacatgaaggcacaaggtactgtagagggcagaagtgaggacccaatgaaaaaccagggatacagttcaaagtatctgcaagtaacagtcatcctctttttcccactcccagaacaccaatagcaaggtgttggcatactaggaaagaggcagaaagtttattatcagaagaaactgaacagaagaagcttgagactgtgagacactaagagtaatgagcaggaatgaagtacagctgtaacaagggaattaatataaaacggttagccccaccttactactcaatttcattttgggttatcccacaggtgagaaactaaaggattctttgctggagaaactcaattgctccaaaaaaaaaaaaaaatctccttgctgatagcactcccgcaaacatggtgaacattcctaaaacctgcaggactttctgtaagaagtgtggcaagcaccaaccctagaaagtgacacagtacaagaagggcaaggattctctgtatgcccagggaaagtgtcgatatgacaggaagcagagtggttat

SEQ ID NO: 183681 - DNA, 535 bp, Homo sapiens
atcttaaacatgctgttattcttcccataaaataaaaaattaaaccacactgcccctctaaaataaaaaaattaaaccacccggtccctctagttttgtcccatcgctttttttctccctatagcaaatcccttgaaaagagttgtctatatatgctctcaaacattgcctcccccatttttttctagaaccaactgcaatcaagctctggttccagcatgtcatggacactgacctctatgttgcttaacgcagtggtcaggtctcagtactcatcttatttgatacatcagcagcactagcaatggctttttccctcttgaagcacttctttcacttccatgtcacttgccttagctttcaagacattttatgtcccaggttttcctaccttactagctgttccttctcaatttcctgtgttgtctctatcttctctatgtttacatgaatggaaaaatgtctctggtctccatcttttggctatactcccttggtaatttgaatctcccggctttatttatttatttttttg

SEQ ID NO: 183682 - DNA, 611 bp, Homo sapiens
tctgtattcagtttatctcaatggcttacgattcctgattcttactgtcacaataagcaggatgtgacaaactataccgttgacaatttagtgctatttgaaggacactaccatcatttcatttaatacaatttccaattttcaaatcatcccccttttttctcccaatcttccacattctaccctatggctaaacatcctcctctttttcctgtctattcactcaggtcctgaaattccaactccttgatgctgcctttcaactcagaggaacaaatggttagaaagctatccaaaaccaacctgttagaacatgtgacttcagtgactcattttcctcattaaaataatccttgtaaatgatgtaagcgactaatgagtttgttcaacatcaatgttgagtataagttctgtttgcacctcctttaattcctgaatgaatccaatctttcaatgatttgttacacaacctaaataagaaagaaaaaggctaataaaaagtcaccacagccaggcatggtggctcacgcctgtaatcccaacactttgggaggccaacgtgcgcggatcaccatgtcatgagatcgctaccatactctccagataatgag

SEQ ID NO: 183683 - DNA, 146 bp, Homo sapiens
tgtccctctctctctgtcctcctcgtattcttcagggtgtgttgttccgcatctttatttctatatgcttctgatgtttagcttgcacttataaatgagaacatgtggtatctggttttctatatctgtgttagttcgtttaggat

SEQ ID NO: 183684 - DNA, 616 bp, Homo sapiens
tggatagatgataaataaaacattaagaacaggtaagattaaatatttaacattccactcagacagaagattaagtaaattagagcagaggaaaatggaatgccaagggagtataatggaaaaagaaaggtgctagagggaaagcaatggctagcctttcatgagtctgggaaagataaagatataatctaccacactgttaagggaaggggaatatcaatccatatgctagatgccatgctaagtgctttatacatagtgtctcattattcactataatcttctgaagtaggaatccttattcccattttccagatagtgtagctgaggttcagggaagtaaaacatcaaggtctgatgacaaccaagtatttccgaagtccaaaagaccatacaaggtaagaattatgcctcttgataaaactcccaaaggaagatggtcattttcatattcacttatggttatggccagctaatctaaagtcattaattttacagtgatgggccagagacagcttctatcagctcataaaagctgactgttaaactttcgggaactttgcaacccaatttacttcgcaatggtagtctgaaatcagtcatggtgtgaatattt

SEQ ID NO: 183685 - DNA, 1625 bp, Homo sapiens
actcatcaccaagggattcatgaggacccagccccatgatccaacaccttccatgaggttccacctacaatgttggagtcacatttccacatgagatttggagagaacatacatccaaaccttatcaccacccaactaggaactcttagagagacgacttgagtgaggttcatctctgggctcccagacacacccatcccagggcctgctcccttgaacttcaccctgtcccccactgagaagcccatttcacttgatgtcccatttgccccagaagagagactggtgaggtgggggtgggggacaagagggtgctgggcccacctgagtgcaggaagcaggagcagctctcctctctaggaaggcatggcacctgccccccaccctcccagggacagggaacttttccccacagctgccaaaatggaaaagatgcagccagcccacggtccagcgcacatggtgctgggtgctcttcctgcctgccacctcagggccacactggacagttcctccacttctctccatgtctactgctcccatcctggacagccatttgtgacccttcccctgcctgctgccctggccctgtttctacccacctgccacttcacagcacagctggagttgcccctaagttggcaggtcctgcctcctgtcctctctgcatgcctggccttcctggctcccctctttccttgcattgagccttgaattctcacagtaaccccacatgggcggatgttagggggagccttgttttacacaggaggccaccgaggtacagagaggtgtggtcacttccagaggccctagaatcttgagtctgctggcgattgggattgagatcagcctccctgacctggctgcccgttctcccttagcgcccttctcccctccacgttcctgccacgccggcccctcagcctgtgcaggcctgaagttcattttctctctggacttccataaatgctcatctctcctgagaatgccattctttttttctctcctgtttttctttctaaacctacttgtcctccttcacattttacttcagatgtcatttcctagagagatcctctctgatcctttcaatctgaactataactcgccctgtctaattttctctgctggctctcaggatgtcttttagttgtgtatttgatgtgtatggttctgtgtgaggtagccaacaggataggggtagttaagagctcgggcactggagccatacacgtgaggtaaaattccagctctgccatttcctatctggtggccttaggcaggtgactcaacctgtgtgcctcaatttccccatctgcagaaagggaataataacagcatcacctgattgttgtggggacaatcaaaggggtcagcagatgtgaagtatgtagtaccgtgccagcctgtagtaaaagctataggcaggtgtcacctgttgtgattattttggggaggggtaaagcacgtgattgggtgctaagggtggagcagaggctcagagaagcctcgcctgctcctattgcctggtggcacctccctgtcttttccctgtgcaccatgatcatgttttccagctcagaggtgggagtgtgtggtctgctgaaggatttgctcatctg

SEQ ID NO: 183686 - DNA, 607 bp, Homo sapiens
  misc_feature (6)..(6): n is a, c, g, or t
tccggngttccttgttacgaagtgtgctttgtcgtacagtatcatttgaccatgactcaaatctgctttaaaaatgcaatgtccccttcttttacctaatatcatccttgcattaccaaaccttctgcctagaagtagaaatcattgtagtataagactgaggaggtcaaaatgaactagtcccatccctgtcccaaaggaaggcagctcaccagactgtggacatttgtgttatcccccaccccaagacaactcaccaacattcattcactatggaacaacagaaaggtttgtctgaaggttaaaaatactttctatttctatgtcagtgacagtttttttttaatttattttttacttatttatttttttgagatggagtcttgctctatcacccaggctcgagtgcagtggtgtgatctaggctcactgcagcctctgcctcccgggttcaagcgcctcagccttcctagtagctgggattacagacatgagccaccatacccggctaatttcgggccattggctcttctgtttttatgttgatagcccagaatggaagctatagactgtgagaaaaagactttgttactaatgataattttga

SEQ ID NO: 183687 - DNA, 129 bp, Homo sapiens
taaaagcaggtcattcacacaaagggtacacatttaagtataaagctcaagaaattttcagatagtgaacacactagtataaccacgacccagacaaagaaataaaaattaattagagtgtatgtgtcg

SEQ ID NO: 183688 - DNA, 427 bp, Homo sapiens
gataggaaaactgtgaaacatttggctctccttatgacatatatattttgatttaaaagcatgagagtttttttttcaaaaagacaaatattctttcaaatcgttttgttcatttttactaccttcactgaagcatgaatagcacagaagtaggcattagtctttggattgtgtgttattcaaccgactgttacttgcattccaattactcagccagcatgggatacagctgtgtccaaggagtatttcagcgtttcctaacaactctatatatcacaattgaatttatttagattgtatgttaactattacagtttggatctgaactctaggttattacatttaaagtcatagaatatctaaaaaattagcaaacaaaaatatttgttattatttttaaaaagtaatatatttaagattatcaggg

SEQ ID NO: 183689 - DNA, 466 bp, Homo sapiens
attggatcatattttccagtttccatgtgagattgtgattttttcatgtgttctatctaggactttatgaattatatgttttagagactctggattcctttatgttctttgaagagtattgatttttgataatagcaagtagttaacttagccattctcaaaccctcaactatgaaatttcagttcaattattttattcctaggtgaaattgtaataaaatttactgtgcatactctggttcagggatgaaccatagatttgggtggcatgtatccacaaaaaccaggagcctctctttagctctctccttcttggatattcctcctcaccttttagctgtggtagttgcttttcatactctacaccatttctccctatgtaggttttagtcatgccatatgatactgactgctgcatagtcttaagctataaaaaatttcctataaaacttacccagtatctgca

SEQ ID NO: 183690 - DNA, 150 bp, Homo sapiens
ctgtggcccctctcatgctgtttccattttgaccccattcacctgagcacaggaaagaaattcagcccttttgttttccttttccattgctagaccacacacattaaattgccacacctatctggaatatttacagagccagcatttagg

SEQ ID NO: 183691 - DNA, 509 bp, Homo sapiens
tctgtgtggtgagtgtcgctgggcctggggccgctgtgggcagggtggcccctcgcgcccgagggccaggcctgctccactgctcagcgttgcgtcaagtggcaggaattttcctcgggggagggcattgctgccccttcgagctctgcccgttctgcacctccagcacccctcgccctgcactcacgcaggtatgcggtccaccgtgtgcagcactcaggtccgctgcgagaggtaggtggtggtgctggagctcggttctggctagcaccctgcgccttcccctctcggagggttgctgctcggcaacaggcaccgggggaagggccgcttccttgggggtctccctgcctacctggagcagaaggaccctctcccgtgatgcgcccacgctggggctccggaccctgggtcctctgagcagacaagctcggggaactgccgggagaagcagaagggcacagcccaacccgaagactgcggtcatctgaacaaaactgaccaggaag

SEQ ID NO: 183692 - DNA, 325 bp, Homo sapiens
tacagagtggtggttaagaggctagacactaaatgcgggctaagtagagtcaaattctcactttgccaaatactggccatatcaccttgggcaagttattgaatctctctatgcttcagtttctttgtttgcaaaatggcaaaaagtatagtacctgtctactaggttgttctaaaaattaaatgacttaatatctataaagggcatagagcagtgcctggctcacaataagtgctatatgagttttcatttttcttaaaaattgctttatgaaactgttacccacagtccaaaataccagaactgagatcctatggcaactgga

SEQ ID NO: 183693 - DNA, 373 bp, Homo sapiens
catgaaggagatgatgaagtgagccagactgaagtttcctagtaattcttaacttgtaccgactatacacgtaatggcaaatgctttagcaaaagagttatgtatgagcaaatttataaacaacccagaggactaaaatagaagagagctgtgtgtaaatcccctccatttttgcagcttattttaccaagtgaaacttacaacttcaattaggtatgcttggtgtgtttttaccccaagtgttattttgaacaaaattcttacttctgtgattcattttcctcaaaattcaaaaataaatgtcccactattcatttgaaacataaaagagcaccagtgttggccgggcacagtggctcatgcctgtaatccc

SEQ ID NO: 183694 - DNA, 541 bp, Homo sapiens
tgcatttataccaaactgatgtgaggaaaagcacagtaaggtagcatcaccattccaggtggttggtttgaccttaacagttttaggggagcagagccagtgtctgggaagaactgaaatggaagcagagatggcagtcccttatgtggcagcagcccatgtaagaggtgatgttcctctatctgcaaagcagaacaaaaccttttaccctttctcccagaggccccctcagccaagcatccttcagtgagcagagaacaggcctcagaacaaactccttttgggacccccctctcattctttttgaattaaggtggacttttcctttacatactggtactgaagtctcagatctgtttattaagaagtatgaagggctcatgcctgtaatccgagcactttaggaggccaaggtggaaaaatcattaagctcaggagtttgagaccaggctgggtaggaaagtgagactctgtcgttgtacaaaaaatatgaagatgttgataaagttcttaaaaaactaaaaatcaattagttaaataa

SEQ ID NO: 183695 - DNA, 1145 bp, Homo sapiens
gagaaatggagataatgagagttcttacctcaaagggtgttatggggattgaaagaaattacattttttggctgcttatcacaaatcctggcacaccatatgccattctaaatggtagctgtttttattaaacattggggttgcacgttgggctagccccaggtttgggctctgaggtggaggccagcccagcacccaggccctctggcacccagggttcctgggctcctgggctcctgcctgctctgtcccctctcaccaagcattgcctgccagacctgttaaagaaactgtccgtcaagggtcttcctgtttcttcaggccagtcagtcatgggcatgtcactgcaggaaaggcatcttgggcctaattactgttggcaggagcaagcccagggttttaccgttcatgccccaggactggatttccacatgtccaaggccagctggggcaaaaccagtccctgtggaacgtcctcaaatgttgggtgggggttggtgacaactaggcccttcctccacggaaggggctcatgatcagcttagggctgatggcatgggtccacatccacagatgccctgggcaccacatgccattgtgaacatgtgtccacccaactctggggaacagggaatgtaaggcaggcagtggccagagggtcctgaggaagctgcctctctgtgccctggccccttctgatggagaaaaaaaatctcttcctctaacgtctgcctggacacctgcaatgcctgggagctcactacctcctaagacaacccagccaggtcagctccccactgggaagttctccaccatcactaagaacagcagacacctgcacccaaaatcctccccgcagaccctactgctggtgacaaatctctcactggcctatagcagtgtacaactctgagcgttgtggtgagttctcttacctcgaaatgtattcagagtggaggatcccctgccattttacaacctcatccttcctacttttgggctgttcaaggaaagacactctgacattaccgtgctaggagatgtttacttttcctttttgtcctaacttggcagaatttaaaaattaaacattggcaattctatattgacatttcccctaaatatatatacatattttttttgag

SEQ ID NO: 183696 - DNA, 463 bp, Homo sapiens
aactgcggaaaacttttgtggggttttgctgcagagagaagcagagaaatgaagcagttgttggtggaagaaatggaatcaaaaggttttgagatagagaacagagggaagagctgttggaataaagtccaggaagagtggatggtgtctagtgagcaagtgatgtgtggccctgagtagaggcacgtacaaatcacctgtgcctgagctgcccttagaactttctgtgatcatggagatgcacgtctgtgcttcccaatattgtaacattggccgcaggttgatatggaccacttccagtgtgactagtgtgattgaggaactgcattttaaatattatgtaattgtaattaattttaatttaaatagccacacgtagctcctctataggccaggtcagagctctgataaggctggatatgggaggaaaccctggtagagggttgactgtagaggttctttt

SEQ ID NO: 183697 - DNA, 315 bp, Homo sapiens
atttgttgatttaatgaatttattcatcgggaatagattttgctatctctagacataagaagttagaaattaactctgtagtctaaataagataattctgtagtgcaagtgtgatgattttgaaggatgtggttaaaaagaaaatattctaaaaaatattttattttttgatctcgctatgttgcccaggttggtcttgaacttctggcctcaagtgatcctactgccttggcctgttaaagcactgggattacaggtgtgagccaccattcctagccttgtttttcttaagtagttaaatagttaatattatgt

SEQ ID NO: 183698 - DNA, 378 bp, Homo sapiens
tgtagatgatgctgaccgtaagaaagcatatagagttgagaatcttggaagttatctagggtgcaaaaagagaatagatcaatctaaccagaaaagaggccagaagcagatgctgaaagctagggtatagaaccagaagttagaagatgcaggcaatgaaatcaccaaatagttcattaattcagccagttagtcaaatatttattgaatgctaccatgtaccaagcacagtgttctgtggtaagcaaggcactattccttacagatgttagactctactgatggaagcagatgaggaaataggcaattacaatcttaaggggtaagtgcagtgtgttctaggaacacaaatcaggggtatctaacctgaacttaggg

SEQ ID NO: 183699 - DNA, 1517 bp, Homo sapiens
  misc_feature (324)..(324): n is a, c, g, or t
  misc_feature (734)..(734): n is a, c, g, or t
  misc_feature (1225)..(1225): n is a, c, g, or t
aatttctcttattttttctttggctcttgagttctttggaggtgtgttggtcaatttccaaatatttagggggtttctagttatctttttgttatgtcagtaaattgatttctaattaatttcattgtactttgagaacatactctatatgagttcagttcttttgaatttcttaggacttgttttacggttcagagtgttgtctatcctgctcaatgttctgtgttcactaaagaggttgttttctgcagttattggatgtagcatttcacaagtgacaactaggtcaaattgattgtgttctttgtttcttctctattcttnttatttttttttttgccttttctattaattactgaggaatttttaaatctcccaactataattgtggatttgtctcatttttttaaaaaaaagttttgacagtttttgcttcatgtatcttctggaagctatattattaggtacatacacatttaggattgttattgcctcctggcgtgaaatgcttgccttttttttgagacagagttttgctctgtcactcagactgaagcgtaggagcacagtcacagcccactgcagccttgacctcctgggcccacgtgatcctcctagctcaacctcctgagtagttgcgaccacaggcacacctggccacacctggctatgtgttcttttttttatttttcattttgtagagatggtgtctccgtatgttgcccaggctggtnttgaacttctgggctcaagagatcctcccaccttggcctcccaaagtgctgggattataggcatgagccaccacaccagaaatgcttgtctttatctctgctaatatcccttgccttgaaatctaccttgtctggtattaatgtagccatataagctttcttatacatgtgtgtctcagtatgaagttggatcttgtttattttggaaaattatggtttttaaggaatttgttcatttatctgaggtgtcaaatttgttggcataaagttgtttaaaatctcaccttattatccgtttagtgactgtagaatatgaacttatgattcctttttcatttctgatattgataatttgtctttttttagctttctttttcattgctggggtttatcaagtttattaaacttttcaagaaaacgactttgcctgtgttgattttctctgctcttctgttttctgtcaaatgacagagagtttgacagtctcttcntttttattagaatgtttagttatttacattaatataattgatatggctgtgtttgaatctctcatcttgctatttgttttctatttctcctctattctttattttctttttcctttcctgccttcttttggattaataaatttttagtgtcccatttttagctcttttgttggctttttaatctatttaatttcatctagcgattacactatatataaattaacatgataaattacaaattaatagtataccactttatgtatactgtaagatgcttacaatagtataattt

SEQ ID NO: 183700 - DNA, 272 bp, Homo sapiens
taccagtgttaaaaggagtttaaaaccatctccacaaaaatgctctgcacaaaggctataaagatatatactcaacgagcagtaaataagagaacctgcctcctcaaaacctttcccaaaacgggcataatgaactttttaaaaaagcttttaaaactttttaattacttaaaatggtctatatttggtgtaatttttatttcttagctcactattaagactgcaaaacctcatttctacaaaaaaacagaaaaactagccaagtgtggtgg

SEQ ID NO: 183701 - DNA, 321 bp, Homo sapiens
tgttatgctggtgtccttagggtagattttgtggagaaacccagcagactgaattactacctctctctcttggtgttgtgcatattaaataaacagaagtatgccgtggcctttatagagggttggacttgtaatcaactcccaacactcgttcatgcattttttgtttccatagactcttaatgggtccccagggcagtaactggacatgccaaattggggttgatcaaagtaagtaggagaataccatggttttatatatcagtgtatacaaattggatacttctgcttattcttgagttagtgggagttatctactga

SEQ ID NO: 183702 - DNA, 487 bp, Homo sapiens
tgaatgaaggaaggcaatggaaattatccagacatggatcttgaagtgggagataccctaatatatgtagtcaagtggaatgatgacagaaagggtcagatttggccattgaaaatcaaattaccgatgactttggagagagcaggatcaggaaagtgggtgcttgagatccattttggaggagttgcggaaagaatgaaatagggagaacgggaagccggcaagtataggtgacttgtgtagcccatcccctgatatcctctatattcgtttgctagagttactgtaacaaagtaccacaaactggcttaaatgacagaaattggttgtctcacaattctggaggttagaagttccagatcaaggtgtcatgagagttgtgtgagaaccgtgaggaagaatctgttccatgcctctctcctggcttctggtggtggtttgccggcaatctttgtcattccttggcttatagaagaatcgccctgtt

SEQ ID NO: 183703 - DNA, 541 bp, Homo sapiens
atgctcccttccccacctgcaagattagagattcagatctctgaggggagggtgtgtttcctaccacaggaacatgcagtccacccactgatgaggccgagaagttgcgggagggtgtgggcctctgttgagcagccagtgggagccttttagtggtgcctcctttatccttttgacatgtccatatgattttttgaggaattctttactttcaggcacataagatgttccgattttatcttgtagcattcagcatgaatggacctggaggacatcatgctgagtgaaataagacacacacagaaagaaaaatatgatatgatatcggttgtatgtggagtcttgaaaaaaatcaccatagaaacagtgtaggaagatggttaccaggggcggggtaggggaaatgggaagatgtaggtcaaaaggtacgaagttgcggttagattctaatgttctagtgtgtaacataaggactatagttaatattgtattgtatactggtactttgccaggagagtagattttaggtactcttaccacc

SEQ ID NO: 183704 - DNA, 330 bp, Homo sapiens
caatggagccagcttttcaatatttgcagagacgaaagttttctgaccactggtccagtgttctttccaaaccggatcactggcagagcactagtgatgtcatggcaactgttattgcagggcacgttgaaatccattagcaggcattcaaggctcctcatgagtaaagtaggggcaatgtaaaaaagttagtttggcttccccaacttccttaatcccaagaccccgtgccaggtacttgtattttctatttgctaaatgttagttgaaacaaagggctgttttgttgggtttgtgtttccctgtggaaaagattactctaggcaaatt

SEQ ID NO: 183705 - DNA, 328 bp, Homo sapiens
gcatcacagttcaatgagaataagagaggcaatatttaattctaatttgggggaacactgtgcaaaaaaagagtccttttagatctttgtatcataccattcagcaaattaaattagtgatggttttacattaagtatgaaaggttaatgttttaatattaagtatgaaatgttaatttgcataagctaagaaaatacctggacaactttagtaacaatcaatgaaatccaatttaaaataataaagacatctaatttttcacctcttaaattgtgaaagattaaaaattatgatgttgaatgccggtaaaattgaagtttggtgagc

SEQ ID NO: 183706 - DNA, 2791 bp, Homo sapiens
gtctgcgctttgcaaagcatgcagttagggagagcagctcttggtgagctcagtgaacctgcctggcgcgcacttctacccgctggagagtgcgcgaggcggcagcggcgggagcgctggccacctccccagcgcggccccctctcctcagaagttggacttaggcaaagcgtccaagaagttttccggcagtctctcctgcgaggcggtgagcggggagcctgcagccgccagcgcaggggcccccgcggccatgcttagtgacaccgacgccggggacgcatttgccagcgctgcggcagtggccaagccggggcccccggacggccgcaagggctccccctgcggggaggaggagctgccctccgccgctgcagccgccgccgccgccgccgccgcggctgcggccactgcgcgctactccatggacagcctgagctccgtgcggtactacctccagtcccccggtcctcaggggtcggagctggctgcgccctgctcactcttcccgtaccaggcggcggctggggcgccccacggacctgtgtacccggctcctaacggggcgcgctacccctacggctccatgctgccccccggcggcttccccgcggctgcgtgcccacccgggagggcgcagttcggcccaggagccggtgcgggcagtggcgcgggcggtatcaacggcgggggcggcggcccgggcacctatcagtacagccagggggctccgctctacgggccgtaccctggagccgcagcggcgggatcttgcggaggactggggggcctgggggttccaagttctggcttccgtgcccacgtctacctgtgcaaccggcctctgtggctcaaattccaccggcaccaaactgagatgatcatcaccaaacagggcaggcgcatgtttcctttcttgagcttcaacataaacggactcaatcccactgcccactacaatgtgttcgtagaggtggtgctggcggaccccaaccactggcgcttccaggggggcaaatgggtgacctgtggcaaagccgacaataacatgcagggcaacaaaatgtatgttcacccagagtctcctaatactggttcccactggatgagacaggagatttcattcgggaaattaaaactcaccaataacaaaggcgcaaataacaacaacacccagatgatagtcttacaatccttacacaaataccaaccccgactgcatattgttgaagttacagaggatggcgtggaggacttgaatgagccctcaaagacccagacttttaccttctcagaaacgcaattcattgcagtgactgcctaccaaaacaccgatattactcaactaaagattgatcataacccctttgcaaaaggcttcagagacaactatgattcatcccatcagattgtccctggaggtcggtacggcgttcaatccttcttcccggagccctttgtcaacactttacctcaagcccgctattataatggcgagagaaccgtgccacagaccaacggcctcctttcaccccaacagagcgaagaggtggccaaccctccccagcggtggcttgtcacgcctgtccagcaacctgggaccaacaaactagacatcagttcctatgaatctgaatatacttctagcacattgctcccatatggcattaaatccttgccccttcagacatcccatgccctggggtattacccagacccaacctttcctgcaatggcagggtggggaggtcgaggttcttaccagaggaagatggcagctggactaccatggacctccagaacaagccccactgtgttctctgaagatcagctctccaaggagaaagtgaaagaggaaattggctcttcttggatagagacacccccttccatcaaatctctagattccaatgattcaggagtatacaccagtgcttgtaagcgaaggcggctgtctcctagcaactccagtaatgaaaattcaccctccataaagtgtggggacattaatgctgaagagtatagtaaagacacctcaaaaggcatgggagggtattatgctttttacacaagtccctaaagagttattttaacctcaaaaattagctaactttttgcagatggacttggtggtgttttttgttgtcttctttgcctaggttgccaaaaagatgtttgccttccaccttgatgcatcctgttttgtgcaattctctaaaagaaggtgccaaagctttttgattgctgcaggtaactgaaacaaacctagcatttttaaaaaataagattaatggaagactttaaggtattttaaaattcgaagggtatccaaggttctgtatttatttattggggagacactaacaattcaaagaagcaggctgtgaacattgggtgcccagtgctatcagatgagttaaaacctttgattctcatttctatttgtaaattcttaagcaaatagaagccgagtgttaaggtgttttgcttctgaaagagggctgtgccttccgtttcagaaggagacattttgctgttacattctgccaggggcaaaagatactaggcccaggagtcaagaaaagcttttgtgaaagtgatagtttcacctgactttgattccttaacccccggcttttggaacaagccatgtttgccctagtccaggattgcctcacttgagacttgctaggcctctgctgtgtgctggggtggccagtgggactcaggagagagcaagctaaggagtcaccaaaaaaaaaaaaaaaaaaaagggagaatttaaaagtgt

SEQ ID NO: 183707 - DNA, 383 bp, Homo sapiens
gtgttttgtttcattttctcttaggcaacaaaatgtatgttcacccagagtctcctaatactggttcccactggatgagacaggagatttcattcgggaaattaaaactcaccaataacaaaggcgcaaataacaacaacacccaggtagagtgacagagcaggaggggatatcttctggctttgactataaggcttttttctaataagagtccctactcttttcactgtatttataatatttgcatttgtgacctgtttgctcgcctatttctaaccatttttgttcttttgacctttctcatcttcactttcttattggatttcgataacagtgagttgactattaagaacagaaatagcgaagtattttgggaatttagg

SEQ ID NO: 183708 - DNA, 585 bp, Homo sapiens
tgttttgtttcattttctcttaggcaacaaaatgtatgttcacccagagtctcctaatactggttcccactggatgagacaggagatttcattcgggaaattaaaactcaccaataacaaaggcgcaaataacaacaacacccaggtagagtgacagagcaggaggggatatcttctggctttgactataaggcttttttctaataagagtccctactcttttcactgtatttataatatttgcatttgtgacctgtttgctcgcctatttctaaccatttttgttcttttgacctttctcatcttcactttcttattggatttcgataacagtgagttgactattaagaacagaaatagcgaagtattttgggaatttaggaaaccaagaggaaagcatatctatcacaaccacatacccagctatgatttaaatttcaaaaaaaaagggggggggcaataatgagacctttaaacttgcaataaacaaagctgttagtgaggagcatttagaagtccaataccaaaatacataatttgtcaaaatctaattttgttgaaccactaagaggctttttagattta

SEQ ID NO: 183709 - DNA, 2848 bp, Homo sapiens
gtctgcgctttgcaaagcatgcagttagggagagcagctcttggtgagctcagtgaacctgcctggcgcgcacttctacccgctggagagtgcgcgaggcggcagcggcgggagcgctggccacctccccagcgcggccccctctcctcagaagttggacttaggcaaagcgtccaagaagttttccggcagtctctcctgcgaggcggtgagcggggagcctgcagccgccagcgcaggggcccccgcggccatgcttagtgacaccgacgccggggacgcatttgccagcgctgcggcagtggccaagccggggcccccggacggccgcaagggctccccctgcggggaggaggagctgccctccgccgctgcagccgccgccgccgccgccgccgcggctgcggccactgcgcgctactccatggacagcctgagctccgtgcggtactacctccagtcccccggtcctcaggggtcggagctggctgcgccctgctcactcttcccgtaccaggcggcggctggggcgccccacggacctgtgtacccggctcctaacggggcgcgctacccctacggctccatgctgccccccggcggcttccccgcggctgcgtgcccacccgggagggcgcagttcggcccaggagccggtgcgggcagtggcgcgggcggtatcaacggcgggggcggcggcccgggcacctatcagtacagccagggggctccgctctacgggccgtaccctggagccgcagcggcgggatcttgcggaggactggggggcctgggggttccaagttctggcttccgtgcccacgtctacctgtgcaaccggcctctgtggctcaaattccaccggcaccaaactgagatgatcatcaccaaacagggcaggcgcatgtttcctttcttgagcttcaacataaacggactcaatcccactgcccactacaatgtgttcgtagaggtggtgctggcggaccccaaccactggcgcttccaggggggcaaatgggtgacctgtggcaaagccgacaataacatgcagggcaacaaaatgtatgttcacccagagtctcctaatactggttcccactggatgagacaggagatttcattcgggaaattaaaactcaccaataacaaaggcgcaaataacaacaacacccagatgatagtcttacaatccttacacaaataccaaccccgactgcatattgttgaagttacagaggatggcgtggaggacttgaatgagccctcaaagacccagacttttaccttctcagaaacgcaattcattgcagtgactgcctaccaaaacaccgatattactcaactaaagattgatcataacccctttgcaaaaggcttcagagacaactatgattccatgtacaccgcttcagaaaatgacaggttaactccatctcccacggattctcctagatcccatcagattgtccctggaggtcggtacggcgttcaatccttcttcccggagccctttgtcaacactttacctcaagcccgctattataatggcgagagaaccgtgccacagaccaacggcctcctttcaccccaacagagcgaagaggtggccaaccctccccagcggtggcttgtcacgcctgtccagcaacctgggaccaacaaactagacatcagttcctatgaatctgaatatacttctagcacattgctcccatatggcattaaatccttgccccttcagacatcccatgccctggggtattacccagacccaacctttcctgcaatggcagggtggggaggtcgaggttcttaccagaggaagatggcagctggactaccatggacctccagaacaagccccactgtgttctctgaagatcagctctccaaggagaaagtgaaagaggaaattggctcttcttggatagagacacccccttccatcaaatctctagattccaatgattcaggagtatacaccagtgcttgtaagcgaaggcggctgtctcctagcaactccagtaatgaaaattcaccctccataaagtgtggggacattaatgctgaagagtatagtaaagacacctcaaaaggcatgggagggtattatgctttttacacaagtccctaaagagttattttaacctcaaaaattagctaactttttgcagatggacttggtggtgttttttgttgtcttctttgcctaggttgccaaaaagatgtttgccttccaccttgatgcatcctgttttgtgcaattctctaaaagaaggtgccaaagctttttgattgctgcaggtaactgaaacaaacctagcatttttaaaaaataagattaatggaagactttaaggtattttaaaattcgaagggtatccaaggttctgtatttatttattggggagacactaacaattcaaagaagcaggctgtgaacattgggtgcccagtgctatcagatgagttaaaacctttgattctcatttctatttgtaaattcttaagcaaatagaagccgagtgttaaggtgttttgcttctgaaagagggctgtgccttccgtttcagaaggagacattttgctgttacattctgccaggggcaaaagatactaggcccaggagtcaagaaaagcttttgtgaaagtgatagtttcacctgactttgattccttaacccccggcttttggaacaagccatgtttgccctagtccaggattgcctcacttgagacttgctaggcctctgctgtgtgctggggtggccagtgggactcaggagagagcaagctaaggagtcaccaaaaaaaaaaaaaaaaaaaagggagaatttaaaagtgt

SEQ ID NO: 183710 - DNA, 215 bp, Homo sapiens
aagagtcccttattctaaatttggctagaggataaaagatccctggatttgggggcaagaactcacgtgactaataacaataatgtgaaaatctgacttttaggctgctgcttccttttttttttttttttgagtcggagtctcactctgttgcccaggctggagtgcagtggcatgatcttggctcactgcaacctctgtctcccaggttcaag

SEQ ID NO: 183711 - DNA, 345 bp, Homo sapiens
ctctcagcccttttcattggagtcatactctttttccttatccctacattgttggccaaacatcttgattatttttcttcccagagtgattctaaatgcctttaggcaaagggattagaaatatagtcaacataaagaattagaaattaaaacaactcatctgttgatgagtgccctctgtttcttagtatgttattgcatgtagattatttcttgctcatcctctctaggccataagaactattcctctgctcatcacagctgtgactattctgttataagcactaaataactctaacaaacaaaatgtagtgaacagtgcacacagaagacctaaattccaat

SEQ ID NO: 183712 - DNA, 375 bp, Homo sapiens
agtctgtttaggcgtactcataaggagaaatattggttatcaagagaaagctttataaaaataaacagtttgacactctttaagaaagtaatagaaactgctagctaatgaacccaaagcacccacttacagctatagcatataaaaaaattacaaatctagaatgacattacaacaacacagaccaagggcattagggctgctgacctcaacagcaaccaccatgtggaaatgagtgggctgtgaaagtgatatctaagattcctatatagttatttaatttaatgaattcctaattgttatttaatttaatcagctattatgtactgtaacaactgaagaatcacagactaggtgtacagtaccttaatttta

SEQ ID NO: 183713 - DNA, 247 bp, Homo sapiens
taagatcaggaacaaaaagagggcatgaataccagtcttacagattaaaaggattaaaatggaatatgtttgtgtacaacaaattagataatatagtataatggaaaaattcctggaaagacagaaactattaaactgatacaagaagaaatataaaatgtaaggagacctgtagcaattaagagatcaaattgctaattacaaaacttcccataaagaaaatccctcacccagatagcggtgaggg

SEQ ID NO: 183714 - DNA, 563 bp, Homo sapiens
caaggcggaccaacaacggacgcatcaggggaaagcaacaggtaaacagaaaattatgtaaatgtaaaaggcaaattttaactccctgaaaaaacaaagttaaacaagaaaggaaacaagtatgatataccacatggctgatcagtaaacaatatttatttcattataatgaaaacaccaactattgatttaaaatttcaaaattggaatgttgcagggagggaaagtgggatgaaatagtgaagaaatacaaaataacaataaaaccaccagtaagtcccaccatccgaagatactcctattttaataacattattttttaaacaaaaattggttaatatggcagggcatggcggctcatgcctgtaattccagcactttggaaggctgaagtgggcagatcacctgaggtcaggagttcgagatcagcctgaccaacatggtgaaacccatctctactaaaaatacaaaaattagccaggcatgcatggtggcaggcgcctgtaatctcagccacatgggaggcagaggcgggaaaattgcttgaatgtgggaggcagagg

SEQ ID NO: 183715 - DNA, 386 bp, Homo sapiens
ccctcctctacccttcatacagctagacacatactgtaccctcaacttatccctgtagtagaccagtggcaccttcctctagagaacttaaaccagaggggctccagaatcagggacagcaggaatagcagaagctagggactgaaaacagcatgggggattacctgaagtaaacatcttccggctgaataagtaaacctaccatccccccagtcccttttcctcaccttttggcaatcaggcctatattccccaggcagatatctggagggaaataccgcatggtgaagataagaacagccaagattgagaatcactaaactaaaaatatataaggctctaaacagcccttggcatctcttcctacctgcagtactctcaactta

SEQ ID NO: 183716 - DNA, 573 bp, Homo sapiens
atatatcagagatattcactaactacttgttggtaaaaagtgaccaagtaaaacagcaatatatgactctacattatctgattagtagtattgaaaaactggcaacagaagtttaagaaaaaaaagctgatcatggaaaatgttcattccacacatgacttaagtttcatttgatagactatatatgctgagaacacacttgattttgtaaatgggtgtgcatgttaagtacattgtttgccatggtagtgtaatctttgaaactatgtacttttaagttatataaagatttttagcttcataacaccttttgtggggcaatttaatgtgggacagcttttgtgggacaattaatttaataaaatttaattccttatccaacttttaaatgtatgacatttcaaatttcaaatttagtaaggcctacgatatgccacacttgcttttccttcaggttatttacttggcattatttcccttgcaacttggctatacgagcaaatccatactaaagttgctaatatgctttcttaaaagcttagtcaacactaaaacatgcattggcgacacaca

SEQ ID NO: 183717 - DNA, 754 bp, Homo sapiens
tatgaaggtgtgtcttatggcccagatatggtatatcttagtgaatgtccacgtgagcttgacaagaaagtgtattcagcttctattggattaagccgtctaagtcaattatatcaagttgattgatggtgttgagctcaacgatgtccttactgattttttttgcttaccggatctgttcatttctgatagagcagtgctgaagattccacctataacagttaatttgtctgtttttccttggagttctaagagtttttaccttatgtattttggcactgtacagttaggtgcgtccacataaaggactgttgcctacttgaggaactgatcctgttctcattatgtaatgcccctctttattgctgataactttccttgctctaagtctgctctaaaataatatagctactcccagtttctttgattagcattagtatggtatacctttccccatcccttaacttttaattgatacctatctttatatttacagtaggtttcttgtagacaactgctgtggtttgaatgtggtctgttcctgccaaaactcgtgttgaaatttgatcctcaacgtgacactgttgggatgtggggactagtgggaggtaggtattagggtcataggagtagacccatcataaacagattaatgcccttctctgggggtgtgttcttgcttgggtgggaatagattagtttccttgagagtgggttgctgaaatctggcttccttagtttctctctcttgctt

SEQ ID NO: 183718 - DNA, 421 bp, Homo sapiens
acattttactagatattaaatctgtagcactgaatggaaatgcatatctagattcacatcctctacaaccatgaattcatttttccctgttctagtatacatggtcttattttgtctctctttacctcaacttgagaaatttggatctggcattagagtaaacagataattgaagactagaaagaggtagactgggtggaaataaaagtggaattttgacagaatagccttgggagggatgaagctgagtatacctgggcctcagagcaataatccattttttaggaggaaagggactgctaaagccagcttttgagtattctactctgacctgagtggccttggtctgaatagctcatgttcagaacagcataaactattggagttgtttgttaaaaatacagatgccaaaatgctaccc

SEQ ID NO: 183719 - DNA, 331 bp, Homo sapiens
aatgcaatggcgcgatctgagctcaccacaacctccgcctcctgggttcaagcaattctcctgcttcagccgcccaagtagctgggattacagacgtttgccaccacgcccagctaattttgtatttttagtagacacggggtttctccatgttggtcaggctggtctcaaactcctgacctcaggtgttctgcctgccctggcctcccaaagtgctgggattaacaggcatgagccaccacgcccggcatgatttgggaaatattttaaagaaaagaaaatgaatgctgacctaatagagagtggagagcaaagcgaaagagcagttatg

SEQ ID NO: 183720 - DNA, 309 bp, Homo sapiens
gagccaccgcacccagcctactatgtgaatttttaaaaatcctttcatttactgtatttctatggtctcttgttaaagcagctgttttactctaataaactcggtgaaatctggcattagttagtgccatttaccctaacttaaatcctctgtaacggtgcggtacaataggactttctcaatgatggaaatgttctatctgtgccacccatcaggtggtcacatgtggtagtggagaatgtagccagtgtcctggagaatgcaaagttaaatttcatttacacataactaatttaaatttaaaagcca

SEQ ID NO: 183721 - DNA, 390 bp, Homo sapiens
cgtgagccactgtgcctggccgaggtggaatctttctgtgttgcccaggctggtcttgatctcctgggctcaagagcccacctggcttgtagcggttccttagaggagccacaggaaagtagttcggtatgtgtcacgtgatttcagtgactacaactgggtgacccagaatgaggtgccttattgacctgtctgccttcacagcgccctgtggactgtggggatgagggaggaaggctcagaagtgagaccagagcccagcagcatctgggtcccaattccacacactgcactgccctttgtaacaactcgccaatcctgtctcttgctccattgcccaggctggagtgcagtgacacgatcacagctccctgcagcctcaacctccca

SEQ ID NO: 183722 - DNA, 582 bp, Homo sapiens
ggattacaggtgtgagccactgcgcctggccccgaagtcttcatattttagtcttctgtcttttgggaggtacttttaaaaaaagaaataggaaaggcatgcttacggggaacacgagtatgcctgtgcactcctgtgtgcacgtgtcatttgatcaaattccagagtgaaattaggcgtaaaagctaatttacccatttgcagtaaaggagaatagtagagttgatgttgaattttcttacagttttggagtgactgcacctctgagaattgttaagtgttgcttttggaaaaagaaaaaggttactaaagttgacagtgcttacaaccctagcgcttagtccactgcctggcacatggtccaataagtgtttattgtatgcatgactgatcagatcaatccatgtaattctagttagacacttgataacttaaaacagttgtactgatgctgatgtatattagttgctttctatgatagtactgctttgggaatatatttcagttcacctttagtgttttttaatcttaataaatgtgggtttgttttagagggtccagagagcctcattatatggggct

SEQ ID NO: 183723 - DNA, 486 bp, Homo sapiens
ctagaggattaggggcatagccttatgtcaaatcaaaaacaagtatcatctatggaaatactcttctacaaatagaacttctttgcataataagcaatcttcaatcacacatatggaattcctaaggtaacactggcttcaggtaactgattctattcaagattcagataacataataaccttccagatacctctatgtactaggatctagaatcagtcaaggagccattttttcagcctgtattcccttgttccatccctctagccctaggtagaattctctctctcttcccccaagactttccctaggccagagcctaaacctggttatgtgcttggttagtacagcagaggcttgctcttttggtaggattaaaaccagaaggaagcacctagtaatctgacagttcccaagtcagagcattcacagttttggcctgcaatttctctccttctccttcagctcatcccttgctaggatctgaa

SEQ ID NO: 183724 - DNA, 299 bp, Homo sapiens
ttcccactattatctcaaagaattatttaaatattttatcagcatttaaatcttcacttttgtcttgctccctcccctggaccgagtcttcctggaggtcagagagggggtcttgggcttctctagcaagcagcgttttgtggtggtcacctgtgcaggcttctgaaactgttgcccatgtttcacccttgctctgcctcttacttaaccctgtggccttaggaaagttttaatttctctcctcctgagttttctcacctatagaatgtggataaaagtcacacccaccttgtagagtt

SEQ ID NO: 183725 - DNA, 221 bp, Homo sapiens
ccggaatcatctgccttttcaactttggtcttgatatctttggttcgtggagtaggggaacagggcattcggaacagcctgcagacaagcaagtgaggagagacaagccagacaccaggcaggccccaacaaaagaaaagaggtctcccaggagagaggggccggaactataaggaactcaggaaagaggtctgccacaactccagcctggctgcccctag

SEQ ID NO: 183726 - DNA, 217 bp, Homo sapiens
gctctagatttcaaaactgatacattttaaaattacaattaattagcagaaggaaaaaagtgactgttgaacagaatggcaagatttatagctttaaaatctattccataagaagaaaaaattatctggcacttcccaaagcagaaacaaaagaaacaggagttttactgtcttcttcgtttctaaataacttaacagtcctttctttgtggaagca

SEQ ID NO: 183727 - DNA, 545 bp, Homo sapiens
tagctggaactacggcacctgccaccatgcccggctaattttttgtatttttaggagagatggggtttggccatgttggccaggatggtctcgaactcctgacctcagatgctccaccctccttggcctcccaaagtgctgggattacaggcgtgagccaccgcgcccagcccaagtggttattatttcaacacagaagtccttgtttacccgaagcagctgggaaatagggcttcgcataaaaccagagcagaagtagcagagaaagggacctgtgagtgagtcctgcctggttctcggctcacactagtccagccttgggaaagagctgggacaccacaggtaaccaccttaatttaccctttgcctgtctggcgaagacaaagtaaactgagtgccacttttattaatgggaaaccatcttacttatagcaaaaacaaatgctcaaacctcattcattctgcggttatctggatccttcatgctgtaggtagggaacagaatggggctctgagagctccctcctccgcgcctctgctgggag

SEQ ID NO: 183728 - DNA, 259 bp, Homo sapiens
gtcacattgaattaatttttaagttaactttgtgttgaagtataagatgcctatagaaaggcgcacactggtgtctgaatcctcacaaagtgaaagataacatacatccagtaccccagaagccctgcaccatagcccaccatcctcaaatgtcattactttcctaacttgtaatgccatagagtagctttactagtttatgaacttgttataaatgaaattacaacatgaactctcttggtttgggtttactgcatta

SEQ ID NO: 183729 - DNA, 152 bp, Homo sapiens
ttagtcccaagggtttgttgttgctgatttttccagattttctacatagacaatcatgccatctttaccacctttcttccttcccaatctgtatacttctatttctttttcttgtcttagcattagctaggacttccagcgtaatattgaaa

SEQ ID NO: 183730 - DNA, 227 bp, Homo sapiens
agatcgagatcggtaccgattacgctcctaacggggtttcaccaggttggccaggctggtcttgaactcctgacctcatgatccaaccgccttggcctcccaaagtgctgggattacatgcatgagccaccaagcctggccctggcctttctttctttaaaaggtagggcaggccaggcgcggaggctgaggcaggctgaggcaggagaatggcgtgaacccggaag

SEQ ID NO: 183731 - DNA, 250 bp, Homo sapiens
gggaggtagaggccacggcagggaaccactcagtgggtttatcttgggcattctgtgcatatgtaactgagaaaggtatgttgttacctaatgtatgcttttgataatttggaccaagagacatggtattctgaatagcagccaaatatatgaggtcaaggtgacttcctctagcaattaggacagctgtcatggaagagtaggccagacctgatttccttcttaagtccgtgggcctctatgatgataa

SEQ ID NO: 183732 - DNA, 243 bp, Homo sapiens
gtaacattacagttactcggtagccagctgtgtctagtggtgactatagtggtgcagacagagaacattttcatcatcgcagaatgctccgtcgggcagtgctatccgaaagtcttggtgtccctgtcatcacgtccccacgggcccaggagcatgcatgtttgcctctacccatcgatgctgaggtctagtatgtgtgtggcactgcgttcggcccgaggaaagggcccttgcctacctcct

SEQ ID NO: 183733 - DNA, 561 bp, Homo sapiens
gaggagcctccgaatgtgaaataggtaggtgatggtatcatagaatgataggtttgtaggatttatgatactgcattcagttttggcagtgttacattcaggtatccaaggaacattcatatggttaaccacccaagtcacagcctttggagtttttctctgtgtctcctttgctcctgttgataaccattccctgtatcattctgtcactatatttacataattactctgattgccataggtcacttttaaaaaattgtttcttttcaactgctctgatagatctccttttctcaacctctttcttcctttctccatcttctacattgctatcaggtagctttataaagtgcaaatcttacttcactaacaaaaacttgttcgtagctctactgtcatctacttgagtccagattctttagtttgcagagtttttccatgatctgaactctgctttatttcctaaattcttgttttcttcaaactcatgctttttcaagcattgcattcatttttacatattgtatccaacctacctatttcacaatcggggtaccgagg

SEQ ID NO: 183734 - DNA, 396 bp, Homo sapiens
tatgatgtaggcattttgtctttgtcatttcccattaattataacaggatactagaaactggataatttataaagaaaatgattttttttctcacatttcaggaagttagaaagtcccaggtcaaaagggtagatctggtgaaggcctttttttctagtgaatactatctgcagagtccagaggtgatgtagggcatcacagtgagaggggtgagcatgctagctcaggtgtctcttcctcttataaagtcaccaattccactttcatgataaaccattaattcattaacccatcagtacattaatctataaatagattaatccattcctgagggcagaacacttaggactcaatcacttcgtaaagaatccttcacaatgttgccacattgggga

SEQ ID NO: 183735 - DNA, 144 bp, Homo sapiens
cagcaattaggctttattggtgcactaaggagaagcagagaggagaagcaattcttggtaacttccttggaagttgcagctaactctgaaaagtctgggttgaactaggtaagtaactaattcctagaatcaataaactttgca

SEQ ID NO: 183736 - DNA, 801 bp, Homo sapiens
cgcggcgttttcctctggctcctgcgagggcttggtttagggcttcagctctctgcgttctcggctccgggaggcctcggtgattcagccacagcctctgcctcccgttgctctgtgacctgagggtattggacaatttgtagctaagactcccggataccctgaagtcgggaaatggaactcgtaacattcagggatgtggccatagaattctcccctgaagagtggaaatgtctggaccctgcccagcagaatttgtatagagatgtgatgttggagaactacaggaacctggtctccctgggttttgtgatctctaacccagacctggtcacctgtctggagcaaataaaagagccctgcaatttgaagatacatgagacagcagccaaacccccagctatatgttctcctttcagccaagacctttcaccagtgcaggggatagaagattcattccacaaacttatactgaaaagatacgagaaactgtggacactgagaatttacaattaacgaacaacggtcgtaaacgtgtgaatgacgtgtcaggtgcagaacaggacgtacactactggagtttaccagtgcttgtcaactacccaggagcaaacactatctcacttgtcatacatgtgttacagtttcctagtacattttcaaattcaaacaaacataacgataacgacatactggacgagaaaccctttacactgttcagaactgtggccagactcgtctaacatggtcacaccttaacttcaaccatacagcgaactccatgcctggaggacgcaaccg

SEQ ID NO: 183737 - DNA, 745 bp, Homo sapiens
cgcggcgttttcctctggctcctgcgagggcttggtttagggcttcagctctctgcgttctcggctccgggaggcctcggtgattcagccacagcctctgcctcccgttgctctgtgacctgagggtattggacaatttgtagctaagactcccggataccctgaagtcgggaaatggtgagtgtgcggggcagggcgtccggaggctggggaggcctcatcggaaccggcgggaaatggcggcggcgggaccgagtctgcgaacggagtccccgctgccgcctctcagccctcagtcccctccggtgacggaccgggctcctgtcggtccccgcacggcggctctggcccagcctgcggccctccttgtgcagttctgcgcccgcagccccgcaccttccctgggccgtggggtgaggaggagctcatctggaagacgccggcgcccgcgtgcgaggtgcccgcctgggaggagctgtggtccgggggtccggtccctactttaccctgttcggaatgagatcgaggccccatcgaaacaaagttcatgtgagcaaacggggtctcattaatgggacagcgtcggccgcggctcctggtttggggactgccagcgggtcttgaaggaaaggcttttgtgaggtgtgtgagcaagcgaagcaaatcacccgcccgctccaactattccaccagtccctttgccctgtgcacctcctccgcgtggctgttcctgagtaacatcttt

SEQ ID NO: 183738 - DNA, 131 bp, Homo sapiens
atatattaaaggttattcattatacgctgggcaattctagaaacctattaaaaaatagcctaatgaatgaaagtcacagaaaagcctcctttataaccaggaaataatttagacagaagaacgttatggaa

SEQ ID NO: 183739 - DNA, 482 bp, Homo sapiens
atagtttttctactaagtattcttccctaacagtattaagtcttttgtgtctgacatctttcatttaatatcatatgtgagattcattcatgcagttatacgtagttgtagatcatttattcttgttgtgtaatattctattgtggggatatataatttgtgttatttacagttttaggctattaagacctgttacagtgatataaaaacataccagtgttggagacctgagtatagggtatcccaggctttgtgtggctgagcaggatgacatcccatctttcctctccaggtccagatggttttagtgtgatagtttacagctgagcttttcagactatggcttgcaggccaaacctggccttccgcctgtttttacacatacaattttattggaacacagccacacccattcatttatgtattatctatggctgctttcccattataacagcagagttgagtaattgctacggggatca

SEQ ID NO: 183740 - DNA, 407 bp, Homo sapiens
tttttaaatatgagaaaactgaggcttagaaaggtaacttggctgtgagctgtggctcacacctgtaatcataacactttgagaggctgaggcaagctgaaccctttgagctcagtagttcaagaccagcctgggcaatggggcaaaacactgacactaacaaaaatacaaaaattagccaggtgtgattgcgaacctgtagtcccagctactcaggaggctgaggtaagaggatcccctgagcccaggagacagagactacagtgagccaagattgtgccattgcactccaggctgggtgacagagtgagacctcattcccccccacaaaaaacgattaactttcttataattctgaaataataaaggtaaaaatttaaaatataatctaagtctagccaatatgc

SEQ ID NO: 183741 - DNA, 263 bp, Homo sapiens
tcaggattagttgagtgatgccttaaagaaagaaagtcagatgataggtcttcctgctgcccgcaccacatcatgagtgttattcctatagaggaggagtaaagagtgggaagaaaatgaaatctgtcaatactgtgaatatataaataataaaagtagcagtaggactgattaattctgaatcatctttatgaaatgactggagccgtgaaaatgctcagtctgcacagctgattgagaaatgtatgcaatctgttgatcgg

SEQ ID NO: 183742 - DNA, 284 bp, Homo sapiens
actatttgaggaaataatggcaggaaactccaaatttagtgaaagacataaatatacagattctaaacgcttaataaaccccagacagggtttaaaccaaaaaaaaaaaacaagtgattacttcctgcagacttttccttagtgactcattcaagcttctcataaatgccccaattcctaagctattaattcattgttgccttcagtgaatatatactttcatttcattgaaaacaccactgatgataataaaaaataaataaataaataaataaaaagaaaac

SEQ ID NO: 183743 - DNA, 261 bp, Homo sapiens
agagataattcttgaatgctagaggtggtgtagagtgtagacagtgccagcaggagggccaggactgtggctgattccagttttgctgtgtgactgtgagcgaggcctcagattgctactctttaattggaggagttggaacagatgctgtgtggcctgttctggggctaacactgtacatgaggcttgagttctcatggagattcctttgtccagaatagtttgaaaggtctgctcctctggtcagcatccattgaagag

SEQ ID NO: 183744 - DNA, 164 bp, Homo sapiens
tctcgtgggggagggaatcacttccaaggaaatgatataataaactcactctccctttttaatgaactatcgatttcttcaattaactggatactgagaatgtaggtagtactagtagtagtagtagtagtaattgtcttcctcaagacatcaaacacacaact

SEQ ID NO: 183745 - DNA, 625 bp, Homo sapiens
cacataattgctcaccagctcccttttgtgcttaattggtctttcgaaatgtttttattaaattcagccagtatttatttaataaatgctggctgaatttaataaaaacatttcaaaagaccaattaacacaatggggaaatttaaagtaaatcattgaaaactctcatttatattctaatctgcaaatttaacatattctagcaggccttctctttttcagaaacacgtctgactttttaaattcatcaaaagtccctcaaagtgcctgggctggagaagtcccaaggcctacccttcccaaacccctcatcgaagggtcgtcgcctcgtccagtctctctgggtggccatgcttggttttatgtaactctggcctagggcatcccactgactctatgaggagtgaccccctgacccaaaaggcagccaaatcttgagcagacaaaaacacatacattacaggataaaaagataagctggcccaaattctgtcagtaacttgaaataatggtaactaagtaatatcaggaaagaagaaataaggatgcaagatgccaaacaaaatctttatgaaatacttttgatcatgaacttatctgctaaatcatccctcaagtagaaaca

SEQ ID NO: 183746 - DNA, 760 bp, Homo sapiens
tgcgtgcagatgccgtatcttactcatattcttacattcaacaaacacacattaagttcccactatgtgccatgcactgtaaagcctgaagccacagcagtaaacaaaacaagcagatgtctctcccttcatggagctggccattcttgataggcagactaattcatttcttttccctcctgcgcaatggactgttcttcatgcagtatttatttaataaatgctggctgaatttaataaaaacatttcaaaagaccaattaacacaatggggaaatttaaagtaaatcattgaaaactctcatttatattctaatctgcaaatttaacatattctagcaggccttctctttttcagaaacacgtctgactttttaaattcatcaaaagtccctcaaagtgcctgggctggagaagtcccaaggcctacccttcccaaacccctcatcgaagggtcgtcgcctcgtccagtctctctgggtggccatgcttggttttatgtaactctggcctagggcatcccactgactctatgaggagtgaccccctgacccaaaaggcagccaaatcttgagcagacaaaaacacatacattacaggataaaaagataagctggcccaaattctgtcagtaacttgaaataatggtaactaagtaatatcaggaaagaagaaataaggatgcaagatgccaaacaaaatctttatgaaatacttttgatcatgaacttatctgctaaatcatccctcaagtagaaaca

SEQ ID NO: 183747 - DNA, 614 bp, Homo sapiens
tggccctgggttgataattgttgatactgggttatgaacatgacatgggggttcattacactgttttctcctcttttaaataggtttgcaatttcctatgattaaaaagaaagttacagaaaaagacttaacaggtggggccactcccaattaagaggggagtgtaattaaagaggaggcaagaggcagcttgctgtgggcaagaaacagcccgcaagtcagtgtggctggagcatcccactcaaggcaaaaaaaaggaggtggccagacatgaggctggggaccaggaaaggtaataccctgccaagtcccattgggcatatgaacccacatacatctttgagtgatggggagacatttggatattctgaacattgcaaagaaagaattagacttggccaggtgcggtggctcacacctgtaatcccagcactttgtggggctgaggcgggtggatcacgagctcaggagatcgagaccatcctggctaacatggtgaaaccctgtctgtattaaaaatacaaaaaattagcctgacatggtggcacatgcctgtaatcccagctactcaggaggctgaggcaggagaatcgcttgaacccggaaggcggagg

SEQ ID NO: 183748 - DNA, 859 bp, Homo sapiens
ccacagagacatggaggaacgttaactgcatagtacttaaagaaaggagccaatatgcaaaggctacataccgtatggttccaactatatggtcctctggaaaagacagaactatggagacaataaaaagatcagttgttgccagggcttagggtaggggagtgatgaataggtggggcacagatttttagggcagtggaactttcactagagttctcatttggtggagacatgtcattatacatttgtcaaaacccagtgtacaccaccaagagtgaactcggatgtaaactatggactttgggtgatactgatggataataatgtgttaatgttggttcatcagttgatgttgatggtgggggaggctgtgtgcatgtgtctgtggggaggggctatgtgggaactctgtactttcccctcagttttgctgtgaatcacaaatgtctctcaacaacatatcctattatttttttttaaatgttcacaattgcctacttgctaggcacaaagtagccaaatattcttggtctaaaaaacaatatcagcttagtggggtagaaaaacaggtatatgagcaaaaactggaaaggtgagaagtatactcagaatccttgcggaatgaacccaaccaaaaacacccaggccccttgtttccctgaaccctgtggtccattgccgtcccctggtgactccatttctgccacttccttccaatgggctcaccctgcatcttatcctctcacagaaagtcttccacctctgacattataatcctgtctctgctcatcctttgtatctctctctaacttcctcagatgttcctcagtcctctccagcaatttgccccaccatattt

SEQ ID NO: 183749 - DNA, 553 bp, Homo sapiens
tcaaaaagaaaagctaattcaaagtcacttaacagtgcacaaaatccagcaagtaacagtataaaatttacattgcacaatatctgatttttaaaaaattacaaggtatgaaaagaagcaagaaaatgtgttctatagcaatagaaaatcaatacatggaaacaagcaaagaaataacagaaatgatgggactaacagacaagagtgttaaaaccaataaataataataaaaattggaaatgtatagctactaagttaaaagtaaagatgaaatgaaaccataaaaaaattaatctaggctgggcgtggtggctcacacctgtaatcccagcactttgggtggctgagatgggaggattgcttgaagcagtttgaaaccagcctgggcagaaaagggagatcctgtctctcaaaaaaaaaaaaaaaagaaagaaagaaagaaagaaagaaagaaagaaatacaaaaaaagttagctgagcatggtggcggctacctgtggtttcagctcgggaggctaaggtgggaggatcacttaagccaaggatgtcaaag

SEQ ID NO: 183750 - DNA, 371 bp, Homo sapiens
aacaactgaatgtaaacagcatattgtttaggttacgtattcaggctacacacacaaacatatatgcacatatatacaaacataacacatatccatacatacgtaagtatacacacaaatgcacacatttatagaactattaaaactaccaaaaaggcaagagaataatcagcacaaaggggtaaggaaagagggacaggaatacaggctggggagaagatgcacagaggtaagtactaacactgttcttgttctctggttgaatgacatcatcataaatgatcattctattgttaaacaattattaaaagaaagccccagcctgggcaacacagtgagatctgtctctatttgaaaaaaattttttttta

SEQ ID NO: 183751 - DNA, 374 bp, Homo sapiens
taatgcaatcttaccaatcccaggagccccttccatgctccttgcccataagtacccaacgtgctcaaaaccgcaccctgacttctaacactgtaggctggtctggttcatttttgaactttgtataaattatgctgtattgtatgtattcttttgcttctggcttcctttgatcaatggtaagtttatgagatttatccatgttgctgtatataggaattggttcattttcattgcttatatggtattccattgtacaaatataccacaattcatttatccattctcttgatggacattcagtttcaggctattatgaataatgctgctatgaatatttttgtacacgttgttggtacacgtgtgtacatatt

SEQ ID NO: 183752 - DNA, 748 bp, Homo sapiens
tcttcctgcctttaagattatatccctgtaattgtcatgttagcaattggtaacttgaactgcttaagtatctttcacttctgaggcaggggttggggtgggaggttggaggtcggggcgtcatcttgtggactaatggcacaagtgactaaattagttagcagtagtagaatttacaaattagattcatttgtttatttaacagatatttattgattattaccgagaatcttagtaatacagatactaagtaaacagcaaaataacaaaacaaaaaatcttgccctcatggatcttactttctcctgggaagacataactaccaaacaaataaatatatacatgctatgaagagtaaggatagagaattagataattctgtgtgtggcatgataagaaatacatatttggtctttgtctctggttcctggcttctggcttctaaaatccttggactctaaccagtgatgagtgccatcttgctatgtttcccaggctggttttgaactcccagcctcaagcaatcctccctttccgcctcagcctcccaagtggctggggttatgggcctgagccactacacagctaagagtgtcttgtatgtgctaatgagatggctggtgtctgagagcccctagagagcttcaagatgggggctagtctttagaaagtccaagcaatggctaggtatggtggccactgcctgtaatcccaggagtttgggaggccaaggtggacagatcaccta

SEQ ID NO: 183753 - DNA, 374 bp, Homo sapiens
aatgtggtcatgtccccctttctcctctaattccaaagaacttcgctctcctccagcatcccccacctctaattctaaagaactttgcttcatataagctccactcctccaggaaggctcctcggagcagcctgggaggccttcctgggagggatgcaggaaaacaggctcaggaggcagcggggagcagcctgcaggtttgcttcactccctaggacccacacatgctcccctcagctgtctgggcatgtagagtgggtgcgtatctgcggtccaggcatttttgagagggctcagatccttggcatcagctgccctttcaacatcctccttccaaccacttcagactcagtaaggcctttggaaaaaatacc

SEQ ID NO: 183754 - DNA, 465 bp, Homo sapiens
gtgtgtgtgtgtttagttttctctctgtcaatgaattggcaacttcgtagggaggtaaaattactcaacaatattatctcttttaattcatgcaacactatgaaatgagtgtcttatttctcactctctaagttctgataatttgagtaattttttcaaggttagatagatagtaagtgtccaggaatcagagccctattgccttaccccttctgggaagccatattgctccctataactttcattcaatattctccaaaggactaacttttcttaaatactcctcctcacattccttctgaagataggccgcctattctttctctgaatggaggaagctggaaggagctatagataatttgactggaaagagcgagataaatcctggaacctggtgagggtgcataggatttctgtgtaaggaacaagctgcgtcttctgttatgttgcctgttttatggatga

SEQ ID NO: 183755 - DNA, 508 bp, Homo sapiens
aacactaatgctttgcaaaaagaatcagtttgggggtcaacagacttgagctgggattctacctccattacttataagccaggtaattgtcaagttatctaggctaaactgtaaaatgagtctgacataagcagcctcatagggtgttacatattaaataagaaatattaagaaaatgatacgacctgccacatagttggtgacaataaatttgagtttttttatagctctgactccaaccctgtcatttttattgataaagacaaaaaggtattagccaagcatggtggctcatgcctgtaatcctagcactttgggaggccaaggaagcaggattgcttgaacccaggagatcaagaccagccatggcagtttcttagattaaatatacacttactatataacccatccattccaatcctagctgtttccaagtttgggtgattacaaaaaaacagctactgtaaacattctcatacaagattttatgagatcacatgttttcatt

SEQ ID NO: 183756 - DNA, 537 bp, Homo sapiens
aggcggaggttgcagtgagccgagatcccatcagtcactccagcctgtgtgacaagagcgagactccgtctcaaaaaaaagaaaaaaaaaagaaaaattaacattgaaacttcctgaaatcattagagttttagaattcctggttcaatagaattcacaaatttcaaataattgagcaaatacaaagtctcctctttatcctagtggcattttttcctggaaacatcagaaactattttaaagtttgttgctttatttatagtctttgcggttatcacccagcttttatgtgagaaacgtttatttttaaataacttgctctaatagttttatgtttcaaaactaatagaaggcttcttttttaattggctcttacaatgaaaatactaataaaatggtttggtggaaactaaatttttcttaaaatatgagatggaatattcacaactgatttggttgaatatttgagtcttaacatttctcatgtaatataagtggaaaattttgtggagaaaaatctaacttcatgacctcatg

SEQ ID NO: 183757 - DNA, 280 bp, Homo sapiens
aaccccaggcaacactgcttctctgcagtgaaactacattaatgctgatctcatgaactcagctaataatacagttttatgatcactgagatagaagtggggctgagctcaccacttttccaaggagaagaataaagtaaacaggatttcatgaggaacatcaacacttgcctaagagaacaagcttgtaacaacactcttgagcaacctcatctgcatgtaaacgagctggagcttccacaggactcctgggttggatgaaccctcaggctctcctgac

SEQ ID NO: 183758 - DNA, 440 bp, Homo sapiens
tgttcagcctaattcaatcatgtatctgtaattacttttctatagttttatacatagtttataatctcattatgttttagtacttttctatattaccttcgtctaatgctattgttatttccatatatccatatccttaaacaactataatggtttaaaatgttccaaaaaaactaagtaataaatttggttttagtacaaactgtttcagtcaaccaaataaacaaattaccattttgataacaaatagattaaaactcatgtcatcattaccttgtatcttgtcctaagtaaatagattaccattttcaatttaacattgtaggaaacgctactcagtgtaaacaactcccccctccccactttctacctttaaacacccacttaaacatagacaaattatatacacttatgaatttttttttttttttttttttttt

SEQ ID NO: 183759 - DNA, 245 bp, Homo sapiens
tttgaggcaattcgccaagcattgtggttaatcactgtgttattattagaaatgaggcttttcttaaaaaaatttttgagtgtttctaaaactctaaggatttagatcatgttaggtatataattcaggttattgtgtatagactagctctataataagctgaatcctccttgtactttaaaggattcctggctgggtgcagtgtttcacgcctgtaatcccagcagtttgggaagctgaggtgg

SEQ ID NO: 183760 - DNA, 387 bp, Homo sapiens
caaagattttcaaatgtacaaggttggttcccctaaccccccacccccagttgttcaagggtcaactgtatttactggttgataaaactgaagccaccttcaatcttgaatccattcaagcacatgggctgatccattaccagactgaattctctcaacatacacaaattgtcagctttgctgacatcagtgggcaatggttttctaactgaaaaataatgtttccaaaatattgtagacttggtcaaaagcagaatttaaaagctaatgggaaacaaaacagtcctcccaccccaaagccaatctcagctgatgaagattcttgccccccttagttgaggcaggcagatcacgagtttaagaccagcctgaccaacatggtgaaac

SEQ ID NO: 183761 - DNA, 285 bp, Homo sapiens
ctcctttgggtggacagataatgtattaagctttgaactatggagtctgaggtacctgtggtacatcctggtggctagatatgtggtcagggtctggtggccaggaaagtgctaggctaaaatttctccttgaatacatgtcttatgtttgataacttagattctaaaaggctggtggccaggcgtggtggctcatgcctgtaatcccacaactttgggaggccgaggtgggcggatcacgaggtcaagagatcgaggccatcctggccaacatggtgaaaccct

SEQ ID NO: 183762 - DNA, 676 bp, Homo sapiens
ttatccttaggcattcttcctgccccatgaccttttattaacaaataatgattcaggtcaatagacaatcaggcactggaataaaataatgaaaagagagatacacagctcttgctctgatggagcatagtcttctaagaattattatagggaatgctgccaactcatcagcatttcctcaaataaatgtgtcttcctttttgaaaaataggtatatctacttagaatatctatgagcattaccatgtggcctgtcttctgtactgtttgtcacttataaaaatagcattaaaataggacttttatctacaatctactttcaaatggtatatccaagaaaaagaaaaaggtggcaaatcagccaccttttgggttatcaagttgaaaaatatatgaatgtttattgtgttcatcttgtctgtaggcttcaattttaagaaagaaggtcagggagaaaaacatcaagaaagaattatctcaccaagtgtaattatttaataccatcttaattaaaaataaattcctcaattcgggaagtttgaatatggactggctattagatactaagaaattactataaattttcttaggtataaaatgttatggttttgtgagaaatgcccttattctaaagagatgtatgttgaagcatctgaaggttttgtttctttgagac

SEQ ID NO: 183763 - DNA, 296 bp, Homo sapiens
agtcaaccttatcaggcaagtcctggaaccaggatggcgaaaataacagtccagagcccttactccgcgctgggcactgggaatagagcagtgaaaaggtagatgaggtctccgctcccatagcacttctatttgttctagtgatggagacaggtgataggaaagccttccagtagaggagataattgtggatcatggtacctgctatggaggaatgaagagtgtgatggagggatactggtcacggcccacatgatgttgggtgaccagggaaggtgtccctgaagaagcagtgc

SEQ ID NO: 183764 - DNA, 439 bp, Homo sapiens
ttcggaaccgagtgcggtgggctaggactatacgtttgcaagtttaagagataagcgagaagaccagacagagcaaacaataaaaggctttttgttgagaactgtataaatgtaagggagtaccaaatcccctattttgaatgacagtatcacggactttattacatatgtaattttattctgattatgaaagcatcagtaatttcactattgaggaataaccacaatgtttatgaatatttcctttgcttctaaatatgcggtctttttaaatcatgtattttatttcatttgtatatatagtttttcgctgtgtaaacttcctttttgcaaaattctacgtcacaaattgaacaaggcaattagatgtctagggaagtactgatgcacgagaaagcatattgcagcattggttaataaaacgaaaaaatagaaacct

SEQ ID NO: 183765 - DNA, 275 bp, Homo sapiens
tcagaggcagagcaggtcagtttcctcggggaagtggtttcattcccagaagagagagggaagggatcctgagtggaggcgatgggctcaatttcgcatgtttgtggcctctggcgatgtccggcgagggatcggaaagctctccttgaggggcacagagaagtagtggtgcttaggtcagtggtaggtttcttttttaaaggcagacaggaatcaaggaacagaagcccttgagagaccttaaaaatcattcctttgaattcctccccctcccc

SEQ ID NO: 183766 - DNA, 394 bp, Homo sapiens
aggatgtcttcttcgtgtgtttatggagagacaccccactggcgagatgtctctcaaggcgcttgccggatgatgagtatgctgactcagcctgtatgagctcctcagggctggaacccgactgcaaagcacagcaggtgctcagtaaagctgctgaatgaaaaaccagcagccctccacaatctcaaccttgctaatgtattcccaaaacaccgaacttaccttcctaagtgcaaaagcgccagactaccccttacctcacagaagaccttcctgaacctttctacccgcctcactcctgtgagcaacagctgtctgctgtgtacaacattccgtgatttactcaaaaagcaacttcagggaatcccttgggtttttgctccttttcttactc

SEQ ID NO: 183767 - DNA, 242 bp, Homo sapiens
taagacgctgtctgcctctcgcacatatctgggcgccgcacctgctttcccacaggctctgcgccaggtgttggggtgatggacgtgacttacagagcttctgctctctccctgcagcacacgtggtggtgggtgggtgcagtgagtgggaacatccacataggttgagtgcagctcacagtgggagaggcactgtgggaggcccttccccttgtcttgcaaagcagaaatgcctgttccga

SEQ ID NO: 183768 - DNA, 297 bp, Homo sapiens
gtgaaaaagaagtctacctgtgtcaggggtgttccctgtcaaagtgatgggtgagcttcagctgggttgcagtggaacggtgtgctggatggattgaggaggcgagagggtgcaagacagcccatttaggaggcagttcctgcaatgtgggcatgaagtgttacagcccaaactaggatgctagaatccgagggcagagggcagtagaaaagaacaacctggcggaattgtgtaggactagaggatgacagccgagtggcagataccagggtcaagcttgcggggagaagggggacg

SEQ ID NO: 183769 - DNA, 606 bp, Homo sapiens
atggacacatacactatttgcattcagtttttccagtaaataaatgttattgctgcataaaagaaagattaataaattgccagtttgaagtaaataattgactaaatcagacttagcaaatatccatcacttaaaaccctccagcgttaaatgtgcgacaaatgtctcagatggtcttatggcataaaataaatcaaaacactgtgacaaagtgggacgttcacaaggtaatatgtttcttattattatcaattagacttaagattttccattttaatacttttctttgaaatatcctattcaggtgggccgaaattaacataacattgaagaacatattgtcacttaagacaagtgttctcatcataatcaaagcgttatgaatgaataatgaatatatttgtagtagaaagtattggttttatttatttattttatttatttttggacagggtctcactctatcacccaggctagagtacaatggcacactcatgtctcactgcagcctccacctctcaagctcaagtaattctcccaccctggcctcctcagtaggtgggatttcaggtgcacaccatcacagctggcttttttttttttttt

SEQ ID NO: 183770 - DNA, 501 bp, Homo sapiens
aggaacagcaatttactcgaagcttcatggggaagtgggagcaagttagagccgagacctgggtctttcgtttcctacattaatgatgtttatgtaacattccactcttgggtttgccaagccttggtgctttaaaagtttttttctaccaatacccagtatgtttggctaaagttgaaaagcatcaaagagaaccagtaaagcccttttatcctccctaagggtctgcttttatcactctgctctggtaacttcatgaactgggatctaaacagcatagccatgggccacaggggagcaggccttcttcagaggataaagcccagatttcttggaagcccctaacccttggaggcctctgactccctgaaaaagactcagtgcataaacagggcctaccccaaagtagtaaaataggactgaaagtgtattgatatctttaaaccatttctaagaaaataacattgtcttggataaatatgagtgccatgaacttgtgca

SEQ ID NO: 183771 - DNA, 367 bp, Homo sapiens
tgggaaggaaagccatgggagcttgcacagtggatgcgaacaccccaggaagtatgtggagggagggaaggagagcagacacggctggctgtccaacaggtacccatcctccctttcttcctcagaactctggttctgattgagaattgctgcctggaaaaagtctaaactgcgaacctccctaagctagaagaggctagacaaagagcttccagccattgagatgcagaagtgtcgcaggaaaagctttaggagggctcattacaacagagggaggagcccttcttcctgccctctggtcgcctggaatacagatcatgactgcaggcccaggaggcctcttgtaccatgaggtgagcttgaagac

SEQ ID NO: 183772 - DNA, 137 bp, Homo sapiens
tagcaagagaccgccactcctcaccactctgggtcagggccaactgcagtttcagagggacagaaataggaggtgacccaaagagggtgcctaagcacaggtcagaggtgaaaagtcagactcaacctttcctgagg

SEQ ID NO: 183773 - DNA, 265 bp, Homo sapiens
gggccaccgctgatagtgcctgtcctcttggtactgcctctgcctccctccgctaaggaggcaccttgcctgcctgctgtcccatagtgcccagccccagccccagccccagctccagcccatagaggagggaggaacactggaagggccctgagcaccagggggcaaggccgggaagaagatgggtatgagctcaggattccacagttagtgcttcaaagaaatgctcatgggaccctgcaggagctttcagagtcccccacat

SEQ ID NO: 183774 - DNA, 381 bp, Homo sapiens
ggaagaaggctgttgtgaagctttatatgattatttaataggataccataatcttatcaatataataaagaaggccaggacatcagaaagtttgctgtgacagtaatagctatagcatagttaataagtagctaggaatccttgactagaagccccctttgaagaaagagtcacaggtggagcttcaaacacactagctgcagagattcattccaggaaggctcaagctgttgttacttttgggtaataaggcacctttacctactgtaggtagcaaaactaatgcctatgattgcactaaaggaactggcaggagtggagtgttactgagtcctgtgggggcttaatttgggaagggacaactagcatgtgagtttcctg

SEQ ID NO: 183775 - DNA, 296 bp, Homo sapiens
gttggtgaagttaagaggatctcgtgccttccccggtgaggacattcatctttcaagagaggggagaccatgacactcactcctagagggaggagcacaggagagaaatggtcccccgggcctcactaggaaccattgggggcacctctcaggtcctctccttccagtgggaacgccagtttccctcagatacactgagccataaaattagcctcagttacgctgaagctagatatacttggtatggggtagttattagtaatgacagaattttctagacccccacttgcatattt

SEQ ID NO: 183776 - DNA, 262 bp, Homo sapiens
acagagacgaggaggaaggctgcgtggttttagttgtctgtttgtggttttgagcactcaatgtgtgaaccatagcaatagcacctgtgccagagtcagcacctggcacaaacttctcaatgcgccaatcagtcttaactcggggactctcttatcagctgaaatacaacactattgcctttcgacgttcacagagatcttaggtatgcgtgtcctgcagagtggttagctaaggatgatggctttctgcccatttctcaca

SEQ ID NO: 183777 - DNA, 139 bp, Homo sapiens
tgtaagtgaaatttgctgaaattaaccctggaatgtttacttcaccatgtaatatattcaaaaatggtgaaatgtcacaattgacatataaagaaaaatggctataaatatatgtatggggtaaaaaatatccaatata

SEQ ID NO: 183778 - DNA, 213 bp, Homo sapiens
agtttccacatttgcttttctaagaatgttcctagctgtcaggtctgacaaaatggctttttgagaaaacgcagttgttgtctgtgggtcacatgtgtgggggcagatgcctggggctcccctgagctgacagtcacagcaaagcaaggagggggtgcacatgccagcctggggcactgagcgccacgctgagcagtgaggaggaaacgccaa

SEQ ID NO: 183779 - DNA, 126 bp, Homo sapiens
gtgtgcctgtagcgtccttcccttacctccccactgtgaacttcgcagggtgaggactgggagccttttaaaaaacaaaacagaacagtttggccagcatggtggctcacacctataattccggca

SEQ ID NO: 183780 - DNA, 547 bp, Homo sapiens
ggcagagcagggactagagtgaggccagagagggacccaaggcacaaagggaaggaggctgtcaccctcagggctgtgtacttgctgtttgtgcccttcatttgtgccctacgtggctctctgtcctcatcctagtcctggcccttgcttatggggacagacgggtccaagggaggagggtggcgaagtgctcttctccacacctgtggggacagatgctgagaatggaattctacagagacagtggacaggcttggtagtgaactttccaacaacctagagctctcattcctggtgtgggggccagaagactcccgaaggacaacagttttgtcaggtgcccttggtctgggccagggactcagcattagaactgggcatctgggtagaagacggtctgtggggccatagggtgccacgtgggccccttaacttgatagggaaggagggctccctgcctggtttatgcagggtgtagtgggaaaaggcctgaagggcgccctctcccatttcccacacacttatttgagggtctaacccgaggcag

SEQ ID NO: 183781 - DNA, 234 bp, Homo sapiens
ggtggagtgtaggaacagaagtccagccacagagggggtgaggaaaggagggggcaggcatgggtggccctttcaggaggtgttattgtgaagaggagcagagaagggcaaccactggagaagacgcagagtcaaaggagagatgttgcctaaacataggagatactaaagtccacccctatactgatgggaagaagacactgagttcagagagataactgcagaatggaagtc

SEQ ID NO: 183782 - DNA, 403 bp, Homo sapiens
ggtgaacgagtgagactccatctcaaacaaacaaacaaaaacagctaaaatctgcttggtgctttgcactcttagttgccattttcttctaagtgagatcttcatttttaaatttcattatttgagtgttgcaaatctcacattggacttacctgcatgaaattcccaatttctcctcaatcaggtctccacagtttaaattttgttatttagagtgttataaattttacgttggcctcgttcatgagaaagtgcattttaaaattaaatacaagtagctttcaagtttacccactgttcttaattctctaccccatttatgaagttgaacaatcaagaggtagccacatttaaaaaagtggttcctttttgcttttgcttttgtttttaatagagacaggat

SEQ ID NO: 183783 - DNA, 287 bp, Homo sapiens
ttgaccgtggcttgtgggtggcttgaaagctacttgtatttaattttaaaatgcactttctcaatcaggtctccacagtttaaattttgttatttagagtgttataaattttacgttggcctcgttcatgagaaagtgcattttaaaattaaatacaagtagctttcaagtttacccactgttcttaattctctaccccatttatgaagttgaacaatcaagaggtagccacatttaaaaaagtggttcctttttgcttttgcttttgtttttaatagagacaggat

SEQ ID NO: 183784 - DNA, 139 bp, Homo sapiens
actctattcattcatttattcaacaaatatgtattgagttcctgctaggtaccaggcactatgctagactcgggagacagtgtaaacaaaacagacaggctctcgtggagcatacagttcagaatggagacaaatgtta

SEQ ID NO: 183785 - DNA, 612 bp, Homo sapiens
ctctgatcagtgtgtactggtaattcactgtggtttcattcagcattttttgatgacgaatatggctgaacactgctagaagctttagttttttttaacctttcgcattgagatctacaattagcctataatttatttttgtaagtgatggcaagcaaggaccaaaattagttttctttttcttttcatacagataggcaattgacgtaggatcatttatcgaaagatctttctttccacattgctgtaaagtgccattttaatcataaattagtatctacatatatgggtctgattcagggctctattctgttccattatccattcatttattccacactgtatattcaatagtgtgaatcctacaactttgttcttccttaatattaccttgactattcttgccatttgcactgccatatgaattttagaatcaacttatataaacttctgtaaaagtttcaggtatctttcttagatttattaccagcatttgatattttttgatgctattataaacagcatctaaacatttcattttctgattactgttatatagaaatataggttttgtataataacctcacatccagtaatcttactaaatttatg

SEQ ID NO: 183786 - DNA, 445 bp, Homo sapiens
ctctgatcagtgtgtactggtaattcactgtggtttcattcagcattttttgatgacgaatatggctgaacactgctagaagctttagttttttttaacctttcgcattgagatctacaattagcctataatttatttttgtaagtgatggcaagcaaggaccaaaattagttttctttttcttttcatacagataggcaattgacgtaggatcatttatcgaaagatctttctttccacattgctgtaaagtgccattttaatcataaattagtatctacatatatgggtctgattcagggctctattctgttccattatccattcatttattccacactgtatattcaatagtgtgaatcctacaactttgttcttccttaatattaccttgactattcttgccatttgcactctaacctgggcaacaaggaaactgtcttcc

SEQ ID NO: 183787 - DNA, 290 bp, Homo sapiens
caaaagcttctctgaaccaatgtgcttgtctttgaacagaatttttaggaagcctccctccatttccatgctgaggctccttgtggactgggcatttccgtgaggtgggatgtaacatagtgtgcgaacgccgagagccaggttcttgtcttcatgcttgtcgtttattctttttgattgtgttaatggctccgagtacgtcaaaacatctcatgaccaagtagttagttacgcatttgatgttttggtggcatgggctgcgtaaggcgggagagcagctccgggagaag

SEQ ID NO: 183788 - DNA, 187 bp, Homo sapiens
gttgctctcacgctataacaaaactgaatagttttttgtgcaacacctaaaattatctactatctggttcttcaagaaaaagtttgatgactcctggtttatgccagtaaatattcttataaaataccatgttaatggctgcctaatattctaattaaatgctcagcagaatttccctagcggtgag

SEQ ID NO: 183789 - DNA, 379 bp, Homo sapiens
agctgacccgcttaggggctgaaaaagtataagatagggtacctgctggcaaattaccatctattatggactgaattgcattcctccaaaattcttacgttgaagctgtagcccctaatgtgatggtatttggagatggggcctttgggaggcaattagaattagatgaggtcatgagagaagcgcccaagggaccctcataatgggattagtgccctcataagaagagactccagaggacttgctgtcttcctctctccctctctcccacctttcccccctcaccctgtgaagacactgcaagaaagtggccttctgcaagccagaaagagagaccttgtaccagggaaccaagtcagctggcatcttgatcttaagc

SEQ ID NO: 183790 - DNA, 196 bp, Homo sapiens
aattacattcatacataatatggacttcagagccagtcactatttgaccctcaaaagcacagattgagtcatatataatcttcaaaacatagtccagcatcgtttgtcgaaggtatgtatggcatctcttttgtaagttaagtatgccatgtcttgcagattacttgtaaaattcttacctaaaaagctgttaatt

SEQ ID NO: 183791 - DNA, 700 bp, Homo sapiens
tcttgtttatattgcagaaaacatctgcgagagtaaatgactgagatgaaagatcttggcaaagggctatttttctttgcttggcttaaagggggacagatgaagactttagcctcatcctcgccttccccagcgtgactccctcccccagcttccagagaggagagaaatgggatctgaatgaagacagaccagaaggtggcccagccggccccagggcctcacgtccccaggcaggggagattgtttttcctgtggaacaggctggcctggaggaaaaggctccgtgggtggagaggaggggtgcagattagcatgcttctgcagggctttcccccagcgctgtccactctctgccctccctccaggccacacggtcacccttgccagcagcagacctttgtcttgggcttggtggcatgttatggaggagagaccatcccgccagcctttcctccctcccgcccctctctcctgagtggttgtgctgtgcagggagtgacatcctgggctgtacagcctctctcttactccagggagctgtgtggctttagacaagttaataacttcttgggtcctcagtttctccctttgtaaactggggataaatatacctgcttcacagagttgtagtgaggatgaaatgatgtaacaatgcatgctccacacaaaatcaggcacttaataaatggtgatgaca

SEQ ID NO: 183792 - DNA, 1597 bp, Homo sapiens
cagaattttctcacataaatactgaggaagaccctgccctctcctcactcctctggacttggccctgagctggacctggtccactggggtaggcagggcgatggggaacctgtttatgctctgggcagctctgggcatatgctgtgctgcattcagtgcctctgcctggtcagtgaacaatttcctgataacaggtcccaaggcctatctgacctacacgactagtgtggccttgggtgcccagagtggcatcgaggagtgcaagttccagtttgcttgggaacgctggaactgccctgaaaatgctcttcagctctccacccacaacaggctgagaagtgctaccagagagacttccttcatacatgctatcagctctgctggagtcatgtacatcatcaccaagaactgtagcatgggtgacttcgaaaactgtggctgtgatgggtcaaacaatggaaaaacaggaggccatggctggatctggggaggctgcagcgacaatgtggaatttggggaaaggatctccaaactctttgtggacagtttggagaaggggaaggatgccagagccctgatgaatcttcacaacaacagggccggcagactggcagtgagagccaccatgaaaaggacatgcaaatgtcatggcatctctgggagctgcagcatacagacatgctggctgcagctggctgaattccgggagatgggagactacctaaaggccaagtatgaccaggcgctgaaaattgaaatggataagcggcagctgagagctgggaacagcgccgagggccactgggtgcccgctgaggccttccttcctagcgcagaggcggaactgatctttttagaggaatcaccagattactgtacctgcaattccagcctgggcatctatggcacagagggtcgtgagtgcctacagaacagccacaacacatccaggtgggagcgacgtagctgtgggcgcctgtgcactgagtgtgggctgcaggtggaagagaggaaaactgaggtcataagcagctgtaactgcaaattccagtggtgctgtacggtcaagtgtgaccagtgtaggcatgtggtgagcaagtattactgcgcacgctccccaggcagtgcccagtccctggggagagtttggtttggggtctatatctagagggaccttcaaagtatttgttcctttaaatttcagaccatgtccaacccagctgtgctgctgggaatcaggagaatagaagcaaaaaacgaaagagttctgttcagacttctgaagagcagcctgtggctacaaatctatgctgataaatgagattgagaactcaactgtattttgccataaatgcttctaagatatatccagctgggacttctattactccctttggaaaccttaagatcaaaaagggaataagaaacccttcttctgtatcccaataatccaccaggataaaggagaaactagaaatatgcaactcccttgatttcagtgtttggcaggtaacaaaaaattgagacccagacactggtcaacaggaaaacaatacagactcccagaattagaaagtgttattttaatgcaacctag

SEQ ID NO: 183793 - DNA, 1899 bp, Homo sapiens
cagaattttctcacataaatactgaggaagaccctgccctctcctcactcctctggacttggccctgagctggacctggtccactggggtaggcagggcgatggggaacctgtttatgctctgggcagctctgggcatatgctgtgctgcattcagtgcctctgcctggtcagtgaacaatttcctgataacaggtcccaaggcctatctgacctacacgactagtgtggccttgggtgcccagagtggcatcgaggagtgcaagttccagtttgcttgggaacgctggaactgccctgaaaatgctcttcagctctccacccacaacaggctgagaagtgctaccagagagacttccttcatacatgctatcagctctgctggagtcatgtacatcatcaccaagaactgtagcatgggtgacttcgaaaactgtggctgtgatgggtcaaacaatggaaaaacaggaggccatggctggatctggggaggctgcagcgacaatgtggaatttggggaaaggatctccaaactctttgtggacagtttggagaaggggaaggatgccagagccctgatgaatcttcacaacaacagggccggcagactggcagtgagagccaccatgaaaaggacatgcaaatgtcatggcatctctgggagctgcagcatacagacatgctggctgcagctggctgaattccgggagatgggagactacctaaaggccaagtatgaccaggcgctgaaaattgaaatggataagcggcagctgagagctgggaacagcgccgagggccactgggtgcccgctgaggccttccttcctagcgcagaggcggaactgatctttttagaggaatcaccagattactgtacctgcaattccagcctgggcatctatggcacagagggtcgtgagtgcctacagaacagccacaacacatccaggtgggagcgacgtagctgtgggcgcctgtgcactgagtgtgggctgcaggtggaagagaggaaaactgaggtcataagcagctgtaactgcaaattccagtggtgctgtacggtcaagtgtgaccagtgtaggcatgtggtgagcaagtattactgcgcacgctccccaggcagtgcccagtccctgggtaagggcagtgcctgataataccccacacaagttcacttgattaattgcatcagtggaaggggacatagcttctctcttagagagaacagattggaaagcaatcggaaaattgcagttttggtctgtagtcctcatgatatctgctatcagtggggaaaatggaggcccaagattctacagcatattcctggcggggctgaaattggaacctgggcctcctgactttggcagacccccatttcatctttcctgcaaactactttcccatctttgtgcctgtacttatgcagctttctacagggagagtttggtttggggtctatatctagagggaccttcaaagtatttgttcctttaaatttcagaccatgtccaacccagctgtgctgctgggaatcaggagaatagaagcaaaaaacgaaagagttctgttcagacttctgaagagcagcctgtggctacaaatctatgctgataaatgagattgagaactcaactgtattttgccataaatgcttctaagatatatccagctgggacttctattactccctttggaaaccttaagatcaaaaagggaataagaaacccttcttctgtatcccaataatccaccaggataaaggagaaactagaaatatgcaactcccttgatttcagtgtttggcaggtaacaaaaaattgagacccagacactggtcaacaggaaaacaatacagactcccagaattagaaagtgttattttaatgcaacctag

SEQ ID NO: 183794 - DNA, 791 bp, Homo sapiens
ttatatttttcctaacatacattcacatgagtacggaactattaaattttaaatgaccatccacgtgccatctccagttttctcatgtgctaccgtttgcttcgggtttatagatttcttggaactgacatgggagggtggctaggacacagatgggtgcagtgggctggacatccagtggggccaattacgagtcatgcacccttgggcaattgacttctgccctctgagcctcagtctatttatctgtaaaacaggtctagtagctcttggagggttgcatgtagcgccatgtaagacaagtctagtagctcttgcagggctgcatgtggtgctgtgcctggcacatggtaggcattcaggaaataaggggaggggggtccatgctgccctcacaacaggaggaagtcaggactgcttcccagcacttctatctctagatgaaaaataggcctgagagccacaaagccggtaagtgaggctgccatgactgtgacctggtatcccggtgccacagccacactgctcttttcttcttcttcttcagagcatgctagagtcaaggggagagggaccactgcctgtcagcccatctcactccaatgaggcccttcaaacacccacctcagcagccatgccccaagcccaggacacgaagctccacactgaggtccacgctgtctgggaggaaggcagcctcggcgtttgccgcctctgagtaaccacctccccaagacatgattcatacctgtctggggtcacccacatcctcattccctgcaaaggaatgc

SEQ ID NO: 183795 - DNA, 739 bp, Homo sapiens
ttatatttttcctaacatacattcacatgagtacggaactattaaattttaaatgaccatccacgtgccatctccagttttctcatgtgctaccgtttgcttcgggtttatagatttcttggaactgacatgggagggtggctaggacacagatgggcaattgacttctgccctctgagcctcagtctatttatctgtaaaacaggtctagtagctcttggagggttgcatgtagcgccatgtaagacaagtctagtagctcttgcagggctgcatgtggtgctgtgcctggcacatggtaggcattcaggaaataaggggaggggggtccatgctgccctcacaacaggaggaagtcaggactgcttcccagcacttctatctctagatgaaaaataggcctgagagccacaaagccggtaagtgaggctgccatgactgtgacctggtatcccggtgccacagccacactgctcttttcttcttcttcttcagagcatgctagagtcaaggggagagggaccactgcctgtcagcccatctcactccaatgaggcccttcaaacacccacctcagcagccatgccccaagcccaggacacgaagctccacactgaggtccacgctgtctgggaggaaggcagcctcggcgtttgccgcctctgagtaaccacctccccaagacatgattcatacctgtctggggtcacccacatcctcattccctgcaaaggaatgc

SEQ ID NO: 183796 - DNA, 438 bp, Homo sapiens
agccagtgtataatgttataaaatggaattctaagttattaattgtaatctgtaggtgacctcggtattaacgtgaaaaacattcaaaacaagcaaaaaaagggacaaaatggaaaaaaattagactatgcgcgcattgtacttatcaggtttagagattaaatatattggaaactcgggatgaatcctgcccacctgcccctcttgcctgcggctggtctgtccctaaggagccgtcaaggtgcgcactgaagcaggaacagagcgacgtgtgactgagccagaaccgcccgctcgcgggcccatcctcgcctcccgggactcgccaaacgccctgactgaagggcccgcagcggaaaacgctgctgcagagcagcactttgtgctttcctttgcatagatatgagctagaaataaatgttattttctaagaaaaca

SEQ ID NO: 183797 - DNA, 310 bp, Homo sapiens
gtcccaaaaacaaacaatatttcattgcaattgcacttcaaatcccacatgtagagaaattctgtttacaggcagttttccaaatattataaactccattacagagctgttaaccaaagtcctagtatcttatcatttttaactctgtactatttgtaataaaaacaaccaattaaaaaaattttaatgagaattccaagtttaactcagataaagcttttttgtaattgcattcctgtaaatgtgctatttgttcgtatggcttgtagaaactaaatgctgctgagctttctcatggtgcaagcagact

SEQ ID NO: 183798 - DNA, 1005 bp, Homo sapiens
tgggtctggagctggttttggaaaagatcaacaaaattgatagacactagcaagactaataaagaagaaaagagagaagaatcacatagacgcaagtaaaaaatgataaaggggatatcaccaccgatcccacggaaatacaaactaccatcagagaatactataaacacctctatgtaaataaactagaaaaccaaaattaatgggaaaaatatgagcatctgtcctacttgccccggacagacaggtttgggttgactgaatagtcccaaattgataagaatttcttcttctttcagaaaagtcagccaataaatataaaaaatgactgtttaaaatatcactcccaacagattattttataatggtaaagggaaaaacaaaacctaagattagaggcccaggttgatatcagctgaatccagtgataaaagtggataatccaacatcatgtatctcagctcctcacatatactattaataggcacagtgtgaccagtgatggatttgtcccagatgtattcaacctgaatctaataaggcccttagatctgacttccagtttaagagaaatatgggagacaaaggataaaggcagaggacatccaggaagcagatggacagatgtaaaacatgacatgctgcaagaacagttaacctaatcccagcaacaaatcaatggccaaatagggtgagttgggggaagcaaagagaagagtactctagattaaaagactaataacttataacttaacaactaaaagtaatatgtggaccttatttgggtcttcattcaaagaaaccaactgcaaaatggtatgtaagggacaacccagagagtttgaatatgatggattattaggaaataccaaattctagtaattttgtaaggtgagataatggcattatagctaagtatgaaagtatttttaaaacctttatagcaagagaatttttatagtcttctttttcctcaagtctttctggctaaattttacttcattc

SEQ ID NO: 183799 - DNA, 536 bp, Homo sapiens
tcctttgggattttggctggcttacccatacgtctacacaggctattagaagccaaaatgaccctatactacgggtgaaggggggaaacagtcacaggggtttcagccagccactcttcccagggaaaatcaatcccacagagagggaggctgggccagaagccttgcagagaggccccatctacagggagagagctcagaatcagggttgggcctcccagaaaaacaacagcaagatcgtggcagagacagcaacagtgatgaatgctggaggaaagcaggaggctgggaggctgggtccagtcggcttcaggctggaggactggggagcagcagggaaggaaaggagcacagaggggacagtggaagacaactggacaggcatgccccagagcaactgtgggatgctcgactgggacctgggagaggaaagagcgacctgcagggatgccagtctgatcctgtagggtcctggccaagaggaaagcagatagagatttcacaggatgacagcctggctgagatggacagagagg

SEQ ID NO: 183800 - DNA, 881 bp, Homo sapiens
ccccaccagcccccaagaaaaagatggaccttgagcagatatggcagctgctgatgacagcagacaggaaggactacgagaagatctgcttgaagtatggcatcgtcgactaccgtggcatgttgcgcaggctgcaggagatgaagaaggaacaggaggacaagatgcgacagtacatcaacaccatctccagcttaagacacatcagggtcaccaaggatgggaatgcaaagtttgacttggagctggatctcaaggattctcagagcaagatttacctgtataaggatggtgagatgatcccctatggcttcaacaaccaaaccaagcactgtctgcgccggctggggaagcgctatgagttccagattcaagacctgaggcctgaggactctggcatttaccaggtcaaggtggaggatgctgtggtcttctccacagaactggaggccagtgccatccccccaagagtggtggtcccactggcggagacccactgtgaggagcagggtgacgcagtctttgaatgtaccctctccagcccctgccctagtgcagcctggcatttccggcaccggctactccaccccagtgacaaatatgaagtgtatgtgtcccctgacgggctgacccaccggctggtggtgaggggggcacgtttctcagacatgggcccctattcgctgggcaccgggctctacacttccagcgcctggctggtggttgaagctgggaaggataaagaacttcagtccacaagtgctgaccacaaactgcagaggcaaggagcccaggcatcaggagcagaagagtctgggagcatcgagagccagggagagaaatccagagcccttcgccccgagccatcccccgcgcatacc

SEQ ID NO: 183801 - DNA, 1464 bp, Homo sapiens
ccccaccagcccccaagaaaaagatggaccttgagcagatatggcagctgctgatgacagcagacaggaaggactacgagaagatctgcttgaagtatggcatcgtcgactaccgtggcatgttgcgcaggctgcaggagatgaagaaggaacaggaggacaagatgcgacagtacatcaacaccatctccagcttaagacacatcagggtcaccaaggatgggaatgcaaagtttgacttggagctggatctcaaggattctcagagcaagatttacctgtataaggatggtgagatgatcccctatggcttcaacaaccaaaccaagcactgtctgcgccggctggggaagcgctatgagttccagattcaagacctgaggcctgaggactctggcatttaccaggtcaaggtggaggatgctgtggtcttctccacagaactggaggccagtgccatccccccaagagtggtggtcccactggcggagacccactgtgaggagcagggtgacgcagtctttgaatgtaccctctccagcccctgccctagtgcagcctggcatttccggcaccggctactccaccccagtgacaaatatgaagtgtatgtgtcccctgacgggctgacccaccggctggtggtgaggggggcacgtttctcagacatgggcccctattcgctgggcaccgggctctacacttccagcgcctggctggtggttgaagctgggaaggataaagaacttcagtccacaagtgctgaccacaaactgcagaggcaaggagcccaggcatcaggagcagaagagtctgggagcatcgagagccagggagagaaatccagagagcagggccccagggggggctcccttgaaggggctgggccggcttctgggctccagcacatagccagcccagacagggatggccttggcagacatggctactccttgatgggggacaaagggacagctgactcagcctggggccctggacaggagggcgagggctttccagtagcagagggaagcagagccactcttcccagggaaaatcaatcccacagagagggaggctgggccagaagccttgcagagaggccccatctacagggagagagctcagaatcagggttgggcctcccagaaaaacaacagcaagatcgtggcagagacagcaacagtgatgaatgctggaggaaagcaggaggctgggaggctgggtccagtcggcttcaggctggaggactggggagcagcagggaaggaaaggagcacagaggggacagtggaagacaactggacaggcatgccccagagcaactgtgggatgctcgactgggacctgggagaggaaagagcgacctgcagggatgccagtctgatcctgtagggtcctggccaagaggaaagcagatagagatttcacaggatgacagcctggctgagatggacagagagg

SEQ ID NO: 183802 - DNA, 106 bp, Homo sapiens
ctgagtctcaactagcttaaaacacccttgactagaaatgcccaaggtcaccggtaggctctgtagccagctgagaagaaggatatttgatgtctgtgcctcatgc

SEQ ID NO: 183803 - DNA, 466 bp, Homo sapiens
gaaggcagtgactatgtcatatttatatttgtaccccaagtgcagtgcctgaaatgtgttagacattagatgctaaatgcatgatgctaaatgcatgttggatgattaaacaagtatagagcatctgcaatataccaggcatcatgttaaggcccggggatggtccctgggagttcactcacagtcttgtagaaatgagtaaatgaatatattggtaagtttgctgcattcaagtagactgaataattgttactaacaaaacaaggaatggcaacaattaggtcactacagtaattgctcaaagcacaattaacagactggagcattcaattatgtggcaaccatatggttatgcatttcaccatgttgacatcatactgtaaaattcacacattatatgaaaagaaattacgccaggaaagtacaggctaccacaaagtaaagtgaaaaacacattactgaaatt

SEQ ID NO: 183804 - DNA, 431 bp, Homo sapiens
tgagtaaactgaggaaaaccaaagaatttggctgcaaagtgacaatgatatcaaatcatctacagcatagttcatatgaaaaaggaaaatcaaatcagagttttgtatttctaactgtattctgcaacagtcagctaatcagaaaaagaagtccctaaaatctccatccaaatttgaaacaaataaaatttccaaggggggcatctatagggcaagatgcaacaaattaagtgcagactttgcactactgtaatccttacttgaggggcactcctgaatagaatgaaaaagaacagtgtggcctacggagggcatgcattactagtgtgaagaccttatctttggaagtacgtaaaagcacagcctggccatgacaaatgcccaaaacgccagacacggctgcagatcaagttgtggctttactcattgac

SEQ ID NO: 183805 - DNA, 310 bp, Homo sapiens
ttcttacaatgcagaacagacgatgcactgtctcaggtcacgcttagcctcctacgggggcacgacagaagaagaggaacatttagagaggcacagctcctacatccttggatggggagagtggggagcaaacaggccagttcacacttctttcctctgtgaagccttccttctcccagcattccctcccctcaccctactgtgttgtggccaccactctgcctgggactacagccatttgtccttctgcctctcctctgcctgagagcaaggtgagaggatcccgttcctgttctccatctcctgcccg

SEQ ID NO: 183806 - DNA, 383 bp, Homo sapiens
aaaacgtctttaaatgttttattgtttttacaatcagaatatgaatgttgtaataacacaatctaaattttctgacaaactgcacttattataaggcaggattttcaaacaatttaccacaaagccattttacatggtatatatgccacaagaaaaaagtgtcaggcgaaaaacatgtctacatacaaacagaatacaaaatgagaaattatatatttctgatgacagaaccaaaaatcatgtatttatggtaataacagtttatgatattaggtacataatgtgactgatatttgtcctataaggacacaaaagctatttattatagggtaggaagtgtaactttgcttggattcatgcacagaaaggtaccgataatatat

SEQ ID NO: 183807 - DNA, 492 bp, Homo sapiens
gcaagacagtggctaaagcaacagcccacagtctagtacagataaagaatgaaatgaaaacagacatgatgaacagggagaaaatgaagaggctaaaacactaaagaaactgaagaattggtagaatttgaaaaagggagaagtgaaagtttaagacattcattcatttaatcaacaagtattaataccttctaacatggtttagatctgtggccccacccaaatctcttgtcagatggtaatccccagtgttggaggtggggcctggtgggaggtgactggatcatgagggtggtttctaatggtttagcaccatccccctcttggtactgaatagtgagttagttctcaggagctccggttgtttaaaactgtgtagcacctcccccttctctttcttcctcctggccatgtgaagctcctcactctcactttgtgttccatcgtgagtaaaagctccctgaggcctccccagaagcagaagccgatgtg

SEQ ID NO: 183808 - DNA, 270 bp, Homo sapiens
aaatgaaccataggaaagacgtggggagaaacaggaagactcattgagaataaaacagaattataaaactagtaacaactgaacccattaatatagttattgaaaatacagtaaagaaaagccatgcaataaccataacttccctattattatgttatcaaaatatctgagactaaaatgaacatttaatcacattggttagcacgacggatagcctttttgataaaatatgctactgaccagagggttccatactttctaagttatacg

SEQ ID NO: 183809 - DNA, 305 bp, Homo sapiens
gtgtccatcttggtagagaaacatcagcgatttgaagaaaagataaacaggtgaaaatggaaagaaatttcaaggtactgggtctagcactgctctcatgttcctgccccaaaggaccttggcagcttatagcttgttaatgctgtctgcctaggattttcccatgagtcaccctacaccagggagcattaccctgtgaaaactgtcagtctgccagaaccacatgacatcataaaatgtagctcttattcacaactgaaaggcaaacaaatccactcaacacaacgtcacttaggaagtcgttg

SEQ ID NO: 183810 - DNA, 558 bp, Homo sapiens
ccccttccttagtccagagcagcccacttgtggctcctggccctgacctgtatgaaccggaaactcaggccccctcttcctgaggaggctgccatggctccagctgttgactcgctctcccctctcgtgtggaatgagtgccctctgctggccgtccctggcacagccgctcctgtcaccttggcttcccaggaaggagctcccccttcacccacccacccccagctgcctcctcctgcaaggtcagctgtgcctggataaggaggagctttgggccgggcacagtggctcatgcctgtcatcccagcactttgggaggctgaggcaggcgaatcacctgaggtcaagagtttgagaccagcctggccaacatggcaaaactctgtctctactaaaaaatacaaaacttggccgggcgtggtggcgggcacctgtaatcccagctactcaggaggctgaggcaggagaatcgcttgaacctgggaggcggaggctgcagcgagccgagatcgcgccattgcactccagcctgggcgacacagcaagactctgtctcaa

SEQ ID NO: 183811 - DNA, 228 bp, Homo sapiens
tgcaggggatgggaaaagacgctattaaaactgaaaggatgaaaagaacaggactcctcaggtataactaatatgtttcagagtcagagattatttcagatttggaagaagtcaaataatttatttcacttaaagacacacaagacccagtgttgtaaatgatctggaagataaacatagaggaacatcattaagtagagtattatcactcagctttccaggaaataa

SEQ ID NO: 183812 - DNA, 718 bp, Homo sapiens
agggggacactcttcaacccagtatctccaccagctgaagctagccctgcctaccttggattcacgttgcggggatgccccgggccgacgcagcagcaggtgcctttggctcagtatgtgggtctgctccctgtccttctctcacagccagaagctgagatggacaaactatgaacccgtgctccatcctaagcggtgggatggcaggatcttctgaaactgtgactgggcaggtggtttgaatatctgaaatcaggaccatctcagaaaagctggggtgcatcatttcctctagtttgtggctcttcacaggcagaaggtttgatattaggttgtgtgtgtagttttgaaaaccagccagctgagagtttcaccctgatttgttctcatccagtggcgaggaaagattgctttagaagcacagccgacctaaatagggatgtgcattctcctgggtgcacacacagcttccttgttgctgtttggcctgcaggaaagtaaagagtccaagttgctcatctccacgggtctcgatttttctcatctgtgaagtggctaaaatgaaggccgctgtctccaagcctgtgatggggattgactgccttgcggagaagcgtgtgtgtcaactgcacgttgccgtgtaggagctttgctgggtacgagctcgattcgcaatcagtctagtgttctggtgatgttccgacacaaaacgagaatc

SEQ ID NO: 183813 - DNA, 191 bp, Homo sapiens
tcacttagactatacaaccaataatacatccttccaaaaatttaatagattaaaatttgaatttccaagatcagactctcaaatcaatggctgtagataatgggatcgactttacctcacaagccaaaaccaacagagctctgacttactgaacatccttcatgaccacatacaaattgactcaaagcaaa

SEQ ID NO: 183814 - DNA, 416 bp, Homo sapiens
ggaggctgaggcatgagaataactagaacttgggaggcagaggctgcagtgagctgagatcgcaccattgcactccaacctgggcaacaagagtgagactccgtctcaaaaaaaaaaaaaatttagctgggcatagtggcacacacctatcgtcctaactacttgggaggttgaggcatgagaactgcaggagtttgaggttatactgagctctgattgcaccactacactccagcctgggttacagaatgagaccctgtctctggaaagagaaaaaaacaaagaattaggagacaaaaatttagcagaaagtttggcagtgtcttataaagttaaacatatagttcccataaaattcagcaattccattattaggtatttacccaaaataaatgaaaacatgttcacataatgac

SEQ ID NO: 183815 - DNA, 239 bp, Homo sapiens
caggagcaatacacgctggtaataaataatttaattaaactagtagtttactgattttaaaagtaaaagtctcttttcacatgctctcacttgctcttatcccattcttctctccatggataacgctattaacagtacattgtgtattctttaatgctgagagcttgtcatcagaacatacagaattaccttatactgtggtaggaatatatcataatttatgtaattacactgttgtg

SEQ ID NO: 183816 - DNA, 240 bp, Homo sapiens
tttgtgcaaccattcagccaggtttcggtactcatctggaggcttgacatggtgattgatctgcttcccatcatcatctgattgttggcagcattcagttccttgcaggctgttggacacagggccccagattacttgctgccctcagcttcttgccatatgggcctctccatctggccgctcatgacatggcagctcacatcttcaaagccagcaagacagacagcctcctagcaagat

SEQ ID NO: 183817 - DNA, 151 bp, Homo sapiens
tagtgctggctctaccactttgcagcccgatgacctcatacaagtcactttataacttgtgttgcatgaaacgacaacaaaagtaccctaatgtgtgtacatcagtgcaccatattgtcgctggcttgcttccactggacactgaaaatga

SEQ ID NO: 183818 - DNA, 307 bp, Homo sapiens
gccatagcatctcttatgtcagagtggccttgcctatagtgtgactgaaatgttcagatgtgggttaggagggaggaccctcttcctagtcttagagtcccagctcaccagggaaacatttctccaggaggagtgttgatggtgggaagacagggcacttagatttccgtgctctgtgtcctcttggatggaactattatggctgactgctggattagacactcaaaagttggttggcttgttctagattcctctccaccaggtagtgcttgataggcaatgaacaagtttgcttctgcaatgctac

SEQ ID NO: 183819 - DNA, 330 bp, Homo sapiens
tgagtgccaagagccaggcagagcccaaatacacatttcttaattatatcacaaagagcctttttgaaaaacactatcagggcagagaccggcacttaaactaggagactggagaatatacaagctcctgaaacaacttttttttttctttgtaaagagacagggtcttgttatgctgcccaggctagcctggaactcctgggctctagcaatcctcctgcctcagcctcccaagtagcagggactacaggtgggagctgccacccccactgagattaaataacagtatttttttcttagtggtaggtgaagctgttcttgatgtgatga

SEQ ID NO: 183820 - DNA, 312 bp, Homo sapiens
tgtatatgttccccataaacataaagtttgagaataagtgtcagcaattcacaagtatttgataaagatttgttttgaaaaattatagcaattgcaaggattaaaaacaactttagtagttgcctttatctctgctgcttatagatcaaaactaaatcaaatacaggtcaaatcagctttttcatcagaatcataatttagtgtgtagttagaaagtagaagtagaaagtttcaaaagccctttgaaaaaaataggtcagtaggctaagtataactttatcaacctaatttatacccctgggataatatcag

SEQ ID NO: 183821 - DNA, 215 bp, Homo sapiens
acttgtccactggtaaccttgagtgttatggaggcgtcagttacaaagctgatgacccactctgagccaggatattctttaatgccagggacagtgattgtcctgcttacagagggtcaagatgatcacaatatgtgagtaattactatttttggcaaggtcaggggaggggtaggggacagtggtgaaatcaaaaatgttcagtttaccacaat

SEQ ID NO: 183822 - DNA, 242 bp, Homo sapiens
ctatcactttcattgatctatctttggttgtgtggcttgctctaaagcttcccagccagcttgctccctgatttggcccaaatcactcccaagccactgagcttctggtgaaggtagtaggaaccttgccttggtcagcagaggccacacagaatagccctttcttaaatattcaagatcctctgtctgaagttgttcttttcctggatggtcaaagatcctgaggaattctctgacagcag

SEQ ID NO: 183823 - DNA, 209 bp, Homo sapiens
tcccttgagtaattcataaaatccactcttttaacctctgaatcatcccttcatttcttgctctaagtaaaatctagctccctgaggatgccttttcctttcgcagccatctcaaatgatagatgtttcctcttttctcctccacacacttcatatcactgtacctactggagatgtggggaagaaatcttccctgctctggctggcgc

SEQ ID NO: 183824 - DNA, 340 bp, Homo sapiens
tttgccctgtcagtgtacacccttaaccattaccccacgctacctctccgggtgggatggatggatggatggggaaaaacgttggtgataaactgcctccctgagggacccaggccttgtcccaggaagtctcagagcaagccctggatgggagctcacacataggtgtggcagtggggccagagccatttacactaagaagacctctcctagctctctgctccctgccagcctcccctggctggacttagaagggcatgagaccacatctccagtagattggaagtatccccattaggggacacctgatagagacactagagaagagggcacagaatgg

SEQ ID NO: 183825 - DNA, 423 bp, Homo sapiens
atctggtatgcctaggtatatgtcgtgcgtgtgtgtgtgtcatatctctttacttaacagccaaaacaatctcctatgttaccttcagccattgtttcccctcccctataaatacatcttcattgcaagcagtttgtgggtgagaaaatgcctccattttacctatgttcaccagttagttacaacctgttgggcatacagtaggtgctaaataaatgactgacttttaagcctcaaaacttaactatagataagtgttccgaacacaagaagtagaaaactcaagcgatatgggcagccgatgaaaattaactgtgcacttatataggcagatgtaattaaaaatgaggggaggagaagagaggaataaacaaaaccaccccaaaaactcatatcgtgtgcacgacatatactgaaagtgtc

SEQ ID NO: 183826 - DNA, 291 bp, Homo sapiens
taaaaatctgcgtaaacccatgaatcaataatttacaaataatcaatgcatgatattgcaaagtcatgcataaagatccatttaaagatagactagtgaattttaacacaacagaatatgaaaagttaatatataaggtttcagattccacactgcaactaacctttaagaatctgccatttcttgagttttggtgtcttatcaaggaagaacagttacgatagctgaaatggttatggaaactttccttcttttcccaactgtgtataagagtgaggccagattttcctc

SEQ ID NO: 183827 - DNA, 760 bp, Homo sapiens
gtgtcataggagtagggagaatgaaacagggagatggatcagaggttgatgttggagaaggggttatcagtttggtttgagcaatggaaaatgttgtgaaccatgctttgtgacatggttcggggtcacgatgtcaataggttgctgaagtggaattgaggggaaagctgttggaatacagatgaacaaccaaacctcaaggctgagatgttggtgattcatcttcagggacattgaaatcacctagaatcaggtagatggttgggtaaaactgtgagtcctgcagcaactcacccaaaatgcaacagtccaccatgatttacaatttatcctcatcttgatgagatggactgactcatcttactccagggcattctgtaacttgattgagctttctaaacattttaatcaaatcatttccctactctccaatcatcagttattctatgtgccatcagacgaaactctataaattccagatgagtattgacaaccctctagcagtcaacctataatatcaatttatctgtagcagtccctatactgatcctccatgactcccgtcaagccagtctccttcccctccatcagacaggtgttccttttgctttgactcacgttgatccctcagcctggaatactcctcctctctgagaggccaatccagatccttcccttgtagctcaacttgagatgcctctctaagtggacaaatcccccttacctacctccacctcctaatcccatcttgtactactct

SEQ ID NO: 183828 - DNA, 218 bp, Homo sapiens
ttctcatctgcaaaatcagggtgattcttacctttgcttggagattggatttttgggtgggtcaaataatataactatgagaaagcacattgataatggaaaaatgcttttcaaacatgaactattattttgaaaacctacgtttgtacatttcctgttttgattccccctgtatgtgtatattctgtaggactttcttgtgtgcacatatttgattc

SEQ ID NO: 183829 - DNA, 597 bp, Homo sapiens
ccaccggtaaaatatgccctggtcccagctgcctccactcagactttggggcatggaccagagttcctttgatgtcaatgaatccaattctctagaaataccttttccagtttggagtaccccatcctcccatgcccagaccttgaaggtccaaagtgctccctggagggcctttgtccctccatacactgttgtctggagcctttgatgaagccggttattgggctggctcaggatcaagtcccaacctgaaaggtcatgggagacagtttcatcatagcttggaatgggtccgttgggaaataacttgccctcggtgtttataggaacagcatcagcatgatctggataggaagtgagtgccacaccccttcctgggtctttctcttgctatctcgtagtctcccaaatttcagattttggcctcaaatttttggaattttgccattgtcacgtactccctgcactccaagttacttggcatttttctttgagttgctttacattgtaaacttaaatagatataagttaaacagagagctttctaaaaaagtcataggctttaataaaaaaatgaaaatcacagccaggtgtgat

SEQ ID NO: 183830 - DNA, 436 bp, Homo sapiens
agacggcttcaggaggagggctagcgcagagaaagcaacacttttttttaaagcaaccgtttttttttttataaacggagtctggctcttatagcccaggcgggagtgcaagggcacaatctcagctcacggcaacctccacctcccgggttcaagcaattctcctgcctcagcctcccaagtagctggaattacaggaatgtgccacaacgcccagctaatggtggtcatttctagtacaaacggggtttcaccatgtgggtcaggcgggtctcaaattccctgtatctttaacctatcccccacttttagctccttcccatcatcatttaaattactcaaacttcttctgttttaaaaacctctccctaaactcagtgagaggtctcctgcacacccattgagccatctgctctccctggtgccttctctacag

SEQ ID NO: 183831 - DNA, 345 bp, Homo sapiens
tggagtgtcactgtgtggacgccctgctagaatctctctctcctggtcattctcctttcctctgtgcccctagagccccttgccctacattggaatcccccaggaatggggcccaggctcccttgcctctgccccctggtacagatgggcatggcctggatcagctaatgcccagattccctttcctgtggggctgcccctgccagctgtcttgaccaacctcagtgagtatcagcaactgctcctgcagacggactgtgtcctgagcctgggcaggggtctcagctgctggcatggagactctgggtcccgaagctcctgggccctgcctccatcccagctctg

SEQ ID NO: 183832 - DNA, 410 bp, Homo sapiens
agacgcgacagcctctatcatacgtgcaatgcttccgtcacagtggataccgagcgcaaaatttgtagtcatgcacatagttagttatcctgaatttctatattgtgcattcttagtgtttacacaattgatctttagctggagtaatgaggttgggaatccttgccagttttttgattttaggaagaaaccattcagtcttttaacattaaacatgatgtttgctgcaggtttttcatagataccccttctcaggttgaagaaattcccttctattctgagtttgctgaaaattttattaagggtaaatgtaggtttttgccgaatgttatttcagcatccattgagataatcatacagtttttcttttttaattggttaatatggtgaatgacagtacttgagctttg

SEQ ID NO: 183833 - DNA, 426 bp, Homo sapiens
taaagacatacccgagactgggcaatttacaaaagaaagaagtttattggacttacagttccacgtggctggggaggcttcacaatcatggcagaaggcaaggagcagcaagtcacatcttacatggatggcagcaggcaaagagagcttgtgcaggaaaactccccccttataataaccattagatctcatgagacttactacttactatcatgagaacagcacaggaaagacctgccctcatgattcagttacctcccactgggtccctcccacaacatatgggaattcaagatgagatttgtttgggggcacagccacaccatatcaccatgtatgtctctggctacacttaggaatgtctcatctatttaagttttttttaagctctacatattagcttcagaaagtacaaataaaaataag

SEQ ID NO: 183834 - DNA, 562 bp, Homo sapiens
gcagtgatgacggtgatttgttgagcacagttcacatgtgaggtgtgtgctaagcctttttacaactttcttaagtttcctaacaactcatacagcagctactaaagtgatctccatttcagagataagaaaattgaggtaagtaacagctcaaagtcataaaggtaataccctgagcaaagagaatcagagaggctggcccttgctggaggaatctagcctggggaatctggtgctgggaaggcctctgacatgctctgatatcatctccttgatttaaagcaatggtgaaggtcatggccaaaggtatcctgctgatgagtggtggagctgcagctagggcccaggagacccaaaggtcaggaaaaaggcaagtgtagtgtttggagagtaaatggcacccccttccagcttttccagtcccactaactgaattatccagaaaggagagctgattgcctccctgtaacagctgactcacatcaggttaagtttggattcttattgacaggacctaaaagcaaatcatccctcacttctttattgtacatggtcttctctt

SEQ ID NO: 183835 - DNA, 497 bp, Homo sapiens
gttcaagagtttggctctatgggtaaatctgcaccattaaagccaaagttcataaagcaactatggaaagcttctatcttagtgctcccaactgaaaaagagtgactgatggcttaagtatttttataactaaaggaaaagtgattagtggattgagtcagagtcacataaaagaaaatttgagctctgtaccgcttgcttgtgatttatttatttctatcatgcagttgccagtgctattaaaataatgtcaaagacataaagatgaatttaataagctattgatggtggatctgacagtgggttagtgcctaaagtagtgaaatgtcagggtaaagtgcattatgtgctgacttgcatcgttaaagtgactccaggcaaaccgagaagcagccgttagacttccttcagatgcactaaacggctgctcttccgctaaaagctccccagctcttatcctgggataatggatcagaactgaaacatctatgtctaag

SEQ ID NO: 183836 - DNA, 183 bp, Homo sapiens
actctgatgatagcatggacacataattaagcatgatggatttttttcttgagtagatacattcgctttttatgtaaagagttaagagaacaaccaataagctgatggcataattcttaaacatcttgcacacttaaaaatattattaaattggtaagtctaggattctcagatccttttgat

SEQ ID NO: 183837 - DNA, 507 bp, Homo sapiens
gaaagccttgaatgtatagctcagcttgaaagtgagaaaagacacccttacatgctaaaaacaaaacaaaacaaaaaacaaaagcaacagccagaattcagagtgttgcagagtagaagcagaacaggacctaagtaggtggcgggaaaggagacattttcagcaggatgaattgcaagtgagtttatatccatagaaccttacaggacaggcagccattctatgtacctgagctttgttttatatctggatgcaaggccctggaactagggcataaaaagttgcttaatgactgcatgcttttggaaccccttcttttgtggacctccaaggtgccacataagctgctttggctttatatattttggagggtaactgatggtagagaccatccagtaagtcagtgaaggacaggggtccctgaagtcactttaaactactgtggtctctacaggaaacaaaggaaaaaccaaaaattagccaacaggctgtttaataaaccaagtg

SEQ ID NO: 183838 - DNA, 466 bp, Homo sapiens
gaaatgaccacagatgatagacagccacaaaattttggacatggcaacccaagaggagagagggatgaggctacaggaggaggagtcaaccagaagaagcaaaccaatttatagctcagaatccccagaaagtgtcaggaattgaggatgccagctgcctctgaaggcaaattgaaaacaagacaatcaattaaaaatctttgtaaggagtaggcaaattctgaggtctcctaatcaaccctttgtggccaggtagccaactctccctactccagcagagcaccaaagatgtcctccctggagatgtggatgaataggtattccagacttgggaacaccagacacagctgaggtaccacaattaaatggagaaactaagcaaaaaatcacattataaacaaaaaatctgacccaactccacgcccttctttatgtcaattctcagaaatactgcattgtcattaaa

SEQ ID NO: 183839 - DNA, 431 bp, Homo sapiens
aggctagggtgcaatggcacaatcacagcttactgcaacctccacctcccaggctcaagtgatcctctcacttcagcctcctcagtagctgggactacaggtgcatgccaccatgcctggctaatttttaaaaaaaatttgtagagatggtggtctcgccatgttgcccaggctgatcttgaactcctgggcttaagggatcctcctgcctcggcctcccaaagtgctgggattagaagcataagccaccgtgtctgccccaccccttgcatttatctgtggaagaaacctacctgattgctgggttgtttcccgtcgtctgaattttgtgctcgcctctctgtagtgtgtcattggaggaactctcaaatgccaatacatgtagttcttttctcatgagactttaggattccccagtgaagagtcttcag

SEQ ID NO: 183840 - DNA, 365 bp, Homo sapiens
ggaggcaggaagggaggaataaagcaaatgtgacaaaatgttaaaaatgggtgaatcagaataaaaagtacataggagttctttgaactattcttccaactcttctgttagttcatatttatttcaaaatttaaacatttaaacacgaaagggggaaagcaaaagctctttattacagaaaacagttaatgaatataaacaaataacaaaattagaaaacccccaataaatgactcagctaataatcatcaatcattaagtgaaaaatattttgagaagtgaggtactcacatgatgctaaagttatcaccccacagatcaagtataactgcaaagggaaaaatatacctctttgatgaagaaat

SEQ ID NO: 183841 - DNA, 467 bp, Homo sapiens
atttccttccccaaatctctagactttttggccagtgctccttttatcatcactttataggctgtatgttttttcgtttgtcacctgtatttattgtattatggtttatattattctgtcattaaagtgtttctggaagaggtatttgctattgaagcaaaagaatagcataatgtagctaagttacaacaaatggaaaccccatagccataaataatttctaattatgtgccttgacctcccactgtatgggcattaagcatttcaaataagagttgctttgtgtgtgtgaccaagtttttaactgatgagaatggaaaccaagcatcctgcatactctgttggagtcagtgtgaatggcattggcttttaatttctattggaaatgtctgtatcctaaatttcaaacgtggatgtgagtactggatgaagattttaagtggttattaaaatattaattttcagtg

SEQ ID NO: 183842 - DNA, 233 bp, Homo sapiens
gtgccctagttgtacattcaagttaatacaacagattttaattagaaaggaaaagcacacaaaatgaaaggtcttactgaattcaaatctcattaaaatgcaattctagaacttgccattaaaaacaggtacaggctgggtatggtggctcacacctgtaatcctagcacttttgtgaagtatgctaggggtaccgagcttccgaaattttccggtacattcattggtcatta

SEQ ID NO: 183843 - DNA, 427 bp, Homo sapiens
aagagactcgaaatccatttcagtcacaaacagagtcgtaggagtacctctaaagaaagaaaatactttcacaaggaactgtagaagaggagtagggacatagatctgagctttgggaattacttataaataaaagtggaaagcaggtggggagagagcaattaaaaagacagagaaggggccaacttacaatttcatgaatagagaaagcttccaggctttccaaatgctcgtgttacacctcacacccaatggcttgccccatgacttcaataatgtgttggtttctctgtgtcttttctcacaaggttactgagatactaaatcagaagggtttgtgccaaacttgtgctgaaggctgataatgtagggagcattatgaattgtttcccagcttacattttggtctttgtgtagagtttgcatg

SEQ ID NO: 183844 - DNA, 307 bp, Homo sapiens
cttttcctacccccatgtttaaggcttttaagtctccttttaaatcatctccctccaggcaattccctctcaacatcctctcaccagcttagggaagccctcccgatgagatttaggagatagacaggtcacatgactatctctatgtggattatttctacataagaaaaacatccagtttggattgattcttaacagcattaatcttggagtttcaatttttcaaaataacgtatcaaattttgccattgttctagcatatggtgcaatataaaatggtcgaatgatatttatgcagggaagaaag

SEQ ID NO: 183845 - DNA, 2048 bp, Homo sapiens
ctcacagatggttcacatcagaggattctgtgcagacaacctccagtaccagcccagagcctggtagacttgctgggttgctagatccagaagagagataacaatctttacagcttggctctcaggaagccacatccctaggaaaagggggagagtactacatcaagggaacactccatgggacaaaacaatttgaacaacagcctttggccttagacctctgtgacaaatgagaagaaaccagaaaaccaactctggcaatatgacaaaacaatgttcttcaccacccaagaaaaaatcacactagcccaccagcaatggattccaaccaagaagaagtccctgatttacctgaaaaagaattcaggaggttagttgttaagctaatcagggaggcaacagagaaaggtgaagcccaatctaaggaaataaaaaaaaaagatacaagaagtgatgggagaaatactcaatgaaatagatagcataaataaaaaatcaaaatttcaggaaacaatagacacacttatagaaatgctaaatgttctggaaagtctcagcaatagaattcaacaagcagaagaaagaacttcagagcttgaagacaagttctttgaattaaccaaatccaacaaagacaaagaagaaagaataagaaaaattgaacaaagcctccatgaggtctgggttcacgttaaactaccaaccctaagaataattggcattcctgaggaagaagaggaacctagaagtttggaaaacatatttgggagaaaaattgaggaaaacttccctagccttgctagagacctaggcatccaaatacaagaagcacaaagaacacctgggaaattcattgcacaaagatcatcacctagacacattgtcatcagattacctaaagttaagatgaaggaaagaatcttaagaactgtgagtcaaaagcgccaggaaacctataaaggaaaacctatcagattaacagcagatttctcagcagaaatcctacaagctagaagacattggggacctatcttcagcctcctcaaacaaaacaattatcagccaagaatttgtatccagtgaaactaatcttcataaatgaaggaaaaatggtattttttagacaaacaaatgctgaaagaattcgccactaccaagccagcactacaagaacagctaaaaggagctctaaatcttgaaacaaatcctggaaacacatgaaaacagaacccctttagagcataaatctcataggacctataaaacaaaaaggcaatataaaaaaaaaaccctcaaaaaacaaaaaaaccaaggtatacagggaacaaatagtatgatgaatgaaatggtaactcccatctcaatactaatgttgaatgtaaatggcctaaatgctccccttaaaagatacagaattgcagaatggataagaactcaccaaccatctgctgccttcaagagactcacctaacacataaggactcacataaacttaaagggatggaaaaagacattccatgcaaatggacaccaaaagtgagcaagagtagctattcctatatcagacagaacaaactttaaagcaacagcagttaaaaaagacaaagagggacattatataaatgataaaatgtcttgttcaacaggaaaatattacaatcctaaatatatatgcacctaacactggaagtccctaatttataaaacaattactaatagacttaagaaatgagatagcaacacaataatagttggggacttcagtactccactgacagcactagacaggtcatcaagacagaaattcaacaaagaaacaatcagtgtaaactataccctggaacaaatggatttgacagatttatacagaacattctacccaacaaccacagaatatacattttattcaacagcacatggaactttctccaagatagaccatataataggccataaaatgagtctcaataaatttaagaaaaacactctctcagaccatagtggaataaaactagaaatcaactccaaaaggaaccaccttcaaaacc

SEQ ID NO: 183846 - DNA, 511 bp, Homo sapiens
tgttggccaggctggtcttgaactcctgacctcaggtgtttcacctgccttggcctcccaaagtgctgagattacaggcatgagccaccgcgcccagccttggagtgatcttattctctgcccaacattatttcctctgttgcctcaccaaagagttctggttaacatttcctatttcagcgtctctcttaaatagcaaacagtccagaaaagacctttttgttcttcaagatgttttagtccttgtatggagcagtttggagaaggataaatttgtataactaagggtaggtgagggctctaggagcttagaagagggaaagtgctcataagttctctcataattattttggcatcagcgctgaaaagttttctcatctgtaaacctaatttgaattattttggcagtttcctctattaacttctgattaggggagaaaatattgggtataaaatattaaagacatagccagaaagtaaaaaatactgcaaagaatcagggctaggttag

SEQ ID NO: 183847 - DNA, 504 bp, Homo sapiens
tcatagctgtgtctcttacgctgttctggatggaactgatgaggattcctccccaagtaacactgagtctccagttctttatcctgacacacactgctcttgaaagcatcctagtaagggttaattagtatttaacccttcaatgctctgggatcatcagttgggaagcttgtccagataccatcgtgtgtatctcaggatgagaacatacgttatcaatgaccattctgtgtgtgtaaatttattcttctaatacatatttgtcatgttccaactatgtgccagcctaggcatgtaatgtacaagacagtcccaaatctccccctgctctccccacctcctactccctgcaacacacacatggtggaaaaagaaaggtaagtcatgcaaaattatgatagagtaggatgaacattatgacaggggtatgccagaggtgccaggagtgcacatagccgggacactgacccagccccagtgtgaaaagggcacccgtccagaagt

SEQ ID NO: 183848 - DNA, 444 bp, Homo sapiens
  misc_feature (86)..(86): n is a, c, g, or t
  misc_feature (88)..(90): n is a, c, g, or t
  misc_feature (93)..(94): n is a, c, g, or t
  misc_feature (96)..(96): n is a, c, g, or t
  misc_feature (101)..(101): n is a, c, g, or t
  misc_feature (104)..(104): n is a, c, g, or t
  misc_feature (106)..(106): n is a, c, g, or t
  misc_feature (108)..(109): n is a, c, g, or t
  misc_feature (111)..(111): n is a, c, g, or t
  misc_feature (116)..(116): n is a, c, g, or t
  misc_feature (158)..(158): n is a, c, g, or t
  misc_feature (185)..(185): n is a, c, g, or t
tattcaaggtggctatacagaaggctggaattgccagaattactgaaacagctgtcttttggggggtagatttgcatctgtagagnannntcnncnttaancancntnngnttgcnctgaggccctccaatatcaagatataggaaagatgaaccgantgtctgacacctttaaaggtctgaaanaaacatttaccatcaattctctctgagggctgctacctgtgaagtataaaatataatcccggttcataagtaactcatagtctagtggtagggggtttgaggtgggcatgaagatgtattagtataaggtggaagctattgccacaatagatgagttcatccttgaatattcatttatttgactggaagggaatggtgagttattttcacacggctcccgtaagatatagtgacccaaaaggtcagtctagactaatag

SEQ ID NO: 183849 - DNA, 432 bp, Homo sapiens
actaaagatagctttatttataatagtacaaaactgaaaacaaccaaagtgcctctcagtaggtgaaattgctaaacaaaccatggaatattatataatattatattcataccatggaattctacttagtaatgaggaggagtgaactattgatacttgcaataacttgaatgccttttaagggcattaagccatgtaaaaaaagtcaatttcaaaagacttgtatgtttccatgtaggtaacatggcaaaatttttcagctgaaaaacaaattagtgggtgttaggaatagcgagaggaaggaagctgagtgtgactataaatgggtagcatgagatctttattgtagtggaatggttctgcatcttgattttggtggcgattacagaaatgtacgtgtgataaaatggcatagaatgatacacattgtac

SEQ ID NO: 183850 - DNA, 305 bp, Homo sapiens
ccaggagaagcagacggaactgtaggagcaggcatttgacgagcccagtgtggccaggctgttccaccctcgctcatcagcttacccagtgcccacacacaatgcactagctcctgcctccatgccttttctcatgccctcccacccacctggaatgtcttcctccttcctatcatccgtatctcccaatctggacaaggtccagcttacatctaactttctgcaaacataactccaatcatgattgtgaggctattacttcagtatcaatataataaatttgcacaatgtcttcatatttgcac

SEQ ID NO: 183851 - DNA, 842 bp, Homo sapiens
tctactggggtggtatcagcaagctaaatggtgagctgttcttccatctctcagtcagaagaagtgggcagcattccaattctgctactgggtggtatcaacagagccgagtagaagctaaacttccagcccctgctcagctgaaacaagcagtacttcagttctaccagggtgatgtcaccactgccccacaaaatcagacgatactttaattttctagctggggtgttataaggagaggaagggagagtttggagctgaaaaaatatctgaagaaataatggttgaagtttccccaaagctgaaatggggaaaggcgtgaactcacagattcaagaagctgagtaagtcctacacaggataaattcaaatacgtctatgccaagtcatatcataattttttgaaaatgaaaaaataaaaaataaattctaaaagaaagctggagagaaacaacatattctcatagagaaatacgaagtttgttgacagctgatttctcatctgaaattatggtggccaataagaagaggcacatttttcaagtgctgtaaaagaactgtgagtcacaaattgtatatccagcaaaaatatccgttaggaacaaacagcaagtaaagacagtctcaaataaatgaaaacagattattttgcactggcaggcctacccttaaagaatggataaagcaagttatccaaggaaatgatgacaaaagaatgcttagaacttcagaaaggaagaaagatcaatggaatggataaaaacagaggtaaatatgacaggctatccttctcataagtctcttaaatcatatttgatggttgaagtaaaagttgtaacacc

SEQ ID NO: 183852 - DNA, 189 bp, Homo sapiens
cccctgtcatttgctgccactctgaagccagagggaacttagaaaaacaatccgcttagatctaccccacgctgaaaatcgtccaccgaagtcccattgtcgtctaagtccccaacttctcagcagggcttcctgttatcttccgccactaccttctccagcctctctctgcctctgttctccctccct

SEQ ID NO: 183853 - DNA, 243 bp, Homo sapiens
gagtcactgtgcccggctgctcacccagctatttttattttttggatggggtctcactatgttgccctgggtggtcttgaactcctgagctcaaggaatcttcccaccacggcctcccaaagtgctgggattacagccctgagcctggcctcactgtggtctgttttgagaagcctttgtttttaaacagaaccacatgttggtatttcagagccaactcttctgtcaagaatccaaatcagc

SEQ ID NO: 183854 - DNA, 1155 bp, Homo sapiens
accactgcgctccagcctgggtgacagagcgagactccatctcaaaaaaaataaaaataaaaataaaaaaagttttgaaagcctccaggaatgggtgtctggccattttgaggcaagaattttcccccatggaactctgcccatccacgtaagaacaggacttgttttacagatgtttgcatctgtcaatgcagggacccctggctagcacagcataccccatttggccccacaaacctgtccttgtctagctagagtggaaagaagggagacaatgagaccacttgtgatggagcactgcaggaagggattcatgcactcacagtggagtcaccgcctctacattgcaagagagatgggaggcactgatccctgccctggtgtcctgcactgttcagagctacaggagaaaaatgagcaaaatcgcaagtatggaccctttctgcctgccccctgcacaggcaccagactcggtaggttagcactagttcctgcaggggcgttcagtgctttctttaaaaaaataaaataaaataaataaaagacaaaaaaacccgctaatggcttgatatgaatttcactcattatcttcccatagcccttaaaacatcattaagtattaaattagcaagctgaacttcctaagaggagcaagaataatttgaactctggattttaattacttatcttataaacttctatcatgtgaggtagagtgaagagccctgtctacacccctgtggactttcaaagcagctatttaagatttcataagactatccattgtgactacagtgaataaattgtggtcaagggagtgtatcgatcaaacaccagaaggctcctctcagcttctgtcgcaatcttgcacaggagagaactagacctaaacaggaggaagagttgataagcagtaagcgaacgaatcttggttctgaaaagaacagcatcatatgtaaatttcaatttacatttattagaatttgctcagtaaattgtgctctacgatggagtcaaggccagattgggctctatttccacaaccccctaaggagtagctcaccagtgtcctaagtggctgtttcctgggtgaacatagtacatatttgctgtcacgctgggaataccagtgagaatctcatgcatggacagagg

SEQ ID NO: 183855 - DNA, 133 bp, Homo sapiens
cctcaagcatggccagagcggatgccaaggccgaggaggtgctgagagcgagcaagggctgctagcacgttgtcacctctcactatgattaatacgttaagagctctaatggaaaaagtagataacatgcaaa

SEQ ID NO: 183856 - DNA, 525 bp, Homo sapiens
cagtaagatgtgctgtctcagaagccacacaagcaaaaagaatcctcatctccattaggttctttgaggttcctgtgtgctgaaattgagtaatgtccttagaaaatccaattcaccacagtaagccaacattttgaatcaattctaaaccacgatgttgtaacagacggcactattttacctcattcctttgcaatgtttccattagtgaactgataccttcatatttcatcacttttaaaaccatacttgcagctctgctatttggaattccaagattgcatgcatgccctcactgcacaaaaattctctcactaagaaataatgtacaactccaacatcaccattttgggaataggagccttccctcagcctgttcattggagctcctccttttcaccctgcctgttcacataagttccagtaaagtggactcttctacccacaagttaatctactcgtgttccaagctgatggccatcttatctgtgagtcaatggaatggattcagatactctcttttta

SEQ ID NO: 183857 - DNA, 333 bp, Homo sapiens
gtcttgaaaagagtaattttctcttcactgtttattctttactgttggttctcattttgaattaaattttcctaaagcagcaagacagaaaacaatccgcccctcccccccatatctgcgggttccaagtgggaagattcacccaactgtgaatcgaaaatatttgggggaaaaaagcaataaaaataacaatacaacaattaaaagtataaatgaaaatacagtgtaataactgtttccacagtgtgtattatattaggtaatatcagtaatttagagatgatctaatgtgcatgggaggatgtatataggttatatgcaaatactacatca

SEQ ID NO: 183858 - DNA, 736 bp, Homo sapiens
tgttttaaaggtatattattcgttagtatttccaggaatatgctgagtatggtagtgtccaggagagcatttagcataaatgaaacaaatctatttagcctaaagtacttcctaaaagtaggctacagcatagtatggtgatcagaccaaaaccttgatttgaagatgtgcaaagaggtgggcagaacaagggaatgttatgcaaatgttattttggttaccattcccaatttagctaaagggctgtaaccatggcaactgggcccaaataaagggcaatgatggtcagctttcttcctgtggtgataaagctattgtcaacttttgtatggcatgaggagggaaagaaaaatctgtttattgatgccaggaacagccaaggtacttaaatatttcaatggctattacagattcagcaaaatctgagaaatacatttaaatgaaacctcacaaagtgacttctatatgttaatttgcacgttaaaacttacatacacaccccacaataaaaactatgattaagaaaatcgtttttctagttagaacattttcaatacttaatagtgtcatgtaacttttcaaaaacagaatgccatgttggcacctctgtcagtcttacagtagtgagaccagtacacatatcttttggctagtatttcattaaaatgacaaagaaatcactgaaagtggtagtgactcccaaatcattttaaagatgccaaaacttgttgacctg

SEQ ID NO: 183859 - DNA, 312 bp, Homo sapiens
tactcataatttcacacctctagactagaagcactgagatacagtggtgtgggagtctgtgaaggcattttcttagctattaccagatgaactaaattaagaaatgttaactgtaaaaactcagacaaaccaaacctgctgggtgagggaattcctgtctctaatgcttccagatagcccatttggcttgtaagagtggatttgagacctttataaatttaaattcaaaaagagaactaaggaatagaccccttgctttgcaactagacagatctgggctcaaatccagctcatgccatttggccaagtatt

SEQ ID NO: 183860 - DNA, 530 bp, Homo sapiens
atgtaacaaccctgataaggctctgtaatttagccctgctttacaggtgaggaaacttaagacacattaggggctaggcagcttcccaaggtcacctaggtaagtaagtagcagagccacccaggaagtactcaaaagaaagattgttggtttttcttccctagttggcctagggatgataaacatggcatgattagttatgaagctgcggtagcttgagagttagagctctttgcgttctctgtcatttcttcccatcccaggttgtctgtttggacagtgtagcccctggctacgtggaggtgtgtcatggagttagttggtgcatcctgctcatactactggtcattggtagaactggagggtaggggcactacttgaattaaaaaaaaatttcttttggcaggtcagctttctcaaatacaaaagcaatgactctgttttccttacattcacttgtatttgcttaatgggctttaaaggtgtgaatgaatccaagtcttattaatttgggggcctttaattcttga

SEQ ID NO: 183861 - DNA, 312 bp, Homo sapiens
aaaaattgaagattattttactttggggggatagtaggggagaaatgactagagaaattgtagtatacagtctgcttgcccataagagggttaatgtcagagcagcctctagttcagaggttagtgggttagcagactctttttgcaaagaggggacactatatattttagactccacaggccacaaggtctctgtaacatactgttttttgtttggctaatggtttttttgttttgtttgagacagagtctggctctgtcacccaggctggagtgcagtggcacaatctcgtctcattgcaacttctgcct

SEQ ID NO: 183862 - DNA, 496 bp, Homo sapiens
agattaaatattcctagagggcagggactggacctcattcaccttcgtatggaagcagtgtgggctagagcatcttgcccatagtagaggattaaaaatgaactgaatgcagtgttgtctcaggaaccttatcccaaatccactgcccaagttccaagttggggaatggatccatttcatagcaggaattctaatcgttgctacgaggtcccagtctaccaaaagaggctgggaatctttgttttcctattcccttgcaatccatatggaggttgcaagcaaatgaccaggactgggctgctggcagtgaagctaaaaatagccatgaagccaacagcgtggagttagcaggacttgttgctaaggagaccagtcgcagagagagcaactaagcagggggaaggtgtcagatgtgcacccggagagcagaggggtccaaaggctcgcacctagcggtgttctgccttctggcagctcctggctgatgctctaagtg

SEQ ID NO: 183863 - DNA, 438 bp, Homo sapiens
ccatctgaaaacaagacagggttttttaaagttttttttaacctcttcaattcatcttcagtgtaattcagcccacccactcatagtcataatgtataccttgtcaacacacaaaaaatttcatatatcctaatcaatttaccaacaattttagttctcccagctctcccccttacttctgctatacctgtttctcaaacccaaagaaaacccaaatacttttctttcatcatcccccatttctcttaatgttcttgtcttccaatccattcagctctgctaccagtttcatcccttcaagcactgtatgccaaaatctttgactctagagagtcctaaatgtgacagagattgtcggggaatggggggtgggcaggaactgcattaattcttcacatacttcctccactcctacatcaaagctactaatgctgctct

SEQ ID NO: 183864 - DNA, 434 bp, Homo sapiens
tccacaaaggctacatagggaaaataaaatgtccttaaagagaggattaagcaagtcaagagccatacttaggaatccaactgttcaagaataggtatcatggtcttcattgttgacttatgataaagatcttccctatcccactcaccctatgctagattaatggttttccttagaagtcttagaataaatttttcttctgtttttcttattgatttgaaaagttgggatatttttcaaataaaatatctatgtacacttgagtaaatggactctgggctctttctgttatgaaagttttctgaaggaaatagatgaacaaagaacgtatattttagtttccataagttttttggttgcatctttctaaacagagtccatttttaattcaaaacttttgaattttgagtgctcactttgtggattatttagat

SEQ ID NO: 183865 - DNA, 590 bp, Homo sapiens
aactttagactccatgccacacagtctattagtagatgttgcttgtgtgaagcataaaattaccacctgtttagttcttttaggcaacagatgcaatcaaataataatctaagcacatagttaatattttcaattatcacataaatcatctccataatgtctccatcactataaacgctgcatgttttttcttaccctgcactatttaagttcccaatagaagtaccatgacagtagacttaattttttcataccaagatacccagcaacacttttcaaaagatcaaattccttcatgttcctgcacaaatttaaattaatttttatattgttaatacacttcaaaaatatatttccataacatttttgttgagcacagtagaaagtaccattttaaaatacatttttcctaaaaagaaaaaaaaaaaaccaataaaacaaagtcacgaataaaagccctggatttataaatgtgccctttgagcacatctacgcagcattctcacttctgctgctcactcaactagcattctcccctctgctgaggctttgaagaatttaacacagtaattgctttaaaacaatggctt

SEQ ID NO: 183866 - DNA, 251 bp, Homo sapiens
atggtgaaaccatctctactaaaaatcaaaaattagccgggtgtggtggcacacgccatgtaatcccagctattcaggaggctgaggcaaaagaattgcttcaacctgggagacggaggatgcagtgagccgatatcacaccacgttggagtgccaacatgggcaaaaaagtaaaactcaaagaaaaaaagccataaaaattttaaattttttatgaaacacacaagaaagaagtgagaatggctgggtgt

SEQ ID NO: 183867 - DNA, 238 bp, Homo sapiens
caggagatcatacagcagaactcacatgaattcagttagcaggttttgttcattaaatctagtgacttgaacaaatttttattatcctttcacaaaagtgcaagcactggctcctacaaaaaacagttgttacctaacgaagtgtttcagcttgttcatataagttgatggcttcatatggctagattattgctgtatcagctatcagctactgataacacactcccatcttacttta

SEQ ID NO: 183868 - DNA, 341 bp, Homo sapiens
atcctttgagctgctgttttagtggagggttggccagcccctactgcaaatgctcatgtaagtagaaaagggagagaggggagtgagctagctggcagcggaggccaggagagctgggcattggaagcagggcccaaagtgaactgcatgggagttgtgctgtgttgttaacccagagaatgaaatccactttacaagacttaattcagcagccgttcttgactagtgaataaattaaaagatcttatagaaatgggaagagtcaccgaatgtacttgtatcattgaatctgtgttttagagaaacttgagcatttctgcaatgtggtttcagaagcagac

SEQ ID NO: 183869 - DNA, 506 bp, Homo sapiens
accaccgggaagggagaaagggagaagtggggaagggctccaatcccatctggattggcagagggtaaagctgaccctgtctctcctgggaacattcatgggctcctcggtggttccctgctgctttgtctcctgaagtccccttaactcaagcagatgtgccactgggtggatgcttacctggtggctgtggaggggaggggccctctgcccttcctgagggacttttggacaggacctaaatggatccatgggtcttgtgcttgctcatccacccagctcacatctgtcctcaggaaacactggcacactcctcgccccaacattagtgaacaggtgggtcccagcacagcagcatagctctgcctctgaaacagcacatgagcccttcctgccactgtgccctccaaattgagtgccaaatattgagctctctgagaaatcccttggaagccaccctcacaggcttaaagtgaaggaaggagtgcctgtcctctgtgtcccct

SEQ ID NO: 183870 - DNA, 365 bp, Homo sapiens
aaggtatactgatttgtttacatttccaaaatgacaaaacagattatcaacatagaaataggttggcaacattgcaaggggtgaaggattctgattcgggaaaaggtggataactacaagacatgttggttgttgaaaacatagttttgggggcctttaccatcttcaggtacagctacatgtcagagctggctgggttgtgccaagcagagaaacctggcaactctagggggcaggtgggcagtggagataaagggggttataaaaaggtagggaggtgtgggcataaaaatcaacaagcaagaaagcccagagagagctgcaggtcaagagtcaggccaggcaagcacagatccctggggcat

SEQ ID NO: 183871 - DNA, 623 bp, Homo sapiens
atctgctgaagtagcttctcacttttttcactgataaaataatcacagacatttattccctagttcagcacctcccagtgctattgtgggcatggaagatgaaagtgctttaaaaagttaggaaggtagtataaagataattgtcatcatatcctattgagtactagaaactcatatcattgagaaaatactatgattccatatcttagtaattgtaagcagagaatctaatcctcagcttctggagattagaatgcagacctccctgggggaccattgttctttttgaacagcgaaaaggattaaatttgcagatgaaattaagattgcttattagctgatataagagaattttcctggattattcaggtgggttcaaaataaccataaaatccatataagtggaagcaagagccagaatagagttcaagagagatttgaagatgctacatcgcttgatttgaaggtagaagatgggatgacaaaccaagcaacataggcagcctaaagaagccagaaaaggcaataaaactttttgttgcctaagccttcagaaaggagtatggccttgccaacactctgattttagcctagtgagacccacttggaacttctaacctcca

SEQ ID NO: 183872 - DNA, 162 bp, Homo sapiens
gcggcgaaagcattcttattgcatggtatctctgtcatccatgtggggaatctagccactggcccacagagttaaacagagctttggagtgtgagaggtggggggaaagaagggacagtctactccagcttcctgtttaatttcttcaaggggaggggccct

SEQ ID NO: 183873 - DNA, 514 bp, Homo sapiens
aatcaggtaactgcttctgtctaccaagttcctactcttaccagtggagcagttaaatctggacagtcactccttggcacagggcccttgagaccttttcatgaaagacagcatgaaatgttgggaatagggatagtaataaagaggtggattctagtttatgctccatgactattatgaaaacttaggggacaagtttctgaatttctatttctcttctgtgaaggggatgtggtaaaaactaccctgcctatatcacagcgttgttgtgagcacccaatgagataactataaactttataaacaataaaatgcaatgcaaatatagtcttattatgagattgtagttcctgtaatgattatggatggctcacgggcaaaggctggatttatttaaaaagtcagagaacttctttagaattttctgtggtggggagctcaaggagagatgagtatttccggcatggtgtggagtatctacttactggattaaaagtaaggagaaaaatacaga

SEQ ID NO: 183874 - DNA, 327 bp, Homo sapiens
attcatggcaaaagagagagaataaaaaggaaaggaataaaatccagagcatgctgtgccctaaccagctggagataacaaagtgctgtgttttgctccatagcccacagtagactttggaatatgactggggaacctgggaaggatctctgcctcagtcactgacatcactatcaaagataagcctgtagtaagaatcttctatgatggtatcaatgactaggatgaagaaacaaaaccgctaaaatgtgagtcacatttatttatttatttatttatattagtcatccttttttgtgtgtgacttttgaatgttttcggagattt

SEQ ID NO: 183875 - DNA, 527 bp, Homo sapiens
gtcagattccatgactaagacagccagggagcagagtgaaaatcccaggggctctctctccaggagacacctgctccatccagatcaaacccaaaatgtccccagccagtgatgcctggctctcctttcccctcggctcatcctgcctgcatcggtgcagtgccctgacgttcccagtccagagggtggaggttgcagtgaggggagatcacagactgtcagagccttcctctctccttgcctatgcatgggttaatattcacctgaagtcccagctactagggtacgcataggagcacagcccagtttagtctgggtgacacagtgagacccccatctctaaaatttaaaaattaaatcaaatgtgcaattttttgacctgttcatgcacactacatttcggctgcatttacccaataaaaactcagagcccatgcactccacctccgtgcgcttgctaagcagtgcacatcccatcagcaagggacactgaggtcccctccaactctacctcaacccaagaggtg

SEQ ID NO: 183876 - DNA, 519 bp, Homo sapiens
ctcaacacatgctcaagctgctcagaagatgagaaactagagcagtcatttatcttttctgggattctagaacgtgtattaaccacattgcaccccgtgccccactctccattaacctagaaggccatgaatagctgagtttgagaggcaagggaatgcttaatgttttagtccctccgtgtagctgacctacctagttattgttggttttggcttttttctctcacacaatatttatttccctatgttcctagtttttaaaaagaaacttctttattcctagttttctgtcattgcctgctttggcgctgtagcatttaacttccttatatggctgaataatgaatgcagcttttcttcgtacttgaaatagcagtttcttggtctgttttttttttttaatgtgttaccagacaatccaaattaatgacagcaaagaattagtatcaggggatgctattaccttgtgtcagcactaaaaagaggttaaaacatattctgtgaccctggaggtggtta

SEQ ID NO: 183877 - DNA, 315 bp, Homo sapiens
tttattaatctaaaattattactgtgaataatatatttccaaactttccagtagaagtatacatctctcagtatgcttctacccatcaaataatctatcagctttattttcttggagccattcttcctggattcttttttactctcaaatcttgactgggtgtattcttaaggtcacctgtcagtctggaaattccttttactgccatcattctgggaattccttggcctcttttccttgtggtaagtcttccttttacttggtttactctcattttggtgaaacatttcttctgctaatttcatgagaaagatg

SEQ ID NO: 183878 - DNA, 513 bp, Homo sapiens
accaaatatatcggcctatccaaagagatggtcattgtttctcttcctacgtgttaaagtatctgaatggagatagctccagaaaatagtcctggattgcatttcctgaaataaggagacattttcagtaggttaaccagaggattggatagtagccacataccaggttttgaaggtagtgattgttcctcaggggttatgctttacacagctcggatttcctaaaaggtaatcattacatgaagtactttaactcagtagcatctagttgtggcttagaaatgctgatatcatacactttatttttcggttctcttgtttcttactcccgtctctacttctccagctttagaatttgagtcatttaagtatgtgtttgcttcattcctgtttgggggctgatttgtactcttcaaagagttttgtcagctttagatctctgagggatagattgccagagaaggggaagtttcagtccaggcatatgtgcagagccttgatcaattgaggaaa

SEQ ID NO: 183879 - DNA, 208 bp, Homo sapiens
ctgttcaattcaggttgaagaagccagtgaaactttaccgcttttgatatttgcattcagcatataggagtctagaataagatacttccagatttggggggttgtattttttaggatgaaatgagcataaatggatgggttaaccatttgcagaatgctactatataaagatgtttacaaattttcattataaaggcttaacaatatg

SEQ ID NO: 183880 - DNA, 345 bp, Homo sapiens
aataaaatgggaacctatagctatagaaagaaagaaaagggaaggaagaaaagaaagaagaagagagggagggagggagagagggagggagggacggaggcagggaagaaggaagaagactttcttacagtagaatgccaatgaataaatacagagggaataatagaaaactccatttgcaaacatgatcataatagtttattcaaggaagaatcatcactgagtgaaaatttaggaaggtaaagtatgttttcattgtctcatagcacttccactcatatggtttattaattgcaaagagaaaaagtggtaacttaacagtagagaaacccagcaggtcctccc

SEQ ID NO: 183881 - DNA, 271 bp, Homo sapiens
tataaatccagtcatataatgataaacatctccacatcataacaaagtattccacattttaaatttaaaaattaaattaatttttaattaaaggggaagtgttaattaatttttaattagttaattaaattaaaggggaagtgttagatcacatttttagctttagaatttctactaccagaaaattagaattttttgtaggttattaaccttaccacttgaaatagtgttctttcctccctccctccagaataatgcttggaagagagta

SEQ ID NO: 183882 - DNA, 250 bp, Homo sapiens
gggtattgaaggatggttccactaagacttaatgcagaagtagacagtgggtcctcaaaggaaatagagttattgtcacagaagagagaagagataccatgtgggcaaaaacaacagacatcttctacaggtggtaatgtagttaataatggaaatgaaaaaatcatttggattcaggagtcctcttcccctcacccttcacttgcagatggtgagttaatagaatgactgggtgctgtttgtatggtta

SEQ ID NO: 183883 - DNA, 543 bp, Homo sapiens
tcgagctcggtaccgattacgctcctagacggctaggaaagttgcttcatcctgtgatcgtggctagtttgtgagtgattaaattccctggcctcctctttggaagcaatgaccagtcattctgttggtttattactatttcacaacataggaagcagagcacaccacctctacctaacagtttaacttgaaacacctcatcagagtatgtgagtgagacttcacatgtgcctgttgcatagtaaaaaggacgtttctttcaaagtcactgggctggctgagcaggacccccacagaaaaacagtgttcttgggcctcaggcatacctcagggcgatgctcagggatgtctgagcaatgtcaagcctgttagatgcatggcagggaggactggagcacagattgatctctcagatgggggtgaatggggaggtaaatcatcctttaaagggactctttttcaaggctgagaaaccatgtcctgagaaaagggagggctctgtttccagaggccacacgtctggttgacctccttccagtctcc

SEQ ID NO: 183884 - DNA, 271 bp, Homo sapiens
catggcctccagttccatccttgttgctgcaaaagacatgatttcaggactttttatatagctgagtagtatccacagcatgtgcgtatatacgctgttttggtcactatagccttgtagtttaatttgaagtcagtaatgtgatgcctccaactttgatcttttagctcaggatttctttgtgtatttgggctcctttttcgttccttttgaatttggggattgttttttctaattctggggaaaatgacattggtaatttgatagggat

SEQ ID NO: 183885 - DNA, 187 bp, Homo sapiens
ttgttcaaatcaaggggaaggtaattcagaggtgctgttgagactggtttgctttttaattttttttttcaaagaagacgggaagttcctgttttttggaaaggttgttcatttccaaagaagttacacagccagtcagctataggatgattcctggctgcattttttcggggtagtacacaataca

SEQ ID NO: 183886 - DNA, 356 bp, Homo sapiens
ctgtaccctgtggcctgggcagtgtttgctggaatggtgtagcccagtgagctgagtgtaagcacctcttcctagccccattttggtagctctacgctggccatagtgggagtattcattcattccatcctgccatgaaaatctaggccccactatgaaaatcagggtcttttttcctgggagctgatggttaaacattcatgaacacacctttggggttattctactactttttagatttgttgcatttccctccagggttcaggagacagaaactatccccacaaactaaacaccagccccaaagttaatattatgtccctttttcttttcttttcttttctttttttctccct

SEQ ID NO: 183887 - DNA, 212 bp, Homo sapiens
agggactagggattgacctcagttgacagaagccaatgggtacatgccattccctggccagtcactagtctgggtgggcatgtgacctcagcagtccacacagggtgggtcccggggctctgcagagagggctgggagcaacagcatcccctggtgtggccctggctgctatggtggcatcccatggccacagagacgccagagaaccaacg

SEQ ID NO: 183888 - DNA, 219 bp, Homo sapiens
gggctctaatccaataggactggcgtccttataagaaaagagaaagagacaccagggatgtgtgtgcccagaggaaaggccctgtgaggacacagggagaaggtggctgtccgcaaaccacagagagaggcctcaggaagagccagcccttctgacactttcatctcagacttccagcctctagaactgagataataaatttctgttatttaaatcact

SEQ ID NO: 183889 - DNA, 237 bp, Homo sapiens
tgacttgtggcttcccaaaaaagacatgtctaagtccttacccccagaacctgtgactgtggctttatctggaaacggggtcttggcagatgtcatgaaggtaagtattttgagatgaggtgatcccatgagagaaaggcaagggagattggacacacacaggggagaagaccaggtgacgacggagggagagggcagagtgatgcggccacaagcccagagctccaaggatggctg

SEQ ID NO: 183890 - DNA, 396 bp, Homo sapiens
acacgatcagtcactgtaaccttgaactcctggtctgaagcgatcctcccacgtgtgcctctaaagtgtcgggattacaggcatgagctactgtgctcagcctctactctgttttctaccttttatttgttgcaaaagcaacatgtttattttaacaaatactggtcttcctcatcttactcccctgagatttcaatgttaaaagttgatttgtgtgtttccacgtaagtctttataacaagcttctgctgacactccttggcccagctttccataaacacatccatccctacctattaggttgaactgtacaaaattgccatttttataggtccccactattctttaataccaagcctcaaatttagccagacactaaatgtcctgttttatata

SEQ ID NO: 183891 - DNA, 286 bp, Homo sapiens
cagacaggttgaaagtaaaaaaatcagtaaaagatacagcatgaaaacactaagcaaaagaaagctgatatggctatatgaatatcaaaaaagtagattttaagacaaaggatactaacacagataaaaatggtcattttattggggaaaaaaaggccaatttgtaacaaggcatgacaatcttaaaagggtataacaaagtagaatttcaaaatccaagaagaaaaaaatggcagaataaagtaaaaagcagagaaatccacaataattgttagagattttatca

SEQ ID NO: 183892 - DNA, 308 bp, Homo sapiens
cttatgtgttgtctatggctgctgtcttgttgctataaggacagagttgtagacttttgacagagatcatatggctcccagatcgtaacatattcactatctggccttatacagaaaaagtctgcatatcaatgcttgggattacaggcgtgagccaccaggcctggcccctgcacctctttttacatgtaactgctgtgatctcccacacgtgcctccttggcagactggggactggggccagggtctgtgtccttgtcactccctgtcctcggcgtggcatggggaaggcactgctgctgtcctcg

SEQ ID NO: 183893 - DNA, 124 bp, Homo sapiens
cgcctctgtgcatgcatctgtccatccatccccacctctgtgcatgcatctgtccgtacatccatccctgcctctgtgcatgcatctgtccattcatccctgcctctgtgcatgcatctgtcca

SEQ ID NO: 183894 - DNA, 789 bp, Homo sapiens
cgctaatagtgcccaaacctcttggtagtcagacttgtgaaatcccctcctcatttacttcagaaaacagtaacattgagaggatactacttctatgattaggttacaattgtgacttctgtcttgctaagactctactgcctcgtcagctttcatcttttgataactcaagctatcacactggaaagaccaaaagggcgaggaactgagagtggccaatagtcaggtagaaactgaggccctcagtcaaacaaccctccaggaaccgaatcctgccaaaactacatgagcttggaagcctattcctcccgtcaagccttcagctaaaaccccagttctgccaatattttgactgcaccttcagagaaaaggagacagggaacccatctgagctgtgtctggaccgctgacttacagaaactggcagataacaacaaattagtgtagttttaagctgctaaattttggggtaatttgttatacagcaatagatcatgactacaggacaacatagtaaaactgctgaaaatcaaagacaaaataaaaatcctaaaagcaaccagaccaaaaacaacattattttcaaaggagcaataagactgctaaatttccaacattaggaaggcataaggcagtagaacatctttactgtgccggaaaaaaaaaaaaaaggactatgaatcagaattccatagctactgaagtcactgtcaacaaacctttgttaaaaagctttgtgtgttttttttttttttttttttttttgagacagtcttgctccgtggtcca

SEQ ID NO: 183895 - DNA, 253 bp, Homo sapiens
aagcataagacaaaactgagatagagcaattattttaagcttcgggagcagggcaaacaaatcccatttttactaactacctttgctctcttaatagaagacaacactggaatttttttacttatctctgaaagtaattaactagtacaagacccttaagatgggcaattgcatttctttttttcttttttttgagaaggagttttgctcttgttgccctgctggagtgcaatggcatgatcttggctcactg

SEQ ID NO: 183896 - DNA, 456 bp, Homo sapiens
acactgtaataataataatgatatgaaacaattatacagctcaccatactgtagaatcagtgggaaccctgagcttattttcctgcaactagacagtcccatctgggggtgatgggagacagcaacagatcatcaggcattagattctcataagaagcgtgcaagctagattatgtacatatgcaattcataatagggtttgcactcctatgagaatctaatgccactagtgatctgataagaggcggggctcaggcagtaacactcaacgctgcttacctcctgctgtgcagcctggttcctaacaggccatggacctttactaactagtctgtggcccaggggttggagacccctgatctaagggtatgagacagtaagagacaaaggaaaatatgaccagttacccaaatttaacaataaaaaaactttaactccttttctcaaagtgctagt

SEQ ID NO: 183897 - DNA, 149 bp, Homo sapiens
aaccaattaacattgataaaagatttggcaagaatagtatacagaggcttgaatttttaatgtaattaatgtaattaaaggtttgttggaaatgtgagaccattttgttctcccagagaaaaagtgtgttaattgtctagctggcaggg

SEQ ID NO: 183898 - DNA, 465 bp, Homo sapiens
caggctccagaggatagcctaagacaatctagattctctattccaagtgtgggctgtggaccagcagaatcaacacctccaggagctcgttagaaatgcagagtcccaggtcccacccagccccactgaatcagaatctgcattttcataagacttccaggtagttcctatgcacattaaagcttgagaagcagtaattaagagcaaggtccaagagcaagaagggagaagacaggaaggaattgattatgtgaatttaccctcaagagatctagaaatctttatctttggaaaagataaagaattgctcaaggtattcatcctttcttctttccgtttctatttaggaagaggcatgtctaagcaatgccaaggcagtcattaatctgttgagtcctggctggtttgaaaaacagtgaccttgcttctcttacctgcttgtctcatgagggggtttggggaagg

SEQ ID NO: 183899 - DNA, 625 bp, Homo sapiens
tttatgatgccatgcaagagacactagaaagggatagctgacaaggaaaaaattaaaaattggataaaaagtaaatgaataatgtcatattactaaaaagatgagaggctaatttgtgccgactttttgctaattttgttcaagcctcaaaatgaggagctgtcacccgttctgtgtagcactgatgacagtgccaatgatccatgaaataagctgccgctggctttgttctgataagaatgaacaaatctgcaccatgttcggctcccagaatctcattttcatacttgcatgcaggctaaaagaaataagctgtttgcaggcttgattaatcagacattggaggggtttttgtctctttgatctctttcgtctcctaggtaacttgcttgacattaatgttgagcttgagtaaagacaatcaagaattgtcgaccaaactgatataaaaattaaagaccttaacactttaagtactccagtaatggttccgctttacttcagaaaacatctgttttcatttaattaaagaacaaaagagaatggcataaatatttttcatagagacctattattccataaaaagttaaagtatgataattggtatttttaaataagtgccttg

SEQ ID NO: 183900 - DNA, 699 bp, Homo sapiens
ctgtgactagctgcttggggttcttctaccatattgaatagacgcccggcggcgaaccgagacgttcgtgaatcgaaagtccagaatggagattcggaggttcactgactgggatctatctacaggagtgcatgcgagctcgatgatctaaatgtacgtcatccgcctctgaagatgagaggctaatttgtgccgactttttgctaattttgttcaagcctcaaaatgaggagctgtcacccgttctgtgtagcactgatgacagtgccaatgatccatgaaataagctgccgctggctttgttctgataagaatgaacaaatctgcaccatgttcggctcccagaatctcattttcatacttgcatgcaggctaaaagaaataagctgtttgcaggcttgattaatcagacattggaggggtttttgtctctttgatctctttcgtctcctaggtaacttgcttgacattaatgttgagcttgagtaaagacaatcaagaattgtcgaccaaactgatataaaaattaaagaccttaacactttaagtactccagtaatggttccgctttacttcagaaaacatctgttttcatttaattaaagaacaaaagagaatggcataaatatttttcatagagacctattattccataaaaagttaaagtatgataattggtatttttaaataagtgccttg

SEQ ID NO: 183901 - DNA, 298 bp, Homo sapiens
caagcaagggggtctgaatgctgggcaggctaaagccacagttaccaccgtggagctgatgcagtcagacatcccagcccaggacctggtacaagggagtggctccataaatgcttggttttgctggtagtgttttcacctgacctcctgcaaggcagcaattccagaccagtaaatcaccatgtaacagtacatctagaaatcctagctcagcattcttcgtaggcgtgtcatgttgtgatacacacagaagatggtatttgagcagcaaatatctgaggtaaactgacaaggtgct

SEQ ID NO: 183902 - DNA, 169 bp, Homo sapiens
aaaaaaaaagagagagacagtatggcctggaagcctcaattatttactatatggcccttttaagaaaaaatctgctggccaggtgctgccacacctgtaatcccaggcaggaggatctcttgaggagttctagaccagcctgggcaacacagtgagatcttgtctctac

SEQ ID NO: 183903 - DNA, 294 bp, Homo sapiens
tactgtctgccaaagctgatgccattttttatttccagaaaagcagctggcttctacattttgctgggcgatcttcatctactgtaaggaccctggagacaggagaaagggagtcaaagaccctttcaagaaactgacatctatttttaagctttagagaaacaaaggaaaagagacataattcaggaacaacagcctttatatcctcacatagaaacaaaacattgggtaatagagggaatgttttcctataagaaaaactggtaaagatgcaggaaaaataagatgaaaaaa

SEQ ID NO: 183904 - DNA, 416 bp, Homo sapiens
agaccttctgaagccacttgacaggcttcctgcctcaatttcatagattgagtctcataaacaaaaacaaatgccaagcacaaaaatctcttggcaataaaggggcctgcattagttctcctcaggtaaggattaacttcaatatttagcttagaaataaggcattttaaattcgcattttcagaaacactgggcaaatttgcagaaaagaaaaaaacacgtctggatggggaggggagatctcactgcattaaatgtttctataataaataattccctgaggtaccaattttaatcacttgacattttgtttccttttaatgcaaacatacagaacacaatactaccatttccaattttatttgtaaggatctagctcttaggtaggaattagggacatttcatggggtgggggg

SEQ ID NO: 183905 - DNA, 526 bp, Homo sapiens
gccctgctgtggctttctaggaaaattatgcttccatgagagaggattgccccttcatgttttcagcttcttctgctttcaacatgagcttgaacctggaggtagaatatccatgcatcttgtgaccaagagggaacaaacatgaagataaaagtcagcatgctaagggtggtgaagtgaaaagataaaaaatgtttgagttttcttttacttgtaaccaaacacattcctgagctaatagaccacagaaacttgagttgggaaggaattaagcccagcctgacctcatcgaagacttttccaacgtttctggtgacataatccactgctttgggagggagtctaattttgttgcagatctatatccattccaacagttctctcttacagtgagtgaaatttgacccccaaagcttctgcttatagacccagtgtgatgctgacctgagagtcacctggacagtcactcccacactttcatagatgtcagtgaaaagtcatcctgatcaagctggcgagtctactg

SEQ ID NO: 183906 - DNA, 557 bp, Homo sapiens
tgatcctaagcgattgtgtgtgaggcaactgcaggaatcaaggcattcaaaccaggctgtggctccaagaatgaaaacacaaccctcaggcctccgattccttggggtctgatgtgcatgacatgtgtgtgatgtaagggtggctgagtcagaaagtctgcagaagtgggtcttgggagggaaggatgtcagtcaatgcaatctccttttgagaatgaatcccccaagctggagtgtagtggtgcaatctcagctcactgcaaccccaactcatgggatcaagccatcctcccacttcagcctcctgagtagctgggactacaagcatgcaccatcacatccggctaatttttatagagacagggtttcaccatgttgcccaggctggtctcaaactcctggactcaagccatcctcccaccttgacctctcaaagtgctgggattacaggcatgagccactgcacctggcccaaggacatttctaatcagacggctcatgtttccagcatctccaaggcatggggccatgggcagacaatgacgtttactcttgat

SEQ ID NO: 183907 - DNA, 648 bp, Homo sapiens
gaaaacaggctgtgggtttggaagaagtcaggctgtgggtgggaggggaacagaactagaagcaagcagtcaagtgagttgagggtggacgggacaggcccagtcaggcgcagaggcaactgcaggaatcaaggcattcaaaccaggctgtggctccaagaatgaaaacacaaccctcaggcctccgattccttggggtctgatgtgcatgacatgtgtgtgatgtaagggtggctgagtcagaaagtctgcagaagtgggtcttgggagggaaggatgtcagtcaatgcaatctccttttgagaatgaatcccccaagctggagtgtagtggtgcaatctcagctcactgcaaccccaactcatgggatcaagccatcctcccacttcagcctcctgagtagctgggactacaagcatgcaccatcacatccggctaatttttatagagacagggtttcaccatgttgcccaggctggtctcaaactcctggactcaagccatcctcccaccttgacctctcaaagtgctgggattacaggcatgagccactgcacctggcccaaggacatttctaatcagacggctcatgtttccagcatctccaaggcatggggccatgggcagacaatgacgtttactcttgat

SEQ ID NO: 183908 - DNA, 714 bp, Homo sapiens
aacattatggatgaatctcaagagattaagctgagttttaaaaaacccaatctcaaaaatttacatatttgttctggtccaccccatagtgttggggtgaaccctcctacccccaatgtttggtttggatatcaaaactggtaatgatattaagagtgtaaaaaggagtttattagttatagagacaggtttctagggagactagagaaggctcctaaggagatctaaatgtgggttgagaaagaagggagaagaatggctgcttgtcagtaggaatttggggtggggtaagcgcacacaaaagggatggagtttgtgtggtttgagtttcctactggcattgagggagtgaccacctaggctttattattggcttgcccaaatgtagggtaagaggggagatgggtgggatttgaaatctattagcagccaattaccacaaatgcagttaggctgtttatcataatacctcatgattttatttggataacacttttgaaatgacaacatagagatggagaactgattcgtggttgccagtgttaggaaggcagagagggtgggagatggctgtagttaccatgtgtggcatccttgtgatgggactgttctgtatcaccaatgttgtgattttcacaaaaatctatacctgtggcaaaatttatagaactaaatatacacaactaatgcatgtgaaacttgtgaaatctgaat

SEQ ID NO: 183909 - DNA, 339 bp, Homo sapiens
aacattatggatgaatctcaagagattaagctgagttttaaaaaacccaatctcaaaaatttacatatttgttctggtccaccccatagtgttggggtgaaccctcctacccccaatgtttggtttggatatcaaaactggtaatgatattaagagtgtaaaaaggagtttattagttatagagacaggtttctagggagactagagaaggctcctaaggagatctaaatgtgggttgagaaagaaggcctcctatctgaatccagatcgccatgaagacaaaaatgagacggatggccttgtactatttgtcgtcgcatctggattcagataggatga

SEQ ID NO: 183910 - DNA, 682 bp, Homo sapiens
ataaaataagacactaatgaacattaaataagccagtcacaaaaggacaaataccgtgtggttccacttatatgaagttgctagagttgtcacatcatagagacagaaagtacaatggtggttgccagaggcgggggaggggagctattcttgaatgagcacagagttccagaaatgcaagaggaaaagagttctaggatggatggtggtgaaggttacaccgcagtgtgaatgtacccactgccactgaactgaatacttacaaatgggtaagatggtagccacgatgaaaagtttattttaaatttatgagaccagttctcttgagtgatttgtagaatggctctgaaaacagttacagaagaggagttagaaaaatgtttggagcaaaggagatgtggtcacgtaactgtataatctttaggtgacagaaaaaaacccattggatatttagagtatatttgtatgtgttttagtcttatttcttcatagatgaggcttataacttttttgaaacaagatcttactctcacccaggctggatccccaagtgccactagtgctgacatcttttaactgtgttcattgtgacttgtttatttctaaaagtaaccactggcgccttggtgcagatggaactccaggtgcatgcggtgagttaaccatggtctggggagctttg

SEQ ID NO: 183911 - DNA, 495 bp, Homo sapiens
ttgtcacttgccattcctctataatagccccctttattcatttaacactttatatactttctctgtcttcctcacaagtggtcctctgaagtacatgttagtctgctttaagaatgggaaactgaggttcaggatgttcagtaacctctctgaggacattcggctggtaaatgttagatttgggatttgaactcaagtccatttgactccagaactcctgttctgtctactactcgagtgatcttcaaacttttttgcctgtgaaaccccttacagaatttagaaaaactataaagtccatcaaacattttaaatcggcatgtaaaaatttttcatcttgaatttatgtacttgccaagaatataattcctggcatgttgtaaatattgacatttttaaataaaactgttaacatcattcttttaaatgtacccaatgagaaataataatgatttagttatccattaaaaatatgtaagtaaactcttaacagtc

SEQ ID NO: 183912 - DNA, 495 bp, Homo sapiens
ctacttttaaaaaaatttcaattcaagcataacaattcagtgatatgcacacattttaactgtacagctcaatgaaattttacatatgtaaactgtataattttgcttcctgcaattttcacttaacgtagtgaacattttccctcatcattcagtattcacaaatggaatgatctggggccacttttggctttgtaaatggaacagatgtcagtgtgttaattttttagttgtgagtgtgagcctgcctgtctgtttctgtttcttccattctatcttggtcactcctgtttggccaggataaagaaaaaaatctgtgcttgggttctgggcaccatggctcctgattacaactgaacgatggggcatataggggttgattttaattgtctgcgttggtgtccttagggtacactgaggcggcgcacaatggcagctgccagatgccttcagattaaacatgactatgagggcagcgtagaatactatctgcac

SEQ ID NO: 183913 - DNA, 404 bp, Homo sapiens
agtcagagaactcacatgaactgattttaagatttattataaagctacagtaagcaagacagtgtggtattggcttaaggatagacacagaaacagacggagcagacagaatcaagaagtgaacccgccaatttagggtcaattgatttttaataaaggggccaagctaactcaatggggcaagttcagcaatctgcaaaatgtcacagaactaataaggagctgaggcagagtttacatcctgctggacagcaggtgggctcaccagcaagtttccttcactctcatgtctgtctcaacacagaggagtgaccctgctagaggggactcggacatggtcctatcagctctgcagggaccttccatagcttcccctcatccttttaacaccagtgtcaggtcta

SEQ ID NO: 183914 - DNA, 348 bp, Homo sapiens
agcctccgtgaggggtcctaggattgctgagggctgagaccaccttcccaaagttggggaaggggtaactgaggctgtcatctggcctgtctcacctgtcttacctgcaggcccatcattcctgcacagtcatttattaggcaccaactgtaagccaggcccaggaggttggatggttcaggtggggccctggccttgcagaactcatggacttgcacatagactcctcctgacaggcccctcatgagtagctgggtccttacgatttttctggtcagcagtggggagccgtgggaggcattaggctctggggaagccaagcaacatcacatgtacacagcatagaga

SEQ ID NO: 183915 - DNA, 238 bp, Homo sapiens
tcttgctcctgaccacatgatgttgaattcaaccattatccgtctgctttagactgaaagttcctggatggtagggactatggctgctgcatctgttttcctagtggccatatgaaatggaagcaattggtttacctatcagtatgagtctccagaactcctccttgtatttcacccacacattagaaaactggagcaactcccacttggataccaaataaggagattccttctgtta

SEQ ID NO: 183916 - DNA, 388 bp, Homo sapiens
tagacaggcaaagctcctacggagccaggtgtcagggagcactgctgagagtatcacaataggatctgtcacggggttcatatcagatgaagcgccgtatccactgcttcacagagcaaaacattcaatcccataaccaggcacaggggaactaacttggactaactaaccagaaaaccttgttaacgtataacttgttccagtactacatctctgcctgctggctcatgacaattgctcagcacattttcccctcttgaagaaaggttgcaagaagaactaaattatcctcaaaagatttctgcttcattagtaaagagtcagtgatggaatagggtgactctgcagaatagtggcctctagggtaggagcttgtgcctgtgttgtc

SEQ ID NO: 183917 - DNA, 892 bp, Homo sapiens
gggccacagcttcttgaaaacatagattttcatagtgagctcctgaaaagatgaaaagattatttgaaaatccaatttccatgtgcagaaacaacatgtagactttggaggaaacacgatgggctccttgctcatacagcctatgagggctgcctctcaccttcgttgtcctcatttagctgttcaagactcaagcaggggcctgtcaatcatctgtgcatccctgttcgtacatagatgacacccacatacccgaatagagggaagagatgagaacgaacattcatgaagggctcttgtgtgtcgggccatctttcatgtttgttatttcacttatttttagcaacaatccctggaaatacttgtcattattctcatttcactgatgagcaaactggcatttagagaggataaatgaattatttaattgcatacaatcagtaaagaacagagctgggactggagtccaagtttgttggtttgtttttcttttttctgacctcaaagtccagtacttgaatcctctacaccaggattttgggagcattgattatatgttatatctggagcccttgtgccacagagcaaatgtccaaagattttggtttctttttgtcggtacggaagctagtgtgttcttaaacggcattttgggatctgcatggtgagtattaggaccaaattttgaaattccaagtttcttaacactgggaaccagactttcttctcatccctaaggagaatctcactcagatgttcctttatgtgctgggatataagaaggctttgcatttttccagacaatttacctgtggtttattcacgtgatgcatgatgttattaagggttgatgctttttctccttcagaatatgcttactttacttgttcct

SEQ ID NO: 183918 - DNA, 417 bp, Homo sapiens
aatcgctctagaccaatccacagtacgaatgcaccatggaatatttaaccattcccctactgatgatggatgtttagattacagatgctccttgacttaagatggggttacattccaataaaatcgtcgtaagttgaaaatatcagaagtcaaaaatacactgaatatacctaatctaccaaacatcatagtttagcttaccctacttcaaatgtgctcagaacacttacattagcctacagttgggcaatatcatccaacacaaagcctattttataataaagtattgaatatctcatgtaatttattgaatactatactgaaagtgaaaaacagtatgggtatcatatgaagttgaatcattttaagtttgagacgacctgtatttctttttttttttttttgctgcctctaaca

SEQ ID NO: 183919 - DNA, 430 bp, Homo sapiens
tctgcctgaccccacccaccaggacctaacctcaagccatgttctctcctgatccactctcccataccggccccatctggcaaactcctagacatcccccaacaccccagctctaatgcccacctccttcaagatgtgccccaacaggccaggcatggtggctcacgcctgtaatcccagcactttgggaggccaaggctggcagatcacttgaggtcaggagtttgagaccagcctggccaatgtggtgaaaccctgtctctaccaaaaacataaaaattagccaggtgtggtggcgcgcgcctgcagtcccagcccctggggaggccgaggaaagagaatcacctgaacctcggaggccgaagttgcagtgagccaaaatcgcaccactgcactccagcctgggtgacagagcgaggctccatctcag

SEQ ID NO: 183920 - DNA, 581 bp, Homo sapiens
tggatgaataacttcagactggagttgaaggcctggccctcaaaattgactcaaggtcctgtctgtttgacatagttaagaaaaatgtagaatgttgtgctcattctggttatctgaagctctgcacctgggttgggattggggctgtttctctgggtcaagggacccgcatgctgctgaggcaagactgggatgttccatcttccaggcaagagtggcttgttccattctcactgatgtgacttcaaacagcaaacttgtcatggcctttgattttagcagccaaggtttccccgttctatgtccttaatgttaatgaacagagccacatttttatgtgttcacagatgaaaagcaggtcagacaataagcaggtggtttcatcaggctatcagtatggggtatcaggctattattattccctctagacttctatttcttcttatgtttgtagagaagaagcagatacagctaggagggctgaggagaatgcgggtgtgggggcaggctggcatgacatgaatttgccaacttgtctgtcatgtttcagagagattctttaatcttcccctttattgtac

SEQ ID NO: 183921 - DNA, 273 bp, Homo sapiens
cttttcccctcaaatcaaaatcatcctcgaaagagcaagatttgtcatctctgctgtgttcaagaggatattctccaactatgaaagtaccaagtaaaacatatctgataacatttccaatgacagctgcatgttagagttaacagtgccttccaatgtcagtgattctgaccacgatccattggaagttttccttacagaatcagtcaaattactttatcatcattccccagacagagagggataggcactctttgaggggaaaagaccctg

SEQ ID NO: 183922 - DNA, 718 bp, Homo sapiens
ttcctggtggctaagagggcagagtctggaatctgccaccaccacttaccaagtgggtaactttggtcagagttatttaagttttgtctcagttcctccaacaataaaaaggggatgttgacaatacttaatacatagcgagtgcttaaaattgtgtgtgacacacagaaaacttcattctgttcaggtcaccctgtgagcattgttgggtatggtgggaaaagaaagacactaagatcttagagatgacttcaaggttccttttctggtccaagacgatgtacgatgaatagtcacaggaaatgactcttttctgcgatagaatctggacccaccatttaccttgtggttctgctcactgtttagtgctgagttgctaattttaatgattcttcctgttttaagaagcatggctctgagtcgtattctctctctctgcctgtctttctctctgtccacaaacacacactttttgagtacaacagcacagaagacgatttagagatacatgtgctcaagacttacctctctctgtataaaagtttgaatctcaattactcccatttcctctttctttctttctttctttctttctttctttctttctttctttcaatcgtactgctatgtcttactgcttcctaagtgaaaggggaaaagaatcaaagttagggaaatcaaaggtttcagaaatgaaaaactggatttctaaagcact

SEQ ID NO: 183923 - DNA, 558 bp, Homo sapiens
taattttgtggttttagcagagatggggtttcatcacgttgaccaggctggtcttgaactcctgaccttgggtgatcacctgccttagcctcccagagtgctgggattacaggcgtgagcccccatgcccggctaaatctgcctttctttgcctacaactgtctaaattcttaccaccggggccaccagcccagatagacactgatcatctgcaacacccgtctgatggacaagattgccctgcagagttcaagtctgagagttcccctagagctaaactctcctatcaaagtaagtcgagtctagaggcatggcagtccctggctgtgctccattacagaatgctcctgcagcaaaccctctggtctccacatcaggtggcttgctgcccttaccactcctctgagcatctctctgccaactcaagtgtccagagtctctctctgttgcccaggctggagtgcagtggcacgatcacagctcatggcaacctccacctcccgggttcaagtaattcttctgcctcagcctcccaagtagctgggattacaggtgaac

SEQ ID NO: 183924 - DNA, 449 bp, Homo sapiens
acactcacatagacacactcatatagacacacataggcacacacacatatgcatgcactcaaacacactctcacatacacacactcacatagacactctcacatacactctcgcatagacacatacactcatatagatacactcgcataaacacacacatagacacacacactctcgcatagacacactctcactcacatagagacacactctcacagacacatacactcacatagacatacatacacactctcacacagacacacacacactctctctctcacgtagacacacaagccattgcctcttctgtcttctgcttagatccctagtccttgcttcagtacctgcagctggagaaccccttctttgctttctcatccatgcatttatgatgaaaatttgtggattttccttacgaacagtgcgaggaaatattttatgtattt

SEQ ID NO: 183925 - DNA, 309 bp, Homo sapiens
ggtttctaccctcatatcttaatcacctcccaaaagctccttctccagataccaccacattagagattaggtttcaacatatgaattctgaggagaaacaaacattcagtctatagcactcagtattttaaatatatcaattatccccaaattggtctctgggctttagaacaattccaaatcattaactgactggggtaatctatactggctagtttaccacctacttccttcctctttctagtggccacaaagcaagatatatgcttttgaaagtctgtcaaagcaatacagaattatgctgtgcat

SEQ ID NO: 183926 - DNA, 198 bp, Homo sapiens
tgaaacacagaagctccggtgatggtgacagagaggaacgtgtactggctgcgatgcagggctgtcccatcacggtggcatccctgatacttatctggagataggaaggcgacggactgtagagaaagacggaaagccaacctgtgatccgcagagtctgaggggagatgagtgatccatgttctcaacttcccatgt

SEQ ID NO: 183927 - DNA, 207 bp, Homo sapiens
aaggagctgaggcattcaccatgaccccctgtgagggagcggaaggtggtatcaccagtggagacttggaagaggccggaggagcaggctgcaggaaggaagtgagttcagtcttgactgtgtctgctggacattccaaagctgctgtctgctaggcagtgaggagttaggcaggttcatctggagaccaaggagcagggttggtgg

SEQ ID NO: 183928 - DNA, 603 bp, Homo sapiens
cacgcaagcctgggcgacagggcgagactccatctcaaacaaagaaaaaattaaaatcattcataccagttaaagacatctgtttaataaaactcagcctgtaccacgcatcctgcttggtaacaagcgcttgtcgatgttgacgcattatggcagtccctcacgtcaatgtcaacagcagcacagagcccatcacctgcagctacaactctaaccaagctcccactgttggtctgtttcacaaatcccactcctgagacaatgatgcggcaatgagcaccctcatcaccatcaggctttgaatactttcctgattgcgcccttggaggaaatcgacatttttaaggtactgggataaacagtattgccaaaaggccttccagaaaaaaaatggatctaatttaagtgcccccagctgagctgactggttgcatcttcctgtggtgtttctgccatctctacctgaggtgaatgtcccctcaggacagcccccatcaccatagcagctgaaatgggcctgcagcagtactcaggaaactggcactggacagatctaggaatccccctgctacagcagtcctgagaggcaggaaatgattgatt

SEQ ID NO: 183929 - DNA, 521 bp, Homo sapiens
ctaggattaaaggtgtgagccaacgtgcccagccaacccaagacttcttttacttttgctgtataacattcaagggagctaaaaggaaaatgagatttcacacccacatactctcttagaatagtgtctactgactagttcctctggaaccagtgtgaaatgtctggagaaacaggacagaacaaagcaatgagataaaaaaaaatttcccacattgactcagatgcagacggaggaacaacgacttagctttggattttgtgtctacatcaagaggagcttctaaagtgcttgggaaagaccccaagagggatggctgaggctcagggagggcaaactgttaaggacagtgctacccaccatgggaaccactgactggagaggcggtcacaagcacacattgtcccagctcatcttctggtacctgcctgtgctgcagtcccgactccagctgcctgaccttgaacaaagtacaaactgtcagtctccatcccgttttgaatgggggtattaagaagact

SEQ ID NO: 183930 - DNA, 527 bp, Homo sapiens
ctgactatagagacctgatcaaggctccagttttagtaataagacttcaaggtgaatacagattcaaagggccgagttgtttttcttgaagtgcacaaagcagacaccctatgaaaaccctcgcccaaaaatgtgaacactttagaacaagaactaatacagataaacgatttctgacttaatgaaccacagtggccagaaacctgctgatcctgctttccccttccaaaacttgctgctctcagctctggccccgagggtggcctataatttacattaaaataaaatattggaaagattagtaaaatttggttaatttgtccatcttttttcataagcaacacataaaagaattaagattagaaatatacataatacattacacagttgagtggtagcctcttgctactttatagtgacttagattttcttgagaaggaggactcagagcatgatttctgacagttacaccatagcaactgcatgcctctgaaaagaactgctgtttcaacttttaggggaagaga

SEQ ID NO: 183931 - DNA, 526 bp, Homo sapiens
agggaaagaagaaactgtcaaataaaccacggatatggtctccaaatggaaagggcccatttggggcccaacacatgaatgaaaaactcttaccaaccaacatcattgtgaaatttcagaacacctgaatggttgaagggaggatcaccccatttaatactacagtctgcatcccctacctctcctttccccaacattcctgaacttcccaccccagcctgctcttttttctcttttctaaagcagttatttactttacaaactcccaatgttttgtataatttatttattatatttgctgttgaacaactcctccctccctgaatttaagctctataaggacatgaatcttgtatttttgttcacctatatattcaaaatgtcttgaccagtgcccggcacataaaatgtgctcaatacatacttgctgaataaatataaacgcttccaaagagatataacaggtcacaatcaaaggattggttatcataaatgtgagggttaaataaaaaaatggttgaccatg

SEQ ID NO: 183932 - DNA, 390 bp, Homo sapiens
agaaggatgttgaagtcctgagctataattgtggaattacctattcctcctttaagttctatcagtttttgctccacataatttaaagctctgttgtttggtatatacacatgtaggtttgcttagtattcttggtgtattgacccttttataattaagtaatgtccctttttgttcctgttaatactcttatcaatttttatctgatatttgtgtggtcagtcttacgttttggttaatgcttgcatgatttacacttcatcatttttttaaaccttatctatatcactatattgggagtaagtttcttgtgaatggcgtatatttgggctgtggttttatatccagtttgcgtatctttttttttttttttttttttttttgagacgg

SEQ ID NO: 183933 - DNA, 680 bp, Homo sapiens
tgccacctacttagaatctaaagtccttcaaggcttggcacaaacccgacaccctctatgaagccttccttgattgcactaatctcccctaaacttcttttcttctgaccttgacccacaattcagcatcaaatgttgtgttctggtacctaagtggcagtctcatctgttccattggacttgaaggttcagggccattatgtatacatctcctttaatttccagagtgtgcagttcaaggcagtgcttggcacggaatataaaccgagtaacaaatttatttacatgcaaattctggctatatctcatggcttcgagaacctaagtgcttcagagtaaaaacactgacacgggcactgcctgaggaagtgctgtacatgctgtttccaaaaacattcaaggagctgttgaacaaccactggcacagacagtatagagtggaatcatgtgtgaacagagaggggtaaagaaaatggtagcccagacaaggagggttgtcagcccatagtcacgcagtagatgagtggtcaaagtagcacttaaaccctggcattccagctcccagcctggactccttctaaagtgttcatggacaatcacatctgaagaatcactctgaacatactgcattttgtctgctacatggtatctagagaggtccaggtctcatgtggttacta

SEQ ID NO: 183934 - DNA, 519 bp, Homo sapiens
ccatcccattcatggcagacatcattaatcaatcaaagtctcagatttattcacacatggtgctgtagagagccactaccagttgttgaatgttgctgtgggagctgctgtgtatctgtctcctatgatgggatatgaattcacaagaggtgggttcaagtcttgccttggccactggaggtctgtatgaacttgagcaagtcattgaaactctcttgtattttcttcagttgtataaggattttttaattctaaagattttacaatatgagatttctggagtgatgaggcattggttacctcaactgcaaaactgccaaatactaaatgaggctatgttgagagagggggtaaaaaaaaaaagatactagacacacacagaaataggaaaataggatgggaaatgatcagaaaaagaaatagcacacataaagggcattttttttctttgaaaataaaggagcctcatgtagagaaaatgcagtagaagacttgaaagtcatcagcttgagcgacagc

SEQ ID NO: 183935 - DNA, 473 bp, Homo sapiens
ttaataagtgataaagctaggattcgaatccatgcttttaaccccccaggcttcatactatgtaccctttcccttatactgaggaattctagaaggcatagttgacaggttgttgtgtgtgatatcactctgtgttcctcatatgaacacaagagaattttctctctgagccacaagtcatgaaatatttggctacccttgagtaactgatgtgttttctctttataggcaatgtgaattatataactgcctgtttttcacttttcactttgccaagaagctctgagtaaatttgttggctcagcgtttgtaagtgggtgaattggcctgcatatctgtattctgttgctttgaaatttttaaaaataaatagttgagagaaaaataatgtaaattttctttattttccaaattgttgacaatgtacaatgataatttttataattagaaaaataaactttgttcttaaaaga

SEQ ID NO: 183936 - DNA, 365 bp, Homo sapiens
tctaaccctattatagcagtttctcaaactcttaaaaaatggaaaagatgcctgtagtgtttaatgttatgcctcaaaccttacttttcccccagttttcttttacatcagtgcaaagcactctttatgagcactaaatgtgggtaaaggtacaagtcagagagcacctgtttagtatatgtggcattttaaattgagtccttttggggtactagtctatcaagagagacacattttcttatccatgtcaattttgcttcctatctctctcccccatgcctttcacttggaatgacaacagttgacattaaaaagctgttggcaggtatggaataaccttattctgttaccaaatagcaaagacc

SEQ ID NO: 183937 - DNA, 214 bp, Homo sapiens
gcaactgtctgttctttctgcatttgctcagtgactgagtacccgccccatgcacagcatttggccagccactgcttgcgggggatattcagactggggctctgcatctggtggaggtggtgaccagagatcaaggtgggctgcaagaagccgctttcgcaggtggggactccctctaaagtctcgaccgtgcaggacttgcaagctttggcac

SEQ ID NO: 183938 - DNA, 182 bp, Homo sapiens
gcttcaatactcaatttttcaagttgctataaatggagccttctacttcacaacatttaacatctgattcattttcttgaaggcaaatcattcttggctagagacaccactagagaatgttgttttgaattctttctctactagagacagtgctagagaatgttgttttacttccttacatc

SEQ ID NO: 183939 - DNA, 441 bp, Homo sapiens
tgcagggagaaatgtctttgaaaaagtacaaaacaagtttagacaggagaaagggagggaagaagattcatgtgcctctcatggccttcctgtctgtgacctggaatatgacaacagtcgcagaattcaaaatgaggaagactcaaatggaaatacatcttaacacttctcgatctagaaagttaatgataaagaaagaaattgttttgagaaaggctatcacagatgctcatagaaaaatgcttaagacttaaaaagaaaaaggctatagacacagagacttatttgacttcagtttagcatcagagaggtcagtgataatgaatcaaaaaaatttgtaagaaagaattaacagaatccctaatttcttgacaggccaggtgtgagaaacaaagccgttcaaggagggccaaagaggattctataattaaatcgtagcta

SEQ ID NO: 183940 - DNA, 363 bp, Homo sapiens
catttttgccttgtattatatcctagtgaaaaactttccagttgtttcccattgattatagtaggtttttcatatatggcctttattatgttgaaggattttccttctatacctaaattgttaaaagttttcatcaagaaaggatgctgaattttgtcaaattatttttctgtatcaattgagatgataatgtgagttttatatttggtgaatgtaatgtatcacattgatttgcatatgttaatgcagccttgcatgctagacataagcctcaaataatcacaatgtataatgttttttatatattgaatttgatttgctaatatttcattgagaatttttgcatcaatgttcattaaatat

SEQ ID NO: 183941 - DNA, 414 bp, Homo sapiens
ttcgagaccagcctggccaacatggtaaaaccccgtccgtctctactaaaacgacaaaaattagccgggcaaggtggcgtgtgcctgtaatcccagctactcaggaggctgaggcagaagaatcacttgaacccacaaggtggaggttgcagtgagccgagatcatgccacaggactccagcctgggtgacagagtgagactccatctcaaaaaaaacaaaacaaaaaaaaaaacatctcacactgggagttgcaaggcaatggccgtcaaggccaagccaaagcagagaagtgggtaggggccagtgccactgctcaccaaggcagggaggaaagaatgggcaggcaactgtgggactaggcagggaaggatggggctccagcctgggaaggagaagctggaccagggagtgg

SEQ ID NO: 183942 - DNA, 115 bp, Homo sapiens
tatgaatgctgagcagctccatatgacaaatgttcctcacagcaataacccatggagctgagttgcaccttcccctgttacataaggcagttttccgggatatcccaatcccact

SEQ ID NO: 183943 - DNA, 386 bp, Homo sapiens
gaaaaatgaatccaaatttacttaagccactattatttgggttttctgttccacattgccaaattcaattcttgatacatacagaatcctgtaacttactgaggaatttgccaaatttaatagaaactcacgttagacagaatctgtaaaaagctatattaggtactttcaaaatgctatatcaagttactgagtctgactgccacatatttgtcatctatatgttgccccatgtctacttcaggcatggttaatcaattagggcactctctgccaataaactggaaataagtcaataaaaatgtctcaactccaagtctcaacagctacaattgatattaacctggcactcaataaagaacctattttcccttaagcggatcagc

SEQ ID NO: 183944 - DNA, 684 bp, Homo sapiens
cataaggagggcttgcagctggctgaatgagccttggttttccttgcagcctcaccttcagacagacttttctgacctgcatacctggtccaatgctgtcagttgactagtttgggttttttgtactgctcaaaggcacccagctgagatggttggggtggggttggaatccagtctcactgctggccaagccctggatgctggcctgaggtcacatcctttggggtgggggcacattttcaaattcatccactcagagggggcacatgtttctaactcacacacagtctccctgtgtgtggctgttctgagtaccattcccaacatcatctgctcagggaatttctaccccccatcaacctcgtgtaagacagagcttgagcttttgacctcctctgtgaagtctattttgctctcagtctcttagacagaattgctttttgtctaggagacagaagtttctaagtgcttactcttgagttctatacttactttgtggcagactagtgacaaaccatcagccgaccaggcccaggtctggaggccacacttcgagggctccaccttagaccagccctctgctgcacacagggtgaccttctacatgtttttatgatggaagcaagctatctctgtgaattgtaattatgtggacaagcacggagccacatggctggcagagca

SEQ ID NO: 183945 - DNA, 496 bp, Homo sapiens
tcttattgactgagaaatcttcaatgtggccccttgtcgtccataccactattggtactcttgttctcacttggttctgttaagcttcatttgagctttcccaatgctgctataatagtcttcctaaaaattaaagctgttcttattcccctgcttaaaaatttctctgctgttttatttcttatagaataaaacctaaataaaaggaaaatttttgagaatctagtccctttgatctagaactggtatatctctctacgcaccttcaaatcttttggcacataaatttctcattgataacttcagttttgtttttgtataccatgcagtgtttgtctttctatacatctttttctgttctccacaagttcctccatacctctcattcccctgccaaaaaaaaagccagaaagcagaactgagttaagacccggcttagatatgacctcctcagcgaaaccttttctctcacaaaacaaggtggtcatcttattca

SEQ ID NO: 183946 - DNA, 346 bp, Homo sapiens
atttgctgagagtaaaaatgcactgtatcatttgtcagggctctaaggaacttctaaccctagtttaaggaagaatcatggataccaagaataaatcacaaatactctaaaaaatcattccttgaaggggaagaagactttgctgaccttaattcctatcacagatttcactgaacccaaatggggtttggtttcattaatttaacctataaaagacagaaatagttgaagctgcagagaaaatagcaatggaacctgaaacaaagtctaattgtgattaattaaaaattagtgtcttctaaagactaccagaagatgaagaacaataaatttacaaatatcagaa

SEQ ID NO: 183947 - DNA, 338 bp, Homo sapiens
tggtcccagctacttggggggctgaggcaggattgcttgacgctgggaggcggaggttgcagtgggccgagatcgcaccactgcacgccagcctgggcaacagagtgagacactgtctaataaaaaaaagagaagattagtactgtgagaaacaggacaacaggcaaggttggaagggtggccctgtggcagtttgtgcatgtgagctttgcttgtgtttttaaaaccaactattgaggtgcaatttacttcagtttgctggtaatggcacacccaagtagcacgtgcaactggatgggtactggccgtcgttatatacctgtacacttacgtacatg

SEQ ID NO: 183948 - DNA, 377 bp, Homo sapiens
ctgcaggtgtgtgcccctactcccggctgtgaggtcttcctgatgccctagaatgcagtgtggaaaagctgtgcttctggtaagcactgagaaactcggtgtctgtggatttaccctcaagcacacagctaggcgccctgttcctcagtgctcatccctgggccggtgtcattccgtgacaggtgtcagcagatgagtgactgggcagatgcttttcagttgcatcattaatactgcttggtgataagaaatacctgggctgagactgagcctctctgagatatttggttagctgcattggcgattccctcctgcctgcctgagtgaccccatgcaatctgctttccctgtgcccacccgaccccgtcagtcatggt

SEQ ID NO: 183949 - DNA, 178 bp, Homo sapiens
gtgctgcagtattacaaacaaataaaataggccgaaaagaatcccccttccacttccataaaaagaaaaatgcatcttcatgctcaatgtaaacatcacaaaagcttggtcaatggtttaatatttaaaaaatggttttgggtcatcagataactatagcaacacaacgtggaaagaa

SEQ ID NO: 183950 - DNA, 597 bp, Homo sapiens
ggatacatagttaaatctcacagcgtgactgaaggcctttgctgcgtctgacgtcatcatggcagagggcgtaaggaatggaggaaatcaaccctggtgcagagcaatcgagtccacaaggtccgacggcgcaagcggacacgggtacccctgtgcgggatccacggggctctcctcacgcagctgtaaaggcgtgctgttggtgactcgctgtcagacacaggaaaggggcgctgcaaaagagggctcttatcatcatggaggctgatgcagccactgccgctaggcaggaacggggttctctgactaggaatgccagccctaatttactgtcttgaaacacacagattgtactggctacagcacgatactgtccttggggcgccaggcttacacaggacttccttgctagagtctcggctgtcaacactgatttcatcttcttttgcttgctgcctgtgtggactttgcacggtttcagaatcgtaccaggcttactgctttcccgtgatacttctagcgttaggtcttgttttgtgttcctgtcaaacattctgaaattattgttaagacccagtcacaacaccgtcagatcca

SEQ ID NO: 183951 - DNA, 443 bp, Homo sapiens
atagatgcattgtgaatttggcaggttctgctggttgcccttcacaaaggttgcacgattcatcccttaccagtagacagggtgtgagggtgctcttccctatctttgcaacactgggtatcaccaagctcttgagatgaaatgtgacttcctcttattttgatttccatttctgtgacagatttattaattcatttgggagtctccaactagtcttctttttctctcttcttttcctttttttttttttttttttaaagacagggtctcctctgttgcccaggctagagtgcagtggtagaatcttagttcactgactgcagcctccacttcccaggctcaagcaatcatcccacctcggcctccgagtagctggggctacagacgcatagcaccacacccagctaattaaaaaaaaattttttttttttgagacagagttt

SEQ ID NO: 183952 - DNA, 381 bp, Homo sapiens
gtacaagtagatatctatcctcctcctctggaggaatagactgtaacttactccactgttcccaagagaaactaaatcagacccactgccaaaattctgctgcactatctatttgaccctgaacaagtatcttaaatctctacaggtctcaatatccacagggctgctggaagcgcaaaataagataacctatgcttagttacgataggagacacaattatgctactattataatcatggtcatccgtgagtttccgggttttatttgtttttgtattagtttttttggagtctccctctgtcgcccaggctggagtgcagtagcgcgatctcggctcactggaacctccgcctcccgggttcaagcgactctcctgcctc

SEQ ID NO: 183953 - DNA, 296 bp, Homo sapiens
acatcccctggcagagggcagcacctggtaccccggggagttcaccgcagatcctggtctttgcggagggcaacagcaagacgccctgaattctgatgagctccccccaaacttcccaaagcaaatactctgagcagcatctccctgctgtgctttaagacacctgtacactaacagtgtggcacaatagatgctgagtcaggtgacagctcggggcagccacctctcccatcaggaaagcacaggattcctgcagcatcctggcgggaaaagccccccaagaggcagctaacaca

SEQ ID NO: 183954 - DNA, 473 bp, Homo sapiens
tgtacgcttactctcaaggcttttttcctccccttttctcataaacgtcttacgcaagtggctgtcacactattgtcgcttcagtcatttgcagggaggctattaaactgcccctgctgcaagacgtagcagccagcctcaatacaactcaaataactgatgctttccctctaagattaggaacaaggcaaagatgtctgttatcatgacttttattcaacatactgctgaaagttctagccaatataatacagtaagaaaaagaaataacaggcacacagataagaaaagaaaaaataaaaatggtccctatttgcagatgtcaaaggatcatccacatagaaaacccaagaaatctattttaaaagcctcccagaggatgggcgcagtggctcactgcactccagcctgggcaacagagcgagactccatcttaaaaaaacaaaggccaggcaggcgcagtggctcacacc

SEQ ID NO: 183955 - DNA, 269 bp, Homo sapiens
atatatatatatatatatacacacacacacacacacacacacacacacacatatacatatttatactatttttatacttttttaccatatatatatatatgaaccatagagccatcagaaaatagagataagtaaaaatgaaaaaagtaaaaatcatcaactacctagccacctcaaaataccaactgttaatttggggaagtgtccttctggtatattttctatacgtgtataatgtgtttttaaaataaaaatctcaatcttattgt

SEQ ID NO: 183956 - DNA, 211 bp, Homo sapiens
aaagaaatgagtgggagacaaaaaggaaaaaagagaaaggaggagagaccacctacaagagtttgaatgcttctagccaaagaaggtgaggcattgcagcatcttaccactagatagcatatcccagtatgttacaacagtatgttacccgcaggtgagtctgcagctatctctgtcctttttcttttccaaggaaagaattcaaaggaaa

SEQ ID NO: 183957 - DNA, 529 bp, Homo sapiens
agcctgctgaggacagtgattcctaggaatgggaaagaaacaaagggaacactaaagatgctccagattactgcttgaagaaagtttccaggcttaagtacagaaataggaaacccaaacttgaggagagagcatttgcaatttggggaggcaaggtagctagaatgtgtagggtgggtcagggatgttgctcccattactgaagcaatatcgttccgagggcttcacctcaggaggtctttctattctgaatagtgggaacacaaaatattctcagccctgtgagttctgaaaattgtttcacctattcccttttggtggttccttccccagtcttgggtagtttccttgtattctgcacatatcagtattcagccaaagactttagatgatccttctgttcatagctctctccctgtgcagctctctcctctctgttattccaccctacacattctagctaccttgcctccccaaattgcaaatgctctctcctcaagtttgggtttcctatttctgtacttaagcc

SEQ ID NO: 183958 - DNA, 434 bp, Homo sapiens
tttttttctgggatacagttcagctactactaagaatcagtttgattttctcaaggcttgcttttaagcttttttagggtgggtcagggatgttgctcccattactgaagcaatatcgttccgagggcttcacctcaggaggtctttctattctgaatagtgggaacacaaaatattctcagccctgtgagttctgaaaattgtttcacctattcccttttggtggttccttccccagtcttgggtagtttccttgtattctgcacatatcagtattcagccaaagactttagatgatccttctgttcatagctctctccctgtgcagctctctcctctctgttattccaccctacacattctagctaccttgcctccccaaattgcaaatgctctctcctcaagtttgggtttcctatttctgtacttaagcc

SEQ ID NO: 183959 - DNA, 357 bp, Homo sapiens
actacttgtatcatgttctaaaaatcccaccatgtccctggagctcaggatcttcaaggccaaggggaggccctaaaggtgaagttgggggtgaaccagagtgaaggagagcatctccagtgatgagggagtccaagacccatgatcctgggtgatgggggtggacaggaggagcgtgactgtcaagctgcccaggcccaggcccatgtgtgaacagcagccctgtgaatcttgctcttggcctctgagccttggctctggcttatgctccaaagatggtgacactgcatctcctgtggtctcagggatcagctgggtcatgcaggtttcagcaggggttgtggtcaccactattcc

SEQ ID NO: 183960 - DNA, 202 bp, Homo sapiens
tagctttccaagtcccttgaaattccctataaattgaagaatcagcttgtcaacttgtacaaagaaatcagcagagattctgatagtgattttgctgaatctgtaggtcagtttggggaagtattaccatctcgacaatgttgtcttctgatccatgaacaggggatgcttttccagtttcttagatcttaggtttctttca

SEQ ID NO: 183961 - DNA, 262 bp, Homo sapiens
gtgttcgccaagcaggaagctccaccacacttaggggcccagagctttctccatcaggatttcattatgtaggaatgattgatgacattactggacacctgattgaactccatctccagccccctcccctctcctgaggttgagccagtctgaagtcccagccctctaatcacaaagttggtgtctctggggccagctcccattctgaagctatcttatctaggggccaccaagagtcatctcataactttctaaagaccgt

SEQ ID NO: 183962 - DNA, 614 bp, Homo sapiens
aagcgattcttacacaacagcctctcgagtggctgggattacaggtgtatgccaccacacctggctaattttttgtatttttagtagagatgggatttttccatgttggccaggctagtctcaaactcctgacctcaggagcccacctcggcctcccaaagtgttgggattacagatatgagccaccacacccagcctagagtagagccatttcttgtagagtaggtctgctagtgatgaattatgtctttctgtttatctgggaatatctttttctcctttgtttttgaaggatagttttgctggattttgggaatgtttggtttacattattttagcttcagcatggtttctgatgaaaaatatgtgttatctcaaggatctcttgtgtgataagacacttgtgccgcttccaagattctctttgtctttgttttttaagagtttgattgtatgcctaggtgtagatctctgagtttttcctggttggaatttattgagcttcctggatgtatagatgagtgattttcatcaaatttgagcttttggccattattttactaaatattattcttgcctctttttctcctctcataggactcctagtatgtatt

SEQ ID NO: 183963 - DNA, 277 bp, Homo sapiens
tgagctggcaggaaggggctgggcagagcaggggcatgcatcctgacataggcagcagtcagtggctgtgaaataagaccaaccacaggtcaaaggcaaggtcacagtctagattggaaaactggggctaaggtccagagagctgagttgctccagatggcacaggacagaatggaaagcaggcataccggtattggttggacattcaagctaacctaaatctagcttccagaaaagacaggttcacacatgtctattcaggatgttactaaggtat

SEQ ID NO: 183964 - DNA, 796 bp, Homo sapiens
cacaaaactgcctcaatctatgagagactgtaaagctaaaagaaaactgcagagcctcagggctaggcggcctggcaggcacacactgacagtgcgctatcttgaatgtgacctggtcttggagattccatcagaataaatagagccacggccccatgccagtctgagcactccatttaattattcaggggaaactcggatatactcaggccttgaaatgaggcagaagcttgcaaggtttcagactgtgttcaaacttcccctgctagccagccgtgttggaagcatcaagcatcgaagcctcgtgaatcagcatttggagagggagatcagccgggctaaatttggagatttttgactcagccatcagtgaaattcagcagttcctcctgaagcttttggtgaccttttggtttcatccaagctcaaataccaaaggcactgtgaaagtggatagaattgtaaacccttgcgtgaagatggtgcagctggcgttctgagatgagttcatccaccacaggactaaacacatctctgtgcctctagcttttcctgtgaaggaatggaaatggggtggtggggaggggcaagaggtggaggcaaacaaagaggaggtggcaaggagatgcccctcgccatgcctggcgcagaacgcaggaggcacccgtctggacctcaccagtgccggcgccccgtagctgtctcccaccagctctccacggagctcagaagggcccaagtcaatgcatcctccaacacatcctcgtgtattgccaactgagcctttgagcgagtg

SEQ ID NO: 183965 - DNA, 294 bp, Homo sapiens
cctgctcgtccgacatcctgggacattggctttttacctgcctttgaacttgaactgaaacattggcccttcctgggtcccaagcttgctggccttcagatggaaactatactgccagctttcttggttcttaatgcttcagacttggactgaaactaaaccattggttctccaacttgctcccacaactctgcacatgttaggtcagcctccacaatcatgtgaactacttccttataataaaaaatctctacacacacacacacacacacacacacacacactcacacacat

SEQ ID NO: 183966 - DNA, 380 bp, Homo sapiens
cgagatacaatcaggtattaagtaccttgtggtaaacaatttcaccagtgaagtagtcttgcacaaagagaaaagaacacaaacctaattaagcttctggttctacctaccaatttacaggagatatacacgggacaggaaacatgttaaaggacaccatagggatgcagtcagcaaaattcaaactttgggaagctgaccttcttacttcaacaaattgtaataaaaatggagatttaaattaaacttttaggccgggtgcggtagctcacccctgtaatctcagcactttgggaggctgaggcgagtggatcacttgaggtcaggagttcgagaccagcctggccaacatggtgcaaccccatctctactcaaaatac

SEQ ID NO: 183967 - DNA, 271 bp, Homo sapiens
ccaatacccaaacttttccaatcggctccccaattcttctgacacaactaggtcaactgactccttttccataatttctaatctttcagcatgcaattctttccatatggtactatatttccacagacacagagaacaacattctaagcctcctaaaaagattgttttctaaaagtcaaaattatatatctaaaaaaaatagattgttttctaaataaaattggcatggtttgtatgtatatcttaagcactgcagggtaataaaaactgg

SEQ ID NO: 183968 - DNA, 159 bp, Homo sapiens
gagatatgcagtctttccatcagatacaaatggaaaattgtttgtttgtttggtttgttatgggtctgctagcctataaaccaaaggaaaattggtctgccctccatgtacaatagtggagaagaagcaggactaccataataagcgcccatttggaaa

SEQ ID NO: 183969 - DNA, 190 bp, Homo sapiens
caaaaccagccacagacaatgcatagacacgagcctggctgtgtgccaagaaaactatccatggacagacatttacatctcgtctaacttgaaatgttattcctgattttttgcccccaatcatttcaaaatgtcaaagtcaccctcagtttgtgggccctgtggtggtggtgatgatgatgatgattac

SEQ ID NO: 183970 - DNA, 377 bp, Homo sapiens
gatgtttatggaagtgggatttcccccacatggagggagctcaggatctctgggactcctccattagtccatggggtgagcgtgcaggacccttccctgaggctgaagggaagaaggggtgaaagggcttttcattctgggctctctgctcactgaggcccccagggtcaccatgagcatgcaggataagctgcagatgaggcaggggtgccaacttccatggaacacgttgggaactgtgtcccctgtggagggggagagaggagcaggtgtccctgctgcagctgacacagcctcatgctcagggccagcgtgtgagccagacaagtcaggccacagacggatttcagctccaacaaacacaatcctcacatatg

SEQ ID NO: 183971 - DNA, 261 bp, Homo sapiens
gacggtgcctgtacaatgctcttcgcggagttctgtggaacagcccgttcttgcctgggctgtcctgctccgggggaccctggcaatggctgaggacattgtggtgtcacgacttggggaagcccctggcatggagtgggtggaggccagggacgctgctcagtaccctgcagtacccaggatggccccacgccagagaatgatccggccccggtgtccacagcggccggaggaccctgggcttgcgcgagcgtagaccct

SEQ ID NO: 183972 - DNA, 167 bp, Homo sapiens
cccgccaccacattccagccacacgcctcccagccacctcccagccacgtgcctcccagccacacgcctcccaccactaccttccagccacgcgcctcccagccaccacctcccagccacacgcctcccagccatgcgcctcccaccacgtacaacttgcccttcac

SEQ ID NO: 183973 - DNA, 335 bp, Homo sapiens
aaaggcttctcttgtttctcagtctcatagcatcatctgtctcttttttgtgacttgaatataattaatattttatattttgtccttgttgcttgtttggttaatagatttccaccactagactgctcaatacgttagtagggcacctgacacatagttgcagctcttatttattgaatgaatgaatgattccttcccgtaccaccctagtcttgcccactgtcatttttattctgggtattatatttcccaaccagttgtctgactttctcctcagatctcatccccatgggtctgagtgagttgccttgaatataagattcagtgatggtgtc

SEQ ID NO: 183974 - DNA, 366 bp, Homo sapiens
atccccttctcccacattatctctaactcctggaatgacaggttaattttccaacactaattttttttcatttaagtaatactatataattggaatcatacagtatgtaacactttgagtttagctttttttttacttcgtgtgatgaacttaagatctacggaaactgttgactgtaccagtaatttattcttttacaaagcttggtattccattcgatagatatatcacagtttgtttatctattcacctgttgaaagttatctggattctttccagtttgaggcaattacaaattaagctgatgtaaatatttgtgtagcaagtttttacatatacataaatttccatttttctatgttaaat

SEQ ID NO: 183975 - DNA, 574 bp, Homo sapiens
accacttgaaaaagaaagatgtagttaaaaaattatttttgctttatcttctccattgtttaatgcctgaacatacttggattttttaacagcaggaacaagacagaagactttgttagctacccaggtaagatcatttgagtccaaagaccagattccagaacagaccgcagattcctgttgaggacatgggttgtcaggacagcctggaggcagaggggtagattctgttgtaggtgtcgtaagtgacattttggatcagatttttaaccctcttttgtttttgaaagtgagtaaatattcatagcagattattctcatgaaacaagactgacactatgacctcagggaaagagtgctttggggggaactgtgtatttaattaagcaaagaaagagctgatgaaaggggctgagtgtctcagagctgttgtttcttctgccgaatttttccaaataggagcacagaagtcctgagaacactgcctctctatatgttgtgctcagtccacacactgccaacaaatgtgcatacacacacacacacatacacacctcaaagacaacccctccag

SEQ ID NO: 183976 - DNA, 442 bp, Homo sapiens
cagtcatctgaaaagataaaataataatttctcctcttttgccctctaaggtgatttcatagtaggggaggttgctacaggtcagccagaattcattcctaggctcttgggttagtggttcacagttttctctgcatccttatttggagggccttctcctattgcccataagcataacccaaattatgggtcatcctcagtgattactgagaatcattcactgcagtctacttacaactccacccttcatctcccactcaagaaaacatctagaaacacaggcatgtgagagggaggctattatggagattgctttgaagcaactaaatttatatttaatgtaagtccactgtgaagcttcaggcttcattacttacaagcgacttggagctcatctggtgcctattcatagtgcccactgtgatatggtggcacgggtggg

SEQ ID NO: 183977 - DNA, 755 bp, Homo sapiens
  misc_feature (143)..(143): n is a, c, g, or t
  misc_feature (159)..(159): n is a, c, g, or t
  misc_feature (283)..(283): n is a, c, g, or t
  misc_feature (316)..(317): n is a, c, g, or t
  misc_feature (349)..(350): n is a, c, g, or t
gccggacggctccagagcctccagagcctccgggtctgggcggcgcttcggctcctcccgagccggctgctagccccgcgccgactccatccccacaggctggggacgggcccggtgcggctgtgtgggttcgggagcggagnttgcagaatccaaggnacccatttggttctttctccgcactgcgtttatgggaggcattatggcccccaaagacataatgacaaatactcatgcgtaaatccatcctcaattcaatgaactccctcaggaagagcaatancctctgtgatgtgacattgagagtagagcagannagacttccctgcccatcggattgtgctggctnnctgtagtgattacttctgtgccatgttcactagtgagctctcagagaaggggaaaccttatgttgacatccaaggtttgactgcctctaccatggaaattttattggactttgtgtacacagaaacagtacatgtgacagtggagaatgtacaagaactgcttcctgcagcctgtctgcttcagttgaaaggtgtgaaacaagcctgctgtgagttcttagaaagtcagttggacccttctaattgcctgggtattaggggatttggctgaaacccacaattgtgttgacctgatgcaagcagctgaggtttttagccagaagcatttcctgaagtggtacagcgatgaagagttcattcttctgagtcaaggagaggtggaaaagctaatcaagtgcgacgaaa

SEQ ID NO: 183978 - DNA, 293 bp, Homo sapiens
atgtatttcaggatttatcaaatacccatgattctgtccctcaatgtaggctgagtcatcccctcttagatgagaggttctctaccctagctacccataagaatcacctgggatctttaagaaatcctgatgttcagactgcatcccagaccaattaaatcacaatcgctggggaggggtctaggcatcagtgtctctaggaggctcctcagtgattctgaagagcaaccagggctgagaaccactgtgctggacagacctacatctgtgagccagttgaggcagttgctcac

SEQ ID NO: 183979 - DNA, 721 bp, Homo sapiens
tttttatcaggcatgaaggtaggattgtaaaagtcattaagaatttaaaagaaattaagaacaatgtcacctggaattattcccaagatcgtaaatgttcataacataaaactattttcttagtctttatttgcgactacaaagtattttaagactaaaagtctaaatacaatttagtatttgctactaaatagtcttttaagatactactacaaagtctttattgaaaacatcctttgtgccaacatgtatctgcttttccagggtgtcagggcaggcagtggttctagtttccacaaggttacaaccctgttcaaatttagaagcaatgtcagaagggtgacaaggcaccattgtgacagttagaggaaagaggactcagggtgaaagttaccctgggtgaagactcctgccttgattttatcttccaggtgggaaaagaggccttgagggaggaaataaactcattgatcagtcattgggagctttttgggtgctaggcaggttcttataaattgacattaatccaagtaatgtcatttaacgatgccttttcatgaaatctgaaactcacctaacagattttttttaaaagcctgtatgttctctgtgaaaaaggggggcaccctaccaattctgaaagatagaagtgaagccatcaggttctgagttttctgtaaatttttttccctcaaatttctgatataatctttcacttcta

SEQ ID NO: 183980 - DNA, 667 bp, Homo sapiens
tttttatcaggcatgaaggtaggattgtaaaagtcattaagaatttaaaagaaattaagaacaacttagtctttatttgcgactacaaagtattttaagactaaaagtctaaatacaatttagtatttgctactaaatagtcttttaagatactactacaaagtctttattgaaaacatcctttgtgccaacatgtatctgcttttccagggtgtcagggcaggcagtggttctagtttccacaaggttacaaccctgttcaaatttagaagcaatgtcagaagggtgacaaggcaccattgtgacagttagaggaaagaggactcagggtgaaagttaccctgggtgaagactcctgccttgattttatcttccaggtgggaaaagaggccttgagggaggaaataaactcattgatcagtcattgggagctttttgggtgctaggcaggttcttataaattgacattaatccaagtaatgtcatttaacgatgccttttcatgaaatctgaaactcacctaacagattttttttaaaagcctgtatgttctctgtgaaaaaggggggcaccctaccaattctgaaagatagaagtgaagccatcaggttctgagttttctgtaaatttttttccctcaaatttctgatataatctttcacttcta

SEQ ID NO: 183981 - DNA, 298 bp, Homo sapiens
tccccgcgattcactggtgactcctcacactcagatgcccgttccattactgaagttagagagaatatgagagctcatagtggcctgtgcaagatgggtcaaagtcagagtggtggtcatggtcctggaggtggcaagaaggatgacaagacaagaaaaagaaatatgaacctcctgtaccaactacagtggggaaaaagaagaagaaaacaaagggaccagatgctgccagcaaactgccactggtgacacctcacactcagtgccagttaaaattactgaagttagagagaattaa

SEQ ID NO: 183982 - DNA, 257 bp, Homo sapiens
tgggcagtgatgtgaagaagagaaagaggagaggagacgagtgagtccctccccagccatggtctggtctggtcagcacaaggagtggcagactccactgggtagcaagaagtcaggggtggccacggtgttcacacatgaggtggggtgggaagcagggtggtaagaaacgctgtggagcccaggcattcacgcctccccaacccaatcttctggtgaggacaggaaaatcccccacagttggcatcgtctcagca

SEQ ID NO: 183983 - DNA, 258 bp, Homo sapiens
ctctgaacttcagtttttccatgtgtaaaatgaggctaattagaaaggtaccgtctaccttaaggtcttactgcgtagatgggtaaagggccttgagatggtatacacagtacacctagcagtgagatcccacccagcaggtgggattttagttactatttttcttacccatctttccatatagtttgttggcctctggtatgtttcttcttgctagcctttctgcttccacccttaaccacataatagtaatcacat

SEQ ID NO: 183984 - DNA, 123 bp, Homo sapiens
ttggtagttgctggggctaaatgatggtgttcatgggattggttacactattctatttttgtggatgttcacaaatctccataatagaaaagttttttaaatctatactatacagatatacca

SEQ ID NO: 183985 - DNA, 405 bp, Homo sapiens
aatgcagcattcgttgaaggcaagtcatgccttatcaggtataaaaacactacagtggtcctcagccttgatgggtcaacccttcttagtgtgaattttgttaacggcctgtgtctgaagtacctttctaggcactgcaactttctgagtgtttcccttcaggactctatgttaaaacaaacaaacccaaacaaaaaaacacttctgtatttccatggaagtgatttttaagaaaaacaaataataaaaatgcatgacttttgggttgccatatcagggcaaaaataaaggaaatagtgcctagaaagggattgtgaaggcagtggcaccctctgcaaatggcacctgttgctacaggtgcaggatttctgggagaagaagaggatttcttcctgacaggcaggt

SEQ ID NO: 183986 - DNA, 854 bp, Homo sapiens
cagcctcccaagtactgggactacaggcgcccgccaccacgcctggctaattttttgtattttttagtagagacggtttcaccatgttagccaggatggtctcaatctcctgacctcatgatctgcctggcttggcctcccaaagtgctgggattacaggcgtgagccaccgcgcccagcctatttatttatttttaaattttttttttttgagatggagtctcactctgtcacccaggctggagcgcagtgatgcaacctcagctcactgcaacctccacctcctgggttcaagcaattctcctgcctcagtctcccaagtagctgggattacaggtgtgcaccaccacacctggctaattttgtattttgagtagagacggggtttcgctgtgttggtcaggctggcctcgaactcctgaccttgtgatccgcccacctcggcctcccaaagttctgggattgcaggcgtgagccaccgcacccaaccaagactcttcttttaaatgacattttggatctcgtattctgtcacagatggaatccccattagatgagcccgctcagtttaaacccaatgagtgagggaggcaaggaagtggtcatgagtagaatgatagttcccttcttgagaatgctagtgaccttgtggatggaaaatcattctgccacaatttgctgggtctcttgcaagccagaggaagtttcttgatagagaatggcccaaactggtaacagaacttttcgcctttgtttggcatttcttttctttaactctcccttgccttccagcaaaaagtgcacaactctgaaccagaatatatgtccctggaaactcttaattctgaagatac

SEQ ID NO: 183987 - DNA, 749 bp, Homo sapiens
atctctaataggcccttatttgtattgatgcttgtatctgaaatacagttggccctctgtaactgtgagttctacatctatggattcaaccaaccagagattgaaaatatttggaaaaaaatggatggttgcatccgtactgaacatgtacagactttttttggtcattaatccctaaacaacacagtataacacatatttacataatatttagatgatattaggtattataagtgatctagagagtacctacataggggaatgaacataggttatatgcaaatactatgccattttatatcagggacttgagcatccgtggatgttggtatccatcagagtccaggaatcaatcctccatggttattgagggacaactgttttgctaacctactgggctctgaatcttagatgaagccttaaggcagttatctttgactgcctttatcttacccttctggtttattcaataaacagttattaagcaacctccagtaaatttggccctaaggaatctgaaatgagtagaatggttctggcctaatgtcctatcttgaagaccaaccttaaacttaatttgatgagaatgaatagaagtgtccttttttggtcccaaaccagtacaacctttagcaaacaaaccattaattaaagtcagagcacccaagcacctcccttccctttttgtgacttttattcgggagtggttggttgatgctttttctcttttggggagaccattttatatg

SEQ ID NO: 183988 - DNA, 1284 bp, Homo sapiens
taaaaatgtgcttacagtggtaacaacaggtaaaagaatataaggatagtttcagccaagtattaatctataaagttaagcggaccaacataagatttgcttaatgggttggcctgtatgcatgtgttgaattttaaaatctaagaaggattattgcattaaatttgcagggactgcccaattttttttttgtcgttttttgttttgtttttttctgagatagcagtctcaccttgtcgtccaggctggagtgcagtggcacaatctcgcctcactgcagcctccaccttccgggttcaagcgattctccctcctcagcctcccaggtagctgggactacaggcgcccaccaccatgcctggctaatttttgtatttttagtagagacggggtttcgccatgttggccgggctggtcttgaactcctgacctcaggtgatccacccaccccggcctcccaaagtgctgggattacagtcgtgagccaccatacccggcctagaaatgttttttagtggcagttaatttctaacttgcaaacaatttttgggatctagagtttttaaaaattagcgttataccaaggaacccactggtatgcggaatgtttctcatctaagtgattaattacaaacgcttttctgagacagacctatttgttgatccaagacttatgaacactcagcttataatttttttgctccttaaacgtaataaacattgtccagtttagaatgacatacttggaccacattcaaccaagagacacttgatgaaaatattatgcaaaatacctacttaaaatgtgattctgtggaattgacagttgaaggtagtattatataggcaagctgtagttcttgcctagaacaggcaagttctcaattcaacaatttgatgcgtcctttagcattgtgttaggaagatgtttagaaataagacaactcaagcaatctgctttttgtaagagtaacgacttttccttcccagttgccctttgattgttgccatctaatggaggactagcatcaggctctttttctttaattggagcagagataaaactttaagcatatccctgtgtaacatttctaaaaataaaggatactaaagtgtatactaccttactttaagagaggtgataaaacttagcatgagccatgcagtctttttgaatttttgattcattgtgtgatttggggcaagttttactgcatttgtctgtgactctgtttccacatcttcaaaatgggaataatactatctacctctaggatgttttga

SEQ ID NO: 183989 - DNA, 845 bp, Homo sapiens
cgacggacgcattcatgaatggtgtgctgggattacagtcgtgagccaccatacccggcctagaaatgttttttagtggcagttaatttctaacttgcaaacaatttttgggatctagagtttttaaaaattagcgttataccaaggaacccactggtatgcggaatgtttctcatctaagtgattaattacaaacgcttttctgagacagacctatttgttgatccaagacttatgaacactcagcttataatttttttgctccttaaacgtaataaacattgtccagtttagaatgacatacttggaccacattcaaccaagagacacttgatgaaaatattatgcaaaatacctacttaaaatgtgattctgtggaattgacagttgaaggtagtattatataggcaagctgtagttcttgcctagaacaggcaagttctcaattcaacaatttgatgcgtcctttagcattgtgttaggaagatgtttagaaataagacaactcaagcaatctgctttttgtaagagtaacgacttttccttcccagttgccctttgattgttgccatctaatggaggactagcatcaggctctttttctttaattggagcagagataaaactttaagcatatccctgtgtaacatttctaaaaataaaggatactaaagtgtatactaccttactttaagagaggtgataaaacttagcatgagccatgcagtctttttgaatttttgattcattgtgtgatttggggcaagttttactgcatttgtctgtgactctgtttccacatcttcaaaatgggaataatactatctacctctaggatgttttga

SEQ ID NO: 183990 - DNA, 881 bp, Homo sapiens
gtaaatcacttcttggaggtgccctgcacgccggtcctgggagcaggcggcctcccgggggtgcgggagccccactcctccgtggtgtgttccatttgcttcccacatctggaggagctgacgtgccagcctcccccagcaccacccagggacgggaggcatgagccggtcaaggcacctgggcaaaatccggaagcgtctggaagatgtcaagagccagtgggtccggccagccagggctgactttagtgacaacgagagtgcccggctggccacggacgccctcttggatgggggttctgaagcctactggcgggtgctcagccaggaaggcgaggtggacttcttgtcctcggtggaggcccagtacatccaggcccaggccaggagcccccgtgtcccccagacaccctgggaggggcggaagcaggccctaagggactggactccagctccctacagtccggcacctacttccctgtggcctcagagggcagcgagccggccctactgcacagctgggcctcagctgagaagccctacctgaaggaaaaatccagcgccactgtgtacttccagaccgtcaagcacaacaacatcagagacctcgtccgccgctgcatcacccggactagccagaacatttccatccggagtgtggaaggagagatatactgtgccaagtcaggcaggaaattcgctggccaaatccgggagaagttcatcatctcggactggagatttgtcctgtctggatcttacaggcttcacctggctctgcaggacacgtgcaccggaacatcctctccaagttcacaggccaggcggtggagctgtttgacgaggtgttccgccacctctacgcctccgccaatatgtga

SEQ ID NO: 183991 - DNA, 1048 bp, Homo sapiens
gtaaatcacttcttggaggtgccctgcacgccggtcctgggagcaggcggcctcccgggggtgcgggagccccactcctccgtggtgtgttccatttgcttcccacatctggaggagctgacgtgccagcctcccccagcaccacccagggacgggaggcatgagccggtcaaggcacctgggcaaaatccggaagcgtctggaagatgtcaagagccagtgggtccggccagccagggctgactttagtgacaacgagagtgcccggctggccacggacgccctcttggatgggggttctgaagcctactggcgggtgctcagccaggaaggcgaggtggacttcttgtcctcggtggaggcccagtacatccaggcccaggccaggagcccccgtgtcccccagacaccctgggaggggcggaagcaggccctaagggactggactccagctccctacagtccggcacctacttccctgtggcctcagagggcagcgagccggccctactgcacagctgggcctcagctgagaagccctacctgaaggaaaaatccagcgccactgtgtacttccagaccgtcaagcacaacaacatcagagacctcgtccgccgctgcatcacccggactagccaggtcctggtcatcctgatggatgtgttcacggatgtggagatcttctgtgacattctagaggcagccaacaagcgtggggtgtccgttgtgtgctcctggaccagggaggtgtgaagctcttccaggagatgtgtgacaaagtccagatctctgacagtcacctcaagaacatttccatccggagtgtggaaggagagatatactgtgccaagtcaggcaggaaattcgctggccaaatccgggagaagttcatcatctcggactggagatttgtcctgtctggatcttacaggcttcacctggctctgcaggacacgtgcaccggaacatcctctccaagttcacaggccaggcggtggagctgtttgacgaggtgttccgccacctctacgcctccgccaatatgtga

SEQ ID NO: 183992 - DNA, 570 bp, Homo sapiens
agatattacgtaaataaccttgaaaaggtaaaaaggagtgtttgcagttatctaaaatatagaaaaatggtttactaaaattagcaatctttttgaatattagaacagcaaaaatttctcagcatgattttggatgaaaaaatgtcatcttggaactgtaaagtttagagatgggagaatccaagaagtcatttaatggtcaacacccatttctgggaatggttacaaatactttatgtgtaatcttttaagggactttgaaagcctctgcttaatcagtaaaagatcagcaaagagaattaacttgagaaacctgctcacggtggcaaccaagaggctctatgagtttgggaataaggctgtctatttgggtccaaagatatgagattaaggtccacctctcttaattctgtcacttggcaattgagtaattagtaattgggcctcaaatttctatatcccctaagtggagaatggggtagtactcttcctcctcttgccaccactactactattgttgccacctctatactactaatatccaaagacagggttgaagttcaaaataca

SEQ ID NO: 183993 - DNA, 165 bp, Homo sapiens
ttgaagcactggggtgctgtccctgccagtagactcagctagccttgccacgatttccggttcctcccagtgccattccagagtctgagtcctgttgcaactgagcctgtgttataaaaatcataaggtggccgggcgcagtggctcatgcctctaatcccagca

SEQ ID NO: 183994 - DNA, 337 bp, Homo sapiens
catcagtgctgtaccttcctctgtctctcaagcgcctttcatccttagaatctggcttaggtctcttcctctatgacactgccctggatactccagctcagtcacactatggcatctacaacacacttaatcatttatttgtcttctaattgtttcctggtgttcataatatccctcatcttctactccaagtgcctgaaagtacagtgccaagtagtatagcactgcagtcattgcatggtgttggtggagactgctgaggttcaaaaccctcttcttctactaactagctgtatgatctagtgcaagttatttaacatcacatggccactcaata

SEQ ID NO: 183995 - DNA, 406 bp, Homo sapiens
ctgcactaggatattggcattgacgatggagagaagtgaatggatttaggagtagctctctttagaaggaagaattgttatgacttgagtggttggttagatgtaaggttgagagaaaacccagacatgattctctggtcatggttggggcagatcgaagtctggagaagtagcagtatggggaaggggctggaggaacagagggaaaacatgagttaaagtttaaatttgctgagatggaaagtgtttgatgagacaggcaagttaagcacttagatatacagatgtaaccatattataagtctagcacttaggaaagagctttgaaccctatttgagatttatatatataaaatatttgagccactcttctataggggttaaattaagccatggaaggcagaag

SEQ ID NO: 183996 - DNA, 262 bp, Homo sapiens
taataaaagacatcaactcacagagttgcagcagcttggttaatctcaggaaggataaatatgaagtaaatcataggaaggaaaaacatactcagatgaaaaccaagattaaggaaaatctagaaagtggtcaaagaatgcaaagacaacatacaggaaacagtgatacaattaaattaatggttgatttttaatcagaaacactaggggcaagaagctaatgagaaaatttttttttttctttttttggtttttgagactg

SEQ ID NO: 183997 - DNA, 1320 bp, Homo sapiens
cactagaaaatacagagcatttttgcagaaattatgtttgaattatttaatgtaccaggattctacattgcagttcaggaggtactagccttggaagtatcttggacatctcaacaagtgggtgaatatatgttaatgagtatagtcattgacaaaggagatggagtcacccttgttctcccagttgtagaaggttatgtaattgggagctgcatcaatcacatcctgattgtaggtgatactgtgtatttcattcaacagctgctaagggagagggaggtaggaatccctcttgagcagtcactggagaacacaaaagccattaaggagaaatactgttacatttgccctgatatagtcaaggaatttgctaagtatgatgtggatccctggaagtggatcaaacagtacacaggtatcaatgtgatcaaccaggagaagttcataatagacgttggttacaaaaggttcctgcaacctgaaatatttttttacccagagtttgccaacccagactttatggaatccatcttgaatgttgttgatgaatacaaaactgtcccattgatgcgcattgtccactgtataagaatgttgttctttcaaggggtttgaccatattcagggatttgaatctcaactacagagagatttgaagagtggtacatgccagattaaaactcaataaggagctcagtggcaggagaatcaaacctaagcttacaaaggttcgggtggtaatcaatcacatgcagcactatgccttatggtttggaagcttaatgctagcctcaactctggagttatttcaggtctgtcacaccaagaaggactataaagaatatggccccagcgtctgccaccagagccttctctttggaataatgtcttagtgtctgccttgaaagcatcatttaatagtgtcatgttggggaacaagtgtccttcagaacccagagaagactaccatttctaaatgacatttggtgttgatgtctgagcagcatgcttgcaccacctagtgcatgaggcacagggcagagtcatttcagtaaaagccatttctttatgtgttgactgttgtatgcccactcctccttctctcactccctttcttcatgcttccccagtttccctcctccttttcacttgaacttttttgttgacaaataccattctgaaggaattcaaatgtgactctgaaaattgttaagaggaaaaaaaatttcaaaaatggcccaaaatagttctcccccaggaaagaatgcagtggtataaatccttttcccccagcttatttttataaataaaatgttataa

SEQ ID NO: 183998 - DNA, 202 bp, Homo sapiens
accaactgataaactaagcaccaccagtaatgagacaagctgaaattatttatctcctggtatctcacaagaagaaatatacaacatcccccatacagtattttttcttttcttttttctttttgagacagagtctcactctgtcacccaggctggacttttctgagacgaggtgatcttctgaggtgatcttctggacgat

SEQ ID NO: 183999 - DNA, 263 bp, Homo sapiens
tctttctttgctgagagctttctttttgcctaatgaatccatcctcctcacctttcaatgtgtccatgtgcctaatttttcttggttgtgagacaagaacccggattttagctgaactaaggagcaaaaattcctgtatcattaagctatgaatgatcaaaatttgcaaactcctgaaatgcacctctggtttgcctgttaaaagcaagggctgagaaaggactctcgcagtacttggagacagatagacaatactagctcca

SEQ ID NO: 184000 - DNA, 316 bp, Homo sapiens
atccttcccttccctcccgctaaaatccctggctttcaatctcatgcactgggcttgcgcatccattacctctcccgggttcagtcactgccccttaattcaagattttagctcctgagagtccaacacactctggtgataatttttggtgacatctgtagcacacagttgactgtcattctaccatcctggctgtccctcaactccaccttagctaccagttccttcagctctgtcctccaagtggcattaccggtaactaagcccctctgatcttagctctaaccaccgctacactgactccctgaaggacctc

SEQ ID NO: 184001 - DNA, 419 bp, Homo sapiens
tcccctgtccccagagaggagcttgaaaaggttctggaaccttcacattccagggtccttggataaatctttgtgctttctctactgggaaaccctgcctaggccttcctggatgattatcctctcatccccaggcaaatgggcaagtggactttggatgtaggagcatgtcctgctaggggcccaaggatgaagccttcgtggatgttcgtgtattctagtccttttggtacagggacagagtgggtgccaagatacatccctgggtttgcctggcctcggcagtcctcctgccccagctcagtctccagaggctccaggaggaccaggcccgcagcttcctgtgtcagggcagagtctttgtgcaggggtcagcaccttgtgcctgccggtcctcctgcactgtgagctggggatgg

SEQ ID NO: 184002 - DNA, 384 bp, Homo sapiens
gttttaacagttaggttttatattttctctttagatctcctcagtattggttttgtctattctgtttcacttaaattatatcttcatctataggggattttatattctatattgtgtgttcctttaaattgaccatgatgaattctgagtgtgtaggtatttgtaccatttaagtcgttaactctttagaaatgtatggacttatttatattttttataatattgacagtaaaaaatatgggaaatgtattaatatgttaaacatttgacaacacaagcaagttatgtgggctttttaattttttttaaagaaatgtaaaaagtctgggctacattatgtttcccaggctgaactcaaactcctggatttgaccgggtgcggtg

SEQ ID NO: 184003 - DNA, 498 bp, Homo sapiens
atactcctgcacaagttcctagctaagggtgagcaaggtgacgctctgcattcttttttcaggctaacatattgtaaacaagtgtctttttcagggtctatttactgccacatttctcttatttttctgccttttttttgaccagggtctcactcgctcacccaggctggagtgcagtggcacgatcacagctaactgcagccttgacctccccaggctcagatgatcctctcacctcagcctcccaagtaggtgggaccacaaccacatgctaccatgcccagctaatttttgtatttttttttgtagagacggggttgcacaacgttgcccaggctggtttcaaactcctgggcttaagcaatcctctcgtttcagtctcccaaagtgctgggattacaagtgtgaaccaccacatttggcctcatttttgtgctttttgctggtgatttttctatttaaaatggtcccaagcatagtgctacagtgctgtctaag

SEQ ID NO: 184004 - DNA, 478 bp, Homo sapiens
ttagtggcccttctgtggaccttcctttcactgagctctggcctgctgaagtcctttagcaatttagatctctaacttcggcttgaatacagaaagatgttcgacctagcacacaaatgaaaccctgaatacaaaatggaaacatactaaaccttggagcctctttgctgatagatcaaaatcaaatgtattggctgggcacgatggctcatgcctgtaatcccagcactttgggaggccaaggcgagcggatcacctgaagtcaggagttcaagaccagcctgaccaacatggctaaaccctgtccctactaaaaatataaaaattagccagacgtggtggcatgtgcctgtagtcccagctactcgggagggtgaggcatgagaatcgcttgaacctgggaggtggaggttgtggtgagctgaaattgcaccaccgtactccagcctgggtgacagagtggactctgtctcaaaaa

SEQ ID NO: 184005 - DNA, 265 bp, Homo sapiens
ctgtaatggttggtacgatctcaccataggcctgttttggaagcaaggtttgaattttcttaaagaaattttgaatgttattcttagaacagcttcttgtttctcacaaaaatcatttatgtaaagggaaggagcacactgatttatttaaaatttggggaaattgcgaaccaaaaaaaaaatgcattccaatttacaagttacttgattctgtcatatgaagtggcagtgtccttttcctttcctgcttaaaaaagcagctctg

SEQ ID NO: 184006 - DNA, 495 bp, Homo sapiens
tctctcactatagttttggtcaggaaacaaagtgtatgaaacttgcaaactctggagtcagactgcctagtttcaaatcccagctccagcacctacttgctgtgtaatcttggttcagtcacaagacttctctgttcctcagtgttctcatctgcaaaatgggcataataattatatctgcataattagtgtgtgtatctcacacggacctgtgcaagcacgtagtcaacactaaataaatgttattataactaaacacatttctattatttatttaaacaaattttgctagtgcccattaggactcaggactttgttcagtgctggagatacagtaatgaataagacacagttcctgccctcaaattgcttgcaatcttaagtgggtagaaagataagaaaatgggtagttattgtacagtggatgagtgctgggagaatagaagttggggatgtcttggaagcacatgcagtggcttctaacgtggttggtgg

SEQ ID NO: 184007 - DNA, 367 bp, Homo sapiens
acaacttttccaccaaaatgtgaaacctcagattatacccttgcataatactctatatttgcctatacattattttagtaagcagagattattcactggcagatactgttataactatgccaaatgaaaagttacttatgaaaagtaactaataagttatgttactttattaactatccttgtgctgtaaagttgtaaatatgtcatttgatttaaatattcagaagaaaatcttttagctttaatgatttttttcctgattgttaaaataatatgtgctcattttagaaaatatacaaaggtaaaaatgaccataatcacagagtacattttggtgtactttttccacccttttcctatgcatttt

SEQ ID NO: 184008 - DNA, 735 bp, Homo sapiens
caaattaaaagtatataagatgaaacttgatttgctatcaagccccaagcaatttttcaactgggcattgaattctaacttttctaagatagcaatttttgaagagacacgaacaaaaatctgaattagttcatgagccttaatgtaaatctcttgctgaaatagtttttaaaatcagaatttagttatctatcagactcaaaatcatttaaagactaacaaaacacaatcatgatattctaactgtggtcaaaccaggtacccaagccacctccctgcccaacgcctttccggcttttcccctccctcttgggctggtggttatgctcctccagctctagttcagctataattccttttatagagaaaccaacctgatacacactttcatgatgggagaaaaatgtgggagtgaaatgatatttagaaagcagcagtcaggcacggtggctcatgcctgtaatcccagcactttgggaggctgaggcaggcggatcacttgaggtcaggagctcgagaccagcctggccaacacggtgaaaccccatctctactaaaaaaaaatacaaaaattagccgggcgtggtggcaggcacctgtaatcccagctacttgggaggctgaggcaggagaaatcgcctgaacccagaaggcagaggttgcagtgagccaagatcacatcactgcactgcactccagccggggtgacagagcgaacctctgtctcaaaaaaaa

SEQ ID NO: 184009 - DNA, 918 bp, Homo sapiens
gataatgcccaacactatgagaaaaaggaaacgaatctgcttaaatgcgttaatagcaattataatgttttatttgtatatttttacgtaaactaaagaacttttgagaacaatcctttgagataaatggagcagattagatccattttatgaagaaagcaatgttttgtattcatgtcttgcttaggttcatactgatgagtgacagccaggaaaagaatgcactacgacttgaaagttctataatgctctttcattagtaatttcgagtctttcactcccaaatctgtgagtcctaagagaacatagtaccctctcatttatctgcatcagtggagatgtatgtaagaacatatttcaaatcatcacttagaggctgtgttttggtgggtacccctgagatcccctcacctcactccttgaagtttggctagagaaggacagttgatggaaggtaactagaaaaataacaaggcggtctgcatctgacttgctagtattggaagcagaattatagctgaatctatatacttaccccaaatgcccaagtgcttgcctctcccctacaaagtacattctcacaagttccttttgatatttacaatcaagattcaaagggactgttgactcagatctaactcctttcttattaacactgccaacttgtactcaaatgtgtatttgtagcccaccattaaatcaattggcagtttccaaagctagaaaggggactccaagtaatgaacttaatttctcatacataaagaagtcctttcaattccattttctgcctttatgattttcgatttttatcagtgctatatttgccctcagttttgcttttttttagctgttaaatcaggaattcgggctttcgatgagaaggaaattaagttgagtgttggtcgttttatcttg

SEQ ID NO: 184010 - DNA, 488 bp, Homo sapiens
taatatcacaaggaactgtgagaatgtactttgtaggggagaggcagcacttgggcattgggggtaagtatatagattcagctataattctgcttccaatactagcaagtcagatgcagaccgacttgtaatttttctagttacattctcacaagttccttttgatatttacaatcaagattcaaagggactgttgactcagatctaactcctttcttattaacactgccaacttgtactcaaatgtgtatttgtagcccaccattaaatcaattggcagtttccaaagctagaaaggggactccaagtaatgaacttaatttctcatacataaagaagtcctttcaattccattttctgcctttatgattttcgatttttatcagtgctatatttgccctcagttttgcttttttttagctgttaaatcaggaattcgggctttcgatgagaaggaaattaagttgagtgttggtcgttttatcttg

SEQ ID NO: 184011 - DNA, 646 bp, Homo sapiens
aatgacatgctgattgctgaacagcatattctaattaccttgtggatcccaggccattcttaaattgggttttgtctttattgccttagactgttaatgaattgtttcccagtctgattgaatgctccttgaagacggacccgggtccagccactgcagtaaatattgctaacttgggggtgtaattctgctgcttttgtggttgctgctttgcttatttttttatgtctgctgtttcctgtgagattgtttctgtgtttcatatgtggattgatgttcggtgaggtttatggaatttctgtgcagcttgggttaagagtatctcttcaaaaaggtttttgcatttgcttctgccaaccttgttatcagctcaagttgtttcttatgttgaattattggggatgacctcccccacactcaagtagtataaattagaacctcgctgggtgtggtggctcactcctgtaatcccaacaccttgggaggccaaggtgcgcagatctcttgagtccaggagctcaacaccagcctgggcaacatggcaaaaccctgtctctagaaaaaatgcaaaaattagccaggcatggtggcacatgcttgtagtcccagctattcgggagcctgaggtaggaggattgcttgagcc

SEQ ID NO: 184012 - DNA, 207 bp, Homo sapiens
cctatgagaacagagttttattatcatcttataaaacagaaaagaaaataattttagaagccagaggaggctgggaaatatagtccagctgtgtcagcagaaagaaaagaaaatagatttggtgaacagttagccaatctctgccacagcgtctctctccgaatattttactttatctgcaaattcatccagctcttctgtcccagg

SEQ ID NO: 184013 - DNA, 344 bp, Homo sapiens
gagggacttacgctgccacgatctctgctgtagttggggctgtaaaatgctttccccgtgagaaatgcaagcaggaagtggtggacagccggagagctgccagagccttctgcctccccgcatttttattttgatgacctgagaaaaggcatcacatttctggcttattgatttctttttttctttgtgtatgtggttggagtggggaagttggtgggggatgaaaagaaaggaaaataaagccattcatcattgcaactagctattttgtgtagaaaatgttttcttggtttctgttttatgtgaccaagcacttacttactctgcataataatgcaaagatg

SEQ ID NO: 184014 - DNA, 420 bp, Homo sapiens
cacctaagatcctgagtaacaaacctgatgccaaaagggcaggagcaccctaatgcagaagactttcaagtgctgatgggctgggtgtatctaacgcccatgaaatcaccacaggaacacacttccaacttgggggcaaaggctgcagctatagcactctttccacatttccaaataaccactctaactgcttattcaggaaatgtggattattaaaggtgagagagacagagcactggatagaaaggaaaactggagatataccatcttgtggacaggaacttcacttacataattcttggcagaaggttattctattaagaccagcttgagacatcaaattgtctagtctcctacattcccaggattctgcaaagaagactaggtctctattgtcatggcattaccttgggaccctag

SEQ ID NO: 184015 - DNA, 405 bp, Homo sapiens
ttttttaaaaagtcatcaaagacaatcgcttctgaaacaggataaaacaagataaagtcaaagactaagcagttagttatctttcaccaccagtttgacacaaaagaattctggcgattttttttttttttaatcagcaggactaggaaattcaaacgtgcctaaagctaaaatggtctacatgagttcagctaaagacacaaattaaatccccaaaagccggactcacgggctcacacctacaatcctagcactttgggaagtgtaggcaggtggatcccttgagttcaggagtttgggaccagcctaggcaacatggcaaaacgccgtatctacaaaaatacaaaaattagctgggaatagtggcatgcacctgtagtcacagctacttgggaggctgaggta

SEQ ID NO: 184016 - DNA, 209 bp, Homo sapiens
ctatatattttctcttgcacgtctttaagaacttactgtttttttcctgcacattgtgttctgctccttctccctccctcctttcttccttttgatgttacctgattataaaaatgagaaatcagttttagtgctattctcatgtttccctgcattcagatttttattcaggcctaaaagtcaaggttttggggaaagtgggaggatca

SEQ ID NO: 184017 - DNA, 377 bp, Homo sapiens
tcaagggattaaaaaaaagaacacaattgcaacacacagtcattcatgcccagcaaattcctaaatcaatatttcatgccccatgggacctcctgggcagaagacaataaataatttgccttgattgagtaacactagatgatgccaagcccgggttccattttcttgttttgcctgctcggtagataaatatgcctgtgatgtgatatttttccatttgttatccaacagcttagcaagtactggagtagccagtaaagaagtgttatacagagaaagaacaataatcctgaccaatattattaaaccaccctgcctaactaaaatgtcaggtactatcaggtatacattgaatgaagaatgataatatttaatct

SEQ ID NO: 184018 - DNA, 233 bp, Homo sapiens
atttcacttacttatcgtttgttccagacgagtggaggggaacgtggagggggaagggcagaaggatgggatggccagatgtggatatggaggcagtagataagcctcaggtcctctgaaaacaggggttacagcctgaggaataactcctttgaaggcttcgttgtgatgcactcattccatgtttagtctgtgtttagaaaactaataaaaaacttagaagttgaaactca

SEQ ID NO: 184019 - DNA, 545 bp, Homo sapiens
tggtggtcgcaggtgatggctaaagggtacagggtttctttggtggacatgaaaatgttctgaaattgactgtggtggctgtgcaactctgaatatactaaaaactctggaatcatactctttaagtgaattggtcctatggtatgggaattatatctcaataaagctgttccaaaaagggagggagccaactgcttcggcatgggccaccactcagggagcacagtggggatgccaagcacctgctgtctctggtatttttaccattaacattgcttttatgccagccaccaactctaggagttggtgctactttatcatcctcattttaaagatgaagaaactgaggcccaggcagattaagtaatttgcccaaagtcacatggccggtggtgaactccaactctctcaagcagccctgcggcctgtaaccactatgtgggccgctacaacctaatctaagtcagtagacagctgaaccaacatgcaagttaatgctgtagtaggttcacacttatcttaatagttctgggcctgggaattta

SEQ ID NO: 184020 - DNA, 208 bp, Homo sapiens
cgggcggatcacctgaggtcgggagttcaagaccagcctgaccaacatggagaaaccctgtctctactaaaaaataccaagaaaaaaaaaaaggctgttggaaacagtgcggcttgttgagtacaatttcttctttttacggagataagtcccagccctctgccctttccccagtaactcgcacatctcagtgaagagagtaaatggt

SEQ ID NO: 184021 - DNA, 400 bp, Homo sapiens
cacacacgcacacacacacacacacacagagagagagagagagagagagagctctacatttgcaaagataagtcctactctaaacactccatgcagaaaagacatttcagttcctgccaatattctggaggtacttacagcataagtggactgagctagggagtctttcattgcttcttcaacaccttttgtaacaactattttagcaatgtcaagttacagcaaggttaagaacactactttgaattaaacgactgagattaggaataagtaggtttccttttacaaataatcaaatacataactagtgttaacaaccaaatataatatctccccaagactcttaaggtttaaaataaatgaatctttaagatcattacttagctaattaacactaacc

SEQ ID NO: 184022 - DNA, 557 bp, Homo sapiens
tcccagcctcctgaccatgacacacacacctttcagctggttttttttggcggggtgaatgactctgggaaagtatttcattggaaagtgattattctcctccagaaatctgttcacaagtgtcttcttgtgaatatcatgtgtatctatctgtcttgtttagtgctttgcaaagaattatccagaagggatgcattcatatagtattaatataagtgaagaaggacttgaccaaattttaaaaaatatcttgttagaacaataaatatgtagcatattttctaggtaactgatacatttattcttctatcccaatgaagtttggtttattcttttctctggtcattgataatgaagtggatcagaaatataggctgggaagcacattcaacaggtaatgaggactgccataaagtttaattaattattgttaggctactcagtgattgggaatgaggcactttttttattccctcttgtttaagatctcaacagagaaatgagcgcataacccaaaacatagaaaagttaaaattttgtaaatgaaaagaattgtg

SEQ ID NO: 184023 - DNA, 449 bp, Homo sapiens
gagactgcttggcccggagcgccgcggcgggtggtggcgctcacactaactatagctatccagggcgcgggtcgagtggcgagaccagctcccctgggtatgagaacgcatctttgtgcggtcggctggctggggcctgaagagcttcctcctgtgtgttcaactgaacgcagcaaaagtcttgggcagattccatggagcagctgtggaagcactgtgcagggaatcgaagaaggaaacacctccagcgaccacaaaacaaaattgaagaactataaaacaatataggccgggcgtggtggctcacgtatgtaattctcagcgctttgggaggccgaagcgggaggatccctcgaagccaggagttggaggatcccatgttgccagactgggcaacatagcaagaccccatctctaaaaaataaaaataaaaaaatttaacaattagt

SEQ ID NO: 184024 - DNA, 667 bp, Homo sapiens
atgttttcaagaattctttaaataattgcgcttatgttttcaattgtgatgaactcagttgattctttgacttggcttggcagaaacctgattaggaagtatagttcacttcctggagggtggctcacatggtcaaagcttttgtttttaatgtctcactaaactgggcagactttttttttcttttgccaagacagtaggaaagctcttataagagatgcctctaagcacaaatcactgggaaatagaacttacatgaattatttttagtgtcctgtattcaaagctcaggattcttattacttcaatttgttctttggaattttatttatgtatttttaatttcttttgagatagggtcttgctctgtttgcccaggctggagtgcagtggctcaatcatggctcactgcagttttgacctccccggctcaagtgatcctcctacctcagccttccaagtagttgggactacaggaatttgccaccacacccagctaattatttaaaaaattttttgtggatactgggtctcactatgttgtccaaactggtcttgaactcctgggctcaagctatcctcccaccttggcctcctaaagtactgagattacaggcgtgaaccaccatgcccagtctatttatttatttatataatttaaaacatt

SEQ ID NO: 184025 - DNA, 215 bp, Homo sapiens
gacatatttgtttcccctttcattatgattgtaaatctcctgaggcctttccagccatgctgaattgtgagtcaaattaacctctttcctttgtaatttacctagccttgggtacatccctacaaaaatgtgagaatggactaatagacacagtaacttaataacaaaggtattattattcttaatttacaaagaaaaaaaacagagctagagag

SEQ ID NO: 184026 - DNA, 239 bp, Homo sapiens
  misc_feature (17)..(17): n is a, c, g, or t
  misc_feature (19)..(19): n is a, c, g, or t
gggtgatctgaggatcncngatgtatccccaacacaaacaaacaacaaactattcaaacgtaagctctagatttattttctaccatgatttatggttggttaagaggcattttgaggggaaagatctctttccagagacctagaaatctatatgaagaatggtttcctgtttgggaactatatatagaaaaagttttgattagtacatttttaaatttaggtgttgggcgataacatgc

SEQ ID NO: 184027 - DNA, 363 bp, Homo sapiens
tacagaatgaatgtgtgagactcttttaaatcagtatgtagtcttagctatgcagatttataactacagagtgaaaaaaactattatctagaaattagcttaaagaactaagagtgaaagaaattgaacatcttaatttagccttacctagaccctgtggaaacccacggccacagtatacataaaggtcctccaaaataatggacagaccattcctttttcacaaaggtcctactaaacaagcaggcaccacgtgggcctatgcttgtaatttaatcctatacaggaaggcacggtgttctgtctcacaggtctgacatacttcacccttttgatagaaatacctcacactgggataaccca

SEQ ID NO: 184028 - DNA, 349 bp, Homo sapiens
gatcttcagtcctacattggataagaagttggtttcaggtttaactcaggttagatgtggagggtacctgtgttcccaataatgtttgcaattttctccttatttcactaatattagtgccatcagcttaagtgatacatacacacgcagccctatatgagctcctggcagaaaatccttgccaaaactgtgctgacacactttcaacaggtgtgcagcacagagaccattacggaaggatttatgttcattaggtgtgatttgaagtattgctaataagttgtatttcctgcttttgcacaataagcctaaatgctgctttctgttttaaataaaaactacatatttt

SEQ ID NO: 184029 - DNA, 219 bp, Homo sapiens
gagacaaccccagaacatcctgcgcccagcgggacaatcccagagcctcctctcccagtagagctacacgagacaaccccacaacatcctgtgcccagcgggacaatcccagagcctccagaacctcctctcccaatagagccacacgagacaaccccagaacatcctgtgcccagcgggacaatcccagagcctcctctcccagtagagctacacgag

SEQ ID NO: 184030 - DNA, 372 bp, Homo sapiens
ggctgtcagaggttcccgaatctcgacaagatgtttatacttaacactactatactgtatatgtaaaaatgattaagataaatgttatgtgttttttaccacaataaaaaaggaatacaatatcaaacagattcaccttgaaaatattatgctaaatgaaaagagtgagacataagagatcgtatgtcatcatgctttcatttctacgaaatgacctgaacaaatatatctatacagcaagagagtagactgctggttgtcaaggactaacgtgggagaagggaaagtgactgctaacaggtatgggtttatttttaaagtgatgaaaacatttggaaattaacagtgatggctgcacaactggtcgagatt

SEQ ID NO: 184031 - DNA, 183 bp, Homo sapiens
cactctataacctgcttttaggtggcactaagaaactttctcatccaaacaaattcagataagattttcctgctttagtatcagtgagatcacagacacatgcttttgccgagctgatagctttgtcttatactatatgcagaagtttaaaagcatccatctaacagctagcgtcgttgtgta

SEQ ID NO: 184032 - DNA, 351 bp, Homo sapiens
tgcaagctttaaataaatcatagaggcttctgcttctgggaggactcaggaagcctcccaatcataccagaaaccaagcaggaatgggatgttttatatggcagaagtagaaacaaaacagagagaggaaaaaggtgccacacgttgtataaccctgttatacaaccagatttcctgataactcactatcacaaggtcagtatcaagaagatgttgcctaaccattggtgaaagttctgccccctaccacccacacccctcactgcttccaggcagaagcctgaggcagaggcagagccactaggaaaacctctaatagggcagagcagaaaaagtatatgggcttggagg

SEQ ID NO: 184033 - DNA, 851 bp, Homo sapiens
gggacggcgggacccttacagcccaaagaaccctgaggagcagccccctttcgcacgtggaggggccgggggcttgcagagtgtgacgcgtggtgttggtgaggaggcacgtgctgtgcagccgtggcccagggcagggcgaggctgacgcgggaaccagggagactgggattggtgatgtctctgcagctggatcgtcgaggacccggctattgctctgtgttaagcggcctcctgggggcacggctgcgtgttttagcttaagtgcacaagggttcactggacagctcagtaggctgggctctgcggggacgtggccaccatgttcaccgtgggaggtcctgctcctcacccgacggatgcctctggcaccaaaccctcccaccagccaggcctgccgcgcaaagcctcccaggcaggagctgagttaggttttcagccagggcccagaggccctgaaaagcccgggcagttacgaaacagcatttacgtaaaggattgattcaattacacagggcaggaagcatcagccaagtgggtgaaacccaaaattccaccccgtcgagaggctccctgagcctgggctgaccaagagccacgagctcagatggagcaggttctgtgtccaaatgtggagcccagccaagctcctgcacgcctgaggctttccagatgggcaagcacagtcacagtgccgtggtcttgagcagctgcaggagatccgagtggcttcccctcaggatccagagccgccctccccagccttcctgatgcagggaagagaaggcaaggagcttctgggaactcgcctgacccgggtgctctgctcggacatccaggaaaatgcaacg

SEQ ID NO: 184034 - DNA, 408 bp, Homo sapiens
ggaattcttttgtacatacattcaggttaggccagttcagctcccacccctgctggtggaatttagatcccgtgatgtgagtgtggtgttttcttctcctaccctctccccaccatcaatctatattttatcacttgcaaaggtggttgtaaactaagacaaaatgaccaaatatcacacattcagatttatgctaatgaaatgtttagatataatcttaccctttttttcttgtgaaatgattgatttctgagccttgggggtctggttccattgaaatacagcaggaccctcatatccttttggagagaatgaagatgaacccttgcagaatagaacatccttaaaattggtagctaaggccagggtttttatgtgttttagagcaaagtttcgcaaattgcttgc

SEQ ID NO: 184035 - DNA, 310 bp, Homo sapiens
aagatggggctagaaggtaaagaatcatcctttaggaaatgtggaacaatccaagaattttaagcaaaagaaagatgtgatcatattcacacttctgaaaggcaactgtggcagacaggcctggcagaagataactttagcagaaacatctaggagaaaacagactggggggctggagtaagagaggacaaagaagcacaaagaagctaccagacaggcccagggttgggaagccggcttctgcttccagccctcagcactggcaagaatcctcgcaacagaaagcagcactgggccattctctgcctag

SEQ ID NO: 184036 - DNA, 185 bp, Homo sapiens
gaggcatgaccacggtggggaaccggaggcagggatatggccaagacgggcctgggaatcccgggaatccgagaccctcctggcatcttgctggagacactaagctgcgttgctggggaaactgcctccggggcagcccgcccctcatgaatgattcatcagcagcgctggtcgctcccccaccg

SEQ ID NO: 184037 - DNA, 599 bp, Homo sapiens
tagcagcgtcatttagagccataggatcggatgagcccactccaggagaatgagtgtggataggcatagaagaggactcagaaccaaggctggcacatgccggtgttcaggggctgccagagatgacagaaacggacactgagtttgagcatttagggagggcagaggaaacatggagagccaagtggaaggtgttgcaggaaggtggttgtggtcactgttactgaaggatactgaagggtcagtggaatgaggacagggcagcagccatgaagtggaacatggtgtagggaggcgcttggctccagagacacactgtctgcctacatcactcaacaggtttgtaattgtcctagtccatttgtgctactataacagaataccttagactgagtaatttttaagcaacagatttattgctcacagttctagaggctgggaaatccaagatcaaagcaccagcagattcagtgtctggcaggggcttgctctctgttcccaagatggcaccttgttgccgtgtcctcacttggcagcaggaggaggagcccagcaggaggaggattgcccaggaggagagaatgggatctctagacacc

SEQ ID NO: 184038 - DNA, 614 bp, Homo sapiens
atagaaaacagactgacaaaaatgaacagagccttggagatatgtggaacaaagcatctgtcatgtcattggggtcatagaaagaagaaagaggatggagttgaagaaaatttaaggaagaagggctgacaatttcccaaatttgaccaaaaaaaaaaaaatcaaaatgctgagtaaccaccaaagaagataagcccaaagaaatacatgccaagatttatcatggttaaactgaaaattaaaggcaaagacatggtccctgaggctagccagagcagaatgacaccttacccctagggccaaagcaattatgagtggtagcaggtttctcagtggaaaccaccgaggccagaaataagtgacacaaatgctgaaagaaaactgttaattcagaattctatatccagcaaaaatgtccttcaagaatgaagtggaaatcaagacattctcagatgaaggcaaattatgagaaatgtaaatgagcagacctctaacgacagttaacaggaaacaaaggaatcttgtggcatcaagcaggaagacagaacatagaatgaaaatatcaataaatgcaataggcttacctttaccttgtaagtattctaaattatgtc

SEQ ID NO: 184039 - DNA, 444 bp, Homo sapiens
atagaaaacagactgacaaaaatgaacagagccttggagatatgtggaacaaagcatctgtcatgtcattggggtcatagaaagaagaaagaggatggagttgaagaaaatttaaggaagaagggctgacaatttcccaaatttgaccaaaaaaaaaaaaatcaaaatgctgagtaaccaccaaagaagataagcccaaagaaatacatgccaagatttatcatggttaaactgaaaattaaaggcaaagacatggtccctgaggctagccagagcagaatgacaccttacccctagggccaaagcaattatgagtggtagcaggtttctcagtggaaaccaccgaggccagaaataagtgacgttcctcatcccagtgacgttcctcatcccagtgacgttcctcatacccagtgacgttcctatcccagtgacgttaaatcc

SEQ ID NO: 184040 - DNA, 494 bp, Homo sapiens
atcctagggaagaagtgcacttcacagggattcagtacaggtgtagagaattccctgatagagaattggaacacatcaagagtttgcaaattgaaaaggtacttttatgtacttatccatggtggacaacctgtgtcctagggaagaagcgcatttcacagggattcagcacaggtgtagagaattccctgatagggaactggaacacatcaagattttgcaatctgaacaggtacttttatgtacttatccatggttgacaacctactgtgctagacatttgctgtagtaactccttgattttttcctcggttgtttataaaattaaacatttgaagtagcctattgaaaagtcttaaaagaagcatctcctctattcctttagaatacagtatattaaacaagtgataaagtccaaagaaaaatccttattcttttcttgctttaaaaaatgcactttattttattaagcattatatctatcttttaaaact

SEQ ID NO: 184041 - DNA, 216 bp, Homo sapiens
accttggaagttgaggaaacagcagaagcaagaggccacttgaaccttcccctcctcacattcctccctgaaacaggccataagacctaggttactgtgtaaccttctccctcccttctcccttgaagaatgtaatgtgacaggtgtcttgccctataccgggggcaaggaatgtcacacagggacaagaagaagaatctgaaaaaacagacattg

SEQ ID NO: 184042 - DNA, 563 bp, Homo sapiens
atatctatgatgaggactgaaaggcatcagcaatgggtcagctatcgcagagaagggaaggagggaaaggagcaaggatgacttccaaaagggtcaacaaaggagtgacagtgaaatggtgacaaatactgagaatttttaaagaggattttttttaaaaattgggaaagtgtgctatgacaaagtcaagggaggctcatttcaagaaggaaaatgtagctaaaagcctcaccattgtagagatggagtgagatgaaaactgtagactccactgaacacagttgtgaggatgtcagtctactgggaggtggaaacatttaggtttgggggaggcagcagagggagaaaggttaagggagaacagatgagattcttctttgaacagctcatcatgaaggagagcatggtggttcagcctctcttcaatgactttctcatgtctaccagcattttgtttcactgattttctctattgcttatctgtttttggtttcattggtttctgcttttatttgcttgctttgggtttactttgctttcctactgcacttgacaagtcttaa

SEQ ID NO: 184043 - DNA, 201 bp, Homo sapiens
tctcggagtttgagaccagcctaggcaacatagtgagaccccattcctccaaaaacatttttaaaacatagccaagcatggtggcatgcacatgtagtctcagctactcaagacgctgaggtgcggggattgctgggcatagcagtttgaggctgcaatgagctgtgatcatacccctgcactccagcctgggtgacagag

SEQ ID NO: 184044 - DNA, 332 bp, Homo sapiens
tcagaatcatggtcttggtgtggccagaagctccagggagagttatgtgcattttccagcttctagtgggtgtcctcaccttggctccaggtcaccttgttccatctttcaagccaacaatgtagcatttttcagtctctctctgactctgacctttctgcctccctcttataataacttttgtggctatactgggtccaagcaatcaattcaagataatctttcatctcaaggtctatacccttaatgcaaaataccttttctcatgtaaggcaacatagtcataggttatgaggattatgatgtggacatctttggtggggccattattc

SEQ ID NO: 184045 - DNA, 190 bp, Homo sapiens
ctgatgggatcattggtccgagagaaattagctcatcagttattgaagaagggggaaagttaatgaccacaagagggcttgcagtgaccctaaggcaactttcagagctattctgcaagaagatatttttatttcccaaaccaaggggtaatttccactgggcttttctttttttttttttttttggggt

SEQ ID NO: 184046 - DNA, 560 bp, Homo sapiens
atatgtctatcatgagtttatccttaaaccacctgaaatgtgatcttccctttttatttttttgagacaagagtgttactgtcccccaggctgaaatgcaggagtgcgatctcggctcactgcaacctctgcctctcgggttcaagtgattctcctctttgcctcttgagtagctgggattacaggtgcatgccaccatgcctggctctctcttttttttttttttttttttttgacagcaaggtgttagatggggtttggctgcagttggcagacatgaggctccccaggcctgccagacccaaagccaccgaactgacccctctcgcagtctcaggagagcagtgttcagtttccccagatgcagaatgggaacgtcccatcagctcacgggttctccaggctggcgtgttggtgtcctgggccgggggctgggagcaatgccctgtcgtcccagaatgggaaggaccagcagtggcttctacaggctgtttctgtttccttgagcgtgttgtgtttttgccaatgagggcccgggacagcacccatggacataccct

SEQ ID NO: 184047 - DNA, 351 bp, Homo sapiens
cgtgtggtgaaaggatattttggatatattcagttaaaatgtattattacaattaatttccctgttttttttacctttttaaaaaagatgtggctaccagaaaattaaaaatgacaaatatggcttgtattatgtttcaattggaagtgctgttctaaatgatctggaagaagagtcatcctggctgaggtgacagaggggtgtcgcagtcccagttcgggataactggaacccacattaaacaactcagagaatcagcagaggtcatctgaggcctggctctgagtgcagattcagtgggaccttattttaggccagggaaaggggcctgatggtttaggttgagggatc

SEQ ID NO: 184048 - DNA, 893 bp, Homo sapiens
ttgaggactcccgaggtcctgaagcactggggttcataacctgggaagaagatagaggaaaaagtaaactcttgagagctcactcagtgcccacagtttcacgttcaccttcagagcggcccctggggaaacagtaacggatggtaatgagacagggctcagagtgcatgttaaactttctaagctcagctctgcccaggggagctttccgacctgcagagccttctttccaccctatcccacgccaccttccacaggagaggccccacactcacccgttccacagacaaaagaaacgcacacctgccccaaggaggggacttaactaggacaacaggattcaatgtttaccaggctaacaagaaaaatgccgaacaagccaggaaccaataactaagtgtcaaacagacctgcaaggcccaatgtggcttgcttcacaggaagaggcacacaagcacctcttagaacccctgcattgaaacactcccacaaattcccccaggatgcagacgggagatgccctgcagtcactcctggcctccagaactgggaggggctcaagctctggcccagtgcgaaggcaagaggcctctattcctggctacgagaatcaatagaaactcatggacttctagagagccttgccaaagatctcgaaactcaggaaccacgtagggagccctactgttcaccactgtatgttgccctctgggcttggcagaaatgtacctaagtgcaataccaaggggcaaataagaagccaaactgtggaaaatgaacaggggagcagcggcagttcttggagttggggaaaagagagaaaacgtgttttttaacatgaaaatgtttgtctagaattgagaatgcaaagaaatgcccagaaagcactggcg

SEQ ID NO: 184049 - DNA, 894 bp, Homo sapiens
  misc_feature (58)..(58): n is a, c, g, or t
gaggagatttttaaagattatctggtcaggtacagagtggctcacacctgtaatcccnatactttgggaagctgaggcaggcggatcacctgaggtcagaagttcaagaccagcctggccaatatggggaaacagtaacggatggtaatgagacagggctcagagtgcatgttaaactttctaagctcagctctgcccaggggagctttccgacctgcagagccttctttccaccctatcccacgccaccttccacaggagaggccccacactcacccgttccacagacaaaagaaacgcacacctgccccaaggaggggacttaactaggacaacaggattcaatgtttaccaggctaacaagaaaaatgccgaacaagccaggaaccaataactaagtgtcaaacagacctgcaaggcccaatgtggcttgcttcacaggaagaggcacacaagcacctcttagaacccctgcattgaaacactcccacaaattcccccaggatgcagacgggagatgccctgcagtcactcctggcctccagaactgggaggggctcaagctctggcccagtgcgaaggcaagaggcctctattcctggctacgagaatcaatagaaactcatggacttctagagagccttgccaaagatctcgaaactcaggaaccacgtagggagccctactgttcaccactgtatgttgccctctgggcttggcagaaatgtacctaagtgcaataccaaggggcaaataagaagccaaactgtggaaaatgaacaggggagcagcggcagttcttggagttggggaaaagagagaaaacgtgttttttaacatgaaaatgtttgtctagaattgagaatgcaaagaaatgcccagaaagcactggcg

SEQ ID NO: 184050 - DNA, 568 bp, Homo sapiens
aaaaaatacaaatataaaagagccaaaacaaaaaatggggtttgtacttatacattatatttttccttttatgaggtcgcctggtcacagcatgaactgaagaatgtaacatcgggtgctcccatcatgctttctgtcctgataatgtttgctgtacatctctgcttaggcactcacgtctcataattattccaaaatataatgttttgcttaaaaaaaatgctcatttcacgtaaaaaaatcccccaaatatgctgcaaatgttactgtccatctgtgcatatttgcaggtgtcaaacaactggtgagtgctgacaatgcattattatgtacctagatgattcagggataatttattagtaatatttccccaatttatgattatctaaagtatgcacttacaaatgtgcaataccatttcagccattaatggcaaagttagccaaataaatgatcatttatcaaaacccagaaaccgacacaggcacaatctacttaacatttcaaaattaagttaccactaatagaagcactacaatttttccactggattataatgggaaatcat

SEQ ID NO: 184051 - DNA, 362 bp, Homo sapiens
tcaaatcgccataaacaaaacctaacaaacattccactaggcctaaagagtatacattcgcatttttttttcttaaagtctctcagaagtttcaccatacttatttccaatttgctaataaaactcattaaaaagaggttcagtatccaattctggcattctggaagtattacttcagcttaataaacacatgcaacacacatgctgatgttctaattcactataaaatttaattccgagggcagcttagaaaattaagcttagaacacagggacctgctgagaatgaggacaaaaatggtggatttactcttgagacaaagggtgtcttcctaacattttcatcatctttatgacaccgtg

SEQ ID NO: 184052 - DNA, 382 bp, Homo sapiens
gtcattggagccggcccgttgctgaactccgagtcatccatcagggacaagattaagaacacaattatttctgactgacagggaccaaatctgctagaatttttttttaaacaattcggggggaaaaaacccacaatatcatcatcttaaggtgtctcccaagagactgggaaccagattaatacgcttttaatgaagtagagatcattatgtatgaaggggaaaaaaaagaaaagaggtactattcaagctatttagttatggtggtggctagaaattaaaaaaaaatgcagacggcatatctttttcgacagctgtccagattttattcatactgttctaaagaaaaagacgacttttttttttttctgaaatcttttct

SEQ ID NO: 184053 - DNA, 581 bp, Homo sapiens
gtatctcactgttgttttgatttacaattccctggtagttagtgatgttgaacatcttttcatgtgcttattaaccatttgtgtatcttctttggagaaatgtatgtttagatccttcgtctactttttaattggatgtttcatcttttatgagagttgtgagttctttatatgctctagatacaagtcccttttcagacaagtgatctccaggtgtttccttctgttccatgggttgtcttttcactttcttgatagtgtcttttgaatcacaaaagttttaaactttgaagaagcacaacttacctgtttttttcttttgactcttgtgcttttagtgtgataacctcagaaatcattgcctaacctgaaatctcaaagctttactcctgtgttttcttctaagaattttatagttttagttataaaactagcatttaggtctgtggctcatttcattattttttatatatggtgtgggatagggaccattattttatctaatagtatttatctttttttgattatggaagcaatacatgcttattgtagaaaacctagataaagcagaaaaacataaa

SEQ ID NO: 184054 - DNA, 746 bp, Homo sapiens
gagggctttcattatactcttccaagtcctcaatactctaaaacaaaaagtctagttcactgacaaaccatcactttacatctcaggttttaaacagggtaaattagatgtcaaaggaaacagcttttaatattcaaaggatgctggttatttatttcaaatttaaaaactgtaatcaatacatggagctccaaatacttaaattttttaattccagatttcagtgaaatattattatagcaggtccaacagtcatgtagtttgcttgaataaaatggcttgatgaacatgttacagacaagatggaccaaagacagaaaaagactgtcagtcttatatcatggaataccatattttttcaccaggtagtgaccatttgttatcactaatagtccacataacgtggttttcattgaagggataaaatggtctgtgatatgacctaatcaagttggggaaaacataactacgtatgaaacatatactagtccctcaacaaatagttcagcagttcatagtccctaaaatgttgtatgttaatactgaggaagacgtaaaaaatgagtacacaatctcttccgtattcctgtgacatgagcaaatgcacgaataaaaaaaaaagtaatacaaaacttgtgttactgctatggaagagcaactcactcggacatgtagccaaaaatggagactgatgtcgacttagttggcacaagatttcaatcagtcaaaaaaaaaaaaagaaaaaa

SEQ ID NO: 184055 - DNA, 479 bp, Homo sapiens
ctctgaaagccagaatttcaagaccatactctcttctgtgaattaaaaataattacatatatatatatgtacttgtaaacacaaacatatagatacatacaattatatacatacagttatacggggtttcaccatgttggccaggctggtctcgaactcctgacctcgtgatccacccgcctcggcctcccgaagtgctgggattacagatgtgagccactgcacccagcaggcagttctcaaaaaactatacatatatttatatatagactttgttctcatctttatccttttcgcccttaataagaagtagcaaggactcaataggtggaagaacacagagcaagaagaaactcccgggaaagaaaactttattttttctcaaactattaccttgccacctaaattgtactatattttatcttgttacatgatgagacttccctttgtgaaatgttgagaataggcatcatatctta

SEQ ID NO: 184056 - DNA, 302 bp, Homo sapiens
catgaactcgttgcctaagccaacatctagaagagtttttttgatgttatcttctagaatttttatggtttctggtcttatatttaagtctttgatgcaaattcacattgaatttgtgagttgatttttgtataaggtgagaaataaggatcgagtttcattctcctacatgtggcttgccagttatcccagcaccatttgttgaataaggtgtcctttcccccactttatgtttttgtttgctttgtcgaagatcacttggctataagtatttggctttatttctgggctctctattctgt

SEQ ID NO: 184057 - DNA, 720 bp, Homo sapiens
gtgatctgcccgcgtcggcctcccaaaatgctgggattacaggtgtgagtcactgcagccggccaagattcaaattttttagaaacaattacatgcctacattcaacttcagtctgggagcagtggctcacgcctataatcccagcactttgggaggccgaggcaggtgaatcacctgaggtcaggagttcgagaccagcctggccaacatggtgaaaccctgactctactaaaagtgcaaaaaaagactgggcatggtggctcacgcctgtaatcctagcactttgggaggccaaggcgggcagatcatctgaggtcaggagttcaagaccagtctggtcaacatgacgaaaccccgtctctactaaaaatacaaaaattagccaggtgtggtggcgggcacctataatcccagctacttgggaggctgaggcaggagaatcacttgaacccgggaggcagaggttgcagtgagcccagatcacgccactgcactccaggctgggtgacagagtgagactctatctcaaaaaataaataaataaaataaataaataataaaaatgcaaaaattagctgggcagggtggtacatgcctgtagtcccaattactcaggaggctgaggcaggagaatcacttgaacctgggaggtggaggttgtagtgagccgagatatgccactgcactccagcctgggccacagagtgggactccgtctc

SEQ ID NO: 184058 - DNA, 421 bp, Homo sapiens
ttggaggacacctagctggtatccactgcagaattgcttgcttgcttgcttgctggtggggagaaatccccgcatatttaaagttggagaactttttttgagacagggtcttgctgtcacccaggctggagtacagtggtgcgatcatggctcactgcagccttgatctcacagggtgaagcaatcctcctgcctcagcctcccgactacaggcgtgtgccatcacacctggctatttttggtagagacgaggtttcaccatgttgcccagtcttggagaacactttaaaatgttactgcccagaacaaaggggaggtagaagagtctaacctgctcatctttagagccttcttcagaaagaaacccactcctctctgggtcttcatctgttttaagattttgttttttaaggaggtctcg

SEQ ID NO: 184059 - DNA, 486 bp, Homo sapiens
taagaatctaatgcctgatgatctgaggtggagcagtttcatcccgaaaccatcccccaccccctcatccatggaaaaactgtcttccatgaaaccggtccctggtgccaaaaaggctggggactgctgttatggagtaccaatggcccaaataacatacattgtgcccataagtaatttctcatcatctaccctctttgcaccccgccatcctttcaagtcttcgttgtctatcgttccacactctacagccatgagtacacattatttagctccgacttagaagtgagcacttgcaatacttgtctttctgtgtctgacttaagataacggcgtccagttccatctaggttgctgcagaagacatgatttcattcatttgcacaactgaatactattccattgtgtatatatatcacatttcctttatccagtcatctgttgatagacaccgaggtggattctgtatcgttgctactgtgaatc

SEQ ID NO: 184060 - DNA, 352 bp, Homo sapiens
tccagtcacctccaaaagttcccacctctcaacactgttgcattggggattaagtgtccagcacaagaactttgggagaacacattcaaaccatatcaccacatttgctgatgttcttcctaccttcacagccactcccaatagaaattccaactccacaaagacttccagtgacagttgaatttggagggttgagaccagctcatgacccagaaaggaaaacagaaagcttactttttgttttgttacaagtgcagtctcttaaaaataaccacaaaatgcccccccaaatggcatatggaaaacagcacagagatggtgtgttaatctacctgaaatgtctttctaagga

SEQ ID NO: 184061 - DNA, 315 bp, Homo sapiens
tgaaaattttttccagtttggtaaatttatctgtttcatggtttctgccatagagaaatttagggatttttatgtagctgaattgttaccaatctattctttcatggttcttggttactattatcacagactgtcattccccatgcagtttgtagaataattttccagtgatttcttcaaatatttttatgttttcagttttacctttcaatatttagagtctgtactttttttcctagatatatatccactagtcccaacacaaattgaataacctatcttttctcactgattggaaatgctacctttatcata

SEQ ID NO: 184062 - DNA, 171 bp, Homo sapiens
atataacttttgctaacagtgggggagagcggggagggttgatgatccccaccctcagaaataaaacctcaacaaggacttccagtaactttatgtaaaagactcaaaaagatacagaagaagccgcttcgcagtaagaagccgcttcgcagtaagaagccgcttcgcagt

SEQ ID NO: 184063 - DNA, 202 bp, Homo sapiens
gttaccacccccacccaccctcggccaggtgcccttcagagtgtggcctccagcggagcggcggtagaacctgcgcagctgctgctttccagcgtgtcgcccagacagggcaccccttccctttccctcagccccgcaacagtgaaatggacataattcccccgtccaggattatggggattaaattagaagtcaacttcta

SEQ ID NO: 184064 - DNA, 291 bp, Homo sapiens
ctcctgcagctcggcctcctcaacctgattggaaagtacagccagcacccagactcagggatgagtgacagcgtcaaggacaaattttccatcgcgttttccatcgtgggcatgtttgcctcccatgcggtggggagcctcagcgtgttcttctgtgcggagatcaccccgacggtgataaggtgtggcgggctggggctggtgctggccagcgcgggcttcggcatgctgacggcacccatcatcgagctgcacaaccagaaaggctacttcctgcaccacatcatcttt

SEQ ID NO: 184065 - DNA, 608 bp, Homo sapiens
agctccataaatcagggcacacctctgattcatattggtatccccagcacaatgcctgcatatagcggtagtcagtaaacgattgctgaaattccctgaccactttgaaaaagaaatctattaatacattacagagaacttcacagaaacttaacaaggctttgcacatagtatgtgcttaataaagggctgctgactctgaatgtagtaaaaatggtacatctcttaggtcaagtctatatatagcaattcttgctagtcccttcatgccacaatagtaggtaccaactctacacagacagacatccctgtgatgtttcaggcactgaatattacacttgccttaaaccatccacccctgccagcttaccaggtggcacaaatgtctcactattagtcacttcttggggttaaggcattagctacagaagtgccctactggactgctttcagatggaggaaaaaatacaccagaagccacctgaaagacttcacatctttcagaggacctggagatcattcatgcccctctccttccaactaaaatctgtactccagagagaactcagaacacaggaaaggatcccaaagagtcagtgttgagcaca

SEQ ID NO: 184066 - DNA, 277 bp, Homo sapiens
attcgctccttactcagcagtgcagatggcaaagccggtgccagcacagatgtcttttgggatcaaagacaagcttagcagagtcacataattcgagacaagagatgtgggaaggagtagtagtcattactctccatctctcagctctgattccagtgaccccaaatcacctgtcccatcatagttgactacatgctaatccctacttcaccccctaactggatcttataattcagccaagatctggctgtctaaaacgtatctttgtgcacatgca

SEQ ID NO: 184067 - DNA, 650 bp, Homo sapiens
agagctagcctcaccaaaaataaaaaatctaaaaacaactcaaactatctttttattttttgagacggagttttgctcttgttgtccaggctgtagtgcaatagcgcaatctcggctcactgcaacctccgcctcccgggttcaaacgattcttctgcctcagcctcccaagttgctgggattataggcgcccgccaccacgcccagctacttttttgtatttttagtagagacagggtttcaccctgttagccaggctggtctcgaactgctgacctcaggtgatccacctgcctcggcctcccaaagtgctgggattatagacgtgagccaccgcacccagacaactcaaactgtcttaattattaaaatcttgaatatagctcttaaaaattttaagaattcactaacaagaatttgtcctgaaagcaattttccaagcagcaaatgggaatttactaatgcagctaagctgtagtggaacaagctctcaatctgaaaccagacactctgggttttagactaggtctgacagtggctatgtgacctgaaatgaatcaggatgtcttcacctgtaaaatgggaacaatacctatttatctcattcagttcctaggaagcttgaatgagaccacagaaactctctgaaa

SEQ ID NO: 184068 - DNA, 797 bp, Homo sapiens
ctaaagacaggctaagaaagagatcgccttaataagaatatttttcaggtagtagaagccaaactcttaacagatgggaaaatgaatgaaagttgaagcccagactgctgtctcacaagccctcatgcctccagggccaggtatggtggcgcatgcctttaatcccagctactcgggaggctaaggtgggaggatcacttgagaccaggagtttgagaccagcctgggcaacatagtgagaccccaatctctaaaaaaaattaatttaaaaataaaaagtagtacatccagtaagtgggaagaggagagatgcgaaacgctattttgtgtctctcctaagtggagaggagagaagctattggagagctggctccaagtgagcacccaccaaagagaagggccaactgatggagcaaactgctgaagaagaggggaagtgctggaaccccgagcccaagtagcagagtctgccaggaaaggcacacctgctccttcctcttcaacaacaggaaggaccagcacgcttatagatgtctgcacagaggagatcaggagacctgatggcctcggcattttctgggaagtgagggggaaagtctttctgtacatagcaccaatacctggtacacagcaagtgctgttatcatttactgaaggaatgaatcctggggctacagcataacccacaaggagcctagaatctggtccctgcccaagtcaccactccaagctgttgcctttctcccctatacctttcatcaatctgtcctcatctcagatggaaacatgagctacca

SEQ ID NO: 184069 - DNA, 134 bp, Homo sapiens
gacagggagaaggatgactcctggagtttcggctgagctaggtcaatgcaggtgctgttgtggataaggggcttgggcagttcaccttgggtgtaggttcaccctgagctggttcttccatgctttcctggtgc

SEQ ID NO: 184070 - DNA, 209 bp, Homo sapiens
cgttagacaatgttactctttctgagagatgttcatgtgagagatgttccatattttcaattcaaacaatcttgtaattgctggctgctgctgttgttcacagcacttggctttgcatctgtgcctcttacaattccagtcttgccctttgtttgaggaaacttcctggttcttgtatacctcctgctttcttggtctaaatgcaatca

SEQ ID NO: 184071 - DNA, 341 bp, Homo sapiens
atcaaacaaatgatccctgagcacctagaaagagaactggagaacactgcaaggtgtgtggatttataaaggacatcatcatctaacatttattaaggcctaactctgcgtcaggtgcctatacacatctggttgttggccttgtggatattatggtcagttctgactgtgtgtgcacttggcaacaatttggtttttttagtatgcttgctggattattagtaaccttgaggggagtgccaaatataaatatcatttatttaaatgtgagctgtgggggttttttgtagtttctcatcccattgggcaaaaagagaaattagagctagtatacttctgtg

SEQ ID NO: 184072 - DNA, 283 bp, Homo sapiens
cagatctccctgtcacagcagaccacagctaaatgaacttctctgggtctcagtttcctcatccaaaaatggggtctaggcggggcgcagtggctcacacctgtaatcccagcaatttgggaggccgagacaggcagatcacttgaggtcaggagttcgaggttagcctagccaacgtggtgaaaccttctctactaaaaatacaaaaaatcagccgggcgtgatggtgggtgcctgtaatcccagctactcgggaggctgaggcaggaggattgcttgaacc

SEQ ID NO: 184073 - DNA, 430 bp, Homo sapiens
tgttttataaggatataacagttagataaaacctgagctcatttccagtgcttacattctgagatttcatggcatttcagctttctaaagccttttttaaaattttgaaacattctaagcataaagtataatacaaagaacaatacaacattttaacattcaatttcatttctatctcaaaataactgagataagcaaaggcacagagagaaggcaaagaccattttctgagtgtctactaagtaccaggcatttcagaaccctctgaggtcagcgccatcagactcatctacagatgaaaacaccccgaggcttagggagactgtcagtggtgcagggtcacaacattaggaagcatcagagctgggattctaaccctacatctgttagattctgaaacactgagttcttcccagcagtactactctgc

SEQ ID NO: 184074 - DNA, 430 bp, Homo sapiens
gggggttgacagagaaagcaaagtgtaagtttggaagaaggcatgtgcggtggtggcgagtgctgcgggctatggaaggtgacttggcttttcagttaggggtagtggagaaaggggtagttgcttgtaaacgagttaaaagcattcagtgtggaggtgttaaacccattttaggatcgcttggtttcctggtgggtagaatatgggaacagagccagaggcaggagctaaaccaaaaggagggacccatgaactctgcagctgaccaatcagagaatcaggcaggtgtagcctactgacctgggcagaggtgggcctcacgcagctggatccgaccctttaattctgcccttttggagtggaaggtctgattggtgtagctgctctgcataggcaggacagtgacagttcactaactcttgttaagtta

SEQ ID NO: 184075 - DNA, 927 bp, Homo sapiens
tgctgcaggtgactccaaggattcgattgcattgtcttccaaatgacacttgtttacatgattgaagctgaaacaagaaggcagcgtgtcaccttgtccagcgtcagctgggaatgtgtgttgggcaacttagaactttcactgctctgtgcatgtttgagaaagcaggaaagcaccatgcatattgattttggggttacacgtaaatttctgcaagttaggtgaatttgcaaatacagaatctgtaaacagtaaggtttgactctattaatgtcaataataaaacataatgagaaaaatatgagatattgcaatacacagaattcaaatagggcaatgggaaggtgcctggggcgggtgctacagattgggaggtcagctgaggtgtctctgaagaggtttcatctaaactgagatctggattacaaggaggagcctgtcctgtgaagatcagggggaagggcatttgaggtgggagtgagtacaggcagggcaaaggctccaagacagaatgagtttggtgtgaggaaacccaaagagaccactgtggctgccagaaatggagagctttggaggcaagtacaggcctggtcactagggccttgtcggctggagtgggggtaaggatttgtgctcagtgagtgattcttgctatatttctccgtaaatgttgcggcatttttttcattttccctgccacacttcctaagtggaggtgttgctttttacttctttgctcttttttggtgtcctagacacagtagcccctatatgtgctgagtgacaccaagctttcggcttctggtgctgtaacctttccttccttctgtgaccattgtgaatgaggatggagtatgaatgggtgatatcatgagagagagtctgcattgtattgtattggtgtggtgggggtgctgaggggtaggg

SEQ ID NO: 184076 - DNA, 569 bp, Homo sapiens
ttggcccaaagtgctggcttataggcatgagccaccacacttagccacccatttacacatttccatttctgcttatatgccttcaggtcttggagaatctcctattcatatttcaacgtgcaacttaatttaaatcacaaaaacatgaaaaactgttctctcctctcgcatcttcccaccctgctgcctggactaagtgcaccataacagcttgtgcaagtctaccacaatgtattacgattctctctcccactagactatatgcagttaagctgagaccatgtttcattcattcatttttgaatctttaatgcttaacaagttgtctggtacatactatatatgcaataaatctttgaactaaatgtccttctctgcttcaaaaacatctcaggttctgcttaatgatttccaatgattagtcaatgtatcttttcagattttcatcagcagaaaagaaatgcctgattgaagatattttaggttgggttttttctttaaccctaaaaatctgaaagatacttatatacctaaataccaactatacactttcattgagtagtgagaat

SEQ ID NO: 184077 - DNA, 269 bp, Homo sapiens
ccacaacgcatagacttgccccatatttcacagctagctcccataattcccagacttgttacacaatactcggaaggccttacaacacctagaaaaagcagcatgataggtatgctcactctagaacattcagattcacttcataagggacaaactcagtcagttacattgaatacccaacaccatattgtttgctccacagaatatgagagagggcctacatgctcacacagagctttgacaagtgacttcatttctttctttctttc

SEQ ID NO: 184078 - DNA, 557 bp, Homo sapiens
ttcagcctccagagtagctaggattacaggcatgctacaccacacctggctaactttgtttctttggtagagacagggtttctccatgttcatcaggttgatctcccaacctcaggtgatctgcccgccttgacctcccaaagtgctgggattagaggcgtgagccaccatgtccggccattttaaaaatgtttaattttaatttctgtgggtacaaagttggtgtgtatatttatggggtacgttcttttattttctttttatagctatgcggtatggatgcaccataggttatttagccagtccctgatagatagacactgggtagtgtcctatcttttaggagacagtatttcagacagtaacctgggatatacattttttttctacacattctggtgtatctggaagatgaatttccataggtgagcctgctgggtccaggtatgtgcatttgtaattttggcagatattgccttccacaaagactgtgatccatttgcacatcagcgtttagagacagtcggttcccactgtcccagtggaggttttgagaa

SEQ ID NO: 184079 - DNA, 490 bp, Homo sapiens
ttcagcctccagagtagctaggattacaggcatgctacaccacacctggctaactttgtttctttggtagagacagggtttctccatgttcatcaggttgatctcccaacctcaggtgatctgcccgccttgacctcccaaagtgctgggattagaggcgtgagccaccatgtccggccattttaaaaatgtttaattttaatttctgtgggtacaaagttggtgtgtatatttatggggtacgttcttttattttctttttatagctatgcggtatggatgcaccataggttatttagccagtccctgatagatagacactgggtagtgtcctatcttttaggagacagtatttcagacagtaacctgggatatacattttttttctacacattctggtgtatctggaagatgaatttccataggtgagcctgctgggatgagaaaatagaggaacaagaatcatttgtagctttggggctccaggggt

SEQ ID NO: 184080 - DNA, 274 bp, Homo sapiens
taattagaccagaaaagttaactagactaaaagacaccatcttttacatctcttccagttagttagctttgggtggcttcatgggtaagctagagatagagataggtggttaccaaatacctttctgatgataccacagaatttaataccatcatggaaccccaatctattcacactaactagaaagaccaggagggggaaaaaaaagacatctgagctagagaaatttctcttaattgctaagagaatcaaaattgaaaatgcctttcaatta

SEQ ID NO: 184081 - DNA, 1320 bp, Homo sapiens
atacactagaaaatacagaacatttttgcagaaattatgtttgaattatttaatgtaccaggattctacattgcagttcaggaggtactagccttggaagtatcttggacatctcaacaagtgggtgaatatatgttaatgagtatagtcattgacaaaggagatggagtcacccttgttctcccagttgtagaaggttatgtaattgggagctgcatcaatcacatcctgattgtaggtgatactgtgtatttcattcaacaactactaagggagagggaggtaggaatccctcttgagcagtcactggagaccacaaaagccattaaggagaaatactgttacatttgccctgatatagtcaaggaatttgctaagtatgatgtggatccctggaagtggatcaaacagtacacaggtatcaatgtgatcaaccaggagaagttcataatagatgttggttacaaaaggttcctgcaacctgaaatatttttttacccagagtttgccaacccagactttatggaatccgtcttgaatgttgttgatgaatacaaaactgtcccattgatgtgcattgtccactgtataagaatgttgttctttcaaggggtttgaccatattcagggatttgaatctcaactacagagagatttgaagagtggtacatgccagattaaaactcagtaaggagctcagtggcaggagaatcaaacctaagcttacagagtttcgggtggtaatccatcacatgcagcactatgccttatggtttggaagcttaatgctagcctcaactctggagttatttcaggtctgtcacaccaagaaggactataaagaatatggccccagcatctgccaccagagccttctctttggagtaatgtcttagtgtctgccttgaaagcatcatttaatagtgtcatgttggggaacaagtgtccttcagaacccagagaagactaccatttctaaatgacatttggtgttgacgtctgagcagtatgcttgcatcacctagtgcatgaggcacagggcagagtcatttcagtaaaagcctgtctttatgtgttgactgctgtatgcccactcctccttctctcactccctttcttcatgcttccccggtttccctcctccttttaacttcaacttttttgttgacaaataccattctgaaggaattcaaatgtgactctgaaaattgttaagaggaaaaaaaattacaaaaatggcccaaaatagttctcccccaggaaagaatgcagtggtataaatccttttcccccagcctatttttataaataaaacgttat

SEQ ID NO: 184082 - DNA, 482 bp, Homo sapiens
caccggcctccatcagatgagggattgtggaaccctgccccagaattcaagcaggttttaaattctgaacttcatagggaataagtaatgcctataagactgaagtaaaaatcatttcttcaaattcctactaggataataccagtatccacgtttgctttgttcttagaggtacatgttcttatttgaaagaatgaaacctgaggtcaggagttcgagaccagcctgaccaacatggcgaaaccctgtctctactaaaaatacaaaaaattagccaagcatggtagcacgtgcctgtaatcccagctacttgggagggtgaggcaggagaatcacgaggtcaggagatcgagaccatcttggctaacacggtgaaaccctgtgtctactaaaaatacaaaaaaaattagccgggcgtggtggcgggcacctgtggtcccagctactcgggaggctgaggcagcagagtggtgtgaacccag

SEQ ID NO: 184083 - DNA, 384 bp, Homo sapiens
tattctttgaatttctggctaagtcttcctgtacaccccccatatttctttgaaactcctctcagtgcagttttctgcacgttccaacctgccaggtaatctatccatttccttattttcccaaagatgcttcccagggcactgtgtactgctcagatctgacctggtcattctccaggcctctgctgcaacctggcctattagaacttccctctgtctttgttctgtgagtgtcctcatacttttttctttgttggatcccttgtttcctggatcctatgtctgtctctttcttgatttaccccttcattttgctggaacacattctgtagtatcccctaagaaaagggtaagtgggtaggaactcttttgtcttaggatgtc

SEQ ID NO: 184084 - DNA, 529 bp, Homo sapiens
tgctgcggtcgtctcgaggtccctgggcgatcgccaacctttgtgcaattcagcggcacagcttcaactttggaattacatagcagtgccacggagaattttaaaataccacatcctgttactcaggtgtttcatattgccaatctggttcccattctggttctgtctaaagggtaaaaaaccttatgtgtttggttagttacctaaaccttcctggccagtaagctttcgaatctttccagctggggaggtatgttctgatgagcattaggacaacttcaaaccccaggagggctcactctcagcagctttcccaagcatttcagcatcttggctttgtctttaagaagagcaataattaaatcctcaggtcaaaagaatgaggaagagaaacacgcagagccttcaaaattatccagatgaaatatcagtggtagcaaacttaggtttatggacatatgagggtagagttagaaatgaagcagcataagagcctatgtcacagcaaagcctcctgcttggccaggag

SEQ ID NO: 184085 - DNA, 241 bp, Homo sapiens
gattctgcagacagggctgcacgtatgggctttgtttgacttctcttttctcagttaacatctcagagctagaacattccacattccccagcagcgtgtgggggctgactaaagtttacaattccaactaaaaatcaccctgcttctggcttatctgaatcccttacccaccccaccccaccaccccactcctatttattcagcaccgcactacccaggaaatacactagcaaattgtgaa

SEQ ID NO: 184086 - DNA, 326 bp, Homo sapiens
cacggccggaggatgtgcagaattcccactcccaggccccgcctttctcctgagcacctgtgcaaaccgcccactcccaccatctgtccccagagccctgcaggctcctcaaggtccaaattttcatgggtccaccaccaagctgctcctgccccagccttgcccactcagagcatgtcccaatcatccttctaggatctcggccaggagtcctctctgacccctccgccctgctcccccacatgaatcaatggccatctaaactccctttcccccactccttctgcccacgccttatctgccctgccactgcctggaaaacccta

SEQ ID NO: 184087 - DNA, 614 bp, Homo sapiens
actatttttcttggttctccatcgggagggcatatagtagcctatctgaatctctgcctatatttgtatgtggtctgaagatcaccagctgatttctcttcctattcctatgattgaaggactaattgtatcagattcccagatccaaatggttgacttcttgaggatattttgagcagcagcttctggttttgtaggaaccataaaaagggctttgtaaaattcccttcagtgttggctacagtgggtgatggcaggagtgggagagaggctaagatccagatagcatctgactggcaaagcatcatcccttgatttctttatccacctttattcaattctgaacgctgaaaacaggacaatagtgtgtgatgtcagttgtactgagctttctaaatattccttttagttttctctgagtatataggatttatatacctaagtcttgtctgtttatccaactattcatctacccatctgtcaacaagagtttcaggtattcattctgtgccacatgctgtgccacatgttgaggatacagtaataagcagaaaataaatggtccttccctctcgagcttgccatctaacagaggggtcaggcactctgctgag

SEQ ID NO: 184088 - DNA, 425 bp, Homo sapiens
tctccatgcacaggtaaaatctttttgctaaaatagtgatgatcaaatgtcatatcttcttgtcttaccaactgtatttaagtcatgttagtgtacttattttttaaccaccaccacctaaaaaaaaaaacaaaaccccctcaaaagggcatttatttgaccaaaaccacctcagaatcataaatccactgatgttttacataattatagtttccattttggtgatgcatttattatcaacattcagatacaggcttctgcatcccgtttttattccagagccactggaactcagcttctcccactattctatctgacctgctcttagcaaacgccacctggaccttttatccttcacaaaccctttttacagccggaggatacaatccaaacaaacagccattacatctccattgcctcaacgg

SEQ ID NO: 184089 - DNA, 371 bp, Homo sapiens
attatagtggctggggaagtagcattgggggtgccaagaattggttggactctgggtatgttttaaaggaaaagccagcaggatttgctgattaactgtctatagggtttgagagaaagaggagctgccattacaggggtggaagagactgtggcagatagctcagctggggacatgttctgtttgaggtgtttttttatatacccaagtagtgatctagaaggggcagttggacacataagtctggagttcagggaggaaggcctggctgaagattcacatttggaaattatcagctcataaattctatcaaagtcatgagattgtgtgagaccaccaagagagtgaacgctgatggagaagccaagagg

SEQ ID NO: 184090 - DNA, 309 bp, Homo sapiens
gtcagaactgtatactgttcatacaattttaaaaataagaagtcagtacaaactatagtgggggctagccctccctacaagagaaaaaccagcaaagtttcctcagcaatgaagaaaagactatctgctctatctccctcacagggttaaatcagatagtgtatgggaaagaaagcccctgaatgtgaaaaaaactctatacatgggtaagattattctccttgaatcaactcactttaagatcgtattattggcatcacagaattgaagggggcagagcaatctcccatgggaagtataaataacaga

SEQ ID NO: 184091 - DNA, 615 bp, Homo sapiens
cgttccagctcatctccatccagactgtcaatccttctgtaattaggatacatggctaagccctgattccagtttctgaactcatatactgtcaaatttgtaatgaaagaaaacatcacagtctctgaacttaccatcttttgaagagaaggtggttgtcaattagtgtttactaagtgaggggtatttgttgaaatagctcaggcattggactacagcagtaaaatttgcaatgttgagatttcacctctcttccttcttcattagatacccaattctgatgggtttgcttttccctgttcttcatttcctaaacctttccctaaagggagaaaggaagaaggaggatggagaacttggttcctaaatttaatataaatcacagtcaccccaggagcctgctaactgtgcagattatcaggcccaaccccccgagattctgacccagcagctctgggggaagggtgaagagcctgcttgtttaacaagtgctccagatgagtctaatgcaagttgccagtggagggccaccctttgagaaacctctcagagtatttcataactcttgctgaagttatttcttccaagtgcagaaaatgaagcattttctttcta

SEQ ID NO: 184092 - DNA, 792 bp, Homo sapiens
cctgcctcagcctcccaaagtgctgggattacaggcatgagccaccgagcccagccaggattcatactttaaaatgggaaagtggaaatagacattatcctgtaaaatacagttagtgtggcagatcagcaccaaaaatgatttgtgaagcttgtatgtatgggtagtatattttaaggctattgaaattgagccgcaccaaggactgatattcttggcagtcatcacaaaaggaaaatgccatctgtattagtccattctcacactgctatagagaaataaccaagactgggtaatttataaagaaaagaggtttaattggctcacgtctgcaggctctatcataggaagcatggctgagggggcctcaggaaacttacagtcaggtgaaaggtgaagggaaagtgggtgcatcttccatcaccagagcagaaggaagagggaacattggggattacaattggacatgagatttgggaggcgacacacaccgaaaccatatcaccatccatgacatcgtttgcattgattataaggagaaaccagttttgttacttgtggatttaaaagattttctaggactttgaaaaatttcttcattcaagttggtataattgtggatagctttcctaacaacaaccattaaattgctgacttatggcttattcttggtgcttatgtaagcagagggcctgctgcccaaggagaacttggtgcatataatttttccagggacggaaatatcgtgatccaagtaaacaattctgtttttactgttgagtcctagatcat

SEQ ID NO: 184093 - DNA, 354 bp, Homo sapiens
tattgccatctattagtctgagaaggatctcccagcagccataaactaggcatagctccatctcatagcaatgcccagaaggaaacagacaccctctaatgctgggagcaagcaggagggggccagaaaaaggtaaggagctctcaggaggaaacagcagcacacacaacacttctctgaggacaaaggaagaaggaagaggaagaggtatcctgggcagagcactggccatggagtcaggagcaaggagtctggccctagctctgtaacaggtaactgcataacctgggaaaatcccttcctaagtttcattccaggtcttagtttctctatctggaaaatggggctttaaac

SEQ ID NO: 184094 - DNA, 256 bp, Homo sapiens
actaagccacacaccacgttatttatgtaaaaaatgaagatctggagccagtgtgtattacagatggacctagagataaatggaactaatgtggcctgtttctgtggcacagcagggcaaagcaaatccattcacctttctatctctgcacggggcataatcattatattgtgattagctcccaaatgctcctccctccttgtgacctttcttgaggtcatttcactttgttctagccacccaacacctggtgacg

SEQ ID NO: 184095 - DNA, 403 bp, Homo sapiens
ctggcacattctttgcattgcctagaggacagagtctgcattcttggcaggacaaataagagccttagcagccttcgcaagcccctctaccagctttattgcctgctgctctcctggcagaaaccctgtccctctctcaacgtcctaatgccctcagcacttcatccttagtatgcttccctcttccctagctccatcagaattctttacctacttcaaagtaaattgaaagcttagctttcaatctttccgtaaagttagccctattgatccctccctggagtacctgtcactgtcactcatacattaccagcacatgctgtcatgctccaaactaaactggagggttccactaggaccatgtttgatgtatttttgtggcatctggagcaaagaatcttcc

SEQ ID NO: 184096 - DNA, 354 bp, Homo sapiens
tttctcttccattgaacagctctgcagagtttatagaggactttctcacacatccccagtaatctccatgcagcctagcctggaccaggttttgctgttttccagtgaacgtcagtaggtttaagtggttttcttatgacctcatagctggtaggagaactagaatctaaacccgggtctcttgccatcctgccaagcccaggtcaaacctccctctctgaagccttcctcggagaacagaattattctggctttcttctgggctctagtacacaggtcacctaaactagattcctcaagtaaattccttattggctccctttcctccacatctagaatagcacctagcagtcc

SEQ ID NO: 184097 - DNA, 348 bp, Homo sapiens
gtggggtgaatggattaaaagagaaaaagaataaagaagagaaccaggagacaattacagtaagagactagtggcttgatttagaatggaggcagtacggataaaagcctaagtatgtgaaagatatcctggtgtgtaactcacaggtttaggtagaggcctagatgtggcagcaaagggagattaaagaacttacagtccagaggagacaagaaatagttaaaatagttcaaagtaagaggtgctgctttaagtatctgagaaaagttaaaactgctataggaattccaaatccataagaaaaagccaagatcacaggaaactgtgcaacccatcagaatcaagtac

SEQ ID NO: 184098 - DNA, 124 bp, Homo sapiens
tgcaatatttagacgcacgatatgaggcaattcctaaagcccttggaacttagacatcctgtgatttcacagaatccacaccatttcttcgtccctccaaagcttgagccaaaaccatcaatta

SEQ ID NO: 184099 - DNA, 562 bp, Homo sapiens
gctgacagacacagagctactcccacaaaacctagacaacccatccattcctgatgccgctgtaaagattaataacacggaagcgatggggcctgaagagactcaggaaaggaagagaaggcatttcctaaggggatggtataaactgaaactgcgtggtcaggtatttctcagaccctagcaggggcagcctcgctgggatggcgggagaaacacaagacaaaggaatgaatcggccaaggcaactggggaggagctggggaagccaaggccccaactgagcccggctgcccaggcttccctctagaggtcctgggaagacatccctctgacctctgcccaatcttcctctctctgaactacatccacctcctgtcctcacagaaagcatcctgaactggctaaccacagccaccaaggtgacaggaaagccatataattcccccaggtcacagttttcactgtaggatgtatcaccatctgaaagacatgaccaccccttccatacaccactcctgcaatgttatggtgacaacatgagatcctgagctcacgtgccctg

SEQ ID NO: 184100 - DNA, 486 bp, Homo sapiens
tcgcgtatctccacaatgatgtgcctggacgactcatccttatgccccctcttatactcatgcttcatggagttcactttactcagtcgtctcttctttatactccttggtacactctcacttcacagctatcatgccgccgtttcgttctctgcttctacacagctggcacttgtctggcacttgtcatcaattttacccacttcagctttctcagctctgatctcttgattctgaactcagtaaaactgctgtcttctcactggatttcccctccattgactgcaggttggaaattacctccaggcagacatccaagcagtggatggctcacctcctttgtttttgtcctttcatgcattatagtcctctgctgcctgttatccaaggtctgaaaattctcgtttgagaaggagcaactgtcagatactttcggatctttctctgaaattagctttctgttgtgcttgttgtgcttacctcttt

SEQ ID NO: 184101 - DNA, 375 bp, Homo sapiens
agtgtccctgagcatgacgatgagatcctttctggggactttaccccaccaggcagctctgtggagcttgtccagatcttctccatggacgtggtacctgggatccatgaaggcgctgtcatcgtagtctccccaagcgcccacgttgctcttgccgctccccctgcagcaggggaagcagtggcagcaccacttgcacctcttgctcccaagcgtcttcacagaggagtcgttgcggtctccagaagtgcccacgttgctcttgccgctccccctgtccatccagggaggaagaaatgcaggaaaggctctatgtaagatggggcatctgagcgggtctcaggaggggttataaattcttgcaggtgagaagag

SEQ ID NO: 184102 - DNA, 161 bp, Homo sapiens
tatctacacatcctggtggacctgatattctctccttaaacctatgttcactgggttactctccaatctaaaaaccttcatggctttccaatctccctgaggcccagatcctccagagtcaaatgtgtcctggtatttgttatttgctctatattccacct

SEQ ID NO: 184103 - DNA, 233 bp, Homo sapiens
gacaccactttgtttccattttttttaaatttaagaattaacgggctaccatctaatccagatcattttttaaacactttcaataaaaactttattcccaaacttgaaatcccccatttctgctaatgttattactttgggaacatttcttccaaaaaccagttaactgaattgatattagttctcaatataagaccttatcagaagtgggttttttgtttgtttgtttgttt

SEQ ID NO: 184104 - DNA, 828 bp, Homo sapiens
aacgagaaacgtgataagcctgacaatagagacatgcagtcagcaattcgcaggagccaggtagggagcaggtgaccctcacctggggattagacacatggtagtactggctgagttaggtacctctggtgaggtctctcagtactggtatttgtccattttggaagaacctcctggagcacaggttacagattttggcctcatctctttggatgcctctgagtggtcaccaaaacccagattatgaagcaaatctgtgcacatggattgatttaaaatgttaggaggttatgagagtgtaggctgaaaattgcctaaaatgtgagtcagagaaaaacacagacctatcatctctggagtttttttggactgttgtcagctgtccccatttccaaaatataaaattgagaacagcttactgtcttggaggcacttgttcagatttagctttacaaaataaatatctccagatgtgattgttttatgcaggcgtctccatggcaatgcagctgaggctggaatatgttgttaaaaatatacactttgcatgatcacaatactattagtggcatgattttattttcaggaaatgataatcacctgaagtagaatataagtaaacattttatatcagacttaaagcagagcctctaataaagcttattaacccgattattcatctcatacctctttacattctgtccacaatacctgtgtctgtcatggtttaaaattgggattcttctaaggaaattgcaagtgcgtgtatgtaccgacgtatttctatcttttcatgtgatgacaattttacataatggaaattgaagt

SEQ ID NO: 184105 - DNA, 392 bp, Homo sapiens
gtttgaagtatgtctagagtatggttttaatccatcgctgtcaggctcacataaaattccaggcttctgtaactctttaacttgaagtattacagggtgtcacctgctaaatggaagccaagagaagcaaggagtttttcatggttaaatcttgtaaagatgctttttaaagcatattaatccattagtaatccatttggatttgggaatacggtcatatactgtttggtacaatatgtactaaacctggtcctggaaaattaagtggaaatataggtttaaactactggaacttcaaaatagcttctcagtaattccttctcagcaatcattccaattcctagatttaaaaaaatgttgatatatcaaatttccatcaagaggaacataca

SEQ ID NO: 184106 - DNA, 524 bp, Homo sapiens
atggcaaaatagacattttcagatgagagaaaaaacactgttatgcgaagacatccactggaagaaataccagggagagctcttcaaactgaaagggaaattaccctaccccaactggaacacagagatgcagagagaccctggcccaaaatacaacttttatatccactgggtaacacaaaaatttgtgtgactcactttattacagtggtgcagaaccaaacccgtaatatctccaaagtatgcctgtaatattttacagcagccctgggggaaaaatataccatccaataagaattgttgtaaactctacaaataattagaagaaatgagttttccacaaatttacatcgaactctgggttcacagcaacacctgttctttacaaataggacaatcatacaccccagttagcaagcaacagtcctggcctaaaagcaccccctttgattctcaaaagtgaccacctgtggataataagttacatgtcatcctatttataaacacaggtgttacgctgtgac

SEQ ID NO: 184107 - DNA, 403 bp, Homo sapiens
taaacacccatgagacgtgtatgtccgagagaacgttatgactctggcacacacatctagctcccgaggaagaaatggaatctgaggaggggcatcataaaagactaaggattcacctcccttctccctcttcaatatcatactatcaatcttttttgtaaatggtagaaattccacaagctcctttcccctcatcagtttcatgtactctctagtatatatagaatccattatgcttattcctatctttctatctataatctgctgcatgttgactaaagaactgaaaactgtctttcagatacttccctcatactcttgaaaaatctgtggttaatgtgatactaagacatagaaacagtagtcacaaagactaatctcacaatcataatctatcttttgg

SEQ ID NO: 184108 - DNA, 369 bp, Homo sapiens
taaagatcaaaaaagctaaggatggaatattcaacaaggcatcacattcaacaacacaccactggtcacacacatactggctgaattccagactccctctctatggtaaaagagttctgcaggctctgatgttggctggaaaaaaactagacacctgctcttcccagcactgaaatatggccaaaaaaaaatcaaataaacagattaaaaaataggcaaatgacttgaatagtcatttctccaaagatgataaaccaatggtcaagacacatttgaaaagatgttcaacatcactaatcatcagagagatccaaatcaaaaccacaatgagatatcacctcacatccattaggatggctactattaaaa

SEQ ID NO: 184109 - DNA, 651 bp, Homo sapiens
cggctgagtaatgggggaggaggggggtgcagatacacaatccctgccctatctcacgatcaggaaaggagagggctcataaggacgccccaattcgcgagcgcccttgagtctggccggtgccacggtcggttcgcgcgaagtgggcaccggtctcccgagccgacttcgtgtactccggacctgtactgcgctccggtagaggacccttccctttctcttagcttcttaaatcttttcttttaaggtgtaaatgtgtgtgtgtgccgatgaatgtttctgtttttcatctgctgactttatttttttttattggtataacttctcccttctctctccctgctcgtccgttttccaccttttctcttacttatcttctgccctcgctcactccctaacacacacattcacaccctctccgcctcgctctcccgttctcgccaggtcctgatgggtacagtagattttgatagtttccataggtggtgcttcaaatgccattatttctcactgaatatttaaagagatccctcggcaaagatggatctgcgcactcctggggtgtgagcggctcgcatctcccagaccccggggaacgtgtacgggagcacgtgtaaatcccgcacccgcctccatctcacaaacaggggt

SEQ ID NO: 184110 - DNA, 282 bp, Homo sapiens
gttttattatggtgggtttttaatacttcattaatttttctggttttatctttattaatgttttcctccgacgttctttattttgttcatttctggcttctggaatttaatgcttcaacatttatcaactcattggccgatctcatttcatctatacctgtacccactgccctcttcctgttttccttcaaagctaatcccagataccatataatttctcctgtaaatatttcagaatgcatctctaaaacataagtacacttttttagaaaagcattacct

SEQ ID NO: 184111 - DNA, 308 bp, Homo sapiens
caataaaacagtgaatgaaaataatctgatgaaatgaaaattgattattagaatctcagttacctcttaatttgcaacagaggaaaattgaaaatcagatgagctgaatgaccaatgtagtgatttgtaaaaatgtagaccttattttccagattgccatattttgttatattcattttgctaggtgaagggaatatttttctgtaccatcaaatatatttgaactagctaattttcagtggtttgcataaccatgaaaacctttgagccgtccataaaaaccttttgtattccatttggtcacaatt

SEQ ID NO: 184112 - DNA, 676 bp, Homo sapiens
ctaagcaaagtgagtccagcaccatggaggcctcctttggggtgctgaacaagggtatgggtgaactgtagggaacttgcccaagctcacacagctgccttgaacacagacagactcctaaggcggcaccgttgccctccacgttagagacctgtgtctgatctctgcaggagcaggagcagctgctgctcattccatttatcaagcacttgctgtatgtggtgggtagtaggctaagcatgttacacataggactttacccaaatctcaacttgtaggtaataggtaacatggtgaattctaccttaaagaaactggggcttagagcagtgcagtgactttccctaggttattcatagagtaggaatagaattagaacagagactgagatctgcccagcaccaggctctgtgcttcccagcttctgcttttgcctggctccttctgcttgcctgtgggtgagcgctcacaaaagcagaagggaaaaaatcacacgctacagcataactgagccaatgctgagaattacaaaatttaaagggaaatttaaaagacatttaagccaacccctctcacaacaagagaatcttcaacatatttgaatactccagtgacagggagctcattacctcaatcttactcatcacagcaagataaccaatgcttccatcatctg

SEQ ID NO: 184113 - DNA, 472 bp, Homo sapiens
gaaaagtatatattttctgctttacttagttttattttaaatagttattacctaataaattatgaacattaagcccataatgagaaggcccatatttcccaggaaaaattctgaggggcatttgaacaaggttttttttggtaatcttggctgaagggggcactgctctcaccagccatcttattaacctcatctaaatgcacagagaaagttgtgactcaaaacaggcaactagataaggcagaacattaaagtaaaataaaaatgaatacctgcacaaataatttttcttgctactaagttttgtgcagtgttcaacagactgtccctttgccaaacctcccatgatcctatctcatgagcaggtgacaaatgtattaattgatgcccagctgtcatcacacttaacaattgcccccagggggcatccttgcatctgttgcagatttagggttattttggtattactgga

SEQ ID NO: 184114 - DNA, 253 bp, Homo sapiens
aaagaaagggaaaaaaagaaaaagacaccccctgtcattgcagaagtaatgtattatgatataatagaaaggttttttgaataattcagaaacagcaaagcaagtggtggtttgtctgtactgccgttattcagagagaacatcttaacagttcgatgtattgtctcccagtcccgtttcattcaactctgcatacactcgggttttaggacatctgagtaggcatattaactaggcctctgcttttctgtgg

SEQ ID NO: 184115 - DNA, 783 bp, Homo sapiens
gagtgctggcctgtcactgcggctggcattccaggcatttcattggccccacttcagcccacgcctggctccacggggctgggcagctgaggggagtttgtggcagagtgggcatggggcacggcccgtgcaatgtgcgttacaaaggggctctctctgaagcaagtcctctgcactccagtctatttgaggaagaaaaggacaattcccatagggagggggtttgctgaagcaaccagctgcctggtttcctctccagcattgagagggagggagggctggcttaactgggggacggccttctcatctggactgtgtcaaggccaaggttaggctccaaattccagaaaacctctctgcagggtcttctttcagagtggtgagaatggaagcaggctcccttcccctccagcactaggaagccccgcaattggtgaggtgcaaagaaagatgggcccaggcagggaggcgggagcaggggaggtgcccagggcagtggctggaagggcaacgggagaagcagcagaggctgggggtgggggtcgcagcaggtgctgtccctggcctgtgtgaaaggtactagaaggccccatccttggtgccacatggaccccagaggcttgtcttagtccatggggtccgaggtgtaagacacttacgtttggcgtcacctcttaggcttggatgaatttcagaaagtgctagactggagaacagtggaaaaaatcagtggaacaagatctggagcactcactgctcaatgtcaatgttagagagcacaac

SEQ ID NO: 184116 - DNA, 1125 bp, Homo sapiens
cccacctcggccccccaaggtgctggaattacaggtgtgagccactgcgcctggcctatcatatctaagtcttgatgtcacttttccagttactaatcatctggcccagtcttgcttaggtcatacactctttgatgtgctcttcagtttctgaggatcacgcctctgctgggtggagtagctttcctaggtcagaagcaatgctgtctgcatggcctcccaagtcttcttggtgcctgcacagtgcagagcacaggtggcaccatggttggttaacaccatacttgtggcccagactgtagtccccccagagggtgtctgctggaaagggctggtcctggctcttgctgtgggttcactgaggttaagtgaagatggcaaaagaaccacaggtgattctctcctctgctctgggttttgcaagactagagaggtcagtggctgtggctgagagcctgtaggagatggaactacctcaccttgaggaatgtgcttagggatgccacagagaatctttcccgaagagggaaatggctagggccctggccttgggagccagctggaatggagaagccatgggaagaggggctggcctctcctccaaacccagcaaagggagccatcctgcctgactgaagccagagtggggcccactgctgggtggacagaatacagccacaggcactacattgtcagagctccagatgggagacaaggagtacaaaacagaggtggaagactgattccagtatggaagcagggcaggcttcaggcatggccagatttgggcatgatgaaatagattcacaattgctaatgttctgggggcacttgtggctacatcaggtactattctaagtactttatatgttttaagacactgtagcgccaggactgtactcagaaagtctgcattcttaaccactacgctatgtgaaatgtagaaagaagaaagcttttagacatataaagggttagacctctattttatatgttaaatgccgtatgaaaaaaaaagcaaaggttttggagccactccaagcctatgtgatcttgggcagttacttagattctccaggtctcagtttcctcatttgtttgtaaatttgagagtacatttaccta

SEQ ID NO: 184117 - DNA, 231 bp, Homo sapiens
ctagtggtagaggcaggtaagttatagaaaatattgagggtaagtattaagtgctttaagaaagtatgcttgggctgcagggagcattgtagggttctcagaggaaatgatccttgctcctttttggaatcattccaagcagaaggaacagcaagttcatgtgtgtggctcacacctgtaatcccagcactttgggaggccgagacgggtggttcacatggccactcaata

SEQ ID NO: 184118 - DNA, 239 bp, Homo sapiens
acaatatacacaagtttccaaaaatgttttctagcatgatttctcagagcattcatgtagcacacaatgctatcaacaggcaggccaaacacataaaaacaaattccactgatataggtcctaattgcttgtaactaatgtacttattctcactaaatataaaataggaaacttcttcagaagtcacaaattacattttaacacgagatcctaagtgagaaggttgctggaaagggact

SEQ ID NO: 184119 - DNA, 428 bp, Homo sapiens
cagtagaagtttcttgctcacattctagatctgggaagtccaagatgaaggtgccggcagtctgggtgtctggtaggccctgctctacgcttcagcggtagtaacttccagccgtgtcctcacgtggttgaagagcaaaggggccccttcatgcctcttttgtaaggacacgaatcccatttataagggcagagtccccgtgaccgaatcacctcccaaagccctgcctcttcattcccacacatgagaggttagtggtcaacataggagttttggaggaacacagatgtccagaacacagtgagtgacggcattagaattgaacacttctcatcattaaaaaccaccacataaacatacaggccactcaccaggggaagatatttgtaatgtagacaaatttcaaatgatcactatccaggtttttt

SEQ ID NO: 184120 - DNA, 289 bp, Homo sapiens
cttgacctttcaaatctattttccatgctgcttacaaatgatctttctctgtgatcttcagaataaagtccaaactctcacactgaaaccttaactcagcacctaacccgatatccttaatgataccgctcctgtttaccactccaatttcacctctcatcatgacccccaaatctcccacattccaaatatactgagctgctggtcgtccccccgtggtaccctctatcgtcaccccgctagcgtgcctgcttttgctggtcagctgttgaacatggtcgccaatccg

SEQ ID NO: 184121 - DNA, 598 bp, Homo sapiens
gccccttttttttcctttgagacagagtctcactctgtcgcctaggctggagtgcagtagagcaatcttggctcactgcaacctccacctcctgggttcaagtgattctcctgcctcagccacctgagtagctggaactacatgcacacaacaccacacctggctaatttttgtatttttggtaaagatgaggtttcactgtgttggccaggctggtcttgaactcctgacctcaagtgatccacctacttcagcctcccaaagtactgggattacaggtgtgagcctccatgcccaaccagctctaccatctaagagctgtatctgtagcaattcccttcctctctttgagcttcagtctcatttgtaaaatgggactaattataccaaccccattgataaaagaatcaaatgagattacaggtgttcaaatttgccctcctcagagactttccatgtaaagtagttattacccctatctccactattaatacccagttttctgcattcacagcagttatcacaatctttattttgttcatttccttgtttactgaattttattattttagagaccaggtgctttgtcactcaggct

SEQ ID NO: 184122 - DNA, 362 bp, Homo sapiens
cgaccagtaaaggtttaaagacttcagcacattcttcagatctctctcaaaaacacaactttaacttctaaattagggaggaaaagctattttcttacaggactagaaaaaacaataaacctacaattacttatttttccctcacatcattattaatggaaaaagcatgttaaaaaagagaagagaaaaaagaagagaagagatgagaaaaaagaagagatgagaaaagagaagagaagagagaagagaagagaaatcagtttcctttcaggacaacctgaacatcaaaatagtcctttaaaattatacaagaaaagtatactatcaaaaggaatagagaaaggattctatttaaggcaatg

SEQ ID NO: 184123 - DNA, 243 bp, Homo sapiens
caatatccgagagaaaagagaaagtgtgaaagcagttcaggggcccatcagcagagagggaaagggcactccctggccatatgtgaatattttcataggcttttgaattggagatcatgaccctagagattacaaagtgtgtaagatttgggaaaatgtgaaatgcatatatgcaatcattttgcaactctcgcagatggtctacctgtttgtgttcacattgctacttattagagataactc

SEQ ID NO: 184124 - DNA, 140 bp, Homo sapiens
tttacccaacttgtccactctctttaacttcactgtcgttatctttgcctagggcactgctatcccagctgggctacagcagcagcctcctaactggtcttaactggtcctctgtacctactctcgatgctcagcaatcc

SEQ ID NO: 184125 - DNA, 380 bp, Homo sapiens
gttcctaagggggctgctttgtgaaatactgtgctgtgatatacacatcattagagatgagaaaactttagattcatcaacaatttagagaactatttctaaagataaatcctttgaagataatgtctttatgaacaggtttcttgggaaaaaaataaagttgtcaaatgccagtgtagcttttattatacatatatagagagacagcactgatgatttcaggaaataacacaaacacacatgcagtcagtgagaattctgtcttgtggaagatgatattgatgctgtgtgcagcccgctaataaaacactcagttgtgattagcagaagagctgaccagagtataaagtttcttacatgaatttttgtaaaaaactaaa

SEQ ID NO: 184126 - DNA, 523 bp, Homo sapiens
tagtagagacggggtttcactttgttagccaggatggtctccatctcctgacctcgtgatctgcccgcttcggcctcccaaagtgctgggattacaggtgtgagccactgcgcccggcctatattggctaattctaggtacctcatgtaaatggaatcatccagtatttgtccttttgtgttgatttcactttacatgtcttcatggttcatccctgttgtagcatgtatcagaattcttttctttttttgtggctaagttcatcttccattggatggatagaccacatttggtttacctattctgccatcgatggacacttgggtcatgtcccctttttgctattgtgaacgacgttgctgtgaacataggctctaagtatctgtttgactttttgccttcagtttgtttgggtttatatctaggagtggaattgctgggttgtatggtaatgatctgttctaacttttggaggagcagtggctacatcatttcacatttccacctgcagtgcacgtggttc

SEQ ID NO: 184127 - DNA, 442 bp, Homo sapiens
aatgagttttaatgataaagagtttttgctggcctgaaagtgtctgcaaggcagtcatcgattccctataagcgaggtggaccctccacttggaagaaggcatttcactgtaccttacttagatgaggatgcggggacaaaagtttacacctctcttaatgagtacagccttatggacacaagacagtctggatcataacaggccactaagtaggctgtacagtcagatgcagcaggttctcaggagccagtcagccttgctgagcactggtagtggtatctactgcagtggtactctgaaacagcagtaccagaaggtactagagggagaaagcagaggcagagagtgtgcaagggccaccatcagaaatgatccaggcctcttggactgaatcctaataattcattcagtcattcagtaaatgtttgaattcctgctata

SEQ ID NO: 184128 - DNA, 692 bp, Homo sapiens
  misc_feature (532)..(532): n is a, c, g, or t
  misc_feature (563)..(563): n is a, c, g, or t
  misc_feature (678)..(678): n is a, c, g, or t
  misc_feature (681)..(681): n is a, c, g, or t
  misc_feature (689)..(689): n is a, c, g, or t
ttcaggcagaatgtagactgagcgctcctgctactgctgcctgttgctgagaggaagaccgcagaaaattctggattcaaacatttattgctttttttgttttgctttgtttttgttttctttccttttgccttcagaagatgaacaatgaaaccacaaccctgatatccttgaaggaggcaatgaaaagagtagaccacaaactccaagcgttagaaacacagttcaaagaactagacttcaccaaggataacctgatgcagaaattcgaacatcatagtaaggctttggcaagccaagcagcccaagatgagatgtggacagcagttcgggcactccagctcacttcaatggaattgaatattttatacagctacgtcattgaagtacttatctgcttgcatactcgtgtgcttgagaagctgccagacctggtgagaggtcttccaaccttagcctctgtactcagaagaaaagttaagaacaagcgcgttagagttgtatgggagtccatactggaggagtgtgggcntgcaagaaggagacatcacagcactttgtanccttctttattgcacgtggtaacaagggcagaacactatactgctaaagtgagggcagatgtacatcagggatgtcacgttcctaattactaacatggtaaagaacaggtcgcanganagttgctnagg

SEQ ID NO: 184129 - DNA, 748 bp, Homo sapiens
  misc_feature (588)..(588): n is a, c, g, or t
  misc_feature (619)..(619): n is a, c, g, or t
  misc_feature (734)..(734): n is a, c, g, or t
  misc_feature (737)..(737): n is a, c, g, or t
  misc_feature (745)..(745): n is a, c, g, or t
ttcaggcagaatgtagactgagcgctcctgctactgctgcctgttgctgagaggaagaccgcagaaaattctggattcaaacatttattgctttttttgttttgctttgtttttgttttctttccttttgccttcagaagatgaacaatgaaaccacaaccctgatatccttgaaggaggcaatgaaaaggttgctgagggctatagggagggagcaagcatgggtctgctattctgggaagatggagtagaccacaaactccaagcgttagaaacacagttcaaagaactagacttcaccaaggataacctgatgcagaaattcgaacatcatagtaaggctttggcaagccaagcagcccaagatgagatgtggacagcagttcgggcactccagctcacttcaatggaattgaatattttatacagctacgtcattgaagtacttatctgcttgcatactcgtgtgcttgagaagctgccagacctggtgagaggtcttccaaccttagcctctgtactcagaagaaaagttaagaacaagcgcgttagagttgtatgggagtccatactggaggagtgtgggcntgcaagaaggagacatcacagcactttgtanccttctttattgcacgtggtaacaagggcagaacactatactgctaaagtgagggcagatgtacatcagggatgtcacgttcctaattactaacatggtaaagaacaggtcgcanganagttgctnagg

SEQ ID NO: 184130 - DNA, 454 bp, Homo sapiens
cgtaatttcaaaactatggtttttggagactacttaatatgccctgggaaatttttgtgatataatgttaagtgaaaaacgcagagtaaaaaaacgattaaaaagatcagtggttacctggggttggggaagtggggggaggaaggatgaataggtggagcacaaaggatgttaggccagtaaaaccattctgtatgatactttaacagtagatacttgacatgtatttgggaaaaaccataaaactgtagaatacaaagagtaaaccctaatgtaaactaaggacttgcgttaataataatgtatcaatgctggttcaattgttacaaatgtatcattccaaaacaagatgttattcataggggaatctgaactggggagagggaactctattctttctgcttactttttctggaaacctaaaactgctctaaaaaataaaagcctgttaatt

SEQ ID NO: 184131 - DNA, 315 bp, Homo sapiens
tccaagactgacacagaatgccaagtgtaatcaatagaaataccaattataaaccaactatgatccaaaaatataaagaagggcattacataatgctaaagggttcaattcaacaagaagacctatcctaaatatatatgcaccaaacacaggaggacccagattcataaaacaagtttttagagatctacaaagagacttagataatcacacactaatagtggaagacttcaacaccttgcttgacgttactggacaaatcattgatgtggaaaactaacaaagatattcaggacctgaactcaacacttgacc

SEQ ID NO: 184132 - DNA, 588 bp, Homo sapiens
ccgtgcctgttggagggaagcacctgccgtgagtctggccagggccttcttttccgacaggtaactcacatcccagaggatctgcgtgcctcccgtgagaaaatgggattcctctggagagtctctctgcagaagtgaggggcatggggcagggaacaggcggggagcgcagccactgggagccatgtcaaggccagcgccaagccctggagcccagaatcctcttcctccagcccgttctgtctccatagtccctccatgccctgataaagcagtcgctcttcctttagccacctgacaatgcgatgactacattttctgagctccatgcccttctcttttagggaattataaatacgctactaggtagttcactaagcacaaataaatctaagagaaaccacaaaacaaacagtggaattccgctgcacatcacagctaatctcaccctccaagggctggagaagcctctccctctccccttaggagcctgcatccacttgttcttagtctggccttccccaggggacagaggctcacccaggagctgccagggactagttgtcacatacacacagcagctctcct

SEQ ID NO: 184133 - DNA, 250 bp, Homo sapiens
tagaaataactcacatgtaattcaggtataccaaactttcctgccttcctactaaatggaactagaaaagcaaaatgctgattttttccaggtactccaaaaatacctttataattttaactgtaatttgtttagtctaaaaaggtactgctccaataccagaagctacaggtgaaaaacatatctctcaactgaagacaacttcttgaataactgtgtcactgacaagtttactctctgagcttcagtt

SEQ ID NO: 184134 - DNA, 397 bp, Homo sapiens
ccagagtgtttaagactcaaaccgttcactggtgaaggaaggcattccctgagactctaggtctgagaagagggatgggtggtggagagggggagggagtttattcgccctgcagttgtgcctgcaccacttactttcaagggcatatttggatctgttacttgtcaaagtggctatcagaatcaccttggacttcttgaagggtgagttcacaaccgagaaagcacatattcaaaattgttgaagtaataagtaaatcttctagaaccttaccctcagtgataacattccacttctagctcttaaatacccacttctgtttcctggatgagatactcagtgcaggaaggaacctgggttacatttgtcagagccccaaatctgagatgaactgtat

SEQ ID NO: 184135 - DNA, 268 bp, Homo sapiens
agagtatcccccttattccgggtgccataacatttattttaaggaagccaaaatgaccttagaactcttacgctttcatttttatttcttatggttgtttgctacataagtattatccattggcctattttttcctaatgaattgttaatttacaaattttacaaaataacttttaaaaataaactttcccagactaaatctggaatattaatagatttttaaaagcttatatctgtccttgctttaagaaaatatactgtagccagg

SEQ ID NO: 184136 - DNA, 265 bp, Homo sapiens
gaaatatctgtggatgacagatacagctaagaaactcattaaagtatgcaaaaatatatcaagaatcattatttatttttcaagcaatataaagatgtttttacttttgaaagcaaagatataaattttttgaaagaatattatttttaaaaatagtgtttcaatgtaattagtttgtaggtcagcaattatataaaactgtttaactggttagtaatatgtgtttcaaaaatcatataattttaataatttttggtacctgctt

SEQ ID NO: 184137 - DNA, 196 bp, Homo sapiens
aacttaagactgtctcaccagagcttaaaggtgttagctctggccacagcagcggcctcagtcactcttcttacatggattttgatgcaaattctgctccttttctatttctcaagatttctagccccttcgaggggcccaaccctcgaaggagtccagtaaatgtgtaactccactctgccttgcctgtgctgaa

SEQ ID NO: 184138 - DNA, 180 bp, Homo sapiens
cttagactagttcctcctatacactttaacaaggaagatagcacaggtccttttgaagtaaagcactgtcagaactttcatttaaattatcagaactccaggatgagtggagttgggtaaacaggctactcaactggtaggaataaaggaaagctatccaagaaagttagagagaataat

SEQ ID NO: 184139 - DNA, 242 bp, Homo sapiens
acctgcacttcccggaacataaattggttaacgccatctggttcttaaggctttggggctccattgagataagcacccagaaggggtagaattagccttttgcataagacattgtagggtgatccacccacgacagactgcagggggtgattcctaagaagctctttcctctaggccctcgtgggcagttgaagctttttcaggtggtgggtttgctgactggcgttagagaagaagaatgg

SEQ ID NO: 184140 - DNA, 542 bp, Homo sapiens
cgatccatatttaggccagaaaccacatggatctcgcatcacttcactgggctccaggacagaaaggggctcaagtcaggaagggaatgcttctaaccaatgattaattactcatcctctgtcaaatttcttgacaaagggacaaaaatgaacactcctaccagggagcaaaatcaatggaaactcacccttttcccactctgtatatttttaaacaaaaaggttttctcccactaacaggtagttttcctgatttttttaaaagcgtattgagaagaaagaagcagaacatcataaccctgctgcagccttttcaaaggtaatgaatgagccagtcccacaggagagggagctctgcttcagggtgggaaggattccttgagagctttcagagtccaatttcccaggaataaacgaggtccgcagtcaggctggggccgacaggctttttccaaggcagacaaaccccaagatccacgaaagcctatattaatcttaattcctagtgcgtcacaggcaggcaaatagaacacaggcctcat

SEQ ID NO: 184141 - DNA, 482 bp, Homo sapiens
ccatgaaaacaccataaccattattgagcattccttgggaggcagtttacgtgctcagtgacaaaacagtgataaagtgtgatattatgatatacatatattggttttcatccatggttcctagctcataactcccatagcccttcctaagtgactaaaacaatcacttgttaaggtatttgtccttggttctggaatcagctttggaacagcttcagagggacaaaggtgaaggtcttttgttgtattactggggcacttcaggcctcagaagcagcctcagaaacagaatctctctctctgaccttctcctgccctcctttcacctactcccttttctccccacagcaggactctaatctttccccacacctttctgtcttggaactggccataaagaaattctatgacctaccttgtctgattgcaggctgtaagacccccatttcagaagagatcgtaccccatacccaggaagaaga

SEQ ID NO: 184142 - DNA, 315 bp, Homo sapiens
gggagtcgttagtgaggtgagttcgaggcggtgcaggaagagtgttgctgggatcgctttcctgcgggctagaggcctggggtcttgagggagactggggcaagattttggattcccgattccctgtcaatcattattaatacagctgtccgggcgccccaagtttgaagctgaactacactctgctggaggtggccaaccgtccatcgggcagttctctctctctttgtctctctctctcactataaactcagtcaagtggtagctagcatcggccagttctcctgagagttacagttctgctgtagatgatgg

SEQ ID NO: 184143 - DNA, 116 bp, Homo sapiens
agatcaaactaatacagcatggcccagagacccatgcatccaaaaacaagagattcacttccacttatatggttagaatcatatatctgttgctgcccaagacctcaagtgagcta

SEQ ID NO: 184144 - DNA, 765 bp, Homo sapiens
ttctatgcaggtacacattcagatgaaaagctaaaagtgatcttttaaaacatagtcccataagtgattattaaaatgcttagagacaaaatgtatgtttgtgtgtagactggaaatacacattggattgtagtttcagattctgactgtcaaaagaccaactttccatactccagagaaaatagcccccaagagacgagcacaagttttccccattgttcagggccagacgataaaccatgtgagatttcataactaccagaccagacgctgggtcaccatgagtcaggggcggcctgactctgccaatatctgcacaactgaataaacaggaggagcgagggaatgccgcagaacgtatacacctgaaggtagagatgtcgcctgtcccatcctgatgtttccccagagcctagcagcccttgtcacacacagcagttgtaaaaaatatgtgtgtgtgtgtgtgtgtagaaataaatgaaagagcttcagtggacaacaaacaggaatagtgtgggggctttgatgaccccacagatgaggggtcgttattaacagtgccattttatccctttgtgagcttagatatcttggccataaatttgggccatgccagtcaaagccaaacttcttgaaagcatgatctccacgcctttgcctcccatttacgcaaccttctgcagccctcccagccccgtcactccaatgaatgcgtcgggggatctctagagcgactgaggatgaagtgacgcgggtttaaaaaaa

SEQ ID NO: 184145 - DNA, 1308 bp, Homo sapiens
agcagatcccttctcctatctgaatccagatgctgtggaagatatctgggcaaatctgaggaccccccagttgcagccatgtcaagactgatgctgaggaggaccccaactgtcacgagcaacacccatcgaacacagccacctacttggggaaagatcaagaagctgtcacagatggtggaagaaaacctgaggaaagcgggacaaccagtcacaatgagtaatttaatgatagctatgagagcggtgatcaccattgctgtgagtattccttcagcaagcactgacacagagaacaattatacttatagggcatatctatcaatcttggctggcaataatgcctggatgtaatcactctatgacccagttacacatgctttctgatctcagtatttgccataatgaatctgctcctataattaaggcataccaccctcaaaaacctatttgtaaacagaattgaacctggccagaaaaaatgaatgtacttgtttgcctcctatctgaatgccagatcacttcttgaaagatcgtttccagattcttcttcagttcaaactgattttcacaaacttgaatctgcacgccataattaggaagctactgcaggccaatttatttggttaatttgcatcagtctaaataatttttcctgacagattacttccgttctaagtaccaagtactttttaatcctagtcaggttattgctaaggataaatgatttcacatttctcataaagatgcctgtcattaagaatattaacacaaattccttccccttgaatagaaatgagctgtcattttagcaatcttgctgtgtcagcctttctattgtcaaacacaacaaatgatgggaaaatcaatttactctttagaattagtcaagtgaggaatcctttgaagtgggggtgcagagtttcgcctgaattctataatcacgtaacagcgagtactgtatgtatgttggtaaaatgttgtgaaatttaatgaggactatttgttgccataagaccttccagacagaatctatctctgaaaaagaattccccactcctaaaatagaggtctgatgagcaacagatgtggtttaaatgaacccttgttcaactgaaccaagaatatattgtgatctgtatgaggcacaattcagaagagaggggaggtggctacagcacagcctcagtgttgagtttggttgtggggtttaaacatatttatttatttcataaagtttctctcataaggcacaatgcaaatgagcttttaattaatacaatctaatgttcagaggatggtcttcat

SEQ ID NO: 184146 - DNA, 394 bp, Homo sapiens
aaagagcagcatgaaagaaaagctggaaagttcgctgaacttttcagtgattaaaatcaatgggcttttgaagaaatttgtcagatttggcatggtttctttgtaaaaatgtattttggtaattttccagaattctgttggaaaagttcaaaaattctgacatataccaaaatggcagcaacacagataaccctatgcaaaataggcaaagaggaaaaatttaacttcaacatcccctcaatcttcccttccttgcagccacccaatcttccaagattcctggtgcttttaggaggtcacagacccccagagttcattaatttgtcagcaaataaattaactaatcaattaatttaggtgtaagtaagtaaagggcaacttcatttagatttct

SEQ ID NO: 184147 - DNA, 110 bp, Homo sapiens
ctgtctcagcctcctgagtagctggggccacaggtatgccccaccacgtctggccccagtgtctagtttctaggcataggcccataatcctttgctgaaaactcctggcg

SEQ ID NO: 184148 - DNA, 255 bp, Homo sapiens
taggattcccccacaccaccctaagagaaaacaattttacgaactgaaatttaggccacatggatagcagaggtgagtgtgacattagataaccttgagttttaaggtaacttttatgggaaaacagattcttgagatgctaagtagattttaaacccttttagttttacaagtctgaattaccccagtgtagtatataaataagctggcatttttaaatattctacactagtgtgtgcattcttaggagtaatc

SEQ ID NO: 184149 - DNA, 456 bp, Homo sapiens
aactcttctgcttgctcaatgtttcaggagttagagaatgaattttaagtgtgacgtgcgtccctattaaatgtctacaaaattttcattaagcatatctagaaaatcacggcataacttgcctgcctttcttcaacatatattcttatataacctgtagtggaagatttgggtactgtctttaataaatcaatcaatcgactcttttatttcaaggagaaagttctatgttatatgttgaaggtgaacagatcatatttagaggatataacaattagaaatctagaaaataattatcatttttataaaatttttagtcaactgtacaaataattacataaaacatcaattaattatgcttaaaaatcactaatgttcataatatataatcactatttgtaatcaaaagtttaattttatgccaaaaaataaaaaatgcttacttggaatttgata

SEQ ID NO: 184150 - DNA, 340 bp, Homo sapiens
ccttggaaatggagtatgtgctggccgtgtgacttgaaccatcgctagcatttgcctgtgaagaggctgcccactgaaggaaggctttgggatgccaggtggctgtggaaatggaatattctggtgacaacaataaggacgacgtctgtggggggtgccatctgctccaggcagcaccagagagtttggagaagagaaaaaggcacggtgagggcctgacattcctggtccaaggcaagttcggagaactgagggatgtaaaataatctgtcatctcttacagctgtatccaaatagcaaataaaaaatcggatcccaagggctccgggttcacaacgcc

SEQ ID NO: 184151 - DNA, 412 bp, Homo sapiens
agggcaagtaccactggaggcagaaccaggacgtcaaaattccattgtcagtctctgctgttgtgacatccctggccaaggaagaggctctagcagccacagggagtctcagtttccacatctggaaaacggaggcagttactatggccttggccaatcccctctcactttcatcagaaataagaaatgagcaaaggatgcctcctaggaaatggaatgagctttcacaacccccctgctctggggctggcgtcccttcctggtagagcggtgggtgaacagcacaagtaactgcaggagatcgcagaggacacagctgtccttcttctccattccaattatatttggcagggaaagtggcttttccccactgatgccagtgtatcattttgtggtccagggaaagaatcca

SEQ ID NO: 184152 - DNA, 403 bp, Homo sapiens
gaagtttttgctatgccttcagttctgtcacagtctttagaggtgtttttgtctaactctccctcaggatcacaccaaaaagccttggtcattcagcatggtgcctgaccttcagcaaatattgggagcctccgattcctgctgcttctagtctgccatctttgccacacccccagaaaattctgactattcaatttctactataccaaaattagactcctcctcccgctaaggaaaagtggtgacaacatgggcatatggacattcattcccaccttcagcagagggaggatatgtgttttgagaaatggtactagagcaattcaacatagaagaaaagaagagaagatgaaggagaagaggaggaagaggaagaggaagaaggaggaggaggaggaagaag

SEQ ID NO: 184153 - DNA, 313 bp, Homo sapiens
tgggattatacgtatttttattcctgataagaaatattccttttatgaagaatctttaaaacttcaaaatgaaatatgataaacaaaatcttttatagtttgacagctaagagttggcaaaagcgacacaattcgtaaccacactagtagtttgctgtcagctaaaattactattaaaaagaaagctcatatctagttaataccagatcactgagccaaaaccacaagagattggggtaagggtagatgctgttgaaaataggcacagggatcttattctttggaatttggattggaaaaaaaacatgcatgt

SEQ ID NO: 184154 - DNA, 228 bp, Homo sapiens
tatatagacaagttctggctctgttgcccaggctccatggagcacagtggcacgatctcggctcactgcaacctccacctcctgagttcaagtgatcctcttacctcagcctcctcagtagctgggtctataggcctgtgccactttgcccagctaatttttgaaatacagttctttttaattacaggcgtagagcaccgaacccggctgtctaattctctggtaacc

SEQ ID NO: 184155 - DNA, 300 bp, Homo sapiens
tatatagacaagttctggctctgttgcccaggctccatggagcacagtggcacgatctcggctcactgcaacctccacctcctgagttcaagtgatcctcttacctcagcctcctcagtagctgggtctataggcctgtgccactttgcccagctaatttttgaaatacagttctttttaattacaggtagcttctgaatctcataaagaatgccacttcttctgggaaaccttccctgacttgcccaaagagagttagatacattttcttctttgccctcataatttttattaagttta

SEQ ID NO: 184156 - DNA, 157 bp, Homo sapiens
aagtaattgcggttttgccattgctttcaatgacaaaaccgcaattaattttcaccaacctaatatttggcacctgaggcacctccttgccattccatagtcccagccctgcagccaggccaactctgagctgtacaaaagggccccaaaggggccg

SEQ ID NO: 184157 - DNA, 155 bp, Homo sapiens
gatatagcaatacatatgctattttttatttcccaacaatttcaccgttttgttttaatggcaaccaaagctgaaaacatgatttggaaagatatgtgggaacaactggaattggagccagatgaggtagaactctaccttgtcaaaaaaactgt

SEQ ID NO: 184158 - DNA, 612 bp, Homo sapiens
cattacatgactatatgtgtgtgggtgtgcttctggactctgttccattccattgttctgcacgtctacacttgtacaaatactactgcttgattattatggctttatagtaagtcttgaaatcccatcatgtgacctctgactccttcaacatttttctactttttggtagaaaattattttggtgatttttgttcctttacttttccacatacactttagaatcagcctgtgaaattcggcaaaaaacttgctgagattttgattaggactgcattgactctaatgtaaatcaatttggggagaattgctgtgtttgtttatttgcattgctataaagaaatacctgaggccaggtaatttgtgaagaagaggctaattttggcttatggttctgcaggctgtgtaggaagcacggtgctggcatctgcctctagtgagggcatcaggaagcttataatcctagcggaaggcaaagtggagccggcatatcacatggtgagagagggagcaaaagagatgcagactcttttaaacaaccaactcttgcatgaactaacagtaaaaactcactaattaccatggcactaagccattcataagggatcttct

SEQ ID NO: 184159 - DNA, 404 bp, Homo sapiens
tctcactctcatccaggctggaatgcagctcactgcagcctctacctcctgggctcgagtgatcctcctacctcagccctctaacccccatccggtagctgggactataggcatacaccaccatgcccagctaattatttaaaatttttgtagagatgggatctcgctatgttgcccaggctggtcttgaactcctgggctcaagcaatcccaccttggcctcccaaagtgctgggattaatggtgtgagccactgtgcctggctgatgcatttggattttatcctcagggtactgaaggatatgaaattaacagatttgtgttttaaaaatatatctttggtaataggtaatagaatggtgaatggactggagaatctagtgagagattctggttaggaagct

SEQ ID NO: 184160 - DNA, 2591 bp, Homo sapiens
  misc_feature (243)..(243): n is a, c, g, or t
  misc_feature (246)..(246): n is a, c, g, or t
  misc_feature (250)..(251): n is a, c, g, or t
  misc_feature (253)..(253): n is a, c, g, or t
  misc_feature (257)..(257): n is a, c, g, or t
  misc_feature (264)..(264): n is a, c, g, or t
  misc_feature (266)..(266): n is a, c, g, or t
  misc_feature (271)..(271): n is a, c, g, or t
  misc_feature (285)..(285): n is a, c, g, or t
  misc_feature (293)..(293): n is a, c, g, or t
  misc_feature (304)..(305): n is a, c, g, or t
  misc_feature (312)..(312): n is a, c, g, or t
  misc_feature (314)..(315): n is a, c, g, or t
  misc_feature (323)..(323): n is a, c, g, or t
  misc_feature (347)..(347): n is a, c, g, or t
  misc_feature (349)..(349): n is a, c, g, or t
  misc_feature (356)..(357): n is a, c, g, or t
  misc_feature (359)..(359): n is a, c, g, or t
  misc_feature (368)..(369): n is a, c, g, or t
  misc_feature (372)..(372): n is a, c, g, or t
  misc_feature (377)..(378): n is a, c, g, or t
  misc_feature (396)..(396): n is a, c, g, or t
  misc_feature (399)..(399): n is a, c, g, or t
  misc_feature (401)..(401): n is a, c, g, or t
  misc_feature (408)..(409): n is a, c, g, or t
  misc_feature (417)..(417): n is a, c, g, or t
  misc_feature (424)..(424): n is a, c, g, or t
  misc_feature (427)..(427): n is a, c, g, or t
  misc_feature (431)..(432): n is a, c, g, or t
  misc_feature (434)..(434): n is a, c, g, or t
  misc_feature (854)..(854): n is a, c, g, or t
  misc_feature (969)..(969): n is a, c, g, or t
tggcggcggacggacagggtcttgctctgttgcccaggctggagtgcactggcgcaatcacagctcaccacagccacaaactcctggactctggtaatccttccaccttagcctccggagtagctgggactacaggcacgtgccacaatggctggctaatcctttaatttttgccgatacaagatctcgctgtttctcgggtcgacaatttcttttcttttttttttttgagacgaagtctcnctntgtnncncagnctggagngnagtgncgcgatctcggctnactgcaanctccgcctccnnggttcangnnattctccngcctcagcctcctgagtagctggnantacaggnncntgccaccannccnggctnntttttgtatttttagtanagncngggtttnnccatgttngccaggntgntctnnanctcctgacctcaggtgatccacccgcctcagcctcccaaagtgctgggattacaggcgtgagccaccgcacctggccgagacttaaactttcaacaatctgatgggtatgaaagagaaacttgtagtttttaatctgcatgtcctgtaaggataatcatgttctcagaaatgtttattgactatttgggccatctatttaaattttttaaactttcatgttcccttttattctgttatcactttctcatagtgattaatagtagaaactctagttttaaaagttaatacacataaagtgctcagaagagtcacagccatgttgttggagacagtattatttttatccttttaaatacgtatatattggctgggcatggtggctcacgcctgtaatcccggcactttgggaggctgaggcngacagatcacctgaggtcgggagttcgagaccagcctgaccaacatggcaaaacgccgtatctactaaaaatacaaaaattagccaggcatggtggcaggcgcctctactcccanctacttgggaggctgaggcagaagaactgcttgaacccaggagcgggaggttgcggtaagctgagaccatgtcgttgtattccagcctgggcaacagagtgagaccccatctcaatacatacatacatacatacgtatttattgagacaggggtctcgctgtgttgaagaagctggtctctagccccaggcctcaagctgtcctcctgtcttggcctcccaaattgctgagattataggcgtaatctcactgcacctgtccaccattttagatactaatcttgccaaagttatttttaaaatttaatctcatttctttgagtgtttctacttatattttctaatcttttatgataaattatttcagcaattttagcattcatgactttaatccttttgtttcttttctagtattagtttaaaatgttccatttctgttctctttgtgtatctcagttcttgcttcaatgacagcaaataaaaatcctggtcttgtggaacagctgagtagtacatcctttcccaaactgggggagggtggttgctttacccccagctgtcccagcagctgctcagccagattcccagatctagcatctttcaaaacatctcaaccttggtaactcagataaaagtctttctgaggcgtaggtcctcctgtgtcaatggcacatctgaattactaacaacgtgttcttttcttaagttatgttatctagtcagttgatcaggagttatatatactgtggaccctgaaaacattatccctgcattattgagtaaatcatgtaaatactgcgagaaggtaaaaaacaccacaaaagcaatgtggcataacactttgtgcattacataggcacccaatacatattggtgattgcctagtaaaaaatagagggctctcagtgctgcttacctgcctctaataaaaatgtaggtggtattaaaccacaagctagaccatcaggaaggaggtacaaggatagatccacaacctgctcttggcctttatctcagcaagctacctggcttctgtactcctactttgattcacctgctgttgcagcagggttttaggaggatcctatttgtgtatctaagattcaacattcatgaaggagcagaaatacttggatttgcctcttagctcttggagctggagagtggatgacttcctgcaaggcacgatttttggattggcttctcaattattacaggaatcctcaacttttagaattgccagcctattcatctgatcttgaaagtgtacaaacttaccttcaaacagtgtagaatatatgcaattctggacctagacagaggcaataacctaaagacatttgcagctcatttcttgtcagaacccattgagaatagtggtattgatggaagactgtcaagcccatccagttctctagtctaaatagtctcagtttatccatgacttgagccatctaaaagttgcataacaaattagccgggcgtggtggcgcatgcctatagtcccagctacccgagaggctaaggcaggagaatcacttgaacccagaaggcgaaggctgcagtgagccgagatcgcaccactgcactccagcctgggtgatcgagtgagactccgtctcc

SEQ ID NO: 184161 - DNA, 344 bp, Homo sapiens
gatttttagggcagtgaaactactctgtatgattctacaatggtggatacatgtcatacatttttccaaaaccatagaagtacaacactgtgagtgaactctaatgtagaatatggactctgggcaaaaatgtgacagtgtaggtccagtgtagttccatcagttgtcacaagtgtactggtctggtgaggtatgtcgataatgcagaaggctatgcatgttttagggcagggtattatgggatatctctgtaccttctgttagatttttctgtgaacctaagacttctctaaaacaaaaatctattgaaagcagaaacaaaacaaacacaacaaaacctagat

SEQ ID NO: 184162 - DNA, 242 bp, Homo sapiens
atttacctgaggaaactgagatatagagaaaccaataaatgtactaaaccccacatagttgggggtgggtatgaaggaattgggatttaaagacatgttgtctgtgacatctggcctcttggagaagggtgggatcccagaaccacttatgtctgttgttgattttgtccaagtgtgaaggtagcagtacagatgaaatataaattatacttttttcacacacagccagtgtgttattttcc

SEQ ID NO: 184163 - DNA, 573 bp, Homo sapiens
cgggactcccagctgaaccagtactgcccccacccattacccccgggctccatgagtggatcaatggactcagtggcctttaatctgagttagggtgcagtactagatgcttttgaagcttctcatgaagtagattctgagtcccaagttagaaagcctcccagaacctcaaagcagggcatgaagtattggcagggcacaatataaatattcatgacccttggataaattacatcaacatagcacccaaacctgaccatcgatctctaacatgagcaatacggcaaaccatgtttgaaaagactaacctgcttgtagtaagaacatactagaagcaagaaagcctagattctgatcgtggaaaacctgtgcaccattaacagtctccactttgtcacttgtaaaatgaatgcactgaggatagagtcaactatcctgattatatggcagtttgagttttcaaaaataccttgccaggacccaaaccaacaattcaaagctcaggaattagtgccagcaggaggcatttcctcacataattgcatccttctcagacagctggattctgtgtca

SEQ ID NO: 184164 - DNA, 184 bp, Homo sapiens
cgctgtctgctgggtggggtccaacaccacagcgcagtctagtggccggaggagccaaggaggcgcggggtggagactgggccgagcaggggatagagatgaactccagaaaggaacagcgacttgctgaaagtcacagggcaaaatgtggcgcgtctgtagtcaataaataatatatattgag

SEQ ID NO: 184165 - DNA, 342 bp, Homo sapiens
tgaactggcacaaattcatcaccacaaatgaacaaacagctcaagtctgtgctcttctgacagtatgatcatttgtttaaagtacctaatatgtagatgcctacacatcaccacatatgtatatattttgctaataagcttcctctttggacacagagaagcaacgcgtttatttatgctttgagtactttattatgtcaaggtactaacagtttggatgcagagacaaatagtttcaattgctaatgcattaaaaacattttttctaagttttatttttaatatcagctaaagaaaaaaatttttttctgggaaataacttgtaaaacatggtatcaatta

SEQ ID NO: 184166 - DNA, 347 bp, Homo sapiens
tgagggatacaatgataaataatacagctcttgatttcaagaagctaacaatgttctagaagggtagaaaaagaagtaggcaatctcacctctatgtagtaagtactaccaaaggggtgtacaaaaggctatggtacacagtggggggctacctaaattctcaggtggagtgagaatggcaagggatagaacctacatataacccactactgtgtgaataccagaaaacggagattagggttcatcttagggtctacttgttgcactacatttatggccaccttagtaatatactttctgacagactggacaatcctaatcacttcagtttactcattgtatcccta

SEQ ID NO: 184167 - DNA, 380 bp, Homo sapiens
atatacatgtatattttcttattcacattttccaacaaaaagatcacatcacttagaaatatgggagtctttccctatcagttcgtaggaagatttctcaattcttttgacaggcatctactccatttatgtggacatagcacagtttattcaaccgttcttttatgtatagacttttagattgtttctaatatttagcaattacaaacaatgctgcaatgaaaacctctgctaaccttgtgagtgtttatttgtatattgctataggagtaactttaggatagcatcctataagtgagattgccaggtcaaaaggtaagagcattttattttgttggatattgccaagttcctctccagaaggatgtatcaggttgaat

SEQ ID NO: 184168 - DNA, 719 bp, Homo sapiens
ccctgcacaaccgaggggaaaaggatatattaatggaatcctaagctgcaaacactgaagtgaaaattaaggaagtttatttcacattttatccttatgaaaacaaaagacggaaaatgaaaagttttctgttttttcatgcacagcaccagaggagcacatttacatttttaaaaaagtgattgtttccaaatgctgttatgtgagtgattaaaaaatctcctctgctctttttcttattttcaatatttaagagagtttgaagggcttagcatggtttcagtgttccttttctggaagaatgaacaaaggccattgttgacagtcgtcagcttctcctgcgagggcagccttccattcagctggactggctgggctgggagctgtccagtgatgaatgaatcttccttggactgacctccagctatcctggaacctggagacaagaggtgacctgagagctttgccctcatcaacggccctcaggaacctcatgtgtagggccactaccctgctctggccacctggctctgtccaccccagaccctgggctgaggtcacattggagctgcagaggtggcttatccttcttgcccttgatgttaccaatcaccatatgtcttcaacagagcatgccaagacagggtcttgctctattgcccaggctggagtgcagtggcacaatctcagctcattgcagcctcgacctcccaggctga

SEQ ID NO: 184169 - DNA, 418 bp, Homo sapiens
gtttttctgtaattatagagcacaagcaggatgaggagctgcagttaccccgggatctgaaagttctagagtcgtcacttgctcttctggtgactgtttcttctactaatgcaccagttcatgcatctccagggcctcccttcaccccatttgggacatggatgagcgagtgtcattccttcagctggtatcattctcagtagcagggcattgtaagggatggagagtggcagcagacagatgggcccattgacaagtgtgtccccttgtgagctcctgtcacaactgaattattctatcatttgtgctgtcactaaatcaggcagatcgaagaagtggaaagaatagcatttctagtgacaatcacagagaaatggctctgtagcgtgtgtgctttctgggaaggggactggcttta

SEQ ID NO: 184170 - DNA, 315 bp, Homo sapiens
gcattaggtatttgtgctaatgctctccctccccttttccgcaccccctgacaggccctggtgtgtgatgttcccaggagtgggagtctctaaggggtgaaaggagagagaaaacacgctgggctagcactctgctgagttctgcactgagttagtgcctaactttgtgctgtctgcagctgtctcccctactcctgccccagggttcacttcctagaacagagccccggggaacccgggagctgtggaaagccaggtctcccttgtggttcgggaaacacagaaattcagctgaccaagagacgaagagaagta

SEQ ID NO: 184171 - DNA, 488 bp, Homo sapiens
catatcttgctagtgtaagtgaccagaatttaaatctgtaaaggttcactttttcttgctaatgctgtgaggtgtttggaagttatctctgatcttcctggtacttactataggctcattcagtttactaattaactccatctgccaccttaaaaaccccaaagtgctgggattacaggcgtgagccaccacgcccggcccagaatgcacatttctgttgtgtattttgctgactccctatttggctagaagaggaaattctgctacccaagttcacggggtcaccagcagaccagcagcaagtgccccatggccatcccaacctcctagacagggtctcggggctctcactttcccccaaacttctggctacaactagactcaaacttcggcatcttccctctccttgcgttcctctttactcttttctaggatcttagtaatccctccatcctgtcctccacctgaccacagagcggcacggtgtg

SEQ ID NO: 184172 - DNA, 698 bp, Homo sapiens
ttgcttggaacttgcttccaaggcagatgcagagctatgcaggaacttgcttggaatgaaggcagcttccactgggtgctgagtgccttattcctttctgcccacagtgcctggcagagaggaataaaacaagtagctaccatttagttaagggcttcggtgggccatgtactccatgccaggcactgtaactacaatcacccctgtggaaggctttatgtgttccctatcttagagatggggaggacaagggccagaggggaaaagtctcttgcccatgttcacccatactagcaagaggttgagctgggctttaaactcaggactacatgaagaaatatatggtctttccaaagccatgctataaagatacacagcaaaatttgtggagtgagtaaatgattcactgaatgagttagcacatgaatgaatgataaatgaagaagtgatgaaatgagttagtgaaagaatacctcatcaaatgaagaagagtctccccgttgccacccattgcccttctcttatttcctcctcctttccctctggccttcctcttccctctcctctttactgcctcttttcttctcccttatccctcccttttcttctcttacctctcctttcttccttcttctcttccctcttgcctttctcctctcctcccttccttccttgttcctctcttatctccctacttt

SEQ ID NO: 184173 - DNA, 99 bp, Homo sapiens
agagggcagacgagtcgaagcttacactgtggttgaactggagaaagcagtgcattcatagaaaattctgagaaaattattttgtttaaagaccatttt

SEQ ID NO: 184174 - DNA, 458 bp, Homo sapiens
ctcagagataatgcattttcatttccaaactacctgaataaagcaaatatagccataaagtgaatcacatgaattgtttggttttccagtgtatataatagttatgtttacactatatcatagtctattcagtgtggaatagcctatgtctgagaaaacagtatatgtaccttaattaaaactatcatatttcattgttcaattcccacctatgagtgagaatatgcggtgtttggttttttgttcttgcaatagtttactgagaatgatggtttccaatttcatccatgtccctacaaaggacatgaactcatcattttttatggctgcatagtattccatggtgtatatgtgccacattttcttaatccagtctatcattgttggacatttgggttggttccaagtctttgctattgtgaataatgccgcaataaacatacatgtgcatgtgtctt

SEQ ID NO: 184175 - DNA, 383 bp, Homo sapiens
tgcctagcacctctaagctgttttctttagacataagttttataccgtatgttctgtgttgtaatctttttatttcatcatgaacatctttgtgtattacatagtttgcaatatttttaacagttgtgtgacattccattttaaaccagtcgtattttggacatttgatcttttttttagccttgtgatggaacagtaggtctttttcagtcttttactattatacatggtcatgcagtatggattcttgtggttaaatatttgtgtacatctttacgactttctttggattaattcctagaaatggaagttatcaggaaactgcagggctatggtgaatttttccatcctgagatgtgttgcaaacattgtacactcttatt

SEQ ID NO: 184176 - DNA, 313 bp, Homo sapiens
atgaccatgtctatgtcctaggatcactggaagggtaaatgaaatgatgtatgtgagatgctaagtgcagtgcctgccttaccaggtgctcaggaaatgctggccctcccctgtggttcaagcacccagagatattttctccatgagtcagctcccagtctccctcttgccctggagcaaaagaaccaatcctgtccactaggctgtttcagcttggcaaggagccatcgaagccccctgtcctgttagctgagaaaaggtgtgtcctgggagagagaggattttgacccaggttgagatgggaggtggctct

SEQ ID NO: 184177 - DNA, 341 bp, Homo sapiens
gactgctttccatttctcaacacgccaacatggtctccctctaaacattctaacttccagcaccttcggcctggaacacttggtgctctatcttcacacagccagctctaccttcttactcaacctcaccaccagtgtttctccttgactaccctatctaagaaaggtacccctccctcactttctatcctactaccctgtttttcagtacattttaccatctgaaattatcttgttcaaatttttgtctgattcctcccatttgtatgtaagtcccaagacataaggaccttgtctgttctattcatcactgtatttccccagtgcctgtgcatagtaga

SEQ ID NO: 184178 - DNA, 488 bp, Homo sapiens
cttcatatctattcattcttctttctttatttttgtctgattgggttacttagaaagccttgttttcgagctctgaaattcttttttcttcttggtctagtctactgttaagatttttcgctgcattttgtagttccctaaatgtgtctttcacttccaaaagttctggtttgtttttctttacaatgtctgtctctttagaacatttttcattcatgtcctgaattgtttcattaatttctttatgttggttttcacctttcctttttatctccttgaataatttaataatcaaccttttgaattttttatctggtatttcaaaaatttcatcttggtttggatccattgctggagagttagtgtgatcttttgggagtgttatagaactctgttctttcatattgccagaattatttttctagtttccttcttatttgggtagactgtttcttctaattatttttgaatttgtttttgattggaca

SEQ ID NO: 184179 - DNA, 359 bp, Homo sapiens
agataaaaatagactccatgctgctgatataattactagaggctataaaagccatgcaaaatctggagagggggcgtgggaatagtcaaggaaagaacataaacaagggagcagtgacataaactaggacttcatgccatccttaattccttcacagagctccacacagtcctacagcgttccaccatgtaaaatcaggccttcattttgaacttggaaatctccccactcgcaggcagtggcaatgccagcaagccacaggtgggcaccacatgagcaggtgagaaatgccactagtaaggggaggttgaggatctggtgcctctaaaagagcacatcaatcctaattatcctgcgtg

SEQ ID NO: 184180 - DNA, 288 bp, Homo sapiens
ggaaactgaggttacaggaggttaggggatggcccgggatacccagccggtacatggtggctgtgggctaggacccaggggccgttgccccaaggctgtcctccagcaccctcaccacatcgtcagatggtcacaggaggtcctttagggatcagtggtgcctcaggcagggagcatttggggaaggctctgttgaagctgagttttgggtgcaaaagcaggtaagggaaccgcacatgcagaggccaagaggcaagacagagcccgtactttcggggaacgatgagg

SEQ ID NO: 184181 - DNA, 659 bp, Homo sapiens
aaataaggcagataggtatccttaaaataattttttccgccaggcgcagtggctcacgcctgtaatcccagcactttgggaggccgaggcgggcggatcacgaggtcaggagatcaagaccatcctggctaacacggtgaaaacccgtctctactaaaaaatacaaaaaaattagccgggcgtggtggcgggtgcctgtagtcccagctactcaggaggctgaggcaggagaatggcgtgaacccgggaggcagagcttgcagtgagccgagatcacaccactgcactccagcctgggcgacagagcaagactctgtctcaaaaaaaaaataataataataattttttcccagtagaaattattttagacttcagaaacacatgaggaagaaggaagtttatagtacccattaacgtctaaggattaacgtctaaggatcctcttgttaacactgtagtgtacttcattccaatccatgtatgtgtattttgttttcctacagatttgaagtgaaacaggtttttcctccaacctcttccccccacccagcatcatatcataggcattttcccattccactaaattttcaaaattgtttttaacagctgcatggtattcctttcaatggatgaaccataatttaactatttcccagtcg

SEQ ID NO: 184182 - DNA, 417 bp, Homo sapiens
cagaaactgtttccttaatgttctaacgggcagcaaggtttcttccccaggcctctgagccactgatgacatatcctgcccttctgttttccgtgagattgctcacaggacctcactctccctcttgctcccattgtgtatctctaaagtctcttccaattttactattcctgttctgtgccaccaccatcccgttatcttccccagctgctctcatcaggaaatttcgtgggttgcactgaaacggccccttcagaccaaaggcaatgctatgtaggctaaaatgaaatacgcagctgatgcctcggacggggcttgtgattgaggtgactgaggcagcctttctcagcatggaggaagaaaggctttcccagggcttgcaccttcctgaagtctaacacccagggcccccagccc

SEQ ID NO: 184183 - DNA, 253 bp, Homo sapiens
atgtaaccacctcctcacaagatgtaaccattccatcacaatagaatgacgcacggtctgtgtctgaggatgttttcatttaatggcaacctaaaccaaacctaagacaatcctactccaagccacgacataaacagcgctgacacatgctttcagttcacaacttcatcatcagcattcgtattttctttttttctttcttttttttttttttgagacagtgtcttgctctgtcgtacaggctggagggcag

SEQ ID NO: 184184 - DNA, 386 bp, Homo sapiens
gatgggagggataggggtaaaagagtataaaggaatcacccccagaaacccagaatcccagggctaaagaaaagccacactaggagttggagcttgcaaaagagaagggtgcatgctcctgggccattttctggtggctgcaagctcatcctcactcattaaccatctgtgtttataaccatggccatcactgcacacctctgagctcctgctctcccacttaacaagacagctaataccgtatctacctccagtctgagattcctccagaaagagctctcagttcagcatctgggagcaaccgcctgcttaagaaacattactctccccactgcctttccatagaagagtggtgatgaatgacctaacggtgagaaacaagggca

SEQ ID NO: 184185 - DNA, 815 bp, Homo sapiens
agggccacttcctgagaaatggagcatcggacaaacaccagcggggtgggaatggcaagtgctcaaggtgagcacgatgcagctgcgacctgtagactggctgcaatggggagcctggccaggagaagccagagacggacaccaaggtcagatcctgaagcacagaagaccctcagtggggatagggacctggctgcagggagcaaggtggccagtgtggacccatcaggaaggcaggggcctggtctggggaccccacagctccagctgggcagagctaccccatgctgtgctgtgccatggaataccagccaagagaccaggagcagggagcgttctgataggaacatccagctttcaggtctgacgtggcccattttaccagaagaaggggacctgctctgagcatagcagccccctctgcctggaacctcacagggctcacctccaggctagcaccctgcccctgcggctgaccctggccaggaagacacatgttagacagctggctggacttggtgcctgctgtggctgcaactcccctgggaagacagttgagtgttctgacgttggctaaactgcatctttacaacagctggggccccagcgccacctggccctgtgcccaggcaaggccctgctggtcccagcatccttctctcccacagatcttaccccggctcccaccccagcactctggccagcaccgcctccctgtttcatagtcccatcaacccctcacacactggctcccagctgctgccaccaccttgagctgtctcggatagcctcctgcccatacccctttggcctga

SEQ ID NO: 184186 - DNA, 188 bp, Homo sapiens
cagtaatggtttccaaaagatgtccacatcctcatccctagaacctcgtgaatgttacttcacatggcaaaagaatttttacagatgtgaataaattaggaatcttgagatacagagattatcctggattatctgagtgggcccagtgtattcacaaggatacttaaatgtggaagaggaagatagaa

SEQ ID NO: 184187 - DNA, 189 bp, Homo sapiens
ttacaaaattaggcagcaagccacagtttgctgatccctgatctataggttccccttcccccgcaccttgtccctgtaatacatacattgaagaatgatgtgccttcctaacatcagcgaattattcctttccagagttacaaatcttgagtagcaaagagacttaactttaatggcatcgttttagct

SEQ ID NO: 184188 - DNA, 265 bp, Homo sapiens
tgagagcaggggctattttccgctctgtgttgcatatcccataccccacatgctgcttcacatgtagtagacagaagctcaatgaatgttgatgggagtaattaattaatgaattgaacattaacctaccacagatgaattcacaagatgattagtgctagagcagtctgctgaaattggactaccctagaaaccaagttgatcggatctgacaaatgcgaaccttatttatcatggctgatgcaatgcataatatgagggttta

SEQ ID NO: 184189 - DNA, 296 bp, Homo sapiens
cttgaccatgcaaagtctgagtcagactgccaggtctcctaggctgctgccctccatacggtgactcagcaattcagcctgcgtctatctcaacacaaggcttccagaatctccaccgtggcacagaatgagagctggggagtcctgcaagggctcttcatggcctcagcctggaagtgattctcctcactcacactcagagcacattggccagaatgagtcccaggccctcatctaactgcaagggggctgggaaaagcagttttcttgggtaactgggaaggaaaggcgagtac

SEQ ID NO: 184190 - DNA, 452 bp, Homo sapiens
cattagtcctaaatattaataatatgatttctcaatgagtctgaaacattttcaagatactagaaatttgtgacagatgccttttacatctgtgagaatccagaatattattctttaaaatgcattttctcataaatagctcattaactttctcattgttctcagttgtaaatctgtaaaaagcaattttgttcccttgtctgtaataagaaatcttttgcactcattaagataattaaagcattactagtgtgcatgctcactatattcaaaacattttctacttgatatgagttgtcatggcattatcaagaccggagggggcggaaagaaaaaaataaaatagcgtcagcctatggttatgctctttgaatttgaatatgattaagtgcatctttaatttgtttctgagtcatagtttaaaataaaaactggagagcattttgtaggag

SEQ ID NO: 184191 - DNA, 367 bp, Homo sapiens
agagtaatgttgaagaattgctttattttggttatgtcattgtcctactcattataaatatcacttcctttccttctacttttctattattctacactataaatatttcaggctgtttcatagttttaaagaagtttcttgtcaggggttatgagggaacagagacacttggccatcccattacctgtttcaaatatagaatttccattctaatctgtttcacacattggtattccttttaagtttacttttaaagggactccactgcattaccttaaaataaaaagcttgctcttattgacttggaaacattctgctttctcgcagacataattctataacaatatagcttatcagacaccattta

SEQ ID NO: 184192 - DNA, 321 bp, Homo sapiens
ctttcttcaaaatgcagaaacagtgacaaggaaattcattcaccattggtcaaaggtagacacaaagtcagaaatgggactagcttgtatttatatttaagctgcttttccttgtacctttcttatatgctttattcatctgcctctccagttaaacaaagaaataactgattattatttcttttctgacaacctcacagagcacattagcctcagaaaaacagaatcacagtagcctatacaagggattgctctggcagttcttttctgaggcatgatcataaggtgtgcacaaattaaataattaattccctaggtagc

SEQ ID NO: 184193 - DNA, 304 bp, Homo sapiens
gtcggtaccggtctttcacgggtggaagtagtataggtcttatgtgaactacatgtgttcgcattttctttatcttatagattttgtctggtttttctatcagttactgagagatgtatgataaaatctcccactatgattgtggatttttctatgaattttctataagtttttctgttcttttctactttaattgcattatggtcagaagacatattctgtatgatttaaattctttaaaatgtattgcaatttactctatgagccagtatatggtcagattttaagtatgctctgtgatttc

SEQ ID NO: 184194 - DNA, 281 bp, Homo sapiens
ctatcgcccaacactgcactttcatatccatcatgtcatttaattcccacaatggtctgtctggtgcagggattattattgcacctattttacagaagaggaaactgaggccccaaaagggggagtgtcacccagacagttattggcagagcaggctctcaaaccaaacccaggttctctagtctccctgtgtcagtcctgtctcctgctgtgaaagagcatggggtttggaacaggaggggagtgacagaccttcaggggctgggtgttggggataaatc

SEQ ID NO: 184195 - DNA, 707 bp, Homo sapiens
ccaggctaaagctcctaccccatttggtttacccacagatctaattttcttgttgagaacttccgtctttccacttatttcaagaatattaacagttaccacatgaagggggcttttaatagctgctttaaaaaccattgtctgatacttccaacatctaggctatctatggattggcaactgttgtggcttttcttgagaattgaccagattttccagatttttcatattgaatatcccgaacattttgaatattatgttatgaaactttgaatcctgttaaaatcttctggagaatgttgagagttttcttgtttgtttgttttgggctagcaatcaaccataagttctatctttcctgttgtaggtggcagtttcaatcttagctaaaatataaaatcttttgctatgatgtttgggtctgcctcactcagaggttactctcacaaacgaggggtgatttatatcatagttcaattcctgaagtttttggggttatctttctttggatctggtccacacacgcacagctctaggctgaacttgggacttacgtaattcatatactgaattagtccctgtgtctggctctctcctttccaggattccgcccatgccctttagcctacaagggtcccttttcctggctcttctggccagaaagactgggtgtcttttggagttctactgcccaaacagctttttaa

SEQ ID NO: 184196 - DNA, 382 bp, Homo sapiens
ggggtttgtttttaaaatgaatgccagtggaggctaagcagaagccagggtgtgtttttattttatgtctcaaataaaaataaagagctgggtatgaataatcaaaggggcaggcgcctccctggatacttctaaaccttccaaaagcagtcccaaggctcagcaaaacgtaatatagtcaaaacaaccatgaacagcattagtaccaagggtttgccccagaaaaataacataattgccatacagattcccttgcagccccaaactccagtgcctttcaactttatattaagttaaaatatcctttgtcggtgggtagcagtcctagaaagagtattcctagaagttagaatgattgcagataataggaagatgatatcat

SEQ ID NO: 184197 - DNA, 420 bp, Homo sapiens
tgacaaccccatagtttcgaaattttgtttctgcaatccgcagctttgggaagcactgaattacaaaacctgaaaaccctcatatatgtggcggcttagaggccggcctaggctggagcggaggtcttgggaagcgctgggccgctcgtaaagtcaatggtgagtctcccggctttcggctttcggctttcggcggcagccgggtgtgaggttccacgggcaaagccagccagagggttgacagaaataactggataaatctgtgcccctgcccctgccggctcacacggctgcagcccacggctggagccaaaaataaccgcgcagttgacgccacggtttctttagcgtcttgctggagacattgactttcagagcccctgtcccgccttccattccccactacttggcagcccaccg

SEQ ID NO: 184198 - DNA, 949 bp, Homo sapiens
cctttctttttctgtatatactgtgtttattatagtagcatataataaatctcgatatggggaagaagtcctcctttatttttcaagagtagtgactaatcttggcccattgtccttccagcaaggatcaacttttaaatttcctttttttttttttggattgtcaaatttgaaaacccccacaaactcatttgggttttgatgtcaactgtattaaatctgtatgtcaatttggaaagtacagtcatcttttgatgttcatgggggattgggttcacgaccccacttgtgtggacaccaaattctgtggacgttcaattcccttgtataaaatggtatagtattggcatatgtccaacacctatgcttcagtgtaccttaaatcatctctagattacttgccgtgcctaatagaatgtaaatgctgtgtacatagttgttacactgtacttttagaactttgtattatttttgattgtgtttctttcccagaatgaccctctatatttctagttatgttttttgcctcaatgtttatgttgtctggattaatatggctatcttcactttcttttgtttagacttttctctgtttgttttttatccttttgcttttagtcttgttcctatcattttaagttatgtttcctgcacaagactaaagtataaattttaagtccagactgattgcccttctttttacttggtacatttgattcatttatatgtattagatctaccattttctgttgccttttctttcccagcttatttatgctgctgcttctctcctttttgcctttttgaattgccttgcttgtgtgtgtatatatattttttcatacaattttttctcaagtagtttggaagttgtatttgcatgtatttttagtagttgccactgaaattttactcatacatatttaacataacaaaatctgaagttaca

SEQ ID NO: 184199 - DNA, 336 bp, Homo sapiens
ttgcactgtaaggtgtgagttgtcatggtgactgacatcctgtctcattctcaatcttaggaatagctttcaaaatttaaacattaagtatgatgtttgctgtaaatttttaaaatattctatatcagattaggaagttccattctgttaggctgctaagagtttttattatgtatggtgtttaattatattcactgttatttttgtatctactaagatgatctgatgatttttctctttagttatgttaatgtggtaagttatattgattggttttcaactattaaaccaaaacatatttctgaaataaatctagcttagtcatggtgcttaagc

SEQ ID NO: 184200 - DNA, 665 bp, Homo sapiens
ccttcctgaatgctattttccatatggctgtcagaatgctcttaatcttaaaatacaaatctcatcaaatccctttaatagacccaaattgcctgaggtattaatataatgacaaaactcaacatggcaaataaggactccatgacttctggaacctcatctttctgctctatggctaatctggccttctatcatttcctcaaaagggtcaaggtccttctcatctctagtctcacttgacgctgtcccctcttcactgaatgctgtttattgctactctctatctggttaaatcccacactggtactgcagggcccaagctaactgatacagctactagaaacacagaaatcatttggattaaaaaaaaagaatcccttgatataagcaatagataaaagggaactgggatgtagtaatcagagatccatagtagaaacacacccaagttatttatatacatgtttgtgtgtacataaatatttataaaatttaatgtcatatctaagacatttatttcatttattgtatatattctccttgctcaactctatcttaggtacactatgaaagcaggaagatgtggggaggggcagaggaggggagattaatttcttacatttatcttactcttctgccttagcctgctctttgagcctaaaaac

SEQ ID NO: 184201 - DNA, 300 bp, Homo sapiens
agaggcttccctcctttgtgctcccctaatgcttaacaggcattcactgagcacccgtgacatgcaaggcacccacaacacaagtcagtgtcccctgccctcccagagggcatatgaacaaataaacggcaagactctccaatactcatccatgccccacagaaagccacccacaggcatgggagggctgttttaactgcgggtgacagggaggcctctccaagatggcagcgcttcagcaagacctgaatgaggcggccaggaggtctagggagggactttccaggagggaacaagtga

SEQ ID NO: 184202 - DNA, 413 bp, Homo sapiens
gcgtgtcttggttcactgcaacctccgcctcccaggttcaagtgattctcttacctcagcctcctgcgtagctgggattacaggcacgtgccaccatgcccggctaatttttgtatttttagtagagacgggttttggccatgttgatcatgtggatcatgtggttgtattagcttctctaaaagttttccattttgtacaaataaactgcaatttacctacctatttccctcttgctagacagtgaggtcgttccaatctttccctcacacaacagtgctgtgacagacatgccactcattctccacacccaacagagactgcttgctcagcaaacaccttccacacctccaaggtcagtcgcaattcccaagcctcacctccttagggagtgttccctgtcccacttctct

SEQ ID NO: 184203 - DNA, 498 bp, Homo sapiens
cccttcgattggcgggcacttacaaataaccttttgtggctggattatttaggtaaccatggctcatgatgatgcttatgtcatttctggaaagtgatattcttgtcattcaaaataatgatgaccttgatacctctacagcttatgatggggggatcccaagtggggtctagtcagaccgtgaactcccaaagtcatctaaccctatgtgcatttttctggaagaagggttaccactttgatcatgatctccacaatgtctgactgcaggggacattaagaatatctgctgtggagaacaaggccaggaacagccaggctgtcttgcccagcccaggcgcagcctctgggggggccgagctcagcagtcccagaggagcccttaggagcacttttggggctatgtgccttgctcagacctggcagcggaattctgcactgctgaattgagcatggggacgtcctcatttctctgaggctagacctgacatactgact

SEQ ID NO: 184204 - DNA, 890 bp, Homo sapiens
tggacctggggtgtgcagttgaatgggggtactcatcaatttctcctttaaaacaaattttacaactgtctttatttattgcttctttggcctatggagctaaaagcctgcaagcagcggggaagtaagttagaaattttactgagtgaaaaatctttggtggtgtgtggattaaccttcaggggaagtctgttaggagctgatggttttcttacctgtgaatactactgctagaactagacatttagagcttgcactacggagaaagatacattttcatttttaactttgaccttcaggtgcctttgcatattttcattgcaggcagtcttaaagatttttgttgtgagctgtgtgattaaatacgacaatggaaggaatacatgctttatactataactctctttattcccacccatctgtacgtcatttgcttttgaaattttgttctttatttctacgttccatctatgttccatgagctgtgcaactgctattctttaaaaaatactggttatgaaattgcattaacattttcatcctacaatgtgtttttttcactgcctgtgtcctacaagcctgcttttagaaattgaatcacttttataagtcatttttaattttgaaattttatgatctagctatttaatctatttctatccaggactttcccagttaccttcaacatggtcttgaaatggccctaaaaaattcccgtcttcagtgttcaaacattttgcccggtggttgtatgttttcttcccaccgctgaggcctgggtatatgtgccctatagtatttttgtgacttctgtagatatatgagccatgtttttcctttatttttgaatttttttttcctgtgctctaatggcggtaggagattgtgga

SEQ ID NO: 184205 - DNA, 672 bp, Homo sapiens
atccagaagcggcgggcatttgaaatgatgtaagccgggagtcgctctgcctgcccgtttctgcgctgcactggccgacacttaagcactggaagagaggcctggcaggaggcggcgcagtggacacgcggtccgaggacgggggcctcacccgccgccccacgcttgcctcttcctgggatgccgcaggcggggccctaactcacagcctcctcacccgggctcgtgtctgcgcccgcgacttcgactgggaggagcttctggcgccacctgcgccacggtgcgccgggccgccggcgaccgggtcgctgcgctcggcgactgccgcgctcctcggggaacgtgagggtctgagtccgggatccaggagagcagttggtgtcgggtctctgcgggggagcggggctgcgaggtggaggcgaggaccggggtgggcggaggcggggtaggtctggccgggaagtacccgaggccccgaggcatgagcgggggaaggtgaccaggacttggaatttcataaacgtccccgtcaggcgtgacgggtcgtcagggctgctatcaaagtcagtccgcccatctaccctcaaacaagccacctcctctccaccaaaacaggctgtgtaaaaagtccagctatagacgaccgccgtcgacttaatttcgaaaaagata

SEQ ID NO: 184206 - DNA, 588 bp, Homo sapiens
caccctattgagccactgcctcgatgtcctgcaaaatgtttgatctatttggcttacttaatgaacactcttggtatgagtgagtggaaaaactactgatcacaaaccccatgtatccaaatcagatgggacttaattacagaggagtctgggagtaacatcactgcacacctgatgtcttaacatgtcccaagagacaaaaggggactctcgaattaaacaaagattagttttgtttagcaagcaccttcttgcattggaagtaattagcgtcttaatccacacagatgctagacttcagaaaattggttaaaatcataactgagttagacaatcacaaggtggttttacaattttttacacacctttaacccactcagaaaaaatagtgcagctcgctgtcagcactcatttaattttacataaacatgctctttgaggctgaagtaaacctgactgattttcaacatgaaaataaaacataaaaactgttcttggagttatttctaaacagaacttgtctccaatcctaacgtaacagaaatgtatatgaggttacattaggattagagacaagagtattcttgg

SEQ ID NO: 184207 - DNA, 427 bp, Homo sapiens
ttaatcacttactaactagcatgctatatcagtgtgatggagaaacgggcaaggtattaattagttaggataacatgctaatgtgtgcattgtaacactcctgctatttaaagcaaggaagaccctgagtttgagtcttattcagaactgaagcctttttctagaatttttgttctctccaaattccatatctatgctaagctgacttgccttttgcctccctatggttgcatacttttctcctttcattatatttttcctttcagtctcggacccttgagatctagtcttctacatccatgacattctcaaaccacagaaaggaattttcccactataataataggtgtgcattacactttctttcttcgcagcaataagtgccattacttcattcaagtgttgagtacctgtgatgtgctgggca

SEQ ID NO: 184208 - DNA, 323 bp, Homo sapiens
agagggatcttgcagtagatcttaaaccctatagtattcttaagagcacaaggaaattcttatttgggttccatttacaacaaaggtggaaatttaaaactaggctgagaatttgaaatgctgttcacattaagcagtttattagggggttattttgaaatcgttcttaagtaattttaagatgtttccacatctcaaaaggatacatacatttttcttcagttttctttggagaatgtctgttcaggatgtttagcaggttgggtttcagaatttcagcggctttatggtgctgtcatccagttcgacagattgaatttgca

SEQ ID NO: 184209 - DNA, 402 bp, Homo sapiens
ccaggaaatggccagttggtggagccatcagaacacaaacaacacctactgattaagtgtgacatcttatatggctatggttcatgatgccccaaaacaattacaatagtaacattaaagatcactaattggaggcgatcataacagatatatattgagagaatctccaaaatgtgacacagagacacaaagcgagcacatgctattggaaaaatgggaccaacagacttgctcaatgcaggtttgccaaaaaccttccatttgttttaaaaaaataaaacacacaatatctgggaaatgcaatacagtgaagcacaatacaatgagatgtacttgtatgtatacttcatatttacataaaattaaaatatcagagaaataataaaatctacatagttgagt

SEQ ID NO: 184210 - DNA, 159 bp, Homo sapiens
accattcagcaagatgagccaagtctgacctcaaattagttaaacctagagtgtcttagttacccaaggtaaacagagaaactaagtaccatacatgggcagatgtatggacagttgaatgggcaggtaggctgacaaataaatgaatcaaccattcag

SEQ ID NO: 184211 - DNA, 753 bp, Homo sapiens
agccctatgacggggctccgatttgggaaggctaggcagtgattacatatggagagatgggccctgaactaatgactaagtaactgatgaaaaggaagatgtaaattttatcatccatccctttaagaaagtttcaggggctccacagaatgacaaaagtctgtaacagcctaatttacattaccatattcttttcctttgtgttcttatgaacaagatgccttctcatataataattcaacagtttctctccatttgttctattgctatttgccatgtttcctcctggccacctacgttgggtcttaaacaattcagttgataagacaaagggaggcagggttaagaacattcagacccagaaagccacacgcgcaaaggcacagaggtgcaggtctaagcctttagggaagctgaaatacttccgcatgggtggggcacagtgcaagtaggaaagagtgccttgtgcaggggtctgggtagatactccactgacccaaggctttaagcagggagagtactgcactgctatttgaattcagaataacctctctgacggtgatatggaagatacgtcagaatgtagatgatactggaggtatggaaacaaagtgggagagtgagcaataagctcataagaaaatgaaggcaggtagtacgggctgaattgtgtcccccaaaaactcatatgctgaagtcctaacctcccagcaccctagaatgtgactgtaattagagatagggttgttaaag

SEQ ID NO: 184212 - DNA, 357 bp, Homo sapiens
cgtgcagggggttaccttacttaacaaagctaccttaagaaaagcaaaggcagcacagctggcaacatttctaggtttgctcgagaacattttccaaatgctgtgagcacagcttttgctttactgagcaatatttgaggaaaagtgacaagagaacgccgggcatcccgacatgaaaaggccgaatgtcaaggcagagggacaagcctccttcaagaccacagcccagaagggagccgcggcaaaatgacaactggactctgcttgcagtttctgaccttaggtgaaaggtttcaacagggaagacaggcctcagcacccaggcaccatcccatcccatcaaagccacacacggct

SEQ ID NO: 184213 - DNA, 429 bp, Homo sapiens
tgtaggtgccttagagacatcagacaaagaaatgcatgccagctaggtaatcctttttgtggaagcgctagataagagattacgaatgctgaatggtgagctggggaaaaattaatgtttaaagttagagaaacagttgggctcagaaaaaaagaacatgaaaaagcagtatacctcagtggctaaagcactacctagctgagtggcctatttgtttctccacctgggaaaaaatggaggtagcaatactgaacaggattgttataaaggattacagagttaatattcatgaacagcttagaacacctggaatacagtaaatgctatctaagaacctgttacataaactagaggggtgacaataatggctgaagtgatacagaatggcctgttaggaagcctttgttgtagagaccagcaaagcggcct

SEQ ID NO: 184214 - DNA, 297 bp, Homo sapiens
atttaattgacattttttagttaataagggtgataagatttgaaattcaatacagaatttctgtggtggtggtaaataattgagatggcccagaacgtttaacacagtgattctaatgcaagggagaatttcatccaccctctgtgcaagccaagcctcacataggagacccaaagtgcatccacaccttggcttgtgccttgccaaccctatgcttaggctcagatctgcttcatctgtggccaggtcattcaggattacccttcctgtcaaaaccaccactgagggcaaaggtca

SEQ ID NO: 184215 - DNA, 554 bp, Homo sapiens
ccaaactgtgtgtcaatcctaacttcccacattatttaagcactggatttttctctggcattaactgaatggaacttcacctgaggacaaaattggctgttacatttgtaattatggagtaaaggttgattcttagccaaaccaggctggaaaactgaaagaattcaaaaagtaagtgtgtagatgtgacgctatcttgctgatgcaaagtttctcaagtcaaaacatttacttgaaactttggcttcctccaaagcaataattttttacattttaggagcagctttccttgtaaaagcctttacacttgtcaggccttctgccttaacaaagattgtgaattctcttctaggtgattaaaatcaattctgaattaaatacagttgccctgatcatgtcaaaaacgatgcagctgctttcctacaggttaacttatcttgcagatttaaaaatcagttgtttttaaaacttggtttgtactgccatctagtgatacatttcattgacagtttcaacatgctaaatttatatagatccacagggttatccttaag

SEQ ID NO: 184216 - DNA, 275 bp, Homo sapiens
agagcaagactctggctcaaaaacaacacacaaacaaacaaataaaaaaacattgaaaactgacttagttttcttttaaaaaaggagtaattggttttgtttatttctcccttcatattctgatatggagtcactctgtggtagtcccctccgattgatcagtattcaaggttaaacacagaacatgtcttgaaagaggcatggtgtaaaattttatagccatcttttgtgtatttggcataataaaaggaacaaaaacctaaataaaacaagaa

SEQ ID NO: 184217 - DNA, 253 bp, Homo sapiens
gacacataaatgactattcctcaaagattttaaataaacaactaggatgcgacctctaaagaaggttaatcccaactgctggccttccactgagaaatcttccctctccaaaaacagacttgtcattatacccactcacagtactctacacttcttcacagcatttatcccacctctggttaattaactaattgtgcaggcaatggattttttctctactaggatttaagtcacccctctagaagtgggcctg

SEQ ID NO: 184218 - DNA, 144 bp, Homo sapiens
aaacaatgttatttgaggacctatgtatatttatttggaactttagagtttattaaaactctcatattttcttaataaacctaagaggttaccaaggtaaatattatccacacttttataggtaaataaaaagttcagagtgat

SEQ ID NO: 184219 - DNA, 547 bp, Homo sapiens
acatctgcacagaggaatggcatgatccagctggagctataaaaaggtcactctgactgccgtgttgaggctcagccatagagggtccaggtagacagaggaggccaattaggaagttcctgtagtaatccagacggagatgacggtggctggcactggagtggagtggtggaaggtggtgagaagcagttgtattctagataaattttgaagatagaaactacaggatttgctgacagatacgatgacctcaaggtttctgggtctgaacacctggaaagatagagttgtcatttactgataatggggaaagctacattggaagcagattgggagagaaatcagttcagttttgtacatattaagtctggcaaacatcccactcatgctctcagaatagcaattgactgcatgagtctggagtttaggggaagttcgggctgtaaataaagacttggacggataggcaaatgtccgctcagcgaacattgcgagggtgtggtgttgcacacttgtggtccccagctactccggaggctgaggtggg

SEQ ID NO: 184220 - DNA, 389 bp, Homo sapiens
gtcaacaaattccattaataatttaactagctaattattatcaaacataatgatggatgtgagtaccttagattttttactttgtatcatatacctgcttctactctggaaaacagatacacataacttaaagcaaccttatggttaactctttaaaaatgaataaatcaggaatgcatcagtccagaaaacaatcacaattagcccaaagtttatggtcatgtttttcctcgttttaagagttcccattcaagatgaagcgtattcacttttcattatcactttcttataaagatcaattttttttctttgaattcaatatgtctaaaaggcttaacttcagatgtagaaattcccaaggtggggcaactctaggataaacagcagat

SEQ ID NO: 184221 - DNA, 455 bp, Homo sapiens
tatttgtgctaggcagtgtgagtagtggaaatagtgccgtcctgacagtcggggcacaagctctgcacctaataatgtgcatgaccttgaccaacttctttggacctcagtttctacgtcagtaaagtctggttacggtagatgatgtctgtgtctaaggtctaaggctctagctctcagagtccacgataacgaactttcctgggcaatttcattgcacttaatcgaggtaacgttgctgttgtcttggcatgtgatttacacagaggttcaccttaggaaggaggtgtggatggccatcggtttgccatcacagacgctaaggtctcaagtctgattgatgctgaggccaagggcaaatgcatttacaacagccagttccctttgagacctgccgcccagaagcatgactggggcaagaagattgttccattgttctggccctgtgcagcagg

SEQ ID NO: 184222 - DNA, 236 bp, Homo sapiens
tgccagcttcctttgcaggcttccttcatggtggagctttatttaaatgggactacagatatcatgtgattgttttctctgtaattcactgctaatttattgaatctgagtttctaagtattagctgtgggtattaataagtcatttagggggcaggtttatggcagcacaataaatgtatctaccttgcaggctttttgtagaaacgttcctatgttttagcagtattcagtgat

SEQ ID NO: 184223 - DNA, 617 bp, Homo sapiens
cagaggatgaggtagaagaattgcttgagcccaggagttcgaggctgcagtgagctgtgattgcgccactgcactccggcccgggcagcggtgagaccctgcctcataaggaaaaaaaaatgcccaagggaacaagggttaactgttcagtagtatttctcaaggtgtggtcttggaccacttgcagcatattgccggctcagtccagacctcctgtgcaatctctgggagggaatctgggaacctgcttttaaaaacactgtttttaagcaagggttctgaaactttagtgagaatcagaatcactgagtcctggaattgctaagagagagattgctgggtcccatccccagcttctcatctggcgggtctggagaggggctctataatctgcaagttcccagatgatgctgatgctgctggtcccagggccttactttgagaatcatcattgctggtggttgttcaccctgactgcacattagaatccaggaagacttcaaaaatccagatgccaggcagtatcctagacacattacattacaatcttaagacgtgtgggtggtaaatggagggcgaggcaatcaggcatccgagactctccaagtgtccccgga

SEQ ID NO: 184224 - DNA, 412 bp, Homo sapiens
ggtgagattggagctgctgcgtgtcaggaagggaaagtgtggctcattatgggaaaatactttattttccaaatgtgagagatgagaactgaagctgctgccgtctctcagcgggatgttttatgtggaataacagttgtctgggtttgtggtttgggttttataagaaacaagggcttgctgagtttttgatcgagtgaattaggcttaaaatggcaagatactttctaaccatgatggtgaacttgggatggaggcaggggtgactaccaagggaaagcccgaccacaggtggtcatcctgtatcactgaggcctcttgtttctgcttcctgactccattccagatgtagaatctgtggaatgaggtcaaggaaagagcaacacaaggtgcttaagatccccaagcagtt

SEQ ID NO: 184225 - DNA, 259 bp, Homo sapiens
aacattatcaacaaagtgaaaagttcccatggagtgggagaaaatatttgcaactcatatttgagttttaagtaacaaaaatgagataatgtgatacatactattctgcttctccctttctccatttcagagagaaattcagagaagctgacattttcattcgagaaatacttattgctgtctactatgttccaagcactagagaaaaagtaacgaaagaaataaccaaaacagacataatatctgctctccgatgctt

SEQ ID NO: 184226 - DNA, 245 bp, Homo sapiens
agcccacactcagaggagagctaagcctgattcctggagggaaatagggagatacttggaggctgcacaaatatcccatttctccttcaagtttacccacacattttagcattcatcagtggacccggtctgtagcagttattaccgtgatattataatgatgactttctgtttccctcatttctttacatttactatttagaattccatatggaagatttgtcccttctatcatacttcactta

SEQ ID NO: 184227 - DNA, 1055 bp, Homo sapiens
cataacacacctacccacacctcctcccctagatacggcaggacgaggctggtgtggctagggcttcctccccaggccgaggcctaggcatgaatgtggggagtgggctgtggggtttgagagaagggaggccttattcctctcctgctgctccccaccccctgccccacccaacccctccgctgagtgttttctgtgaagggctatccagagttaggatgcccttgcccaattccttcctgagacccagaaggtagggtgggagggcccaaatgggaaggtgacctaagcagaaagtctccagaaaggtcatgtcccctggccctgccttggcagaggtccccagtgacttatgctaggaggattccatctgggtagacagtctggccacaaaatcagctactggacctcagccatctctgctggaggctctgaggaggagtgagcatccctcacttgtgggggctctgtgaggaaatgtgccttccccattcccccggagtcctaggtctggagctccagggctgggagagggtgagggagatgggcaggggtgttttctctgaccttgggggcttagtctcagtcctgcctgaactttccactaggcttggaacccttccaagaaccatatttctctccttcccaccaattttcccttgatgaggctttagcagtttgctcccaccacccccagcccatttcacaactctgatcttagtccaaagcaggggacacgcccccccaccaccactttttctctctcccatctcagcctcctgtgcagttccttgcctgcccgtgcatttcctagagtctactgcctcccccctggctgggagggtgtctgggggggatctttcaggggccctggcacccagggcctgtgctggcctaggagtgctgaccagaaggctgctctgttcccccccacccccgttgctttctggccccctctttggagccagccacccacagggctttggtgcctcagaagcagtgggctgccgggtcacagccgcaggctgcaaaagaccctcggagggagcatggag

SEQ ID NO: 184228 - DNA, 690 bp, Homo sapiens
cataacacacctacccacacctcctcccctagatacggcaggacgaggctggtgtggctagggcttcctccccaggccgaggcctaggcatgaatgtggggagtgggctgtggggtttgagagaagggaggccttattcctctcctgctgctccccaccccctgccccacccaacccctccgctgagggtgttttctctgaccttgggggcttagtctcagtcctgcctgaactttccactaggcttggaacccttccaagaaccatatttctctccttcccaccaattttcccttgatgaggctttagcagtttgctcccaccacccccagcccatttcacaactctgatcttagtccaaagcaggggacacgcccccccaccaccactttttctctctcccatctcagcctcctgtgcagttccttgcctgcccgtgcatttcctagagtctactgcctcccccctggctgggagggtgtctgggggggatctttcaggggccctggcacccagggcctgtgctggcctaggagtgctgaccagaaggctgctctgttcccccccacccccgttgctttctggccccctctttggagccagccacccacagggctttggtgcctcagaagcagtgggctgccgggtcacagccgcaggctgcaaaagaccctcggagggagcatggag

SEQ ID NO: 184229 - DNA, 302 bp, Homo sapiens
tgttatatcctcttggtaaattgatccctttagcattatataatgaccttctttgtctcattttatagtttttgacttaaagtctgttttgtctaacttaaatacagctactcctgcttgcatttcttttccgcttgcatggaatgaatgactttctccatctcttcactttcagtttatatgtgtctttacaggtgaagtgaatttctcataggcagcatatatttggattgttaaaaaattcagtattttaaatataggaggtacatgtgagatttgttacatgggtatattacacccag

SEQ ID NO: 184230 - DNA, 181 bp, Homo sapiens
atttatgaagatccttgtttccgtagtaacactcacacttgtgcatttaatatattttgtgcaattaatataacctttatatactaacctaggagagcagtttgacttcctaataataactaagcactagatatgattctaaccccaaaatacagctcaattaaaatccttttttaaaagt

SEQ ID NO: 184231 - DNA, 458 bp, Homo sapiens
aacttagaaggcaagtgacttaccaaagaccacccaaccggaagtgtcagtatctggaattgaatcagggtctctgggaccaaagtccaaatctgttctactctatggattaggatgtttaaggcttgtgtgcacaaggctttcagaatcaacacatctaggctatttcaattttggatgctctctgataccttagacaagcgtatcatgaagctgcatcccttcagatcaccaggcttattactgagtctgagcttaagcaatggaccctaagaaagtgatatcatgtgtccaatattttagaaataatggcatcttagtccattctggctgctataacaaaacagcataacctgggtagcaaataagcaacaaatttacttctcacggttctagagtctgagaagtccaagatcaagggatcagcagatttcgtgtctagtgagggccctctctcc

SEQ ID NO: 184232 - DNA, 359 bp, Homo sapiens
ctattaaaattttttgtagagatgatgtcttgctatgttgcccaggctggtctcgaactcctggactcaagctatcctcttgccttgacctcccaaagtctgggattacagatgcgcgtgccaccacgcccagctaatttttgtatttttagtacagacggggttttgccgtgttggtcaggctggtcttgaactcctgacctcaggtgatccacctgcctcggcctcccaacttgctgggattacaggtgtgagccaccgtgcccagccaaagaagagattttaaaaggacatcagtattcttggtgtcactggatttttaaaaataaataatagaaacaaggagtataaaacaattt

SEQ ID NO: 184233 - DNA, 410 bp, Homo sapiens
acagccacggtgctttcagacatgaccccagagccactgcttagggagtgtggctcttccctcgcggctgccaggcttcacccgcttcctggccccagggcccaccattgctcaatcctcctgagtcacctggtgacctgggcctgacattgggtggttgtgacgtgctttagttggaaaggggctcttgtgcccccggactctggctgagcagtggcctgtgctcatgggctgggcgtgacaggtcgcaggtgcaggagcaggcactgcctctggtgccctgatgaccacagcggcctgccccgaacaactcacagcagaaggtgtgtttaggaccagcttaccttaaagtgacacagaattcgagtaaggtctttcagaggatctcaaatatttcattctgattaaaa

SEQ ID NO: 184234 - DNA, 409 bp, Homo sapiens
ctggtatttttttgagcttcgaataggcagccatggttgagagccactgacctaaatcttcttttctaggctctacctggcctcatgccaatggcatgcagaacctcttagccctcaacccttctaaacagccaggtcctttctaatgggcaccagctatagctcctggcatccagatcatagctactgtttgtgttctgaatttaatgactttctattataagctgattgtgagagctcctgtctggttacttccttttggtcatttttttcttaaaaagcatttacaaaagtaatgaatattaattcaacatttttgtatgtttcgtctagataggtatgtaaccaaattgtgattgtactttttgtaaccagccttttcacttaacagcatattgtgataatttcc

SEQ ID NO: 184235 - DNA, 647 bp, Homo sapiens
agaagcatcccaagagatagcaggagaaagttgtcttgccttttgaaaactggcttcgcaaggcccatagcagatcttcccctgtgctccactagttgagacagtcacgaagccccacccagtttcaaagaaggggacagagactccatttcctgatgtgtgagtggcaaggttctggaagagtatgtggaatggaaagcattattgcaaccatttggggaaaatacaacttgctgctggcaggaaggtcatttcaggcagagatcttcattgatggtaccttcagaaatgcatttttaggaaagaaagtggtttttacagacttggcattgctaagggaaaacataaggttttagaagtatttactgagccatcttcaccaagacttatgagaaacatttcttcgaagagaagatgctgaggaagaggaagatgacttttgaagtggactccaaggggcagacaggaggctgggatggatggcagctcacagctggcaaaggcagtggactagcaatcatgggtgaaggcctaccaagactgattcttagaggggggagaattgactttgtgttcttatagcaagtgaccaggaataaccagatgctgtgtccaagctgagtcctcaaaaacagtagtaggcaggg

SEQ ID NO: 184236 - DNA, 417 bp, Homo sapiens
ggccttttccatttcattgcaaatggtaagcacattttcacgttgcccaacccccatagttgatgggtgacttcccaatttcatcctctgctcagcctttgtcaatgtcttcagccattccttccaagaaactgttctggtttctgcaatgtgatctattcttagcccatgctggcgagtcttaagctctcaagttttcatcgaagtgacttagtagtctggtctcaataaataactgcaatttgtgtgtgtgtgtcttcccccaaggacacatcttaaccttacaaagacagaagctttcacaactgcagttgcattttcaggaagagcacttgagccccggagtttgaaactatagtgagccatgatcgcaccacttcactccagcatgggcagtgggatgagaagctgtctctt

SEQ ID NO: 184237 - DNA, 1261 bp, Homo sapiens
tttagaacccactttaggtaaatggaaacattttttggccatgttactccatgaagaaaagcaaataaccaaatggcagagagggcaaggatgagttaggcttcagaaacaattgggactggatattgaataccttcattattgtctttacttcttggtcttgcttacctctgttccagtggcttttgttgttgttgttgttttatggtgcagtttctcagtaaagcagtaaatatggctgttaacagcatttgaattttagaaacatctaccacttttctcatttctagtttaacaaaaaatcctagggaagatttctttgttccagcttggataaggtgtttcctcttgggctaacctgttacacttactaggagtgtttagagcaaggccaccagtgcacatctgcgggggagcatcatttacaataaatacaatgttgtgctctagaggcctgtttacgtatgcaggtcacatgctcctaagaaataaaaaggtatatcttacaatagcccatttatcaaatgcctggttctcatggagatctcttaacattgtgcattagcagttttccattttttttcaaatctgaaatcatggtgtttatcaatccttgcagttagtagtgaaatttggtgttgcccttcatgatgccaaataacgtttctaattttctgcttatttttgctttctgtttcattgactgtttctttgaaggcaccacattttggcattttaacgtgaaacatggtactctctgtcaacacttgtggcaccctcagaattgttacttgcatgccttttgtgagacaagagaggacaaagactaatagtaaagaagttggctgagtggctttatctgcgtggtaggagagatcagcagattgagtaccaggaaagcacagaatgacatgttagtttttatagctgaataaacaatcagcctcttctattaactacccattgtaataactgcattcttaagtaccaaagtgaatttatatattctgagacaaacagtgctctaacaaagcagtatcaaatgaggtatatgggtgtatgtctagaaaaataatgttagtggtagttttccctttgtgggaagattatagaatacttttttttctttcctgcatgttatagggtggtttttctttttggggggcggattttgaaactgtattgcttttttatgattagaaataaagttataaagtagatttacacttaatgtatctggtatatggaaagaacaccaatg

SEQ ID NO: 184238 - DNA, 1315 bp, Homo sapiens
tttagaacccactttaggtaaatggaaacattttttggccatgttactccatgaagaaaagcaaataaccaaatggcagagagggcaaggatgagttaggcttcagaaacaattgggactggatattgaataccttcattattgtctttacttcttggtcttgcttacctctgttccagtggcttttgttgttgttgttgttttatggtgcagtttctcagtaaagcagtaaatatggctgttaacagcatttgaattttagaaacatctaccacttttctcatttctagtttaacaaaaaatcctagggaagatttctttgttccagcttggataaggtgtttcctcttgggctaacctgttacacttactaggagtgtttagagcaaggccaccagtgcacatctgcgggggagcatcatttacaataaatacaatgttgtgctctagaggcctgtttacgtatgcaggtcacatgctcctaagaaataaaaaggtatatcttacaatagcccatttatcaaaaaatcattttcctgaaattggtaacaatattaaatcattgctatatgggattaatgcctggttctcatggagatctcttaacattgtgcattagcagttttccattttttttcaaatctgaaatcatggtgtttatcaatccttgcagttagtagtgaaatttggtgttgcccttcatgatgccaaataacgtttctaattttctgcttatttttgctttctgtttcattgactgtttctttgaaggcaccacattttggcattttaacgtgaaacatggtactctctgtcaacacttgtggcaccctcagaattgttacttgcatgccttttgtgagacaagagaggacaaagactaatagtaaagaagttggctgagtggctttatctgcgtggtaggagagatcagcagattgagtaccaggaaagcacagaatgacatgttagtttttatagctgaataaacaatcagcctcttctattaactacccattgtaataactgcattcttaagtaccaaagtgaatttatatattctgagacaaacagtgctctaacaaagcagtatcaaatgaggtatatgggtgtatgtctagaaaaataatgttagtggtagttttccctttgtgggaagattatagaatacttttttttctttcctgcatgttatagggtggtttttctttttggggggcggattttgaaactgtattgcttttttatgattagaaataaagttataaagtagatttacacttaatgtatctggtatatggaaagaacaccaatg

SEQ ID NO: 184239 - DNA, 326 bp, Homo sapiens
gcaagtgaggatgctgtggttgtgactatagtagcccaggacgaagtctccatggcccttggcagtgattcctcactgaatgttacctggtatgtattcccatccacatcttcatgtttggcccagacatatgccacatagtccttgcaatggcggaaacccacccggtataagccgatccagtcggtcgccttgtgaactaagatgcagatggagaagagcagacacagacacaggtcttggggcccctgcaggggtttctcactggctttttccccctggattcctatgggttctggggaacagagttaggtcggctggcaaga

SEQ ID NO: 184240 - DNA, 899 bp, Homo sapiens
gagggggatttggatatagttaatgtgaaggaggtttaccttatggtgatgagactaaaatttttgtcatttttaaggaaattagcatgtttaagtcactaatatgttgggaatgtggtaggaaaaaactatactgggcccaatctcctctgttaggttagagtcataaaatattaatgtttttgaaatttgtgtatgaggtgcaaatcactatggtggatgttgggagattagaaagataattactccacttctttttgggagtctaagtaatggcaactcttgagagtcttccttactttcagtagtaacagtattcacatgtagtttatgtattgctaaattttgtatttgtgacaattattctctttgttttgcaaatggtacattgtaacctgttctagagcagagacttcctgtagtctctagggaaactaacagcaggttgattcttaagtgcttaataaatacctgttgaatgactgatagaaagtagtgttcactgttagtgataatagtgggattgtatgaaatggtgattagtggttatatgtaccagacctgtactaaggccatgtattgccttatttcacttaatcacctcccagtaaatactttttatagcttggaaatgagaacccaaagaggtacgaacagttttcgacgagcggtcagatcccggtgtgagcactggccgagccaagaaggaccctttgttgttgctgtgggttgagaagggcgctctcggagcacgggactcaccggggcaagatcctcttttaaatcaaacatgggggcgtggcgctgtccacttgaggaggcgaaccaacccacgcggatgcggacaaccagacccgggcggagacgcaacaaaaaactggcacgcacaagggggaaga

SEQ ID NO: 184241 - DNA, 539 bp, Homo sapiens
gttcctttcagctatacaaatgatttagatgaagagcagaggatttagaatcaggtcaatctgtgttcaggttctgcgtcagccactttgtagttctgaggcttggggcaagtgaccgagctctgctgcctgacttccatcgcctgttattgaacagctgtgacaggcaggctgatatggtttggatttgttttggatttgtgtccctgcccaaatctcatgttgaactgtaatccccagtgttggcagcagggcctgctgggaggtgattggatcatgggaagtggtccttcatgaatggtttggcacccgttccttggtgctgttcgagatagttatcacaagatctgttgtttaaaagtgtgtagcaccttcccccctcactctctcttcctcctgctcttggccataagaagtgcttgttcccccttcaccttccatcatgattgtaagtttccagaagctgagcagaagccgctatgcttcccgtgcagcctgcagaactgtaagccaattaaacctcttttctttataaatta

SEQ ID NO: 184242 - DNA, 464 bp, Homo sapiens
aactgagtggactcatgactcacttgtaatcaacagaaagggctggaagtgacacattaccacttctaagtgcatgtcgtagaaggctatgaaactttttttttttgtcagctgggacacttgcttctggagccctcgccactttgtgagaggtctagtgtcctatgctgggatatcagacaggtctcccagttgacagctccagctgacgtcccagccaacagccaacatcaattgctagcctatgaataaagatgcctcaaggtggttccagcccataactctcaaattacccctggttgacgactctccccatttaagactttagacattgtgaacatgagacaagccattccctctgtgtcttatccaaatttatgatccatagagtccaaactttttttttctagctgttaaatttagcagtcagcagcagtaaccagaacacacttggacatcttttt

SEQ ID NO: 184243 - DNA, 283 bp, Homo sapiens
gtaaaacaaaaattaacttaaagcaaaacaatgttaattccagctagatccagttggaagacaaagccccagtgtaaaccctattctctctttgtcaaaaagagatagtagcaagtttagggagttgttaatgagaaaacaccaaactgagacttttcctttcacataatcaagaagataacgcagaagactgaaagagcattgaaaagggcataaatttccaccacatgactcaatactcttgaaggccatcacatccctgccacctaaatcatgccatgta

SEQ ID NO: 184244 - DNA, 552 bp, Homo sapiens
tatagactcttgcagaacttgaggtacctcaaacctcagcccctagaggaaacccagctcagctgcctggtgcagcggggaggaagtctgtcctgctctcacctcttcttgaccctgacctgcagtcctttaccaaatcctggtcactgaagtattcaaatacttgtctgtccttcccttcttgaatacggtcactgcccacaacatgggccgcgtggacaaggaccatagccaactgctcattggcttccagtaaatccagccttcagctatctaatccctggcctgctcacaaaccctccatgactccctatcaccccaagaaggaaagtcccagctcctccacctggcattcaaggctctgccaacctcacccttcctcccatcaatcaattttttttttttttttaggggcagtgtctctctctgtcacctgggctggaatgcagtggtgcaatcatagctgactgtaacctcaaattcctgggcttgaccaggctcagtggctcacacctataatcccagcactttgggaaactgaggcaggaggat

SEQ ID NO: 184245 - DNA, 614 bp, Homo sapiens
tatagactcttgcagaacttgaggtacctcaaacctcagcccctagaggaaacccagctcagctgcctggtgcagcggggaggaagtctgtcctgctctcacctcttcttgaccctgacctgcagtcctttaccaaatcctggtcactgaagtattcaaatacttgtctgtccttcccttcttgaatacggtcactgcccacaacatgggccgcgtggacaaggaccatagccaactgctcattggcttccagtaaatccagccttcagctatctaatccctggcctgctcacaaaccctccatgactccctatcaccccaagaaggaaagtcccagctcctccacctggcattcaaggctctgccaacctcacccttcctcccatcaatcaattttttttttttttttaggggcagtgtctctctctgtcacctgggctggaatgcagtggtgcaatcatagctgactgtaacctccgccaccggggttcaagtgagtctccgtgcctgggcttcctgagtagtggggattacaggtgtgcaccaccatgcccagctaattttggtatttttagtagagatggggtttcaccatgtgggccaggcggttcttg

SEQ ID NO: 184246 - DNA, 200 bp, Homo sapiens
atagaagaatgtattggtgcttcaaactgattattactttttacctccttgatgaactcaatatattattaagagagtggctcagtttcaaccctggaggcatcaaaaagaacaagttctaaataacatcctcctttagaatgcagcatattttaactgtgtctctccatcttgcacatcaccacttccaagctccatct

SEQ ID NO: 184247 - DNA, 492 bp, Homo sapiens
aagagaggccagaggtcagggatcagggaggcatgagaaggtgcagcttctggcccaccctcagaggtactcggacaggtggggcactgtgggatcagagagggaagggcatctggctgaggccacagagccagtctcggggagccgacagggggcagaggggctcatgcagggctatgggtgctgctgctgagctctcatggggcaccttcaggtcagacactgacgacttcaccagccctggggaagctcaggccacatcaagttgagagacagtagagatagaaatggttaattgtatgtcatgtgaatttcatctcaataaaatcaatcagttatttccgcctcccattcctcccaccagtgctgtgagtgctctcacagaggtggttagatgaagagacaagcagtcagggggctgtgtgcagtgctagaaggatgcttagaaataccttagtacatggctgggtgcagcggctcacatctgtaatc

SEQ ID NO: 184248 - DNA, 203 bp, Homo sapiens
cgatctagaggatcctcgaggtgccttagaatacattgagaaacatggtgactccacctcaaaagcatttagcagtgaaatgagcaccacgactgtcttatttttactgaagtcagaatcaacagtaaacttgtaagggccaccacagacgtgtgactacggggcacagagcatttgctccaagggccaaagtggcctcttcc

SEQ ID NO: 184249 - DNA, 472 bp, Homo sapiens
ccatttggaatttttcccttgagcatacacagatatagtcatgagtggcagctgtgatagcacagcttctgaaggagagaaagcaactaaggactgccttgaaaatatttaaggagttatttgagctgctgtgttgcaagttcgcctaattagagtggctactttcctttgtattctcttggcaatgtacagggattccgatgaattggattgagagtaagaggttgacatccaagctccatgtatttttgtgaagttaacattggcaatgatatctggaacttagttcttttctacagttggccatgtgggtttttttatttacatacatttatgaggtacatgtgcaatttgttacatgcgtagtaggtggcagtgttttaaacaatggatttcacctctcctttgaatgcttgtttgagaaaagtaattcaaatcctatctaaataaatacatttatataatcatgaca

SEQ ID NO: 184250 - DNA, 416 bp, Homo sapiens
tcactgcaacctctgcctcctgggttctgggttcaagcaattctcctgcctcagcctcctgagtagctggaataataggtgtgggccaccacacccagctgatttttgtaattttagtagagacagggttttaccatgttgcccaggctggtctcaaactcctgacctcaagtgatttgcccacttcggcctcccaaggtgctaggattacaggtgtgagccagcacacctggcctgtatttacttttttgacagtcatcactgtcttaaatgctaattttatgaatacatggacataggccaatgtaagatgggttgtggggtgaatttgtagttagacctttacaccagactgtgttggtttgtacagtgagggctttagtagtgggctatagggtaccagattgtttgcttgc

SEQ ID NO: 184251 - DNA, 169 bp, Homo sapiens
gtgtacagatgtggcaggcaaagcccagggagtctctagggcctgcagaagggaatgaagcattgtaagagctggatccctgtggtttacccttcgtgccaatgcttatagtgagctgaaaggctttggtcagaaatcttactagacatttcagcttttgcagcacaaa

SEQ ID NO: 184252 - DNA, 244 bp, Homo sapiens
taactcccactcacatctctacccagagatcaagaccagaccaattctccactaatatctccaaatgggcgaggtgcagtggttcacatctgtaatctcaacacttctagaggccgaggtgggaggattgcttgaagccaggaggtggaggctgcagtgagccaagatcacatcactgccctccagtccgggtgacagaatgaaatctcgtctcaaaaaaaaaaaaaaaaaaaatctccaactg

SEQ ID NO: 184253 - DNA, 314 bp, Homo sapiens
gcatattcctttcgaagcatagtttctgtagtttttcctggcctgtaaccaataagctagagtatgaaagcaaagtactgtggcccctaactcttaactttgtctttaagcagaatctagggaaaaagtgaaaaggaggaaaggattctagaaagactttgaatgttgatggaactaatgcaaattttgtagagagaaatagagttgttaaatacataaacttgtatatcgtcatgtatttttttatggcacctgaaaaatgcaatataccatttgatgtcatgatagttgtattgccaggtgtcatggctgat

SEQ ID NO: 184254 - DNA, 329 bp, Homo sapiens
ttggttgacgtggctttatatctccaatgcataagatggtactagcacataataagcattcaataaatatttgtcaaataaattaaatctactcaaccggttcttactcacaaaataaccagtaatggcctgtaacctaataaaactttgctaccctttcataagttattctttttcaaaaggtgttttaaatgattttgttttcaacaaattgaatagacaatatctaaaataattattccaggcacgctaagcctccacaagcaccattctctttggctctctccttttcctgggacattgattcatttcctttgttttaagcccca

SEQ ID NO: 184255 - DNA, 231 bp, Homo sapiens
tagagataggctacagcagatcttctggatcagaaggaggggctgccaagacttaagcttctcatcttgtgctgacccctggctgcaggtgaaggtggtgcacctggctgcaggtgtggtggataagggagggtttgatgcttggcctctgatctggactctggttgagactttggctcttcctagccatatgatttaggaccagatccctaacgtcatggagtcctaact

SEQ ID NO: 184256 - DNA, 366 bp, Homo sapiens
gtaaccagagacccttagagaaatggcaggctctaggactgggacagaggatgtacagaataaacctggagcgttttgcagtgctagaaagtaaggaagtgctcaaaacaagtaaacaagcaaactgccagtgatgggcgtatgtcaaaaggacaacagagccaactgaaagagctcccaggggccaaaggtggaagaatttgagcaacaaaataaataaagtggtattggatcatagcccaaagcagaaaacaaatatccatgagtctatactgatataagtaaatgattgaacaattgttaataaataagtgggaagaacggacaaatctcccatgatgcaggagagtaccaaataatttttat

SEQ ID NO: 184257 - DNA, 489 bp, Homo sapiens
  misc_feature (187)..(187): n is a, c, g, or t
  misc_feature (203)..(203): n is a, c, g, or t
tccctttcacgtaaaaatattcatttaaaagcaatagttaaatatagatgaaaaatgacctaaatcctcaaatgtagcgttgggtgtggtggtgtgtgcctgcaatttcaccttatctgggaggctgaggtgggaaaacccccccaggccaggtttccaagaccagcctgggcaacatagtgagaanctcatctctacaaagnaaaaaaattttaacaattagctgggaatggtggtgtgtgcctgagtcccagctactggagaggctgaggtggggcgatggtttgagcccaggagtttgaggctgtagtgagctaccattgtaccactgcactacagcctgggtgactaagcaagactctgctctgttagaactctctcaatgagtaaaccagaaaagttcagaataaatatttctgaactctgaagagcataacttaaaacattgtactgtgtttatatgtactataatatcaaggaacaataatt

SEQ ID NO: 184258 - DNA, 286 bp, Homo sapiens
gaactattgaaaggtttgaatagggcagaggcataatgagattggtgagactgttcctgcaattgagggggagggcagtagtgatgaggcttgtatcatttattgaggagggaacccaatatactctcaggttataaataacttctgtcattactttatggtatgactttcctggaagtacagacttctaggggataaagaaacatcttaaggcccaggcatggtggctcatgcctgtaatcccagcattttgggaggctgaggctggtagattccttgagctcag

SEQ ID NO: 184259 - DNA, 319 bp, Homo sapiens
gataagagtccccacaacaaagagtcttggccacctcttagcacaatcagctaaaccaagatttcccccattcacaaccttagattgagttggcaatggatatagtggtcatttcccttccaggactctgcacctgcttcccttgccccaactgcacagatacccagctccaagcagccctatttagacacccacacccagaaacgatgaaagaaatcatcactgtttacagagcccccagtccattatggtggtgtgatggtttctagcaaatacacacttaccaggccacttgggagtgaccgtgtgatttccagct

SEQ ID NO: 184260 - DNA, 552 bp, Homo sapiens
tgtagaggatccctggaataatactcaaccataaaaaggagtaaatgcaacaacatgggtaaatttcacggacatgacaccgagtaaaagaagccagacccaaaagagtccatcctgtatgaattcatttatataaaagtccattacaggcaaaactagtctacagtgggagaactctagaaatttccatggtgatcaaatcacacttctgtgtctatttgtcaaaattgtacgctaagatttgcatatttgaatgtacataaactttacctaaaaaatagaatttaaaagctccagtgggggatggggagaagatggagttagaaatgaaacaagaatggcagaatgatgataattgctgaagctgggtgatgagtacatgggactcattatactacgctgattattttgtatacgtttggaattttccacagtaattttttaaggtaaaatgtttaaggaatgtgttattgcctatgattctcagttttaaccaacttttttgatgaactgataaactccctgccccagtgtggagagaggggtaccgag

SEQ ID NO: 184261 - DNA, 558 bp, Homo sapiens
ccgatatcctaagctgacaacctaagaggatcgcacatactgttttggtctttctatcatcaaacagcatttcttatgctatcatcccatttttaaatattttccaatatactggtaagatcctatttttgttgttgttttatagtttttattcttataagctacctcaaaccatccatgaaacatggcgcagtatgaaaattaaaaatcaacacatacttggccaggcatggtgactcatgcctgtaatcccagcactttgggaggccaaggtgggaggattgtttgagcccaggagttcaagaaaagcctgggaaacatggcaaaatcctatctataaaaaatacaaaaattagccgggtgtggtggtgcctgtagtcccagctgctcaggaggctgagcctggggaggttgaggctgcagtgagccatgatcacaccactgcactccaagctgggtgacagaatgagactccatctcaaaaataagtgaaagtaacactattggattgcctgtggtgtgtacatttatataaaatcagatatagccacagattgt

SEQ ID NO: 184262 - DNA, 548 bp, Homo sapiens
agaggtagccggacactcgtgagcagggctcatatgtccagctgagcgagtgcaggcttcactgctcatactgaagccctactatgtgccagtaaagagagcaggcaaagctgtggacaacctggtccctactccccctgttgctgacagtgtgcaggacatgtcaccccaagacatagcacctcggaaatggagaaaacatcagaagcaggaaggccactgtctgcctttcccaggccttgctgtatgaccactggcgtgaaaggattctctgacccactcccctgaaagtagagaccctcatgtgacaggtgtcctgacctgtacccagaggaaaggaatgaagacacagaactgccaagacgcatctgaacaaacagggccttgctgagcacctccagtttaggaccctgagatcacaccccctctctccaatcacacgactgtccactctccagcaaacctaggcagaaaaatgcatcgttttcctgtgtctttgagtcttgatttctgaaggttcgcatgtcacataaaacttagatggaatc

SEQ ID NO: 184263 - DNA, 594 bp, Homo sapiens
gtgattgacaaggtgaagcaagtcacgtgatcacgggacagggtgcccttccctcttaggtagccgaagcagagacagaaggcagcatacgtcagtgttttcttctatgcacttctaagatcaaagactttaagactttcactatttcttctaccgctatctactatgaacttcaaagaggaaccaggagtatgggaggagaatgaaagtgaaggaggagtgtaagcattgaagcacagcaccacagggaggggtttaggcctcgggatgactgcgggcaggcctggataatatccagccttccacaagaagctggtggagcagagtgttccctgactcctccaaggaaaggagactccctttcgtggtctgctaagtaacgggtgccttcccagacactggcgttaccgcttgaccaaggacccctcaagcggccctgatgcgcgcgtgacagagggctcacctcttgccttctaggtcacttctcaccatgtcccttcagcacctgaccctatacctgccggttattcctagcttacattagtaatgcagcaaagagtaatattaaaagctaatgattaataatgtttataa

SEQ ID NO: 184264 - DNA, 300 bp, Homo sapiens
tcagctcactgaagtacagggggctgagactgagttgagacaggcaccttttctactttgcacaaaagcatcccttaggcaagcagttgtcctgcccaagagccttttcttctttcattctccaccatctcctgtcatgcctcccacccttctcccatgctcctcatctggttaacagcttcacactctatgaggaaggcatctggccccagagactcaatctgttttctctgttacatgctcataagagccatcttcccttccttcagaacagagctcttaatgtgccttgcccgctta

SEQ ID NO: 184265 - DNA, 492 bp, Homo sapiens
cccaatccattaatcttaggttgaactttaagaagggaaaaagtcatattcttaccaatttaaacttgctcagtatttaggattgaaaataaaacccaagcaaaaaaaacaataaaaccaatcacaacaaaactttctgtgctaatttgagaaataaaaatttagtcatcaatgacccaaagagataactctcagttgctttcacacttttatagaactattatacctgagaaatattttagacgacggaatcactgtttgtaaaatctaagtattataattcatggatctgaaacgtaaatgacatctcaaccatttttgtcttagtggtgcaaaagttgagggccaaaggtctgcagcccatatgtatttttgtgtatttaatcttacctcaggtttattatttccctgcctgcaccaagactccctcaattatctacctcattctttttatgtctatcagcaaaccagtctaaatcttttaagaaaatg

SEQ ID NO: 184266 - DNA, 426 bp, Homo sapiens
ataaataatgcttctgtgaacattcatgtacaggctttcattgcttttgtgtatacatctaggaatggaattgctgggtcatacagtaacttggtatttaacctcttgagcaacacatggtcttaatcactacacaggatatttcacacagtggatatgaagtcacaactgtctctcaagattttggggttgttattgcctcttacattctaaaaactttgtgtttttcttgttttgaaattcaacatactgttatttcagcataaaatggaacttggctaatttgaagcttgaggtcaacacattttaatgaatctatgatatgtgccaaggactattataagatctatgatggatacagggaaaaaaatatatttctatgaacagtctttatagctttaataaaccctcattgagcatccacca

SEQ ID NO: 184267 - DNA, 224 bp, Homo sapiens
caggacttgtgcaattacgatagtttcttacaaaagataaggaagaacaaaagagatcaggacctgaaatatcaacaaactcctgggaaaagcacaggaagaacatcttgagggaagtatggttaagagctatggtgctagaacagagacctggattcaaatcccaagaaaatggatgacttccttcgcttgtcttattccttatgtgtaaaacaaaatctata

SEQ ID NO: 184268 - DNA, 296 bp, Homo sapiens
cagtgtctagttgaggcccccatgtcctggccctgctgctgagtaaagggccagcctagaaggctgacaggtgctagagctccaataggagtggacccacagtggcctgtggcagagtctgggggcccaccagtgccataggtgaagctttgtgatgcggccagttcaccgttttgctctgaatccatggtggcgggtactagggaccctgctgcctgtctgggtcagaatctctggtgacagtgagtgctctagcacaaaaggaaaagagaaggagaaagaagacaccctgaagt

SEQ ID NO: 184269 - DNA, 254 bp, Homo sapiens
taatgcatatgatagtagtaatattataaacttgatactttaggcccttttggttcaaacctttgtgatacttttaatgatgcaaagtgcctatttgtaagcctggatattagtctctatctttttgcatctcatataaaagaattgattttttaaatgtgatgttcatttatattaattgctttggaaatttgctctgtgggcttcataataccaaagaccagaatagctcatggccgcttttgccaaaaatc

SEQ ID NO: 184270 - DNA, 385 bp, Homo sapiens
ctaagagagatgggagttgtgggagggcgtggagcagaggagggatgtttctgagcttcttaaagcaccactctgatggctcggtaagaacggactagagagatcagtcaggaagctgtcgctatagcctaggcgagaggcagtggtgggcccaagtagagtggttgccacagaggtggtggaagtggtcagtgcctgcctgaattttgaaggtaagtccaagaggctgtgctaacagattgggtatgggatgtcagtgaaggaaaaggagtgtgccaggtgtggtggtgcatgcccatagttgcagtcacttgggaagctgaggcaggaagattgagcccaggaatttgagtccagttttgggcaacatagtgagaccctgttt

SEQ ID NO: 184271 - DNA, 452 bp, Homo sapiens
ctggtcgcctggctcctccacgtgcacttgatgctccagccagatagactgtgcacacctgggcagagggagtgctggtgagtgcacatgtctacgtgtgtgtctgtgtgcggtgtgcacgcgttcctgcgcaggcaccctgtgggtgcatgcactagtgactgtcaatcctctgtctgtgggctggctcccataatccatgctacgtcctgaattccactgccggtttttctgttcaccaatctcaaggacctggcttcagtttctctggtaaccaacctcagcccttagcttcaacctctgagcacaggaagacagccagagtggggaggggtgttgtctcacccacagggcccctgccggagctgagcaccccaatgggatgagtggcagcacggttaccaagacaacagaactctcgacccctttccacctgcaaggctcttctccct

SEQ ID NO: 184272 - DNA, 175 bp, Homo sapiens
agggctgttggaacataattagtaaagtggcattaggttccctaactgccaaggagaaaaaacctgagttttgtgatatttttaggaagaaataatttaaagtctttgttgactctccaattttaaatagtgaaaggacaatttgatgttataattgttttaagtcactgcctgg

SEQ ID NO: 184273 - DNA, 531 bp, Homo sapiens
tacctagaggtatctatgcatacataattcctgacttattgtccctccctccccacctagatgctgagctctatgagtatccagtactgaatatccagcatgacctgagagttcagcataggtggggaggaagagacagagagcaggctcctgttcagcactcctcttcagcgctatagcccccaagagctagaaaaactgcctggcacacaaaaagtgtgcagtaaatatttgttaagtaaactgaataatggatgaataaactgaatctagtgtgcagttatgcaccatggaagattattaatataagttaaaaaacttaaatcatggccaggcacagtggctcatgcctataatcccagcactttgggaggctgaagcctgtggatcacctgaggtcaggagttcaaggccagcctggccaatatggtgaaatcccatctctactaaaaacacacaaattagccgggcgtggtggcggacgcctgtagtctcagccactcaggaggctgagacaggagactcacttga

SEQ ID NO: 184274 - DNA, 849 bp, Homo sapiens
ggaggactgaggcgggcctcaccccagacagagggcccccaataatccagcgctgcctctgctgccgggcctggaccaccctgcaggggaagacttctcaggctcagtcgccaccacctcaccccgccaccccccgccgctttaaccgcagggaactctggcgttctgagggggacaggctgacaagtaggacccgaggcactggaggagcattgaaggagaagatctgcctgtgggtcttcattgcccagctcctgcccgcactcctgcctgctgccctgaccagagtcatcatgcctcttgagcagaggagtcagcactgcaagcctgaagaaggccttgaggcccgaggagaggccctgggcctggtgggtgcgcaggctcctgctactgaggagcagcagaccgcttcttcctcttctactctagtggaagttaccctgggggaggtgcctgctgccgactcaccgagtcctccccacagtcctcagggagcctccagcttctcgactaccatcaactacactctttggagacaatccgatgagggctccagcaaccaagaagaggaggggccaagaatgtttcccgacctggagtccgagttccaagcagcaatcagtaggaagatggttgagttggttcattttctgctcctcaagtatcgagccaggagccggtcacaaaggcagaaatgctggagagtgtcctcagaaattgccaggacttctttcccgtgatcttcagcaaagcctccgagtacttgcagctggtctttggcatcgaggtggtggaagtggtccccatcagccacttgtacatccttgtcacctgcctgggcctctccta

SEQ ID NO: 184275 - DNA, 868 bp, Homo sapiens
ctcaggtcaacacaggggcccccatctggtcgacagatgcagtggttctaggatctgccaagcatccaggtggagagcctgaggaatcaggagctccaggaaccaggcagtgaggccttggtctgagtcagtgtcctcaggtcacagagcagaggggacgcagacagtgccaacactgaaggttctgagggggacaggctgacaagtaggacccgaggcactggaggagcattgaaggagaagatctgcctgtgggtcttcattgcccagctcctgcccgcactcctgcctgctgccctgaccagagtcatcatgcctcttgagcagaggagtcagcactgcaagcctgaagaaggccttgaggcccgaggagaggccctgggcctggtgggtgcgcaggctcctgctactgaggagcagcagaccgcttcttcctcttctactctagtggaagttaccctgggggaggtgcctgctgccgactcaccgagtcctccccacagtcctcagggagcctccagcttctcgactaccatcaactacactctttggagacaatccgatgagggctccagcaaccaagaagaggaggggccaagaatgtttcccgacctggagtccgagttccaagcagcaatcagtaggaagatggttgagttggttcattttctgctcctcaagtatcgagccaggagccggtcacaaaggcagaaatgctggagagtgtcctcagaaattgccaggacttctttcccgtgatcttcagcaaagcctccgagtacttgcagctggtctttggcatcgaggtggtggaagtggtccccatcagccacttgtacatccttgtcacctgcctgggcctctccta

SEQ ID NO: 184276 - DNA, 514 bp, Homo sapiens
cccaggttcaagcgattctcctgcctcagcctcctgagtagctgggacaacaggcatgcaccaccccacccagctaattttgtatttttagtagagacggtgtttcgccacggtggccaggctagtctcgaactcctgacctcacgtgacacaccaggttttgggattacaggtgtgagccaccacaccggactaaggtctctgttttaatgtgaatgctggtcagctgtgcctatgaggcatgttcggccacccacagtcatcatggcctcaacgagcttttcaggtttactttagaatgcatttggccaagaggtgcccattcagttggttggggttgcttagaattttactttgggtttaaaccagggagcaactccaggtagcaagggccctttttgggagcgttctctctattctcttttgggagaggccctgtgttgcctgcagccacttccaccctgccccttgggcacacaagggcacacagtgtaagcaggtgggcaggaggggt

SEQ ID NO: 184277 - DNA, 506 bp, Homo sapiens
aggggaaggtgttctcaagcggttagcagctgtcagggcccaggcagggtgtctgcttcagggaggttctgcagctcctgtggggagtcagagggctgatcaggcaactcaaggcagatgcctcattgagactgggcactatgggcctgcggaagacatggccttgggagactctatcagggtggctctggcctgggtaccaccaggctgagtccatcagcagcagagaggatggcactgtgtagagaattggatggggcatggacagggcagggcgagagccgcagctgtgtgtagagatttaggaacaggcttagctctgaatctgtaaccctggaagcttgggagcctgctcagtttcttttccctgggtcctctgcctgttacttgaggagctgctgagacccatggtacctggctttgtggcctaaacagttaaactccctacaggggtagattatgaagatcagaattaaaaagctttcaggaaaataatactttataaa

SEQ ID NO: 184278 - DNA, 486 bp, Homo sapiens
ccagggttaaggcagatcacagaaggtggtttaaattgtggcctctagtactttcgcagcactatgaactttctttttgtaaatcagaagaaatcaaaagtaagaccactaatttcttgaggcagagtttcatagttgcttgatgattgtgttggaagagtttgctcttatgaaggcctttggaagtcaggagatttccattaaggtttttctggtggcacagctcaactcatgttgagtgataactctgcttcccaaaagctcagagtgtgagcaaggttcgcttgggcacctttcattactgacaactaaagatagttctctaacaaaaagttagccactgggatcttcggtatatgttgtttcttaaggtaactaaacaagatgcctctttttcacttgtgctcatgttccaagccactctatctgtaacagtcaggagatttgcctgtgtgtgtgtgaatgtgacttactcttctgtttcag

SEQ ID NO: 184279 - DNA, 106 bp, Homo sapiens
tgggcaacagagagaaactctgtctcaaataaaataaaataaaaggaaactcttctcttaaaaaaaataattataaagttagtatcatagactgattattactgat

SEQ ID NO: 184280 - DNA, 446 bp, Homo sapiens
ctccctgaaggcagtgatcatgtctgtatatatcccttgtctacctagaatactacctggccacacagtagatgctcagtaaatgttagttgaattgaataagtagaattgaaattatgttccttatggtttcatatgcaatataagtcctgtttggcctttttagtaaaaaagattaaaaaacctattactatatcccatcatttggtcttacagagagtcattggctcaataatcacttgttaaataaatgaaacggtattacttagagttgtacaaggaagtcacaccttccaaaacttgagctccggtgacctctgatgtttcactgtgtgctatgttcctaacttgtgaatgggttgtcctgaagcctgtaataagtctgttgcacctggccaatatgtgtccttcatattggctttacactgatgactcagggtctgcgc

SEQ ID NO: 184281 - DNA, 369 bp, Homo sapiens
agcaggcgctcacctgagctgactcagaaattggaatgagttgtctgtggatcctgtaaggagcctggacatggtgaagagaatgccttgaccatcaggagacagcttagcttgttgaatcttgatcacttcttctgaccgctttggatcttaaaagaacaaggctcacagactaccatttaaggacatggtctccaaggatgtcgtggtgatgcaggatcaagtccctcatgggaggatgacaatcctggctctaaagctgaccccgggggagctcttggcagcatgttctttggaactgtttgtgcctcctccgaagatactagacaactatgagtcaaattaaaatgcttcctttgcaacatccaa

SEQ ID NO: 184282 - DNA, 229 bp, Homo sapiens
tcccacagttcttagatattctgatctgttgtgggtttttttttcccccagcactttttctctttgcttttttttcagttttggcagcttttgttgagatatcttgaagctcagagattctttccatagccatgtccggtctactaataagcccatcaaaggcattctgcatttctgttacagagttattgatctctatctacttcctcttttttttttttttttcctg

SEQ ID NO: 184283 - DNA, 336 bp, Homo sapiens
ggatcagtatgggtactctcaggcagggctgtttttccctactcatgcgcataggcaacttgtccctcttctgaatcttaagctgataaaaagttagcaccaacttcatcgccacttctccaagcttgatctgactctgcctctgcctctgagctcagtgggcttgcaagagaaggtcaccagtgggctaagccatccactccctctgggctcacttttacctggagctggcctggagccccatcgagtcagtagcatttcttcccataacagttggcggaccctggaggatgaagctgctccccaggacacatatgtagacgttactttccttaa

SEQ ID NO: 184284 - DNA, 169 bp, Homo sapiens
acccttgctcttccttctgacatgtcttcaaatggctggcccgtccctgggagcaaatctcagcaaaaacgtcaccatcctagcaaggccttttctttttctttttgtttgttgggttttttttctttttgagatggagtctcgctctgttgcccaggctggagtgcaa

SEQ ID NO: 184285 - DNA, 660 bp, Homo sapiens
atccttccagccttatgtcctgccttccctttcgtgccagacctcactgcccacagtctacctcagcctcgtgctaggcctctgttccttggtgcagtggcttcctctgccaggaatgtggctccccaaccccgctccctttcattggtccctgaggtgaacacatacctagttagccttccaggtagctctccagtcacctcttgtgaaaactgctctgcttcccatatgtattgttagctgcccctctttgtgccctcccataggccccttgcattgtaacatcacgatgtgtttgcatgcttgtcttttgagctgctttaaggcaaggagcctctcttactcatcattagctcctcactgcattggacagagcctgacaccaagggggccttccgtgctggcagaacaaagaaatgaatggatgcatggacagatagagagactaatgcagcttgttgagacaggggctacagcttcactgatgtaagaacaactccaccctcatgccccagcctttttcttggggcaggggcacatgataacctttctcccacactaaaccttgctcactaccagactagtaggccttaaactctgggagcaagaatggaactccttcctatctcaacaccccctgcccagagattttgattcaaa

SEQ ID NO: 184286 - DNA, 227 bp, Homo sapiens
gcagcatctcatattgtgtttattatgtttcacattttcctggtcgtgctgggtcctctcctgtcatttctccttcagagttctcaacacttggaatttgaaatctgctctgccttgtattgagatgacatttagctcctatttctccattcttagccaagatgttaaataaactgaggaccagcatgagcacctccccttacttaacatgttgcctcttttatagt

SEQ ID NO: 184287 - DNA, 837 bp, Homo sapiens
tctcatcctcctgagtatctgggattacaggcatgtgccaccacgcccggctaatttttgtattttttagtagagatggggtttcacaatgttggccaggctggtctcgaactgctgacctcagttgatccatctgctcggcctcccaaagtgctgggattacaggtgtgagccactgcgccgggcttattactattttttttttaacagtcatgtcttctctaactaaactaagtactttaaagacaaagaccacatcttattaatctttttgtctctggggtctaatagaatttcaggcatacaggaatacagtacatatttgatgatgttagtgaatgagtaaaacaaaatcccagattttatttggatttttatactcccctgtagtgtctgaaacagaaagtgcagccagttaaaaccctttaattactgttacaccttgctactttgaagtgatagtgccaggaattcccttaaaaaaaattaccacagtgtttttctcaggcctactgttctcttgaagtctaatgaacaataaaggttttatcaaagtttctatgctctgtgtcatgggtgtttgaattctgtaaatatgacgtagcagttctttatgaggaaattgtctttttaagactgtttgccttcttttcgggtgcaatcattgtttttttttgttttttttattccgttctactgggaactgtgtcgttttgattggagtaaattaagtgtcagagttacattttatttattttttttttggttgttataaatgccatttaggaaatttgcaaaatagggtgctcaagaaataatgaggtgcaaactgatcag

SEQ ID NO: 184288 - DNA, 571 bp, Homo sapiens
ctatacggctatctgtaataaaaatgctagaattagccggacatggtggcgggcgcctgtaatcccagctactcgggaggctgaggcaggagaatcacttgaacccaagaggtggaggttgcagtgagccgagatcatgccactgcactccagcctgggtgatggagcaagactccgtctcaaaaataataataataataataaaccacctggatataattattcctttgagaaaacaaactgttattttcctcctaacagttgtataaaacagctaatcaggctgggcacggtggctcacgcctgtaatcccaagagactcgaggtgcatccattatctccatctcttccacctccaagcaatggagttttaggaagccctgggtgggggcaggatgaggggacagggaggacaaaacctaccaggacaccacacgacccttaaccatccctcagacctacatcggctctgtgctcatctctgtaaaccccttcaagcagatgccctacttcaccgaccgtgagatcgacctctatcagggcgcggtgaggctggggctgggtgggaggc

SEQ ID NO: 184289 - DNA, 539 bp, Homo sapiens
aggtcgtgcgccttttaggatcctgagccgaggtgaatgtcccgccttacctctgacttcatcacgagagccgtgtcactctccccttcactgcactgagcctctcacactgattacacccagcacatttttatcctatctttctctcacatgtcccatgtctgtctggggatgagtcagtgcaactactcccgtctgatagtggttttaaaactaggaatgtcctcaaaagaccaaaacaaacaagagaaaaagatcacacacaaaaaaaaacatgaatccaacctaaacacaagttctgtgaacacaatatatgcactaaggtgaacatgtggtttcctctatacacctgagtggatcctttattgctgtgatcctgagaggtgagtatccttgccttgtacagaaggctacagagcagcacagatctgtgggaagtccaaaatactcaaggggctagagctttgttatatttcaacagataccaccatattttttccccatttttgccatgattctgaagccaagatggcaagcga

SEQ ID NO: 184290 - DNA, 448 bp, Homo sapiens
tgtgtatattctgtcccagcagtgccatttgcagttatataaaactcttttatatttgcttatggagtcaagaatattcattgcagtacttatttggattattgaaaaactgttcggagactgggcgtggtggctcatgcctgtactcttgacactttggaaggctgaggtgggaggattgcttgagcccaggagttggagaccaacactgacaatatagtgagaccctgtctctacaaaaaaattaaaagtagccaggcacagtgttgtgcatctgtagtcctagcgactcaggaggctgaggtgggagaattgcttgagcccaggaggtcaaggctgcagtgatctatgatctcatcactgcactgcagcctgggcaacagagcaataccctgtctcaaaaaagaaaagaaaagaaaagaaaagaaaaattgattggaaatgtcca

SEQ ID NO: 184291 - DNA, 496 bp, Homo sapiens
acataagaaaaagacagctatctacaagccagggagagaggcttcagaaggaacccacacagctgacaccttgatcaaaataactctgttgtttaagccccttagcacagccccacgtacttaattgtggcagcctgaacaaatgagtacggggactcctgtcttcttctttcgtcctgtctcctttgaggggaatgtcaggcttatgacagttgtcacaaacatattgtgtgtctttcttcaagacattaaaattgtgtttgtcaagctttccattcactttaatttgttttcatttcagcacatcagcttggtttcttagcattccaaggggaaagtttaaaacctttttgcatatagactccatttgcacggctacttttcttttcggcgattctcaagccccatcctcaaattcagcccgtggaagttgtttgacatctaactgagttaactgcatcctatcaagcgaagctcctattttcagcctgctgag

SEQ ID NO: 184292 - DNA, 619 bp, Homo sapiens
ttgtgtcttgaggacagctacacatgagaagcagatgtgttctgtcaatttctcaacctttaacaaaattcagccaaaacaatggacagaatacagttattcccctcatcagtttatctgcagagaatataaatactgttaactattaagactttgaaatcaaaaggaaggagaaagggagagaagcctcacagcctgggtttgttccgacttcacagccagggccagccttggagtgtggcctgtgctgagaactggagaagggggacagaaaacacgattcctgcaaaagtgtcagcgtggaaccagctcagccacagaaagcagcattcaaactgggctccaggatgaaatgaaaaagtctgggatgatgcataactcgagatgtcagaaaataaggaacgaaaaggcaaatgatgggggaaagcaccctaggaagggactgatgagtgctttaaatttgtgccagaagaacctagtaacacgcaaccctgcttgtaaaatgccctgagagcacagagtttgtatgccaaaagtctctcatgtgagaataaagcttatttgtgcactagaactgactatttgtgttggactgaaatggactggaagaaagaaagga

SEQ ID NO: 184293 - DNA, 668 bp, Homo sapiens
tgaggagggaggagatggggagttggaaaaataaaaattaaaaaagccagactctaagccctattaaatttagtttggggatctcgtttcattgaatgggtccatggccctttggtgcaattaattttgactgcactaaggcctgcggcattatagacttgattgtgggagttgctgaaattccattggtacaattttccagtttgtctctagggttgcttggcccccagtctgcaagtattagagccagttttaatagatggctgtggtcctctggcgaaagaagaagataaaatgttaaattctggtgtcttacaaaaaaaaaaaatgtgaaaatgggaccaaagaatgtctcttgtttttggactaaaaagcatatggtttctactatgtaaagaacctaaaaacatctttgattgcctttaattacaacactcaccaaaatatgctgcacatgtttctattgggcacaataggtatgcctggattttaagtcttttctccaaggcagctcagtgaaatacagcccatggagaccataccagcattaaaccactctcctccattacaaccccaggatagtttaaactaggagtttgtaagcactctctgccctgcccctcagcccaacaaagaagctactgaacctgcgtttcaaatcctcatga

SEQ ID NO: 184294 - DNA, 501 bp, Homo sapiens
gcatcaccagctggagactgacagccgcagagggcgggcacggcacagctgagatccatctactcccatgggagcctgaaagacctgcctccaacttagaaaactgctttgtgtttacagttagtttaggggagaagaggtagagaacctgccctggcctgtctccatgagcatctttgagtcagtactgagcaaacaggtgtaaacaggaccccaacaggcagaggtcttgtggctttcacaaaagttgtcctgcttccccttagatggaaaatatttaaaatgagacactgggaaaggaagctataacttttatctttagtttactggaaaaatttgactatttgttgaaggcatgaacctaatttttaacttgtaaggtttcttttgtttgatttagtacaagttcggtatcagtctccttccctgtaagaaaatgtgcccacacattctcacctttccttgcctaattataaactaattcatattttgagactctgc

SEQ ID NO: 184295 - DNA, 360 bp, Homo sapiens
gctgacttcaaagcaacattgatacaaggaataaaaattagaaaatacaaaagtaagtctgtctaatagagacatttcaacagcaaatactacatacattacggtaactaaaatgtggctctcaaaactacttcttacttttaacctctgaatccactggttttgtcttcaatacaacattttttgccaaagggagtcttatgggctctgttgtgggtgtgtctttgagtatataattatcatcacctctatgctcacacacctttctcttgcaaaaactctaatattgacatcagccggatgtcagcaaaatgacatctttctgaggctgaaggttttcatgttgcctttgggggaaaa

SEQ ID NO: 184296 - DNA, 303 bp, Homo sapiens
aaattttccactaacagtattacttttaaggtcagaaaaacataaaaaataacacatgaaaaaaagtagtttaatgaatcaccatttttagttggtttaaaatgtgtttctttggaagaaaccttttgcttgctgcaagttttcaagattattgattctgtgccaagagaaagacacattcaaatataaaaatgaaacaagcacattttcacaggggaaaaaatggtcaaaaatagttatttccttccttaaagttctaaagcctagctgattttaaaaccaaggaaataataaaatagagaa

SEQ ID NO: 184297 - DNA, 292 bp, Homo sapiens
tattatgtatttacagatgacacagtggtatgttcacaaagggaaaaaacatttaacatttaagatagataaactttctgagaaaaaaagttttattccttacttggagtaaaaaaaattcacaattttcagtaaaagattaaggaatctttaaactggtttaccaggttcaacataactagtactttttttttttttttttttgagacagcgtctcactctgtcacccaggctggagtgcactgggaggatcacagctcactgcaaccttggactcctggactcaaggaat

SEQ ID NO: 184298 - DNA, 439 bp, Homo sapiens
tatcccagttgcttataatgctccctagaactggaaactacaatgtcaaacattaaggaaatgggtcattataagattaaatattatgcagccattaaaaatgatcctaaattactactcatgaagagaaatgtagaggatagatgttaggcaaaaaagcaggatctacaattttaatgcagtgttagctaaaactatgtttaaaagaaggcagagattttgtacttgctaatttgccaaattcatttattagttccagtaggctttgttgtgaagtctttatggttttctaagtataagattatatcatctgtgaacagacacaattttacttctttctttccaatttaaatgctatttgtctttttctggtctaatttctggactataacttcaaatactatgttgagtggacatggcaaaagcagggatcccttgt

SEQ ID NO: 184299 - DNA, 498 bp, Homo sapiens
cagctagaaagtctggtaggtcccacatcataacagaacacaaaaaataggtggctaccgggttagggctcaagatctgtgaagatgagctgattccaaagactgaaacacaaatatgttgcagaatagagcacaggtcttgacaggtttgtggctttcactttgatcactttagaaatggaaccagacatccctgctgtgcagagtctgggtccttgaacctaagtaaccttacatgctgtagagataacctaactcaagcaatcacatcatatctcagacttattgagtaacatgctgttatttgtgctttgcttcttttcaattagcttcaaagctaagtagccctacctggtcctagcaactgaagccagaggatttgtagtaggtttcaacagaggttggtttatctgtgtttgggaggaaaaaagcagacacaagacagactcttttcggagaaaaaatctgaacctggcaactcctacccgcaaacaatct

SEQ ID NO: 184300 - DNA, 391 bp, Homo sapiens
gaaagaatgatgtcatagaaagcaaggcttttaaagaaaagttgagactcagtatgaaaaaataatacaaaaactaaaaataattaactggacttggaaatcaagggagatattagtgcccttcaaaagaactgttttaggggagaagtagaagtagaaagtatttggagtacatgagagaggaatgagaaaccattgtctgagttagtagaacagtggtttcaaaatacggctgcgtataagaatcacatgggaagggccaccgcgcccagccattagtaggttcttaaatgtgaatctgatgttatacagcaaaagtctgtacgggctacagaaacataatgtgtaataatggaaccctgcaagaggagggagtcatgagggtgcttac

SEQ ID NO: 184301 - DNA, 199 bp, Homo sapiens
tctcgatcaaaacactaatggcactctttagagaaatagaaaacacaatcctaaaatttatatggtaccacaaaatacctaaaatagccaaagctgtcctaacgaaaaacaacaaaactgaaggaatcataatacctgactacaaattatgcaaaatctatattaaccaaaacagcacagtaatggcaggaaaagacac

SEQ ID NO: 184302 - DNA, 257 bp, Homo sapiens
tgttacaataagttaatgttactggtgaaataaaaacaggttattaagaatcaatggcaaggctgagcgtggtggctcacgcctctaatctcagcactttgggaggccgaggtaggtggattactgaggtcagaagttcgagaccagcctgacccctagtgatctgcccttctcggtctcccaaagtgctaggattgcaggggtgagccaccgtgcctggccttccctgattttttagatgtggaaactgaaatgag

SEQ ID NO: 184303 - DNA, 1420 bp, Homo sapiens
gagggggcagagcaccggacgacaacagcagcagcaacaacgcggcagccgccaccatggccctgcaggctgattttgacagggctgcagaagatgtgaggaagctgaaagcaagaccagatgatggagaactgaaagaactctatgggctttacaaacaagcaatagttggagacattaatattgcgtgtccaggaatgctagatttaaaaggcaaagccaaatgggaagcatggaacctcaaaaaagggttgtcgacggaagatgcgacgagtgcctatatttctaaagcaaaggagctgatagaaaaatacggaatttagaatacagcatatgaggaatttttccttttgaagacttccaaatgctatcatgacctaacatttagagggagaggcatactgttaacttgatgtatcatgtatatttttgctattagcatgagctgtagtacttagaagtatactgaaactacatagttaactcaattgtacttgcttaaaccaggtgtctttaaaagttctttttaagaaaatgtggcacatatacaccatggaatactatggagccataaaaagggatgagttcatgtcctttgcagggacatggatgaagctggaaaccatcattctcagcaaactatcacaagatcagaaaaccaagcatgttctcactcataagtgggagttgaacaatgagaacacatggacacagggaagggaacatcacacactggggcctgtcggggactagggggttaggggagggataacattaggagacatacctgatgtaggtgaccggttgatgggtacagcaaaccaccatggcacatgtatacctatgtaacaaaactgcacgttctgcatatgtatcccagaacttaaagtataaaaaaaaaaattcttttagaaaagtattttttatttttatagagttagggagtacagttgcagtgagccaagatcacaccactgcactccagcctgggcgacaaaacaagactccgtctcaaaaaagaaaaaaaatttacaggtctgtccatagcagtttaaagaaatttaaaaagcccccataggaatatatctatcttttaattttcacattaagagactttaaagacaaaagggcaaactaaaatgtatctagtgataaactgtaccactactgtaccccatatgttcagttctatctgagtaaaaatagagtctggaatataatattggccccctactcagtctttctggatggtacacaggctctttgaaagaagacagtctcatgttaacaattcaaaaaattgtttgagatcccttaagataaatatcccccaaaacagtgtacctctattccctgcataaaaatttagatttggaatggtatgaccagaggaatagatccacttcatgttactacaaca

SEQ ID NO: 184304 - DNA, 1436 bp, Homo sapiens
gagggggcagagcaccggacgacaacagcagcagcaacaacgcggcagccgccaccatggccctgcaggctgattttgacagggctgcagaagatgtgaggaagctgaaagcaagaccagatgatggagaactgaaagaactctatgggctttacaaacaagcaatagttggagacattaatattgcgtgtccaggaatgctagatttaaaaggcaaagccaaatgggaagcatggaacctcaaaaaagggttgtcgacggaagatgcgacgagtgcctatatttctaaagcaaaggagctgatagaaaaatacggaatttagaatacagcatatgaggaatttttccttttgaagacttccaaatgctatcatgacctaacatttagagggagaggcatactgttaacttgatgtatcatgtatatttttgctattagcatgagctgtagtacttagaagtatactgaaactacatagttaactcaattgtacttgcttaaaccaggtgtctttaaaagttctttttaagaaaatgtggcacatatacaccatggaatactatggagccataaaaagggatgagttcatgtcctttgcagggacatggatgaagctggaaaccatcattctcagcaaactatcacaagatcagaaaaccaagcatgttctcactcataagtgggagttgaacaatgagaacacatggacacagggaagggaacatcacacactggggcctgtcggggactagggggttaggggagggataacattaggagacatacctgatgtaggtgaccggttgatgggtacagcaaaccaccatggcacatgtatacctatgtaacaaaactgcacgttctgcatatgtatcccagaacttaaagtataaaaaaaaaaattcttttagaaaagtattttttatttttatagagttagggagtacagttgcagtttttgtttgtttgtttgttttttcttgaggagtctcacttccagcctgggcgacaaaacaagactccgtctcaaaaaagaaaaaaaatttacaggtctgtccatagcagtttaaagaaatttaaaaagcccccataggaatatatctatcttttaattttcacattaagagactttaaagacaaaagggcaaactaaaatgtatctagtgataaactgtaccactactgtaccccatatgttcagttctatctgagtaaaaatagagtctggaatataatattggccccctactcagtctttctggatggtacacaggctctttgaaagaagacagtctcatgttaacaattcaaaaaattgtttgagatcccttaagataaatatcccccaaaacagtgtacctctattccctgcataaaaatttagatttggaatggtatgaccagaggaatagatccacttcatgttactacaaca

SEQ ID NO: 184305 - DNA, 1214 bp, Homo sapiens
gagggggcagagcaccggacgacaacagcagcagcaacaacgcggcagccgccaccatggccctgcaggctgattttgacagggctgcagaagatgtgaggaagctgaaagcaagaccagatgatggagaactgaaagaactctatgggctttacaaacaagcaatagttggagacattaatattgcgtgtccaggaatgctagatttaaaaggcaaagccaaatgggaagcatggaacctcaaaaaagggttgtcgacggaagatgcgacgagtgcctatatttctaaagcaaaggagctgatagaaaaatacggaatttagaatacagcatatgaggaatttttccttttgaagacttccaaatgctatcatgacctaacatttagagggagaggcatactgttaacttgatgtatcatgtatatttttgctattagcatgagctgtagtacttagaagtatactgaaactacatagttaactcaattgtacttgcttaaaccaggtgtctttaaaagttctttttaagaaaatgtggcacatatacaccatggaatactatggagccataaaaagggatgagttcatgtcctttgcagggacatggatgaagctggaaaccatcattctcagcaaactatcacaagatcagaaaaccaagcatgttctcactcataagtgggagttgaacaatgagaacacatggacacagggaagggaacatcacacactggggcctgtcggggactagggggttaggggagggataacattaggagacatacctgatgtaggtgaccggttgatgggtacagcaaaccaccatggcacatgtatacctatgtaacaaaactgcacgttctgcatatgtatcccagaacttaaagtataaaaaaaaaaattcttttagaaaagtattttttatttttatagagttagggagtacagttgcagtttttgtttgtttgtttgttttttcttgaggagtctcactctgtcacccaggctggagtgcagtcgtgtgatctcggttcactgcaacctccgcctcctgggttcaagtgattctcttgcctcagcctcccgagtagctgggattacaggtgcttgccaccatggctggctaatttttgtatttttagtagagacggggttttgccatgttggccaggctggtctcgaactcctgacctcaggtgatctgcccacctt

SEQ ID NO: 184306 - DNA, 607 bp, Homo sapiens
gtactaatttacattcccaccaatagtgtataagcattcccttttctccacatctgttgttttttgactttttagaaagtctagccctggtaatatgtgtacagatttgaacagctgtttgttcttttggctcatctgttctgttacaataagttaatgttactggtgaaataaaaacaggttattaagaatcaatggcaaggctgagcgtggtggctcacgcctctaatctcagcactttgggaggccgaggtaggtggattactgaggtcagaagttcgagaccagcctgaccaacattgcaaaaccccatctctactaaaaatacaaaaattagccagccattggtggtgcacacctgtaattccagctacttgggaggctgaggcaggagaattgcttttacccaggagatggaggttgcagtgagccaagatcacaccactgcactccagcctgggcgacaaaacaagactccgtctcaaaaaagaaaaaaaatttacaggtctgtccatagcagtttaaagaaatttaaaaagcccccataggaatatatctatcttttaattttcacattaagagactttaaagacaaaagggcaaacta

SEQ ID NO: 184307 - DNA, 205 bp, Homo sapiens
gtttggctgtttgtctagatactcagtggctcctacagtctgaatcagattatttttccaattccaggaaactcttctcgtctttaataatttcctcccttcatcatgttttatgcttttcagtaggcagttgctttctgtcttgatcttccttctctcatcttttatattttgtgggttttttttcccctttagtattgtgtct

SEQ ID NO: 184308 - DNA, 341 bp, Homo sapiens
tggtttcaccactgtggtacaacaggttccatgtactgagcacttaatatgtagcaggcaccaggctagtgttgactacatactgtcatcatacgaattgtccacttcttataatagctctgtaaagcaggtattttaagaaggaataaagaatgatactaccttcctacccttggttggtgtgttgtgtacactcttggctagaaagcattttgtgacgcagagcactttgaaataagggtatggtggctgacgcctgtaatctcaacactttgggaggccaaggtgggtggatcgcttgagtctcaggagttccagaccagctggggcaaccctgggtc

SEQ ID NO: 184309 - DNA, 448 bp, Homo sapiens
cccaacccaggaagacaccagctctaactcaccaccacaaaagggaaaaaccttatcacataaggtacagaaaatctccttatatgttaaagagccatttccattttcttttctgaacagttcagattcttagtcagttttctgttagactgtcttatcaatttgaagaaatctgccctttctttgatgaggagtttccccgatcttttgattttgtattgcttttttgccatgcagaaatttgtcttttttttttttttttttaaacaagtctagtcaactgcagtagtgagaaggtgaaaaagtagaacctggagttggatctgtgactgtgaacaatcaactgaggtaactcacactaccttcggaccaacctatcttcgttttcaatgttgtcaaatttaccatttacttgcctctgagttttgtgtcaaacttagaaaggctt

SEQ ID NO: 184310 - DNA, 1478 bp, Homo sapiens
atgacacgagaacaatacatactagcaacccaacagaataacctgccaaggactgagaatgcacaactttacccagtgggaatttatggatggcgaaagaggtgcttatacttctttgtccttctgctgttggttaccatgatagttaacttagccatgacaatatggatattgaaagttatgaatttcactgtggatggtatgggaaatctgagagtcaccaagaagggaatccgacttgaaggtatatctgagtttctacttccattgtatgtgaaagaaattcattctcgaaaggatagtccgctggtcttacagtctgacaggaatgtcacagtgaatgcaagaaatcacatggggcagttaaccggacagctgaccataggagctgatgctgtggaagctcagtgtaaaagatttgaagtgagagccagtgaagatggcagggtgctgttttctgcagatgaagatgagattaccattggggctgaaaagctgaaagttacaggcactgaaggagccgtatttgggcactctgtggagacgccgcacatcagagcagagccatcccaagatctcaggcttgaatcacccaccagatccttgatcatggaagctccccgtggggtccaggtgagtgctgctgcaggagacttcaaggccacctgcaggaaggagctccatctgcaatctacagaaggggagatatttttaaatgcagagacaatcaagctgggaaatctaccaactggctccttctcatcttcttcacccagctcctcaagttctcgacagacagtgtatgaactctgcgtctgccccaatggcaaactttacctttctccagcaggagtaggttccacttgtcagtccagtagcaacatctgcctgtggagctgaagtgactgatttctcctcacaccagaatagccttttgttcctgtccgtctgcttcacagttctgctcggtttcccttgtgatcagtccagagcttcttcgaatggtccacagagcaacttccagtgtgagcagggattcgccaccaccttctcttgtgatttactgtactgctcaacacagagggtgtgattgacacagcagtggaaaaagcgtcgtcagcaggaaaactggatcatgacttttgctcgaaagggagaataacataggtgcctttgctacgcgaagtgaagcacacagttttagatttttgcaggacctggatatgaactgcacatatatacattacataaatgaaattcccagtatccaatggcaagatgaaatggttaaccctgtaagaaaacttattctacattctgaaagcacaattttccattcatctttttggatgtaaacttttatccccgacttttaaaattttaaagcattatgtaatgcttgctttactaaaatttaaattcaatacatggtttttaacaaaacagaacaaaacaaaacaatacagaatctctccctg

SEQ ID NO: 184311 - DNA, 294 bp, Homo sapiens
tgcagagcaaaaacgaggtgacccttagaacaaggggtggtgtttagaaggaaaaccgaaaggaatagtagccagaattcaagagcgtcagatattctaagaggcagtgaggggttaacatagtccaaggactttcaggggtccgatcacacaaggatgaccttggccatcattgacgaccttggtcagagcaagttcaggtgagaagcagaggcagaaggcagatgagagtgaatgaaagagtgaacagaaagggagtggagatggcgagtgtggccagctctgtaaagcagc

SEQ ID NO: 184312 - DNA, 473 bp, Homo sapiens
ataatctttttttcatctctcaaatttccgttaaaatgagacctgcataagtgtaatctagtcaagaacgttatttaggtcttggtactactagcaggcaaaaaaacatgtatgtattagtcattgcaggctgactccattaaataaattttaaaaattgcagcatcaaatatattgtataaacaggtctagcttttgcgttgtatttcttgatgtttctaggaaataataaaagctcgcagcatatggtgttgtatcccaggactgatatattaacccgtaaaagtagttgctcaatagtgcatttgcaagaatcaatgaaaactaaatgtccagattcctttatggaaaggtgattttctctctaaaaaactgatattaaatattcttagtggaaatgtattaatgcagctgagagcacttgtgtgatatgaaagcagatcttcttatttaaatatgctaaaagttcagcc

SEQ ID NO: 184313 - DNA, 302 bp, Homo sapiens
taaaatagagagaaagcctggaggcagtgagggcagttaaaacaagttagtaagagccttgattatgataatgaccgtggaaacacaaaggaaatgataaatttaagaagcattacaaggaatatacagtaagacctaatatgtatctagatatagttagtaaaaaagatactatggtttggattctgggtgactgggatgatgatgtcacctctggaaaaaaattgggaaattataaggaagatttgattttattaagaggcagaatagtacagctattattcctctttcttaggttttct

SEQ ID NO: 184314 - DNA, 672 bp, Homo sapiens
accaccacacccagcttaattttatttttatggccaaatatgacacaggtgaaagccattacccagaccttcaaaggagtgtcacgatggggttggcaatgaggacaaggggtgatgaggaaaatacattgctggaaatcaagttgataataggtttggtggaagatctaagaaatgtagtgtggaacctctgaggtagggaaactgggaattcttttctttagaatatacatgtatattggcatgtatgtagaatatgcatgtctggaactccagaatacaatctgggctgcagccatcagtgtacaggttaaaggttcttaggctttctctgttcacggcattcctgtagactaaaagaaacagctaacagctccgtttattaagtagtaaagcccaaacaacttagtaattatttatgacctaacaatttagtggccaattgaaaatacaatcacatcaattcaaaagaaaagatgtattttttcatttttaggtgatggctggttttatgcatcaacgtgcgtagggcatggggcctagatatttggtcaaacccctgactgggtattgctgtgaaggtttgttttttagatgagattaacatttaaataggtaagttttctgggtgcagtggctcatgcctgcaatcccagcactttgggaagcgga

SEQ ID NO: 184315 - DNA, 111 bp, Homo sapiens
atgaatgttctgctattttctgtgtttgcttaaagtgtcaccaaactatagcagtgctgtttgaaatagccaatctgcaaactgtttatcagcacacaactatgagacact

SEQ ID NO: 184316 - DNA, 315 bp, Homo sapiens
tgaacagggaatagatttccattccatgctactgttgaaaggggtgattgggttttggtatatttttcactaacttagaaagtggactagaatctactaaacactaaatagaggtatttccagggatttctttcctcccattttataagacacaaatattagtcactgacaaaagtgtcgttgtactcctccttgtccctagtgtgttctcatgtagttttcatgatagccctgtcaagtaggaactgtgaccccttactgcagatgaggaaactgatgcatggagggattaagtaacttgtccaaggtcatcca

SEQ ID NO: 184317 - DNA, 435 bp, Homo sapiens
ggaagagggagagggacacagagatttgaaacatgattctgcctgttcctgagagctttctagtctcctggctcccccagggtcaagctcctataaggaccagctgtactcctataagttccaggaggcacccatgtatcattacagtccatctccttttcttgtttaagtttgtttgggttggtttctctttcttaaaatcaaaagacccttgactgaggaagtgcccgtatcttatcactgcaaaacatctccaggaaggaacctccccttccttcctgctgtgtacgttgtggtcacagcacaacagtgagatttctcagtaatccctgatttcaaagtaattacaggggaaaaggagtagctgaaaaattggctcatgcctccatctccatctagaatgcccagtgttaaggatgacctctttaataacaa

SEQ ID NO: 184318 - DNA, 420 bp, Homo sapiens
tgtaaaatggtatcagcctttgggaagattctgagcaaaaatggccacaaccattctattctccctacggtatccatattcctccaaaggtgactttgaagcccctcttatcaaggggtggggtctttttctccaccccttcaatgtgggctgattttgtgacttactttgagcaacagaatacagcaaaagtaaccttgtccttgcacacctgtgcctcacacactgctgctctctctcagaaacctgccaaactgccatgtaaacaagcctggactggcctgctagaggcagtgaccagccgttccggctaaggccattctaggccagcctgccctcagccaacttcagctgactgtaaatgcatgagtgacctcttggagatgagaaggactgcccagctgagcccagatcacactg

SEQ ID NO: 184319 - DNA, 239 bp, Homo sapiens
ctttcaaccctacctatgatgcattggaaaatggaggcccataaaggtaagtaacttcccaaggtaaactagttagtgactggcatggcaggaacttaaggagagtgaaggagtatggagggatttagtggaaagtggtgtacggatcagattttaattctgtgctaaggaatttaatttaatattctgggaataaggggagcttttgaaggtcttttgtttgtttgtggggtggagtg

SEQ ID NO: 184320 - DNA, 383 bp, Homo sapiens
tccttggtcatcactaggactcttatcccatccatgtcctacttcactccaaactatgccttttggaattcacagtgtactttctacaaatcgtctacaacctctgccccgcctgtgattattttcttcaccttcttgatccttttgaaactttgagcacactacttggccagaaacaatgttttccttcatgtctttccctccacctcgcttcacctaacctctcccaagatagacataattatagcaagtcaacaccaactcaaggaatcagatatacaaaaaaatatactcaatgttaatttttctacaaatattcctaatcatgacatttaccatcatagaactaattgtattctgtagtctctttggagcaactctaa

SEQ ID NO: 184321 - DNA, 229 bp, Homo sapiens
cccctccctatgagacatcaatgaacatacgtttaagaaataacattggtttggttcagaaagatggagcaactcaaagcagggtttccatactaaatatttaatgggaaatttatctaacagtctatggaattttataccaggtgttttaaaataggttatttcctttaatccccaaaaccgttcagttattaggtgatattatttccatttgtagataaatacttag

SEQ ID NO: 184322 - DNA, 356 bp, Homo sapiens
ccccctgtgcccttccaactgcatcacaacccaccttggtcttgtcttagttgccccaagataagggtattaatgtggtactgccgctaaggtctcatctgtattcttactcagcctgaaaagggttgaacatcagttgtcctttttctcactccacttccacccactgttagacttgcagacagtttcccaaagtttctggtatggggttgcctagtactgatggatgctttcttcatttttatttatttatttatttttagtcatttcaatgggaaactggaaggatagaagagaagcatatgcttaatgtcattctgattaaacaaatcaatgttagttttgttttcattttg

SEQ ID NO: 184323 - DNA, 324 bp, Homo sapiens
atttagaccaattaacttgattacatctatacatatctcactgcacttgctcatgttttctctctttacaaaactctccttccactgttataatttattaaaataattttctttctccctccctctctccagcactttctgcctttctttctaccttcattacactaatttttcttttgttaatttagtttttctttaatttttaagagtatatagtagacatatacgtatatgtatttatggggaatatgcaatgttttgatacagatggagaatgtgtaacggtcacaccagggtaagtgagatatccatcacctcaagcat

SEQ ID NO: 184324 - DNA, 441 bp, Homo sapiens
  misc_feature (135)..(135): n is a, c, g, or t
caggatccccgattatcccccaacagagtacatttattattgttatgcttagcgatacaaagataagactgtcactgccttggattaacttcctaatactaaactacacaaggacttccaagtaaagaagtaggntctttttacctacttctaaaatttcaagtacccaccttgaaattttgtaaacttagctcagcaggccaaacctgctacttccaaattagccacaatggcctaaacatgtttataatttctgcatctctacttcttcctgaagaagctaatgctggaatgtagatttcttggttgggctggtggaaagcagccttgggagaatctcactgacttcaactgcccaaagggtattagattgttaagcatcctactctgtatgggggatctcgggtatcgagcttaaattctttaatttgttcatagctg

SEQ ID NO: 184325 - DNA, 265 bp, Homo sapiens
tctgagagcagaaggaaggacttgcctttgcttgaagccaaaaccaatctgaaaccacagaacctcagcctgagggctagggctaggcagaaagcttgcttttgaaacctgagctctccttgcaacggtggtgggggtgggggtgttggtgtatgttccacttgtacaagcaaaccctctcataagtttgaccctgaaaaaattacataatcctttcatcacagcgggttacattttccaagggcagagctttgacttacaactg

SEQ ID NO: 184326 - DNA, 568 bp, Homo sapiens
atttctccttttttacaatcatgtgctaacgttgctcagtaatggcctatggatgaagagacagatgtactaccagtcattcgcgacacatttgcattaacaaatcatcatttaattaaagcccatccaacaagtttatgctacttaaataaagttcctttcaataaaagatgccacagtggcacacagttaactatgaggaaatttttttaactatatttatttttgtgtcaaaggcttaggtgtgcattagacaaccatttattaattttaattttgcttggaataaacaccctgacaaacagcatttcaattcaggctgctatacaacagaatcatttactttcagatacaatcatgcagtaacaccacaagctcctgcttcacaaattgctcaatccccaatccccaaatactatagaagatggcttatatataagttatacaagacatgcattctaatattcaagccaaagctctaatattcacataaacctaaaatcctgctataattaggaaggaatattattttaaaatatcacactaagtttcatgggtaaatatttat

SEQ ID NO: 184327 - DNA, 1336 bp, Homo sapiens
aattaggctagtgggctggttgtgaatcggccgacgcgttaagggaagtcctgctggtcgaatgcgacctggacatggcgtgggagcgccgagctgtccccttgtggatggggagctttcgttcactcagcagacgtttatggggcgcatgcgtgactctggggcgtttagctgagccggaggccccggctcttggggacgcggtgggctggcggcgtcggatcaccccgccatccatctcaccactcccagcgctgagcccggggggcggggagagtccctcatgggaaggggaggccgtgtgccccgcctggctcccaccacgttcgcaggccggccgggcgcccctcgcagccccctctccggcctcgcggtggcgccgctccccccttagcgcccagcggggtcccggccggaagactgaaggctgagtgggactgggcacggcgcgaaaccggcatcctgataactaggatttacagaataaggctgactcctgtcagctcgtgacccagccctgggcgtcctccacggggcagctgtcattccctaaccgccccccaccaaacccctgcacctccgagctgaatccgtgaggcggagagagggggctgcacttcccacgtggtagttccggtactcgttaatgttaaggaattagagtttgcttttcagtagacagctgctttcctgactgtggtggccaacctctagatccacctgcttgacttcgctttccagggaggtctcctatgtgaagaaacaaagctgcctcactagaaaagatcaggaaacagcagcgttctgtgaggtcctgtgcaataccaggttggaccttgcgggacaagtacagtgggttaaggatagtcataatgaaatctgccccaatggttagatgtattttggcgcctgcaatctctgcagtctttaaaaagaattaagtcagactatgtgctgatatgggaagatcatcaagggttattaagcacagaatgctgtatacatatagttgtatttgtataaaaaataggatctagatagaaaatttttgcaaagatccatcagaaaatgtctgtggcatttttgagacatgggtctaggaatttggggtggattggtgactcggtatgtcagtatgcattgtactctttggtactgtttaatttttttttcctatgtgcgtttaaaatataaatttaggccgggcgcgtggctcacgcctgtaatcccagcactctgggaggccgaggcgggcggatcacgaggtcaggagatcgagaccatcctggctaacagagtgaaaccccttattaaaaatacaaaaaaaaaaaaaaaa

SEQ ID NO: 184328 - DNA, 429 bp, Homo sapiens
ttacaggtgtgagccacgctcccggctgctggcatgattttagagtcagtgtcagatattgactttgtcttcctgttccagatataaccaaccatatgacgttagacaagtgacttaataattcttagcatcagcttctcctgaaaaattgggatagtgctgtctgtttcacaggactcttgagtttcatgaagattaagtaagaatatatagtcaaattagtagtatagtacctggcacactgaacctttggtaatggtgctggatattgtaggggataaatacactagtagaaatccctgcctttgaggagctcacgttctggaggggaagacaggcaaaaaaatcagtgatggtgatgtgtcatgccaggtgccgtaagaaagttaaccactcacaggttcctatgggagcatagaggagcggtgg

SEQ ID NO: 184329 - DNA, 113 bp, Homo sapiens
ttgctgtctctagcctggaagagtgccattacacattccccctgggtgtctcaggaaaggtcactttgggatggtctcctcctcgcagcttatgggactaacttgattaatag

SEQ ID NO: 184330 - DNA, 230 bp, Homo sapiens
gatgtaagcaatttgtactaaattccaaccctgaatcagtgctgaatgaaaacttactctgttgctgcatcaggctttgggaagatattaggaagagaaatggcccaggaggtggcaatgccgacccccaaatacttccctctccccaactccagctgccgatcccagagcagacaggcagtgagactttggaatcccagctcctccagagtctggctggcccatcttga

SEQ ID NO: 184331 - DNA, 177 bp, Homo sapiens
tagcaaaagatgccagtagcgactcaagccatttttttgtgcatctgatgaagagatgttggtatttttatatggcctataagatttcataagaggcaaaaagaactggttccctttcaccagggacaggattgctgcagattcatttctgaaataatatcctgttggctggcgaca

SEQ ID NO: 184332 - DNA, 470 bp, Homo sapiens
tgctgtggcatggggtctaagggcacaagataccaagtggtgtgtgtgtgtggtgacttgaggtctaggggggacactgagtcttgtcagcctagacagttaagagtctgtgacattggcacctgtgtgatccttgacggcaaaagttgtgggaggtctgcagaggctgcaagggctactggagtcctctgctgtgcctctgtgtccagcaacaaagggccatggctagcaacaatgaaggccagagccagtgaaatgcacatcctctggtgtagaggctggctgcagacatgcctctggcagcagatccagatgtagcctcatgcactggggtaagtgctggagacagaaacaggagatgggcaagactgtaagagcacatgtgggatggtcagggctggaagcttgcttatcctcaattgcagggaccagctagggttaggtgacaggaattagactatctgtgtata

SEQ ID NO: 184333 - DNA, 347 bp, Homo sapiens
attgccccaagcctgaatcccaaccccccacatctttgttacctgtctgtgggtggtggcccaattgtcacagcctcctcagccctgggagctcaccacactgtgccacaatgccccagcttgaagtgacatgggacactaagtgtatctgttgcaaatattagaacccaactcacactggcttaaggaaaaaaaaggaaaacgaagaagaaggagaccataatggcacatggaactgaactcaggggtggctgtggcttcaggcatggttgtatccagggagaacagtatggccaagatccttccctcatctctgctcttggggattcggcaccactctccaacag

SEQ ID NO: 184334 - DNA, 194 bp, Homo sapiens
gatttcccagggtgggggtgactccatccagagaggaagagaaaggagcgggggctttggtccagggcacgtgctggcctggggctgtggaagtcggatgcagggaattgtgaagggagctggtgagagaggctcagagaaaagaggcccaggctggaaagaggcagaacagggagaaaatggaggtgaaggct

SEQ ID NO: 184335 - DNA, 439 bp, Homo sapiens
gcacccgtcgtctgcatagtttctaagctcttggatgttttgatgctcagacacactgggaattctgttccggaggagagactgctccctgtgaggaaagccagggaggggatgggtttttgttgttgttgttgagacaaggtcttgctctgttgcccagactgaagtgcagtggcgtgatcatagctcactgcagcctccaactcctgggctcaagcgatcctcccacttcagcctcctgagtagctgggactacaggcatgcaccaccacacctggctaattttatttttttgtagagacagggtctcactacgttgcctaggctgatctcaaactcttaggctcaatgatccttggccttgacctcccaaagaactgggattactgtgcctggcccggggtgggttctgagcggactatcttacccgcagccagct

SEQ ID NO: 184336 - DNA, 331 bp, Homo sapiens
gaaaaaaacatttagcaaaacattgaaaaaataaaaataaaaacctgccagtcactgatctaaatgttaagggaggaaagcgcaccagtgccggctttgtggacattatattccagcataggcaataaatacaagagaaaatcaaatttcagattaagagtctatgaggatgaaaaacaaggcaaggacatagggaatggcagggggtgtggtgggcaggaggtgctattttgaccaggtcatgcctccctaaaaaggtgacatgtgagctgagcactgaatgttaccaaggagcagcatgggggcctctgaggatgtagataatgcaaag

SEQ ID NO: 184337 - DNA, 1020 bp, Homo sapiens
tcccaagaaagaagagcaggaggaggatctgccaactcaggagagcaggtgggggatggcaagtcttcggagtattcataaaccaaatgctaagggaaacttttgttgtttgtcttagaattttaaaaaataaagtctgttgcagtttatctgctttccttcctggagagtggctaaactagtgttctgttttacaatgtagaatgcaaaagcagaaaacattcaagaaaattctatactgtatttgaaaaacatcaccatttagttttaactgctctttgtttcttattataaaaattaatacctaactatgaaaagttagaaagcctggagaagtatggaggtgagttgtccaccattgggccactagagagtgccctatgagcctgtccctggtgtcctggactctggtggtgtgcactgcatttgctggcagtgagccagggggtgggccacatctgggcccgggcggggtggatctctgcagaagtttatccatctcttggttgacagggtgggcgagatgggagcagctctgagggtccctgttggcagagaatgtctttgattatcaacaacatgcctttttgttgtgggcttgtgatccttttctttcctaaatcagctgccgtgcataaccagttaggctctcctgtggcttcagattggagttagtttcccaagtgctaggatgtgggtgttaggtgatttctgtctttccgtttgaaagagatttcagatcattgtaacatttctggaatcctgtcgatctgaaggaatggctaggatgtagtagtttaagggaaatgaaaagtcgaatgtattttgatgtttctgcatcagacctgctcggtggagtccatttctcagcttcgggagccacgtgcttggctcttgagagcctagctccatcagcccatgtcacacactcacaggtctggctttagctggtttcgccatggtttctaacttttcatagttaggtattaatttttataataagacacgaagagcggttcc

SEQ ID NO: 184338 - DNA, 1338 bp, Homo sapiens
cagaacttccactgaatacactagaaaatacagaacatttttgcagaaattatgtttgaattatttaatgtaccaggattctacattgcagttcaggaggtactagccttggaagtatcttggacatctcaacaagtgggtgaatatatgttaatgagtatagtcattgacaaaggagatggagtcacccttgttctcccagttgtagaaggttatgtaattgggagctgcatcaatcacatcctgattgtaggtgatactgtgtatttcattcaacaactgctaagggagagggaggtaggaatccctcttgagcagtcactggagaccacaaaagtcattaaggagaaatactgttacatttgccctgatatagtcaaagaatttgctaagtatgatgtggatccctggaagtggatgaaacagtacacaggtatcaatgtgatcaaccaggagaagttcataataaacgttggttacaaaaggttcctgcaacctgaaatatttttttacccagagtttgccaacccagactttatggaatccatcttgaatgttgttgatgaatacaaaactgtcccactgatgtgcattgtccactgtataagaatgttgttctttcaaggggtttgaccatattcaggtatttgaatctcaactacagagagatttgaagagtggtacatgccagattaaaactcagtaaggagctcagtggcaggagaatcaaacctaagcttacagaggttcgggtggtaatccatcacatgcagcactatgccttatggtttggaagcttaatgctagcctcaactctggagttatttcaggtctgtcacaccaagaaggactataaagaatatggtcccagcatctgccaccagaaccttctctttggagtaatgtcttagtgtctgccttgaaagcaccatttaatagtgtcatgttggggaacaagtgtccttcagaacccagagaagactaccatttctaaatgacatttggtgttgatgtctgagcagcatgcttgcatcacctagtgcatgaggcacagggcagagtcatttcagtaaaagccatttctttatgtgttgactgttgtatgcccactcctccttctctcactccctttcttcatgcttccacagttttcctcccccttttcacttgaacttttttgttgacaaataccattctgaaggaattcaaatgtgactctgaaaattgttaagaggaaaaaaaatttcaaaaatggcccaaaatagttctcccccaggaaagaatgcagtggtataaatccttttcccccagcctatttttataaataaaatgttataa

SEQ ID NO: 184339 - DNA, 480 bp, Homo sapiens
caccacttcaaaattatggtgatcagacttgccattcaacgtgttgataatccaagcccaggcacagaacacatttaagaaaacattttggcccgggcacagtggctcacgcctgtaatcccagtactttgggaggccaagccggtcagttcatgaggtcagtagttccaggcccagcctggccaccatggtgaaacccagtctctactaaaaatccaaaaattatccgggcatggtggcgtgcgcctataatcccagatactcaggagtctgaggcagcagaatcgcttgaacatgagacgtggagggttccagtgagccaagattgcactactgctctccagcctgggtgacagagtaagactctgtctaaagagagaaagaaagaaaagaaaagaaaatagaaaagagctgagtcccaagcactgctggtggaatccagtttctgctgaatgtgttttgagtatgtgtgccaatatt

SEQ ID NO: 184340 - DNA, 722 bp, Homo sapiens
gccctcagaaataatactacacatctacaaccatctgatctttgacaaacctgacaaaaacaagaaaaggggaaaggattccctatttaataaatggtgctgggaaaactggctagccatatgtagaaagctgaaactggatcccttccttacaacttatacaaaaattaattcaagatggattaaagacttaaatgttagacctaaaaccataaaaaccctagaagaaaacctaggcaataccattcaggacataggcatgggcaaggacttcatgactaaaacaccaaaagcaatggcatcaaaagccaaaattgacagataggatctaattaaactaaggagcttctgcacagcaaaagaaacaaatattctttttacatcctactatgtgctggcattgaaaaatattcatgagattataaaaattaggaaaatatttaatcatttctgccctcatggagtttacattcttattattgttgcttaggtgataatgtttttctttcttcctcctcccctgcctttggccaggatttttagtaacatatgatttctaatgagaacatcctagaacttgaaaagatgaaataaatgattctgtttcatgttccaaatggcagctattctccaggggataaatatttgaaagatagagatgtaacagcttaagtttgtccatcatttttctctcttggtcattcatttttcaacttgagttc

SEQ ID NO: 184341 - DNA, 922 bp, Homo sapiens
ctgacaggcacattgcgggtccagccatcatgccaaggtgtcagaggctggttcagcctcttaaagattgaaggcaagacaatcatccacctccaccccaggaggaaaatgaggcagctgagcagtttcctcctgctctcttactctcatgtaaggcatcgtatctgaatgtagacagagtatttgcttgttttctctttcttaggaggcaggaccagggagagacccagcaaagagaaggtcccaagcctagctcaaatctcctggtcctggaacattcaggagccgccccacttcaatggtaattggcctatttccatctggtttccaagcaacatgacacaaaatccccaggaaccttatcacagagccagtgaactggaaggggctggagatcgctctggcccaaactccctgcgccaaagcatgcggggcgactcagacacaaaagggaggaaggcacagtctctgcccagagcccacggtggcaccaagaaactccttttaccactgaagaagaaaaggaggtccagtcttttggaggcaagacaaggtcacctacagagggcctcagccgagcaactcgctagaggttgttttctgcatgaccaccttccctgcaccgtggatccctggggtgggtggtttaggggctttccaggtaagagccagggtcagcgccaggaaatgatgacaagtctgtctgaaccctttccgcagacatacaattgacctcctccagccaagcgctgctccagttagaatctttctaaaactacataggcaaatgtctagcaattgtcattcaactctcacaatgaaagggtaaaaactcattttaatgtgtctcccttgtaccactttcttagtatgcctgaatccatttcatctcaaggaccatacatcaagcactgccttctca

SEQ ID NO: 184342 - DNA, 113 bp, Homo sapiens
tttctcctttggagataactggcatttctaatttttgtaattattttcctatagatacaattccccccctttcaatctgtatattattgttttttcttcttctttccctttct

SEQ ID NO: 184343 - DNA, 560 bp, Homo sapiens
aacagatctagcaacagagccaggatttttatgtaagcactctaattccaaaaaaaaaaaaaattgaatgggtaacatatttacattgttttttaaaaggtatgcagtgagagtctactatgtatgttctccatcaatctaactctcaccacttcttttcccacctctacaccaacagttaccaatgttattacttgtatatatccttccagggttttttgtgtatctataaagcaaatgcaagtgtgtatttttccttgtttaaaaaacccaaaatgtagctctctatacattactctctacaccttgctcattttacttaatgtatattagaaactgtctttaaaaaaagttaatacgtattactgtgtttttagaattttcctagctttttctttttccatatgaacttgagtatatatttgtctacttccctcaaaagccatttgacattttcattgagatcatactaaatttacaaattagagaaaattgacgggttgatgtggttgagtgtccctatccataaatgtggttttcatttgctcaagttttttgtg

SEQ ID NO: 184344 - DNA, 222 bp, Homo sapiens
aggcaggagaatggcatgaacctgggaggtgaagcttgcagtgagccgagattgcgccactgcactccagcctaggtgacagagcaagactccatctcaaaagaaaaaaaaaagaacagattctgtactcttctgacagtcatgctgccccagtgggtatatcatgctttctacttacatgccttgtacaggggaacacctccttttaaaaccatcagatct

SEQ ID NO: 184345 - DNA, 691 bp, Homo sapiens
aggagtatttgcctagatgccgcttgcccctgcctggtcctggcatatctaacagtcctgcctgggccaggactagtttgtcctgattgcagggtgaggtgcctggattggagggatggagcctgtgctggcttctagccgcagtcccctccagccctgtcaagtccccctgtggcttttggccataagctccactttggcgcaagtgtggatggtgatgacgccttgactgcaggggtgctgagggcgaacggagagctgcctgggaggacgaggcctccactgcagtggtacctgctgcctaggtttcccctcctggccagggcaaggatctgatggtcagtgctggctaacgcctctcactcaggagccaccctcatcagcaccccctgttcagtcttcagctgcggctaggtggcccatggccagagtactagaagcagctccaggaagcagctgcagtcctccagggctgctccaagggccggcaccctcttctagccactctgtccctgcatggccatgaagtgcactgctctgctcccagctctcctgccccccctcccacccccaaacctctgcctcattccacattcattcctcgccagtgacttgtgggcccctctgtgccaggcactggggcacggagataagcagcatgcagtcgtaggctctgtcagaagggggcaag

SEQ ID NO: 184346 - DNA, 314 bp, Homo sapiens
attgctcctaattgtctagagatctaataaatcaatgcaaagaaaaaaatcactaatctagccaaaagtgtaagacagctccagtgtatcaattctgtcttcaaaagtggaccccagttacaacaatcgtgggaaactgaacctgtattacataaactctgaaccattttaattaatatttatcaaagtgttgccaaaaaaaaaaatattcatccctttgggtactgtagctctttgctaatcaacattaagataaacctgctccaaacacgtttcgttgaaaatgcccatttaggccaggagcggtggagcaa

SEQ ID NO: 184347 - DNA, 494 bp, Homo sapiens
acaaacaatatcagatttttaaaaagtctttttaagaagcattgtaatcttataccaaaaatattcattgttcttcagtgatctgtcaaataattcaatgtaaattcaatttatgtaaacagcattcaaagaatatattgagtgttcaataaatatttgattagtaatatgttaaatttagaaccaccacaagttttattcctgaaccattcaggatattatctgagtacacctaattaactctacctgtgcacacccagcctagaaaacagaccccccatcccaaacaactgacaaaacacataaggtttttactttttatatctggcattgaaataagattcttaattagtgaattctcttgtgttctaaagctaaaagtaactaaattatcatggtttgagaaccccaaatttagaagagtcattttatcaatcctatgtcttcatagaacagtctttactcatgtaaataaattataaactatataaatt

SEQ ID NO: 184348 - DNA, 374 bp, Homo sapiens
aacatactgcctgaacacaatttgactcactaaaatccagcactataaacacaaaatacatttctcgagtgcattttaaaagacttattatcaagatttatgacataaggatagaaataatttgcaactaggcactgccaggagaatatcttaggttcctctcaaggtaattttaagtaaaatttacaaataaatcttaaggttagagtccactttgaacgcaggaatcttcacctctttcctttcaactgtatggaatttgaatctgacaaacaacctgtctgttgctagaatttataagtgatctgaaaaaaaatcaaaggccataaaagctatttgtcaaataaactgcagaacacgatatcagtctgcag

SEQ ID NO: 184349 - DNA, 405 bp, Homo sapiens
aaagcattctggagatggaaggtggcgatggctggacagcaaagcaaatgttccgaatgccactgactgtacactcaagatagtaatggttcagagatatgtttgttcagttgatgaaaatgtgggccgggcgctgtggctcacgcctataatcccagcactttgggaggccgaggcaggaggatcacctgaggtcaggagttcgagaccagcctggccaacatggtgaaaccctgtctctactaaagatacaaaaattagctaggcatggtggcatatgcctgtaatcccagctactcaggaggctgaggcaggagaatcacttgaacccaggaggcagaggttgcagtgagccgagatggtgccactgctctccagcttgatgacagagtgagaatccatctc

SEQ ID NO: 184350 - DNA, 702 bp, Homo sapiens
tcccttccacctccccatctcttctcaactcagcccacccccaatcttaggggatgttccaaaggaagcagacagttagacagaacaaatggtgggttcaagaatgaactagaaattgggcagaggatgaggctgaggagaaggcaagggatgcagacaaggacaaagttggggagaatatcaagcatgaggttagggaagatgatgaggtggggatggggatgacggtgagtcagcgatgagggtagggatgaaattgaggttggatgtggggtagaagatgaaactgaggttagggagaaagctgaggtcaagtcaggaatgaagtcaaggggatggcccgggtaaagagccaggtaggtgttgtagtcaagttgaagatcaaggcaaaggcagaggccaagtcaaggtccacatgaggagtgaagtcaagtgacatgaagtctggagttgcaatcaaggtcaaactgaaggccaggccaggagcggtggctcacgcctgtaatcccagcactttgggaggccgaggtgggtggatgacctgaggtcaggagttcaagaccagcctgggcaacatgatgaaaccccatctctactgaaaatacaaaaattagctgggcgcagtggcgcgtgcctatgatctcagctacatgggaggctgaggcaggggagtcgcttgagcccgggaggcggaggttgcag

SEQ ID NO: 184351 - DNA, 673 bp, Homo sapiens
ggaagtgactgctaatgggtaagggtgttctctctgttttggagtgatgggaaccctctggaattggatggtgctaactgctgctaactgatgctaaagccactgagctgcacactgtagaaggctgaaattttatgttatgcgggttgtaacttaaaaggaaaaatataaagttgttagaaggaaaaaaaggaacgtattgacagtggtgtgtcaaaggagtccacctgggtgcgggcaaccagagaatttaaggacaataatgaaactaacgacaggcggcttgcttttcataatcactgtgccccagcagtgctaaacatggcagtgaggaaggctcctctctgcagggtggactctccctctgtgccactatgagtacgtcaccgtgtgcagagggaaaacagagcatgtgttataattcattatgtacaacctcatgtttgacagtgccgtatcattcacaaagtgttgtcatagacaatatcatccccatcaccctctggaggaggaagacccaccaaggaggacgagaagcctccctgtggccatgaccgctagtggtggcctccacagagctctggagccgaatgctgatttcagtaaaggttctcccaccaccacactccccagggctggtggacaccactggtgtcctcatccctgaggcctc

SEQ ID NO: 184352 - DNA, 622 bp, Homo sapiens
tggcattgtttgagtccaggatgtccaggttgcactgagccaagattgcaccactgcactccagcctgggcaacagagcgagactccttctggaaaataacataaaattaagtagtgtacagtaaatggacaaaatgccatagtagttgagaatttaaagtcaattccccccagtctaagctccatgagggcagagactgttctgtactgtcaaattcctagatctgctagcaaagtatacagctcatagaaggtttataataaatattttggggaaaatgaatgaaaatagtgaattttatcaggaatgctgtcatagaaacatttacaatgccttttcctatctgttttcaccagaaagttaaatgaacatcagctaattaagaaagcagaatccttcccctgggaattcagttctcactgcctattataaggcagttttgacatgacagaaccacaactaaatggctgtaaatgtcacagtgtacattttaaacctcatagccttagagtttgatgagaccaggcacagtgactaacacctgtaatcccaacactttgaggggctaagatgggcaggaatttaagatcagcctgggcaatatagcaagaccccctctca

SEQ ID NO: 184353 - DNA, 443 bp, Homo sapiens
ggggagctgaggggaacacagatagtttgacttcagtcagacagaataaacatgatgaaccgataacctgtgattcccagcctggggttactactggagttttaggtgtcctggaaagttataataccggtcttcaaaaagtctacagaaagcatagatttccacataatgctgcacaggctaacgaattaatcaagtttctttggtttggcctggatttatatccattcagtttgtggacactactgaattatttatgtcatgttgatcaaaagttctgatatgatttgattaatgaaacattgaaaaaaatagtaaaaccaaccatttttaaccttacactactatcttgaggtatgattgacatacattaaaaccacctcttaataaatgcttcttgttaatcaaaaatttgaaaacgtatgtccactggaggaaaaaag

SEQ ID NO: 184354 - DNA, 377 bp, Homo sapiens
ctctcagacgtgtagcaaaatccagacagaaaaacagtagaaaaggcattggaaagtgtcaagcaccaaatgcacctaagaggtttgttgctttttcttgttctgagccttgctactgaggccttggaatagggtcgccaggattagcaaacaaaaacctgggaggcacaattaaattcgaacttgagacaaactgaataatttttaaacttttaaagtataagtatattccatgcaagatttgggatataagtaaatatactacaaggttatttgtattttacctggcaaccctatgttggagcctccttccctgctgcagccaacaggggtagaggatctgagctgcttatttgtaactgaaagtccatgggact

SEQ ID NO: 184355 - DNA, 230 bp, Homo sapiens
ttcccaaagtgctggattacagccgtgagccaccacgcctggccgagacagctctttttctttgctgcacatcaatcaacttgcatccccgaaagtgccttcaaaatagaaattctggagctgccactggtaaactcagacttaaaatttttaagattttccacctgaggttccttgtaacttactgactctggctttcagttttatagttagagagtaccaggaagaaa

SEQ ID NO: 184356 - DNA, 714 bp, Homo sapiens
tttttagtataatttacttctagcgtaaacttttactgtgcacaattctatatcaaaattgcacattattccaaaattttaaatactctttttagtgtaataaagtatctctaacacaaaatagcagttaatgtcaaagtcttacgaaactggatgattagaccgtgttcctcagaacatagttgtaagatctgagagctatagaatagtaaacaaaaaaatgaaaacagaacatgagcatctgcagggcttggtttatcaatgtcattttcattaaagtctcagaaatttcagagatataagcagtaagaaatacagatttaattatttcataaaatatgcagatttattgcatctacagtaacactacagtaatactattatgctcagtaaatgacaatgtttctttaaaaaacagtaattttatgccaagttaatattttgaaggatctctctcctttcaattcttgaagtatttgtgggttaatgacataccaactcagtgaatacacttaggacacttatccgataatttctaaggcagtgaaagtagctgaaaatgttgccttcagaattagaaggtgggggactgaatcctgtttctgccacccatttgctatgcaatcttgggcatgtggttgaacctttatgccccctctttttcccatctgttcaatgggggttcaaaagcaaaagtaagaaaagcactcacag

SEQ ID NO: 184357 - DNA, 351 bp, Homo sapiens
aaatcagagaagcttcaagcatttgaaagcgttagcccatagccccttcccaaattccagacacaaggcatccaaagactcaggtcaggatggcatcgtcagaatcatcttcatctcagtcaaccctcatagagaccccagtgttcatgttagctcttagcttctgcatagtgcccccataaatcggaagagactgagggttgtagcacttcagctaacagaaggaaattgcaccatttaggaagctaagtgatatttgaagggcatatgtagctatgatcaaaaataccaggtttggtgcaaaagtaattgccagttttgtcgttacttttaatggcaaaaatcacaatt

SEQ ID NO: 184358 - DNA, 653 bp, Homo sapiens
cctccgcatccataggatagaaatcatagtaggatcaacctcataagtttcctatgaggatgaaatgggagggtctgtgttaaaagctttgtgcagcctatgggatatagtgagcgtgctggaaatattggccagtagtagtattgctgtttactcagatgtttatggatccctagataatatatgggaaggcacatggtaaattacaaagtgctatgcaaatgtgttgttattcttcactgggttcctgttaagttgtggggtttggggatggataacttccagaccagagtggctgctgtgggaccgggctggtgaagcggtatttcaaaatacattttcaggtgtgtttgtccatgtggcatgaatgcgtccgtcgaagttgacggacgcatcataatcctgacctcaggtgatccacccaccccggcctcccaaagtgctgggattacagtcgtgagccaccatacccggcctagaaatgttttttagtggcagttaatttctaacttgcaaacaattttggggatctagagtttttaaaaattagcgttatccaaggaacccactggtatgcggaatgttctcatctaggtgattattacaaacgctttctgagacagacctattgttgatccagatttgacactcag

SEQ ID NO: 184359 - DNA, 225 bp, Homo sapiens
ctccttccttgaaatgcttttttcttgaggcttccatgccctgccttatcctgtttcttcctacttctctggttgtgctttttcctctgctcagtatttaacatgttggtgtgaccctggctctggcctgggcccccttctctatctacatgctttctctcgacgacctccatcggttgcatgggtttaactaccaaatctgtgattctagctccgacaccccag

SEQ ID NO: 184360 - DNA, 1761 bp, Homo sapiens
gtccccggcgggctggtgagggggccaccaaagacccctagcgcggcctggtgagcgggggcttggcccataggagccaagccgcacagacccgagaattcggaggccaccacacaacacacacacacacacatacacacacacacacacacacacgccaggagcaagggagctttcgggccacactcccagacgcctccctgagccctggaacccggactcgttgctcctggccttccataccccctggcagatcatcctgcggtcccaccccagatcccctcctcctcgccatcccattctgccccctccccaccctgggtacagaaagggactgaagtgttgggcagagagggggcttaaggcccctgggcacaggctgggatcagggcagtgagcgaagggcagctgtgtcctgccctcccttctggaggctggaggggagaggccaagcccttggaaaatgtagcaaatgtctggatgtcgcataagtgcgtgtatgtgcgggacaggccccgagaagctagtgactcctgcacacccccattgcacaaatgaaatcacagcccaggagggagggtagcttggcactggctgagaaatagagctctctccccgcccctccccctaaccacaagggattgtcctgacaacttgtggggatagaagggctcacagggcaggggtctcagctgcccccatccttagggcaggggagttagtgtggagccgagagcaggtcccagctccccctgccagccgcactgtcccaggcccagggacctctgccgggtcctcccagcccttgccacacagcctagacgtagtagcctgggcttccagcaggtggcgagctggttcgtgctggaaatttctcctgggtttcttggggtcaaacatgccaacctccaagaccccatcctcacgtctcccacttttctggcgctggagtgtgcagggcgtaggacctgcatgtgtgggtgtgagaatgggggcggtggacaccagggggcgagtgtgtgactaggtgtgtgtgcacatgtgtagggtgcagacgcatgggtgccatcctttgcgttcagtgactgtgcgtccagacccctcaccagcggccccccaccacaccctggtcctcccaggcagctgtcccagggcgcccaggcctgccttgcaccacagccctcaggaaatccggcaaggaggcccctgcaggttggttcaggcccccaggtagcaaaacagagacaacagcagccccgcctgaccccctgcccctctctgtggaggcccgggacccccgcaataagcaccacatgggtgaggctgtccctgtcagggtcccctgccagggtccctcctggggttctgggccatttgaggggctctttgatgggccaggccggccagagtgaactccgagcactttctggctggtgccccaacctctccactccccactcattcccaccttgaaaaagggctataggtcccctgccctgcccgggtccagtttacaaacagtgtggggtggccccagggcctggccccactctccctgctgtgcccactcctctccagactccacctccccagtgggtatgggccctccacatgccaggtaagtagcaaacccccactccctccaaggaccaggtctcagagaaggccctggtcactgcccccggcccacctggagcccatcggggctgcctctcccagccgcgacttctccttttgccttaggcctcgcgacatcctgat

SEQ ID NO: 184361 - DNA, 311 bp, Homo sapiens
agaaaatacttctaagtcattgaattgtagacttgcctgggcttgttcttgggccagtgaggtttttagaagaaagctcacttcctgcagtagccatggcaacttcaacaatacaggccctaccctgccagctccaatctgtccaacagattcccagggaggagaaatatgttatcacaataagagatgatttccaacttttaacatttttaagtaggatatttattgttattcaattcataaatccactcatcttcaatctcagctacctaccacctcaaaaacacatatacatgttgccagtggagggc

SEQ ID NO: 184362 - DNA, 284 bp, Homo sapiens
aggataaacagcggcagacgatgcctactgttttgtaaaaaacagtgttcagggtatgtattagctgccttctcaaaaaaactgcagtcgatgatgaaggaagaggccctgaacaagaccaatggggaggatgcaggggcagactgtagttccaaaagattcctacactatatcccttatccagaggctgcggggccgtgaggccgcaaggagaacccatgagaaccttcttcggctgtctgccctagtgagatccccacagacagctagcatcgactgccaca

SEQ ID NO: 184363 - DNA, 424 bp, Homo sapiens
ctccctgtttccacgtacgatcccatctgtacctctgtaattgtgcttaccacagtattgtaattattaaggcaacaagctccctgaaaaatttgtcttattcatcttttggccacttgcactatgtaagttgtttatagtaatctatatcaaaacaataacaaaaaattgttaagaaccaccaaaattaaaactgactttattgaagtgactaaaacaccatcagctcgaaagttcttagcttcagcttcctcatttgttctttagtttgacatttgtttaatattatttgttttactaatgagagcctgatttaagtcattttcgtttctaccatattatttctagctgtgtattacactgccttctatgtgtgtgtatactctaggccaagttctcagtatgtaacaatacttggaacttt

SEQ ID NO: 184364 - DNA, 625 bp, Homo sapiens
aagttgctggcctcttgtgaccaacatagctatggcaccaatctttctagaatatacccctgtggtagacacacatacccgccccacctgccctttaggcacaatgaggcttgtcagacttagaagcatatgtgacctctacctccggccacagacagaagactctctttggcattccagatacatctatcatcactccgttataggaagctaagtacaatataatcctttccagagcttatgtccacaacatacctcttgggcctgtcactgtgataagtctatgtttataaatatgcttttctcttcatttatgccctcctaaaattactcctttcttgcaatttcctcagatggcttaataaggtatctaaggtacaatgaaaccttaagcacagttttaagggaaaaaatgtttataaaacatttgtatgggagaggatcgaatcataactccgaacagatgttttcagcaatatttacatttattttatagattataattatcagtgatgtcaacttagtatagatttctcctcatttttaagcctgaaattgtcattctgtgtatgcacatccaatgaatccaacaggtgaggtgatatattggaatcagcttccttct

SEQ ID NO: 184365 - DNA, 638 bp, Homo sapiens
gcaattgaagacacagccagcacagtccaaggaagacaacacagtggtggatatagggtccagccctgaacggagggcagatctagaggaaacagacaaagtgggtatactgcaacatccagatggcacagttttgaaacagttacaaccacctccaaggggcccaagagagctggaattctataatatggtttatgctgctgactgttttgatggtgttcttctagagctacgaaaatatttgccaaaatattatggcatctggtcacctcccactgcaccaaacgatttatacctaaaactggaagatgtgacccataaatttaataagccctgtataatggatgtaaagatagggcaaaaaagctatgatccttttgcctcatctgagaagattcagcaacaggtcagcaagtacccattaatggaagagattgggttcttggtgcttggcatgagggtttatcatgttcattccgatagctatgagacagaaaaccagcattacggaagaagcttaacaaaagaaactataaaggatggagtctccagattttttcataatgggtactgcttaagaaaagatgctgttgctgccagtattcagaagattgagaaaattctgcagtggtttgaaa

SEQ ID NO: 184366 - DNA, 1022 bp, Homo sapiens
ggcgccgctgctgctgttcttcggctcggttctgtctaccgggcagcgccggggccggcggctgcggcggcagaggaacaggagccgggagccgcgttccgccgagagttgggcagaggagcgcccgcgccccggcggcgtcatgggccccctccccgcgcttcagagggcaccagccgcgggaacccccgggcctcctcgcgcccgagcctgagcgaccctcgggttctccggcgccccctccctcgccctattttttttcctactctcgctgccgttaccgcttctgctctccgttatggcaacagagccaccatcccccctccgggtcgaggcgccgggccccccagaaatgcggacctcaccggcgatcgagtccacccctgagggcaccccgcagccggcgggcggcagactccgcttcctcaacggctgcgtgcccctctcgcatcaggtggccgggcacatgtacgggaaggacaaagtgggtatactgcaacatccagatggcacagttttgaaacagttacaaccacctccaaggggcccaagagagctggaattctataatatggtttatgctgctgactgttttgatggtgttcttctagagctacgaaaatatttgccaaaatattatggcatctggtcacctcccactgcaccaaacgatttatacctaaaactggaagatgtgacccataaatttaataagccctgtataatggatgtaaagatagggcaaaaaagctatgatccttttgcctcatctgagaagattcagcaacaggtcagcaagtacccattaatggaagagattgggttcttggtgcttggcatgagggtttatcatgttcattccgatagctatgagacagaaaaccagcattacggaagaagcttaacaaaagaaactataaaggatggagtctccagattttttcataatgggtactgcttaagaaaagatgctgttgctgccagtattcagaagattgagaaaattctgcagtggtttgaaa

SEQ ID NO: 184367 - DNA, 403 bp, Homo sapiens
accttcaaaaccatgcaaataaatggaaattaaataacctcctgaattatcattgggtcaacagcaaaatcaagatggaaatttaaaattgaactgaacaataatagtgacacaacctatcaaaacctctgggatacagcaaaggcaatgctaaggggaaaggtcatagcctaaatgcctacatcaaaaagtatgaaagaacacaaatagacaatctaaggtcacacctcaaggaactagagaaacaagaacaaaccaaacccagcagaagaaaggaaataaccaagatgagagaataactaaatgaaattgaaggaaaaaaaatacaaaaaataaatgaaacaaaaagctggttgtttgaaaagataaataaaattgatatatcattaacaagattaaccaa

SEQ ID NO: 184368 - DNA, 449 bp, Homo sapiens
agaggcgaaacaggtgataaagggagaggcatcagtcagtcctatgcagagatctgagctctgccacttggggaaaaagcgagtcataaaatcctctctgagatgtctgtagacagcagaagctggttggtgaaagtcatgttagagtcacatgcagctgttaggaggcccctctgtgtctactaggagatttgccgctgcagtattaggttgcatttgcagacactttatttcattagccatcaatatttcctttcaccccacacttggcttgcagttctagtgactgccagcgggtaggcgatcaggagtctctgcctccattggcgcctgaccctctcccctgtgtgtcttgtaacttcttttcttataaggatgcaaatcatattagattagggcctcccctacttctatgtaaccttaactaattacgtgtgttcgttccattt

SEQ ID NO: 184369 - DNA, 511 bp, Homo sapiens
gtagaagtgcattctgggagttgcagattgtcatgccctagctctgttacagtatctgaaagccaagtagtggagacagggacacaacctgccttagcacaagagaagtgctccagacaaatgaccgccagacagggtactgtgcacataccctgccatccatctaaggagctgaaaaggggctttggtttctccttctggcttggcctctttcagcctcagagtgcatatatacagtccagagagatcttttcatatctgaactgcaacccagagctaaaattttctcccttggcattcctagagccaaggaaaataggaaatagctatttccacctctggcatggaaagtaaagtgattaggatcaatccagcttcctaggataactaaaaaatctggattaccttttaaagcatcaaacatcaaaacacactagtgagaaattactgagctctaatctaagagaggttaagaacctagagaggtaagcccagtgctcagaggtaagcc

SEQ ID NO: 184370 - DNA, 201 bp, Homo sapiens
gggtctgtccctcctgagccccaccattccccggggcccatcacttcctcgtggctcctgtccccagccctgcggcctcccttatccctctcctctcaccaagcccaggccttggggcacttcccacagtgcccaggctgtggcctcttacaattcccaccctagcccccggcagcagccaggctagttattccctcacat

SEQ ID NO: 184371 - DNA, 338 bp, Homo sapiens
acacttttcagctgggaagagtgaaacaagttaataggaaataaaaggccatattgtctattcagactagtacgttacttttccagagtcatggggctagcaaccactatatgtctgacttctaccaagaagggttgaatccctggttgatcctgtgaggcctgaggcatataaacaagaaacatgaaagggagaggaaaattaaatgaagtgggagtgttgcagaataataatacaattaagggagaaaataatagaggtagaggaagaggttatatacacttatttctcttactatgaacattttacttagaagtgtaaggttgtatgtcttgttt

SEQ ID NO: 184372 - DNA, 1313 bp, Homo sapiens
gcaagaccctgccacgccagcaggtcttcctgggggggccccaggcagtgtgtgttggtgtagagtgggaggtcgctggttctcctcggcgcctgctctggttcatcctccctactcgtcttctggacagtgtggggggccacattcgtacccagccacccgcgtgcaggatgtggagccggtgtggtcagctcctggctcctcctgcctgtgttgcaggtagtatccgggcgcgcacatccctgtacctcggtgcgctccctccgttagctgtccgtctgtctccctgctggccacgtgcacgtttgtcatcacaaagcctccgagtcctgttcccaagggtagtttctagcctcggaccatgttgtgacaactccatcggagatgttgctgaaagtccactcgggccagagaagtggcctaggttgtcttagccggccgggggtatctcgatgcccttcaggtgcttattgggtagaaatcacaaactctggaggtgtaaagtaaaggcagctgaaattctgaagagtgctcccgagtgctgggtagagagaagataaagccttgggatgaggtttggggaagctgaaggctgctgtgtgcattataagtgaccttgaaggtgaacctcgggcgattgctggagtctgtctgggtcaagaggctgggtccaagggcctccaagtggtgcatgggcctctgcctgggcttggggtgcccgtcagagaaaggcctccatagagggctctgtgggagtgagaggtgctggagcccggtttggagggacgcgagtgcaggtttgttggtggaggaaagattcagacagaagtgaccgtgttgttgtagctgctctcgtgtggaaaaggggaaccgtgagcacagagcagtggtggttctggcctcgtctccatggacggccagccggcccccagtagctggaggagagcacagctgggtggagagcaggcccttcagcaaggcaggcactctggactcagctcggcttttctgtttcttaggaattggccctgtattctgtgtgctgggaggtacccagctggtgcctgtggggcctctcttggcaccttgaggtagttgctcgtttcctccaccgggccttatctttcccttctgggcgtttccagccctgtgttttcacactcagggctctggctgagattctgtcagttggtgctttcatctctgcacagtcatggaggccctaagaccttgtcttggatctgggaacttctctcagaatcctcaaacatcaccctggctgtgcatgggagctcacacctgtaatcctaggg

SEQ ID NO: 184373 - DNA, 294 bp, Homo sapiens
ctgggactacaggcacgagccaccacagccggcccaggagaattctttacatccttctgaggaaaatggattactctcaggtagggtggcttcagctcttcagcactgtcctttctagggtctgaaccacagggtggctcaagggtctaggtaggtgcccataatctcttttgctcaaaaatataagccactcaagcaaacatactgtgcgcttgctatgcattgcatggcaacctgcagcctcccgcctcctggccaactagagggccactttcatgctcctcctagacagaa

SEQ ID NO: 184374 - DNA, 171 bp, Homo sapiens
ttgcatacagttcctgctcatggctgcagagaaaatgagatggcaatggggagaagacaggaagaagaaggcaaaatgagaaacaataatgacagatgctgcaatggtccaccttttcgttactgacatggttaattcttcatcttggattgaagtagaaagtactttttg

SEQ ID NO: 184375 - DNA, 1529 bp, Homo sapiens
ggcctgaataaaaggccgcacacgtgtgtcgggttttcttgggtgcgatagaggacctgcccttcagcagcggtggcgccctgctagggtcgtttgtttctttctgctgtgagttagtttagcgtgagattgcagatgttaccatcggctggaattatttcgtctgcgctggagaaccaggacatcagaggaagaaaatcagcagacagaaaaatactggggaaaaaaaaatgccacgtggttctgttcagctgagcttctgctccctccagcacccccacatgggacatttgtttaccccccacgatgctgctcttggagagtcccaggggacaggtttcaagcccttagggatgcagcctgtctaacttaatatgcacagccgttcacatccagggcacagaggcagcctggctttccctggaggcccacggggaccacaatgctgcatttgtctgtggaactgagatttagctgcacattcttgcctgaatgcagcgggcctccagccacagcctgctggcatgggggattccaggagggatgtgcttcatgagccggcaattgcccttctttccagtccccagacccagtcaagattacagatagatgcgttcatcgcgcgcaggtgctggggaagccagtgggacatcactggctacattcaccaacaggattttccaactgcagtatttatcggtttttcaaacgaattcaacatctgtattcctcacccatttactgagtggctacaatgtgtaaggaaatattctcagtcatggggagttagaaaaggtcaaaggcatataagatatggcatgtgctctgagagaactcatcatctatccagaacctactcatcacttttggaaagagaagagaaactagcattctatggagtacttaccatgtgccagatttggagtgagacatagtacgagtgttactcatttacgtctcatggccaacctccaatgtggacatttagcatctccatcttacaagtgagaaatttcactgtagagaggttaaatatcatgtgtcattgattctgtgacatgtattattttcacatttgaacatctgaaatatagatatgtctaaaagggcttttctttcttggtagtaagataactgtaggtctttgcagtagtgtcttagattatgtgaaatatggtattttggcaagtgtacatggctaagaacaagtggaatcagaattcaacttaagtttgcttgactccaaagcttatgtgttttccagtataatgtgctgcagtatcaatggtctgtatgaacaaaggccatatcatttttattgacaaagtatagaaacggggaaatggtgactgaactggaacttgcatcatctaattccataactgaggagacaatagcctggggactgcatgtatcccacaggatgttaaaaaattgagaaaatgttatttcatgatcttcacttctctgttgattataacttatttttgaagaggctaaaataaatggcaaactcttgtatggataag

SEQ ID NO: 184376 - DNA, 1422 bp, Homo sapiens
  misc_feature (2)..(2): n is a, c, g, or t
  misc_feature (6)..(6): n is a, c, g, or t
  misc_feature (8)..(8): n is a, c, g, or t
gncacnangtaagaagtgcttttcacctccccccatgattccgaggcctccccagccacatggaactaaccaggacatcagaggaagaaaatcagcagacagaaaaatactggggaaaaaaaaatgccacgtggttctgttcagctgagcttctgctccctccagcacccccacatgggacatttgtttaccccccacgatgctgctcttggagagtcccaggggacaggtttcaagcccttagggatgcagcctgtctaacttaatatgcacagccgttcacatccagggcacagaggcagcctggctttccctggaggcccacggggaccacaatgctgcatttgtctgtggaactgagatttagctgcacattcttgcctgaatgcagcgggcctccagccacagcctgctggcatgggggattccaggagggatgtgcttcatgagccggcaattgcccttctttccagtccccagacccagtcaagattacagatagatgcgttcatcgcgcgcaggtgctggggaagccagtgggacatcactggctacattcaccaacaggattttccaactgcagtatttatcggtttttcaaacgaattcaacatctgtattcctcacccatttactgagtggctacaatgtgtaaggaaatattctcagtcatggggagttagaaaaggtcaaaggcatataagatatggcatgtgctctgagagaactcatcatctatccagaacctactcatcacttttggaaagagaagagaaactagcattctatggagtacttaccatgtgccagatttggagtgagacatagtacgagtgttactcatttacgtctcatggccaacctccaatgtggacatttagcatctccatcttacaagtgagaaatttcactgtagagaggttaaatatcatgtgtcattgattctgtgacatgtattattttcacatttgaacatctgaaatatagatatgtctaaaagggcttttctttcttggtagtaagataactgtaggtctttgcagtagtgtcttagattatgtgaaatatggtattttggcaagtgtacatggctaagaacaagtggaatcagaattcaacttaagtttgcttgactccaaagcttatgtgttttccagtataatgtgctgcagtatcaatggtctgtatgaacaaaggccatatcatttttattgacaaagtatagaaacggggaaatggtgactgaactggaacttgcatcatctaattccataactgaggagacaatagcctggggactgcatgtatcccacaggatgttaaaaaattgagaaaatgttatttcatgatcttcacttctctgttgattataacttatttttgaagaggctaaaataaatggcaaactcttgtatggataag

SEQ ID NO: 184377 - DNA, 482 bp, Homo sapiens
aggaaggttgcaacctgacagtgataaaagccgacaaaaccaaccctaagctctgccgggtggcgaaagatctttgaacatacagcagagcagggccccgagggacagcggtgctattttcatcttttctttttttttttagagaacggggttccgctatattgcccagaaaggtctcaaaatcctgggctcaagctatcctcctgcctctgcctccctaacagctgggattacagactctttttttttattggtttagagacagggtctcattctgttgcccaggctggagtgcagtggtgcaatctcggctcactgaagccttgacctcccaggctcaagccatcctcccacctcagcctcctgagtagctaggattacaggcacgcgccacgacatccggctaattttcgtatttttatttttaacagagacgggatttcaccatgttgggtcaggctggtctcgaacttctgacctcg

SEQ ID NO: 184378 - DNA, 1557 bp, Homo sapiens
catttgctgaatggctggggatttcaggaggcaattccctttgctctgaatctgtgatatgtgaggagcctggtaacatgaatgatgacatgtctttatctctcatgacagaatcccaaatactgtttgcaattagctgcccacttttctcattcaatgtgtgatgttcactgggagcactgtccttggtatgctcatcagaggcagggagctcccaatctacctgatttgcttcctgatactccaagccccagggttccagctgtctcactgtaaatcgggtttccggctcggaaccttcagccatgtatccttctgtttgaccatcactggggattgccgcacccccactgcagtcatcccagtccaaatcattgtccatatctgagatcgttgcagtggactgagtatcctccaaaatcactctgttccacaagtcgagactgtcaggggccgtctgccgggagttggtgctgctgtgcaaaagtgtgagttgtcggtttgtttcattgtacagttgcatcatgctggggtcgtcgtaactggactggctgctttccccgacgtcatcctccatggagatattcttaccatctgtgtgctctgtcttgagttcattttcatccaggttgtgagtggtatttatttcagaactgttatctgtatgaggtgaagcccacatgtctaggttcccaggacctgaactgattcgatttcgagatgactgttgcagtgactgaggaggaatgtcagtctcctctgccgtggagttaccatcttttgactcaaaaccttcctctttagcaaatggcttgtgttcagtttccttttcgtctccagcaaatgttggtgatgtgtaagagtctgaggtggaataattggtatctaagggggaaggcaccgaatcttctcctaggttggatgcactgtaatcagaacatttgtaagataagaaggaatcttcccaaggaactaggacatctgaccctcctttcttcatattctcctcaaaaaggttccaggaatctaccttttcatataccttgcccctagttttaggatccactaaaccattctgatcttcttttggtggcttagaattagtccatgtgtgatccagatcagaactgggatttccaggtgcaaagatgtgatccctggagtcattgtttttcttgccccagatttctggagctgcttcattgtttatctcactgggtgaattgtccagtagttctgaagaagaaaaggcaaacccactttttgccatggcccactcattcgggtccctaacagaaggtgtcttgctgcttgttgggtgcaaattccaggtattttttaaagcttcatcatgatcttctttaccaaatgcactccaggctgggaatggcgccacagctgctggttcaccatcatctgtaggatttccccagggctcgggcatggctgtgggagagcgaccagaatgccacaaagaagcaaagtcttctatcaggtggtttgttccttggggagatgtatttggcaaaggtgacttctccatgggcaggttctgga

SEQ ID NO: 184379 - DNA, 839 bp, Homo sapiens
cagaataagatcttttcctttctgcccgtggacgccgccgaagaagcatcgttaaagtctctcttcaccctgccgtcatgtctaagtcagagtctcctaaagagcccgaacagctgaggaagctcttcattggagggttgagctttgaaacaactgatgagagcctgaggagccattttgagcaatggggaacgctcacggactgtgtggtaatgagagatccaaacaccaagcgctccaggggctttgggtttgtcacatatgccactgtggaggaggtggatgcagctatgaatgcaaggccacacaaggtggatggaagagttgtggaaccaaagagagctgtctccagagaagattctcaaagaccaggtgcccacttaactgtgaaaaagatatttgttggtggcattaaagaagacactgaagaacatcacctaagagattattttgaacagtatggaaaaattgaagtgattgaaatcatgactgaccgaggcagtggcaagaaaaggggctttgcctttgtaacctttgacgaccatgactccgtggataagattgtcattcagaaataccatactgtgaatggccacaactgtgaagttagaaaagccctgtcaaagcaagagatggctagtgcttcatccagccaaagaggtcgaagtggttctggaaactttggtggtggtcgtggaggtggttcggtgggaatgacaacttcggtcgtggaggaaacttcagtggtcgtggtggctttggtggcagccgtggtggtggtggatatggtggcggggggatgggtatactggattgggctgcggaccctggaggggggc

SEQ ID NO: 184380 - DNA, 948 bp, Homo sapiens
cagaataagatcttttcctttctgcccgtggacgccgccgaagaagcatcgttaaagtctctcttcaccctgccgtcatgtctaagtcagagtctcctaaagagcccgaacagctgaggaagctcttcattggagggttgagctttgaaacaactgatgagagcctgaggagccattttgagcaatggggaacgctcacggactgtgtggtaatgagagatccaaacaccaagcgctccaggggctttgggtttgtcacatatgccactgtggaggaggtggatgcagctatgaatgcaaggccacacaaggtggatggaagagttgtggaaccaaagagagctgtctccagagaagattctcaaagaccaggtgcccacttaactgtgaaaaagatatttgttggtggcattaaagaagacactgaagaacatcacctaagagattattttgaacagtatggaaaaattgaagtgattgaaatcatgactgaccgaggcagtggcaagaaaaggggctttgcctttgtaacctttgacgaccatgactccgtggataagattgtcattcagaaataccatactgtgaatggccacaactgtgaagttagaaaagccctgtcaaagcaagagatggctagtgcttcatccagccaaagaggtcgaagtggttctggaaactttggtggtggtcgtggaggtggttcggtgggaatgacaacttcggtcgtggaggaaacttcagtggtcgtggtggctttggtggcagccgtggtggtggtggatatggtggcggggggatggctataatggatctggtaatgatggaagcaattttggaggtggtggaagctacaatgattttgggcattacaacaatcagtcttcaaattttgtacccatgaagggaggcaattgtgggggcagaagctctggccctatggcggtg

SEQ ID NO: 184381 - DNA, 300 bp, Homo sapiens
aatggagagaatgtcagagaggttggagctgagagagggaggcacaccatgtctgtctatacccagaggccactgaaggacaggaagtgacagggtcagctccacagtctaggaaaaaatggtgcatagaatggatggaggtgaggagaagaatctggaagctcctctaatgctgcaggcaagagtatcacaatcctcgaccagaaggattgctattggaaaagagaaggaagacacaaaatcaaaacagggacagagagtgatgggagagcgcccacctccccgccccttcctccacct

SEQ ID NO: 184382 - DNA, 546 bp, Homo sapiens
gcgtcagcagattcgcattttaaaatgctacttcatttgcagtgtggagcatggactataggggtatggatggtgtatcaaggtgtaacagtggatgtgaagaagatcaattaaaagtcaaacattttgggttatattttaaaaatggtttacttctcccaagattcattctttctgttggtgttaactggaaaactaagtaagagagacaccgaacagaaaaaaacatttttacaaaatattattatagtctgttaaagaaaaaaagaaaaatgcatctgcctagactttatcaagtctcagggttaatttcagcattccaagttctctaccacttttgggactggagtcaggtcgcttgactaagttgggatggtcagtgaccagtagttgcagaacttttgtctatgaatggctgaggccctccatggtagatctatgttgaaagggaagctcaagatgataaatctgctaatctgcctttgaagcagctagatcagcctcaccctgcaggcctgtgctggcacaagtcagtcctactagcct

SEQ ID NO: 184383 - DNA, 438 bp, Homo sapiens
gaagtttaattttctgtgctgtagttacaaatgcatttttaagtacacggagaattttaaatgggcagaagagaatttaaaggtgctatttacataaatgtaaaagcccctaaagtggagaaatctctcataaggaatttcaaacatttgcttgactctggaggcctggcatactaaggaattaggattcctcctaagaattacacatctgaaggctgtcctgaaagactttccatactcgatgatgctcttttgggtaccactacctagatgcacatttagcttattttcttcctcactatccactaactcctgtggtctgcttagggctctgccaaaaccggtggttctcaaaggtagccatggattggaatgacctgggtagcttttaagaactcactgttcagatcacacttcaaaccaaataaatcaaaatct

SEQ ID NO: 184384 - DNA, 507 bp, Homo sapiens
ggtgacagagcaagactccatctcaaaaaaaaaaggatgatagggttagaaaaacaaaaaaacaccatttgcaagcccaaatgaaataactgattcaaagctcaccaagagactcaacacacaggtaaaaggctgctggaaaacaggatattcaaagggaaccaaaacgtcatctcactgatctgctgattgtcaaggggaaacccattgttataatggatagatctggtgaataccaccttaacaccaaatgatcacactttaggcaaaccacctgatgcctgtgttatgagtcaatataacgtacacaggagtaactaagccaaaaaaaaactaaatataatccagtctttaggctcaatcttctactttaggaaatacagtgggaattgagataaaagttaattgctacaagaaaatcagacaaatccaaaatatgggaaacattctatatgacaaatggcctggtctcttcaagaagccaatatcatgagtgtaaaaaaaaaa

SEQ ID NO: 184385 - DNA, 392 bp, Homo sapiens
caaaatgacttcgtagttcacctagccaaaccagttccttattagaataaaagggttgcaaccagcatgccctccaagtggtatatgcgcactgactggaagctgcatctcacatgcgtattgggctctcccacgcttatacacaccaaacactgacacactgaaactttctaacatacctgcaaacctgtcaaataccagctaatgcatgaaaactcccagttatcactcatatgacggcacggtgtgatacctgcttggatttcctagctagtaataacgcaagcgtattttgcagcataagacaaaaatcacaaaaaggcaaaaatcacatgttaaggggctggccaggcacggtggctcatgcctgtaattccagcactttgggaggt

SEQ ID NO: 184386 - DNA, 469 bp, Homo sapiens
tataatcccagctgctcgggaggctgaggcaggagaatcgcttgaacctgggaggtggaggttgcagtgagccgacgtcacgccactgcactccagcctgggcgacagagcgagaccctgtctcaaaaaacaagcaaacaaagaactgagaaccagagtggtctctgtggcccttgggtgggtggattagggagattgttgccagaactggtaactgggagccttgggtttcagcagctccaagggaacaggagatggggcctgggcccaacattgcagggaaagaaaggaaatgaatgaacaagagaagcatctgcctgctggccccagggcagggagcagggaggcagcactgatacttgtttccccagcatgagcctctggatcaggagtgggaggactgaagctggcctcacccaaggtcaggctttgaattgatgttaccagtttggtccgggaatccccaaag

SEQ ID NO: 184387 - DNA, 398 bp, Homo sapiens
tgaataatacactatttgcatatagacacatgttagtgactttcggccctctgatatcttccctcctcattaaattataagatcctttaaggaggttactctgcatcattcactgaaaacaacatttaataagcgctttgtgccaggccctggaatggaaatgattgagatccctcctttcatcttaggcagcagcaaagacaaggaaataaataatgtgaatagcgttatgaagacgctgtgatgggaagacaagaaggagtaactagggagtagatcattctatagaaagaacatgtgtaaagacatgtttgagaggcagaatgcattcagggaaatgtgtttctatggaaggcttggttcaggaacaagaggagactagagcccgatgagaaaag

SEQ ID NO: 184388 - DNA, 119 bp, Homo sapiens
atgtattctatgccacgccacgttcaaagtggttcccatgctttatctcagttaattttgtgaccataacccaacactgttcaattagtgttccccaaaacagtcagaaaaaggttaat

SEQ ID NO: 184389 - DNA, 767 bp, Homo sapiens
cctcccagactcaagcgattctcccgcctcagcctccagaatagctgggaccacaggcgtgcaccaccacgcctggctaatttttgtattttcagtagagatggggtttcaccgtgttggtcaggctggtctcgaactcctggcctcaagtgatccacctgccttggcctcccagagtgttgggattacaggcgtgagccactgcgccgggcctggatatgtttttttaaatcaactcattttattttctccttaacttgtccaaggtggtatctgtaaaatcagggggtgagttgcaaactctttttcctaatactcatgaaagcaagcatatatccatttaaaataaaacattttcctccccgcaccacccaaatcacctcaagcaccccattttgggaaatgctgtgccacactcaagcctggttgcctaggagaaaacttcaggaagcagctttaatgagcagataagaatgatttgcaattagcatcaattgtctgtatgcaaattaaagctcccaaccgcagggccctcttctgcagcgggctcctctcccatttcattgccttcatttctgggttcagcagatcctttccttagacacagggttatttcatacccaccctcccatctcagccacagtctactccaggcctggctgtctttatgtctcggatttcaaatcctcccagttgttcgggttcgctaaggtggtggtcccatgcctggaatgggggctactgcaatcgagacctgaggcccctgg

SEQ ID NO: 184390 - DNA, 233 bp, Homo sapiens
ttcaacatttaatactgctccaaatacagcttttaggttaattttagtatagccaattcttgcttcgtcccatttatagaaaaataggagtgagaagccagtgaataatcccccagatttttttttttttttttttacattgggttacatcagtgttttcattagattcttattagatgttcgtacttgattgctctgttttggtagattaggaaatcacattttattttccc

SEQ ID NO: 184391 - DNA, 734 bp, Homo sapiens
ttcaatcagtcacccaggctggaggaaaacttcatctccaaaaaaaaaaaaagaaagaaaagaaaagaaaatatagaaagaagagcagatgaagggatggagatgatgcatttgtttggggggtacatcatatttaaggtctgctccagttatccaatactgcataacaagccaccccagaacttagtggttttaaacaacagcatttattatggtcacactactgtagtttgggcatggcttggtcaggacagctattctctgctccactcagcctcagttggggggacttgaagactgaggctaggggcatctgaaggtgcacccgctcacatgaggggctactgacaccaggaagacctagcaactgaggtttcctggcacctgtctctgtctgcctggcctccagcatgcagactcagggtgtccaggcttcttacatgttcgctcagggttctcaaggcagcagttccaagagaggcaggtacaagctgtgtggctttttatggcctagccttagaagtcacatggtgtcacttccgtctcattctattagttagaaatgtgtcacaaaggccagcccatattcaaggagaggggaatcagaacaccttttggagggaggagtatcaacgaatgtgtgaacatgttttaaaaccatcaccaagtctttgtgggatgttgatgtgggtagattcaggagtgacatatggatttctaagagaaagagctgg

SEQ ID NO: 184392 - DNA, 217 bp, Homo sapiens
gggggcgacttagaggatccacaacgctgaccctgtcctcagcactaggctgtcatcatcgctgacactcctatgtgtgcctctcctggccctgtgaccctcactgcagaggcacctgttctcttggatttagagtttgtgtttccattgtaatccaggttccacaaactagtagctggtcttcccaaagtggaaggttcatgtacaaagtccactg

SEQ ID NO: 184393 - DNA, 368 bp, Homo sapiens
tttccaatttcagatttttttgtattttggaatatgtgcatatatatgaggtatcttgaggatgggacccaagtctaaaggcgaaattcatttacctttctgtttcagaaaaactgtttttcctctagattccacactaacacaataccaacccagaacactttcgtgtccaaatgtgtagatttcttcccgagagcgagcaagcaatcaattctgcagtgaacaccaattaggtatcctctaattcacttccaacaccatctttctggaaataatatcagatcctgcaggttgaggcctcagtccccaagactgcccccacccacacaccagtagcaagtttagggctccagaacttctgaccaacc

SEQ ID NO: 184394 - DNA, 397 bp, Homo sapiens
cctgctcctgtcattgggcggaagaggggaagtaatgaatgatacttccagacccaaggaatgttaacttcctcctcctctgcttctcacgctttgccaggaagttcagtattttgaatgctacaaatacgcaaggtgggtaaattactattaactttcttcatttcctgacttagggttttttaattaaatcggattccctccatgttcccccgtccccggtcatctagtcttttgtgggttattttcgaaggcttaaaaatgacattagtaccatttcaacatttgtcagacccaagtggaactccccttatcctgatctgcacaacagattcacattttcttgattcagctgttcctcacatcctgtcattgggaatagatgcttaaactgaat

SEQ ID NO: 184395 - DNA, 287 bp, Homo sapiens
gtacttgcaagtggggctgacacagccatggctctgaagttgagcaaaacttacttaaacccagtaagtggttcacttttacctctcttcttccactaacatttaaagcaatgtttcattctttctcagtttttaggacacttatatttggccattactatacaatcatagatatgtgtacttgggtataaaaagtagaatgtttaatctattcatgtctatcagtcacaacagactagaaaatgtgaatgccacttgactaaaattattctaaactttaaaggccg

SEQ ID NO: 184396 - DNA, 397 bp, Homo sapiens
atcctcatatatacccagtccttccttacattgactcaaatgcccctaaaacatgtacaggtactttgtcctaattagggtctaatttgggactttgctttgcatttggttatgccccgtaaccttcaagtagtgtccactatgactctttttttcaggagatcaagatagttgccctacaaaatattgtgccatctgaatctttctggtttcttctttgtggtggtgttaacttgttcttaaatccttgtatatggaaaagcaagatctaggcaacatagatttaagttaagtagatttcaactagaacatattgtaggtggggtcctgtgtgccaccatgcgtctcaccaggagacacagtgtctagaggggccaccattcatggggcacactct

SEQ ID NO: 184397 - DNA, 360 bp, Homo sapiens
cccagatataacttgaacccagtcttttacttgataaagaggagataattgtaattgttgttaatctatcaaacacctttcccttttcagaagggttttaaaaaataaagtagttcttaaggcatgttcactttctatctacctaaaagtgctaatctgtaagtgccctactatatataacactgagaaaatttctgccttatcagaggagggcatgcccaggattggtgccaggtgttgtgttatgctaggctgcctccaaaagttactctcaaaaactactcttcagttgggccctttgtggtcaggaaaaaaaaaaagtgatacagtataatgaaagagaggtcaaaacagttaagt

SEQ ID NO: 184398 - DNA, 210 bp, Homo sapiens
taaagtatcctttccaaatatgtacatttcttgaatttttaagttgacaaggccaaaggtaaattattccagatggaaattttccagaggaaataaaagtgctaaaaatgataaaaggagggataaacagaaaagataaattttctttcttttcttcggtcttttaaaaatgtcaaatcatggctttcggatggggaggtgggggcagca

SEQ ID NO: 184399 - DNA, 466 bp, Homo sapiens
cgatatttgtggttctggcaagaaaaccaaacaagaaagtaaaaggccatgagatgatgccaaagaaatagggggaactgaaaaagtgagaccacagtaataggaaggttaatgatccaaagacgaaacactcacctcatatgcacgcccttcctaagctgtcaagtataaagggaggaaattttctggagggatttatatttccagggtgttcaggaccctacctgctaccctcaattctgcccctaccgaggggttgtcctgataatcactgaacaggcctgtgggagaacctacctcaccccttcccctttccagaatcctcaaggaaacagtaaaggatcgaagtctagatgtgaaggaagtctatctttacaacaacaggcagagacagcaactttcaggcagaagagcagcttgtgcaaaggcctaagctaagagctatgcgtgggagacctccagggtg

SEQ ID NO: 184400 - DNA, 399 bp, Homo sapiens
tttaacattttaacaccattttgaaaggcagtgtgtgaggttgtaagtgtgttattgtactctcttgcttgccaggcattgatgggaaccttttatgtgcacgaactcactgaaatctcacaataatctttaggagagtagcagtagtgacatccccttttgcaaatgaggagaatgaggcttcaaaagatttattaacccgccgatgatcacaagcagtgggacaggctctgacgctaggtctgtgtgcctccaaagcctgcattctgaaggccacatgtgaaaatggacacctgttccaatatttctaaagagttgttttgtgccatcctgttcatcactggccttattgatgctgtcttcaacatctgccactttccattttttctactactgtcc

SEQ ID NO: 184401 - DNA, 496 bp, Homo sapiens
actaggcaataggagttttttcagttcctctataattttatgggaccactgttgcatatgtggtctgcccttgatgcaaacattgttacacatgactatatttgcatcatctttcaccctctagaaggctgctccactgcttatgtcatttacaaatataaaaatatatataattggctacatttttattgcacaactgtgaaaggaaaatatatctcgggaccccaaaatcactaagccaaaggaaaaagtcaagctgggaactgcatatggcaaacctgactcttattctatccctaaataagatacatacaaagattaaaaaaaaaaaaagctacatacctccctcaccatttgcccacaaggaaattccttgtggacaaaggacagacagaagacagaactcaaagttgtccctctgctcacatgagacaaacgcacatctgattgcttcctttgccctattgtttcactaagccagactaaggcataaatg

SEQ ID NO: 184402 - DNA, 752 bp, Homo sapiens
agaaaaatgggataatgtgatgaggagtggctgccggattggctggatctgagtcaggtgttcacccctgtgcatatgaggcattaaccccatggctcactacccacttggaggtgctgtagatccagcttatctgggtaggggtcacagaaggaacagtcaaatggctgatgtcatacgcagactgaaaggaaatgcattaagcaaatgaaaggaacgaatatggctggttagactgatatttaaatgaagctttgtagtgttgtgacatgtggcattttacatcattcttttaatacaaactctgcataaggttacatactattgatcatgaagaacttgatttttactccagatatatcatttaacccagcattcccattactgggtatatacccaaaggaatataaatcactctattatgaagatacatgcacaagtgtgtttattgcagcactattcacaatagcaaagacttggaaccaacccaaatgcccatcaatgatagactggataaagaaaatgtggcacatatacaccatggaataactatgcagccataaaaaggaatgagatcatgtcctttgcagggacatgaatgaagccggaaaccatcatcctcagcaaactaacacagaaacagaaaaccaaacaccacatgttctcacttataagtgggagctgaacaatgagaacgcatggacacagggagaggaaaaacacacatcggggcctatcgggaggggtggggg

SEQ ID NO: 184403 - DNA, 519 bp, Homo sapiens
  misc_feature (401)..(401): n is a, c, g, or t
  misc_feature (502)..(502): n is a, c, g, or t
gtgcatgttgaggacaggagcccaggcgtggtggacatggtgggaatcgctgtgtgcacttgcaggccggtggcatggctctgtaaggcgggtggggagtggccacaggaagaacccaaccccgatgcggagaatccaggatggcttctgccacttttgagccatgcaactgttggtgagccccttcgtgcccttgaacctcagtctccacctgtgagtaatgggagtgatgacagcatctggtcgcctccccacagcggggagaaggtgagggagaatgaacagggtttgctgagagaccggatgtgggatgtgagagaaagagaagaatcaggggcaactccaaggactctggtctgcgaagagagacaggaggaaggaactgccatccccgggccagncaggctagaaaggcagggacggccaagagctcagttctggacgtgttttgtatgacgtgtcccatagttgatgtcctagctcagggtctggagtgaaccanatagggagttaggggtg

SEQ ID NO: 184404 - DNA, 580 bp, Homo sapiens
gtctcaaaaaaaacaaaaacaaacaaacaaaaaaacagatatttctcacagttctggagactggaagtgcaagatcaaagtgttggcaaattgtgtttcttaaagagggcctgcttcctagattggaaatggccatcttctctcggtatcctcacatggtagggagaaaagcagctctagtgtctcttcttataaaggaagtaatgccaccataggggctctattctcatgacctcatctaaacctaattctctcctaaaggccacgcctcccagtatcctcaccttgggggttagggctttatcatatgaattttttttttttttttttttgagacagagtctcgctctgtctgtcacccaggctggagtgcagtggcacaatctcggctctctacaagctccgcctcctgggttcacgccgttctcctgcgtcagcctcctcagtagctgggactaaggcgcccgccactgcgcccggctaattttttgtattttcagtagagacggggttttaccatgttagccaggatgatctcgatctcctgacctcatgatccacccgcctcggcctcccaaag

SEQ ID NO: 184405 - DNA, 652 bp, Homo sapiens
atatactttatacctatactagttttttgtgattatatgttactgtaagtaccaagtgacacaaggagttattagacacttacagtaccattaaatctacatcagaggcttttcagctgttaagagttacacacttactactgttaagagttacagaattactggccctgcacagtggctcacactagtcccagctactggggggccaaggcaggaggattgcttgagtctgggagtttgagactgtagtaagctgtgatcatgcactgcactccaccctcggtgacagagcaagaccctgtctctagaaaagaatatatggccattaaaagttatgattataaaaactgcattgctacatagaaaaatggttctagtatgatgttaagtgcaactataacggctaccatttatcaagtacctagtgggtgccagtcaatagctgggactctttaacaactctaaaatggagttgccagcagatgttaaaaccaagacacaaattatgtactttcttaagatcactggactggaaagtaggtaagctagaatttgaatgttggtttttctggccccagacatatagtgccagaaagaggtgtccatgatgcttaaactatgtaaaaggggtaacagaggacatgaaaaaaga

SEQ ID NO: 184406 - DNA, 581 bp, Homo sapiens
cattgtttgaagggcagtggtacgacaaatgtttactaggtatttttatttttgcaagtttccactaagaaaattttagaaatgatggctgggtgtggtggctcacgcccgtaatagtcccagctactggggggccaaggcaggaggattgcttgagtctgggagtttgagactgtagtaagctgtgatcatgcactgcactccaccctcggtgacagagcaagaccctgtctctagaaaagaatatatggccattaaaagttatgattataaaaactgcattgctacatagaaaaatggttctagtatgatgttaagtgcaactataacggctaccatttatcaagtacctagtgggtgccagtcaatagctgggactctttaacaactctaaaatggagttgccagcagatgttaaaaccaagacacaaattatgtactttcttaagatcactggactggaaagtaggtaagctagaatttgaatgttggtttttctggccccagacatatagtgccagaaagaggtgtccatgatgcttaaactatgtaaaaggggtaacagaggacatgaaaaaaga

SEQ ID NO: 184407 - DNA, 307 bp, Homo sapiens
ccacattcttcatataacgtgttagcaaacacagacatatgcaggactgattggtgagagaagcaagcacagctttgggaagaggcaccctagttccagcagtctggtaggcaaggctgccgagtcaccagcatagacggctctgggtatattccacgtaaatggtgtgcagagggttaggctaggcacatggagcagttctataatcctaggtgttgtagggctaagggccaccaactctccagccctaacagttacgtctccagctgcaaagctatctcttagcaggggaaagggcaaggcaaag

SEQ ID NO: 184408 - DNA, 283 bp, Homo sapiens
caattccccttgtacagtgctcatgccaaaccagaattggaaccgaatcaatctgatgggttcaagaactgtgtgccgtgagacactacaactgtcctgaatgcttcaaaaatgtcactgacatgaaaaacaaaacacccgctaaccaaaccaaacaaaaagagagaaacgtgttctacaataaagaagatcagaaacatgaggacatgctaataaatgtgatttgcaatccttcctggagcttttattacttaagctgtgaagacactcagaggacagatgg

SEQ ID NO: 184409 - DNA, 482 bp, Homo sapiens
ggtttcccccagtggggctcgtgctgccaccacgtctgattatcccggtacggagccgccgcgctttctgtaggaatatccaggtcacgtgagtaataaggcaaattagtgagccaggcagagaacggcgttgtgcaaatagcacatctcccctggaaaacgcgcgtccccccaaacgttccccggttattcttagaaatcttctctcatctccctgtgagacagggttcaacagcccccacagacaggacaaaatgcataggaggctgttagaataacatggatgaggctaaaatacccctcagacacacacataaaaagccatatccaacaacagaacgagctaaaaatattccaggctttggcaaagagcacagagttaaataaattatacaagagccattcatgggagcaagttgactttctctcttacgggaacttggttcaagctaataaaaataataatttactagccactgagc

SEQ ID NO: 184410 - DNA, 319 bp, Homo sapiens
aggctcaggggccggtagagatgaggagctggtgcactggtgcagagctatgggtggtcaaagcgaatctgcctcggtgaaaaggcccaagaggccagctgtcccctcagctgagctcaggacagaccacccctccccagcagtaccaaccagctctcagaggacgctgggatgctcccagccctccttgggctagggctgtggggctgactcgttcctggaaggctggttaaacacacagtcacccagagagtcggtgaaaacctaggggctttgttcatgaaaggaggtgtttgttaggcctaagtcctccggccta

SEQ ID NO: 184411 - DNA, 454 bp, Homo sapiens
atttcccccattcatgcttctcaaatagtctcttaaatctacttttgcctaaaataccctacaccatagcttgaaaatagcataaatttttttgtagtcttttggcagatttctgtcacagtgtttaccttgtattacagttggtgggaaggaacattttttgagctattgccggtgtctttataatgtatacaattttggatgtaacacattaaatttgaactttggtattctgcaccacttcctttgctttatgttttttctttagctcacatagaaaaatattgcacacaagaaagaacatagtggatgctaaaagaaacaaaccctttttaagcctttagtaggactgtttgccagtctgtttttatgtagttttgttacatcacttaggtgagctctacgttagtaaggagaagatttgcagaggatgtcatttctggagaggaaagag

SEQ ID NO: 184412 - DNA, 347 bp, Homo sapiens
tacaaaaattagctaggtgtggtggcacgcgcctgtaatcccagctactcaggaggctgaggcaggagaatcgctagaacccgggaggtggaggttgcagtaagcagtgagattgtgccactgcactccagccggggtgacagagcgagactccatctcattaaaaaaaaaaagttaaataagcacttttgttgtatagtaaacataggagggaaagacagtgaaggataaacatagcttgcttgcttcactcaaaggtacttgtaaagacacccagattcagctttgatttttaagagactaccctgtgacaacttactttggaaaaaatatttgtgtaaatacag

SEQ ID NO: 184413 - DNA, 354 bp, Homo sapiens
cagttcttagattggcccacaaaagcctatttcatatataaatatatctaaagtcctttactaaactaataagtgctgtgtaatctatatatacacataatatttttgtggaaaaattgattctgatttccaatatgagatgccagtaaaacatctcttttctccttctccctgcttctccaccatagatctagtgacagaattagggacttccacaaatagttgtcttgactctgaacataatgggtcagcaaagagtgagtattgacgaaaaagaagagacgtggaagtaaaggagagattatgaatgaggagctagagagagaccaggaccttttcttaccagtttaattt

SEQ ID NO: 184414 - DNA, 524 bp, Homo sapiens
ccgaacgggcgctccataggggcctgtgcttgcagaatcctccagcccgctccccgcgccttttctttctttctttctctgtacgtctctggaagtcctgactgccagagcgtaatgtgtacttgaaactttggggggacaaaaccgcgaacgtaacatacagcccccgcttcctctcttttctttttaaccagactcttccggggcagccgaacctgaaatggtggggatggcgataatgcaagtgtgtctgtgtggggcagcattttctccaaatgtagttcaagaaaaccctgggaaaaggggtgtgtgtgtgtgtgtattctaaatgcagctctttctggggctttaatctcaaagaagaatgcattgggatttctacagcaacttgcacttcaatttggaaagcctcattcaatgcgctcaattgagagcgcattggggatgactttcacagcagttaatactgtaggtcgtccctctgtcagggtgagattattaaaagaagtgcttgtctacgtcag

SEQ ID NO: 184415 - DNA, 312 bp, Homo sapiens
acctgtcctcaccatcccaccccatacctccaagctcacagctagaactgaccaaaggcccagttatttatttacaaagtccatgtccagaactgtaccagcctcagcggtgtggaataaactggtgtggccaggtccattgtgctgatgcctcaagagatccaggctggtacagatgggtctggcacattctgtacctgccagccaagcagagcatccagcttacttctcactcgactccttacataacgctcgtcgggtactctccattccttgggcttaaattccatagtgtaatattagtaaaccagg

SEQ ID NO: 184416 - DNA, 279 bp, Homo sapiens
acccgggtaatttttctgattttcagtagagatgagggctcactatgttgcctaggctagtttcaagcttctgagatcaagcaaccctcctgccacagccttccaaagtgctgggattcgaagccaagcctggctggctttcatgtcttttctatgtagtttatgtttctggatgccattgagagtctggctggctttcacatatttgctatgtcgtttatatttcttgatgttattgtaaatgtttattaaaggaatcttttaaaaactttgttttgg

SEQ ID NO: 184417 - DNA, 445 bp, Homo sapiens
tgtgatgtgtgttgtatatgcgttgtgtgtgctgtgtgttttgtgtgtgtgttgtgtgtgtgctgtgtgtggtgtgtgtggtgtgtgctgtgctgtgtgtgtgttgtgtgtgtggtgtctgtgtgatgtgtgtgtgttgtatgtgtatggtgcatgtgtggtgtgctttgtgtggggtatgtctgtgtgtgtgtgtttgcttgttttcttcccactacaagaatctaaggcccctagggtaaaaatcatgtctgattctcctaaatctccaaagcctggcaacagtgcctggcacagagtagatatttagacaagggaaggaaggaaaaaacaatcttaagccaaactaccacgctgacattcagcagatgcgaaattggaaacacaggtcagctaaaagtccaaagtcaaactatgagtgtgtgatgaagccctagcataccct

SEQ ID NO: 184418 - DNA, 441 bp, Homo sapiens
acccgccttggcctcccaaagtgctaggattacaggcatgagccaccacacccggcctacagcagaatgagtcttattctggttagtatatttcattttctagaaaataaccaagataatatattttaggaatgagattaggatacaaagtatgagctcatttttcttttggtataattgcaaacttaacacagatagttgcaagaataatgcaagaattccctatgccttttagcgagatttaccaattgattatacttggttccatttgtttttcattctttttctatccctccttctcatactctcagatacacacacgtgtgcacacacacacgtttgcattgtgcttttcctaaatcctttgacagtaagtttgaaatctcaagcacccttaccataaaatgcttcagcatgtatttccttacaaggccgttattt

SEQ ID NO: 184419 - DNA, 285 bp, Homo sapiens
tgctaaatagtagtctcttttttggatatgccacaatttgctgttggctgtgaaaattaatgtactgctctttgtgtgggacatatgtttttatttctgtaaataactaggagtttcactttataaagaactgccaaacttgcaaaaaataaaatgtttgtatcatttaatatcccatgagttttataggagtcctaattgctctgcattcttgcagcatgtagtacaatgaatttttacaaatttcagccatccttgtggcgtgtagtacatgttgtgaatctt

SEQ ID NO: 184420 - DNA, 362 bp, Homo sapiens
tgctatcaggaacctttaagaaaagaatgctcaaggcttatgacagatcctgctaaattcaatcactgtcaatctctttcatgcaaatgaatatgtattcagcattatataattgtaacaagagtcaatatcaattatgtttccaatatgacaggtcctaggaaaacatcatattgtataagatgataacatcaataccataaattcttctaagcaaaagttataagttttaatacatcaattggtaagaatgttctcatatatagtccattgtactccaatatcaaagatggacgattagtagaaaagggattcccctgtccccttttgacagctgaaaaggctatctatattccttgagt

SEQ ID NO: 184421 - DNA, 186 bp, Homo sapiens
gtgtggtggaaacgtgtgttgcccatttatgtgtccacagaacaagtgcaaattgaactcagctgacttggaggggggtgggatgtatcctaacagccaaggccacaatccctagaaaccaatatgggccaggtgtagtgactcatacctgtcattcagcattttgaaaggccaaggcaaaaggat

SEQ ID NO: 184422 - DNA, 352 bp, Homo sapiens
gccaacatgttccttcctcaggatctcagcacatgtggttccctttttccctttgcttgaaatacccagatctttacttggctggtttcttgtcattcagattctgcccaaagtcactttctcagaagtagtgttacccttccacgagtaatactactcttacttctctttacagctctcaaattcttatgaagttttcctatttattcatttgtttgattattgtctgtctgcatcaggtaccgtgcaaacttggatgtaaactcagtgatagctgatttctgttcagcattgtttgttgctatagctccagtgcttttagtcatgttgggcacgtccctactaaatagta

SEQ ID NO: 184423 - DNA, 582 bp, Homo sapiens
agactcggcagagacacgtgcgcagatgatgcgatggaatcccagaggctgtggggacccgtgagagggtagggatgtgcgaagcctcaagaagaggtgaggagatgccccgatttccttatttcagagcagtacatgcgttcgtctcacgaaagctcttacaactaaaacaacagcaccaacaaaccaggatcaaaataatcgtgcattttccaggattccatgttggacttctcagtgctttggagatcaggaaataatcatgctgttgcagcagtatggttttgtgtctggattttattcatacaggcatgtgtttacaggcatgagaattctgtattgaaaagaaagtccttgtttttttctaacgtatctttctgttccatcaactgttaaaaccaaattgttaagaacattgagcttcttaggagagattacatgcagctacttaggaccacctcagcaaaatggagttgcctgggtagatagcagcagcagctcaccagccccacgctgccaggctgctggctgctgtccaccaggcagctgtggaacctccatgttctgcctaggtgttgtggc

SEQ ID NO: 184424 - DNA, 409 bp, Homo sapiens
ttttttttttttttagctcatcagctgtcaatagtgtcattgtattttatgtgtggcccaagacagttcttccagtatggcccagggaagccaaaagattgggcacccaaaccatttaaacagcatataaaacaactagatactgttttataactagttgccaaacttaaagttaatgctcttcaggggccattcatagaagctgtttaaatgtagagaaggtgggtgctctttgtcattgttgaattttcactttgagagctagattatgtgtctggtcttaaatctttatgtagactaaggaattgaaagatttctaaagctttattgcttggcagttgttgaggaatgaactaatagattattaagtattaattactttagggtcttcaatgaggaaaattaaaaa

SEQ ID NO: 184425 - DNA, 306 bp, Homo sapiens
agcccatggcccagacatcaccccacccactcctcttcccaggtgtgtcaagggggacacaggagtctgacctggggcctcgataagtgggcacagtgatccctgactagggaaacaggtgtatagttccccacccacctagaattggggcaaggacaggtatggcagggatccagcctccagggccagtccttgtctgtctggtcacctagcaggggtctaaaaccagtgaggtccctctaggtctgggccagggacatgtcaatctccagggagggcggctcctccttccccattgggcccatg

SEQ ID NO: 184426 - DNA, 288 bp, Homo sapiens
tatctcaaagaaagaacagaagagccttgttctatgttatttttaaatgtgtgcgctacagtagcaaaatctacaatttggttgctaattaatagtgtaatcttgagcttcaataatcaaaacaagtgaactggatttttctgtctaatcacatgcagacctaaactctctcattctgtaatgtcttctcatataacaaaattcttcctatattgtgccaatttgatctagctttgtgtagctttgtgtatgataatcattaagcaaaaaacaaattgtgtcaatatg

SEQ ID NO: 184427 - DNA, 625 bp, Homo sapiens
tttatatgctgtgtgacttacacaaattactttatttaccttatttctctaagcctttgtttatccatcttttaaatgagaataacaactattttaatttttatgataatagctgacatttggtaagcactttctatgtgccaagcactatgctaagcactttacatagctgatggcatttaaccgtcaccaccatcttaggaggcaggtattatcattatcctcattgtacaaatacagatgttccttgacttatgatgaggttacatctcgaataccgtaagtcaaaaacatatttgatacacttagcctaccaaacatcatagctcagcctagactatcttaaatatgctcagaacacttaacattagcctctagcttggcaaaatcatctaatacaatgcctattataaacttgaatatctcatgtaatttattaaacacagtacagtgtgcagtattggttgtttgccttcatgactgcacggctgagtgggagctgcagcttgttgctgcagcccagcatcatgagaacgtgtcagtaggccaggaaaatatcaaaattaagaatttcaagtgcagtttctaattaacatatatggcttttgcatcatcgtaaagttga

SEQ ID NO: 184428 - DNA, 354 bp, Homo sapiens
ttatattaaggaggtgcgtttatcataaggaggtaacagaatggctaactcaaaccggttgaagcaaaaggaaatgtattagctctcacagaaggtggttaaggataaggctgggctccaagtttgctcaatccagtgacctagttttgccagcagagaaccagttctttctatgtctacatttgctttgtaacccacagggtcagccttatcctaaggctggttccctcattgtcatgggacggtcgtccatggaaacttgggctcatgctctcttgttaatttgggaggtatagggacttcttgcagctctcttaagactaaagaagaacttttccacacatctccagcaaa

SEQ ID NO: 184429 - DNA, 498 bp, Homo sapiens
gctcagggctcgcagagtgaagggtgcacatcacatgaggcaacagggcgctgcctccgatgttacctccagtacacaggctagcaggaacacagacactttcaaggggcaatgggcaagagaggtctcggcaatccaggcgaagtccgataacccccagacccagagtagaacaggctgctttgtatcagctgagcacatgccggcctgtaggaggcttccgcactggggagctcaagaactaaaaccccacctttaggtcatttgtttttaaagatgctgctgcacagtttaaacttcaaaacatgaagtgcaagatggtcttatcaacgcaataaagtattggccgtgaagttagtatcattctttctgcagccccactggacacatagggcagcccgtggggaagggcatctgtctcctaatcatatacagtcaggactggtctcacaatgcccattgcttctttgggttccaggtacagaatggaaaacacac

SEQ ID NO: 184430 - DNA, 367 bp, Homo sapiens
caaccaagcatcatggaaaaatgtggctccctctgccgacagacatgaacccattttcaccgagctatctaacagaggtgaatacagggcagaatccaaatctgggtaaccagaacactcctgaccatgttacaaactctactgtaaaaacactgtcagcctgtatgtgcattcaagattaaacaggaacctcaaattgccaacttcttttaaaaaataaaatgtgtaactgcacctgtcaacaggacttcatgtgtgtgatcaaaattcctttcttttccatccttcacttatgactccatcttccaaagtaattgcaaaattgaagattccatcacttatacatccacttattcaactgacaaat

SEQ ID NO: 184431 - DNA, 671 bp, Homo sapiens
  misc_feature (648)..(648): n is a, c, g, or t
ctgcgtgcgctgcgtgacatggggtggcgctgaggagcctctgacctcctgggcctaggccgcctccttcatccctgctgtgcccagcctctcccaggcagagtcagaaagctcaggtgtcaggccctacagaactccaatcggttgtcttgccctggctgctgtaccagtgtcaacccctcccctgggggctgggcagtggctgcacccctgcggctcatgctcactgggagaaaaatatcagcctgtgaatgatggttccttgtgccacactaacttgcccacagcttcccactcagggccactcaccctggttcagccaaaggaacagagtgccctgtttgaatattctcaattacacaccttagggccaaagatagcaccatgtccctgccaggaaggcctttcatttcaaagggatgattgacatgcagactctctgctgccacttttcaatgacacggcagtagctgttggttcgctatcaggagaccaacctggtctcagctaaacctggggcctggggggccctgaccctatgtggtaacagtttaggaagggacttctattaggtgtggaaaccctgaatccagtgggggttgcactgggctcgaggaacagaaaggtcacatggagttagagctgacncagacgcgcctaatgtacgagcg

SEQ ID NO: 184432 - DNA, 152 bp, Homo sapiens
tcatgatgattaaaagaaacttttaaactttaaactctttgaggaaggtgagccgccactgcagtggggctggccactcctgcacttgactcacagctcacggagcaactcgttctggactaggaacaggttggccaggaagccttgccaaa

SEQ ID NO: 184433 - DNA, 243 bp, Homo sapiens
ggaccgattctgtgcgtgctttacctcatctaattcatttaaccttcacaacactcccatgagataggtaaacgtatccccattaaacaggtgaagaaacagaaggttagtaacttgaaggctctcacaaagtcaggaagtggttttgttagccgagcatggtggcgcatgcctgtaatcccagctactcaggaggctgaggcaggaggatggcctgagcctaggagtccgaggctgcagtga

SEQ ID NO: 184434 - DNA, 253 bp, Homo sapiens
agtaataaaaacaccacagtatgggtataggactaaataaacagactggagaaataacaggacacatatgagaatttattatgtgttaacgcaggtatcttcaattgttgggagagaactgatggttctgggacaattgtaatccaagtggaaaaaaaaagtcagatccctacacctaatactaatcttcccaaatacataccacatgaattaaacgttaaaatgtgagccataggaggagtattagaagaaa

SEQ ID NO: 184435 - DNA, 453 bp, Homo sapiens
catagaccatgattacgggatcagcggccgtttatataccagccgaaatctatcccacttacgcactggtaactttatatgtaagctccttcttataactaaagaattcacatggtggttagttatggttgcagtctgccttgcactaacgtattttcattttctagaatgtatatgcatgcctgtcttttcctcatggagtcttctagggaaatcctcagcacactgcgagagggcagtcatttccttgttaggtgtgagtgagatgtgatccattccccaaacagcgtgcatttcagtaagggcattgtttttatgtgaggccgatccatccgtatctatgctattgtctgttacttgaagaatattgactgtcttggagtcgtatttctatcacatctctaccctgctggcttcaccatctaagtggtccttcagcaaacttctcaaact

SEQ ID NO: 184436 - DNA, 615 bp, Homo sapiens
aagtgtcctgtctggcggtgccgacggtgaggggcggtggcccaacggcgggagattcaaacctggaagaaggaggaacatggagaggagagcagcgggcccaggctgggcagcctctggatggaggcctgcctgaaggaggagcttccttccccggtggagctggaggagagccttcggaatggagtgctgctggccaagctgggccactgttttgcaccctccgtggttccgttgaagaagatctacgatgtggagcagctgcggtaccaggcaactggcttacatttccgtcacacagacaacatcaacttttggctatctgcaatagcccacatcggtctgccttcgaccttcttcccagagaccacggacatctatgacaaaaagaacatgccccgggtagtctactgcatccatgctctcagtctcttcctcttccggctgggattggcccctcagatacatgatctatacgggaaagtgaaattcacagctgaggaactcagcaacatggcgtccgaactggccaaatatggcctccagctgcctgccttcagcaagatcgggggcatcttggccaatgagctctcggtggatgaggctgcaggtaag

SEQ ID NO: 184437 - DNA, 570 bp, Homo sapiens
  misc_feature (37)..(37): n is a, c, g, or t
gtaccgtgtgtcgagtaagggaggaggaactggaganaagcagcgggccaggctggcagcctatgaacgcctcacagctgaggagatggatgagcagaggcggcagaatgttgcctatcagtacctgtgccggctggaggaggccaagcgctggatggaggcctgcctgaaggaggagcttccttccccggtggagctggaggagagccttcggaatggagtgctgctggccaagctgggccactgttttgcaccctccgtggttccgttgaagaagatctacgatgtggagcagctgcggtaccaggcaactggcttacatttccgtcacacagacaacatcaacttttggctatctgcaatagcccacatcggtctgccttcgaccttcttcccagagaccacggacatctatgacaaaaagaacatgccccgggtagtctactgcatccatgctctcagtctcttcctcttccggctgggattggcccctcagatacatgatctatacgggaaagtgaaattcacagctgaggaactcagcaagatggcatccgaagcagctggcgg

SEQ ID NO: 184438 - DNA, 619 bp, Homo sapiens
gacataccaggtctcaaaatctaccttcttgtctctctgaagaactggaaatattccaccaagcaaaacaataaactaagaataataaaggcatgtgggccagataacaagggacctaacaaaacaatgaaattcctggagaacagagaacaaaaaactagaatgacacagctgtgtagtgggcatagcacacagtgatgcagactgaagctggagaacaagacttcaagaggagcattttcaaaaaaatatatacaactgacagattatctgataggtttcacaatagagggcaaaagaactggggagaagtacatagaaaactaagcaaatcaaaaagagagacaattatcacatataagaaaaacaaaattttgtatgagaagggaaatataagcatatactactttggttcacctctcattaatatttatacaatcacaacaacattgatgctccataatgatttaaccagcttttagattactagttggggcaagggcagaggtaatatatgatatattctgatctaatctaacatatcaaagctaaagttagtaaatccttaaatccagaagttagaatattaggttatatccagatatatggagataatatg

SEQ ID NO: 184439 - DNA, 445 bp, Homo sapiens
tcattgagagggcacgttagaactcagttctggactccaccctcgtagttactgattcagttggtctagagtgggaccaagaatttgcatcttcagtaatttcccaggagatgctggtctttgcaagccacttctggagagtttatatgatgactgtgtgcaggatagtttaggtagggagagactagagatggagacatcagccagacaacgttacaccatccaggtaaagagggagggacaaactccatcactgtataactgaagaaatttttttttatgaaatattaaagcaatacaaaaccaaaaatgaatttctattaatatgatagaaattaattctattaatatgatttgaattagttcaaagttatgtattaggtaaaggggtagcttcctttcaaatgatgtgaaaggatgtcttttatttcttctgatattgaag

SEQ ID NO: 184440 - DNA, 196 bp, Homo sapiens
gataatatctacagtaagactaggtgaccacttaccccctcaaatcccaaaatacaagctagtgaagacgaactacaaacagatacaagacctgcatgatctcagtgtctgtgcaggatgaagaaggcgcaaagcctgacagatgtgatgacaggcgaaaccccatatcatcgactggaactcctggaaagcacca

SEQ ID NO: 184441 - DNA, 189 bp, Homo sapiens
gatccgtgtgtgtgtgtccctgtgagtctgtgagtctgtgtgtatgagtctgtatgcgtctgtgtgagactgtgtgagtgtgagtctgtgtgtgtctgtgtttgtatgagtgtgtgttagtctgtgtctgtgtgtgtctatatgtgtgagtgtgtgagttgtgtgtgtttgagtgtgagtctgcatgtg

SEQ ID NO: 184442 - DNA, 387 bp, Homo sapiens
tggtatgagagcttagatagatagggtgggccataatatggagggttttagatgccaggctaagaaggtttgacttagtgcagagagcacaaatcactgcagatgttaaggatgagatcttgacacaatgataactaacatcgtgtatcacagcttgtgtatcacagcattgtgtatcattgtgcatcatagtttgacacaatgatagtgtctgagaaaaatgctacagttaccagttatgcaaacttctatcctgaacaacatactcccacccactgcctgccaatttaatcatgttcaaaatcaaagacaaagcaattcacattattgcactgagttattcttctaaagagagcctactgtgggatgcgcttgacactaatgata

SEQ ID NO: 184443 - DNA, 231 bp, Homo sapiens
agtaatactagcagtagtaggtgtgttggaatagaataaagattgtgaaccaatactttaaaaaattcacctctgccttgaaagagtgttctgcctgttactccttttttaaagtaacagcacaacaatacaccttctttcacatcctcctttccctcagcaattgctctgttagtatctctttgaagtgatttattattcatagccaacagtagagaaacttttaacttt

SEQ ID NO: 184444 - DNA, 386 bp, Homo sapiens
gaaaactccatctggtctctttcctcccttcttactctggccaccatttaggccctggggtgactgttaataggattcccatttttttatttgccaagttctcccccacccttttacatcctgtgctctgctctagccaggtttttccccaaagccagggtgggaggtggaatcagactgatctgggaggcgctgggtcagccgcacagccacgtggcagatctgtgaggagttgagaacccgcttggaaggggctgggtaggatctcactgtagagaagaggaggaaggtagtgaggaaaaggccacacataccaagatacaaaggcctgaactgagaaggcaggggacgtgtggggaccttgagaagtccagtttgagcagagc

SEQ ID NO: 184445 - DNA, 283 bp, Homo sapiens
cagtagaatttaggcatgatttgagaagaagtaaaaaaagttgctggaggttatcaaactgggttgcaacaatagatggtggtcgatgactataaagcccaatgcaagtcatgtaagtgggatgtggcaaccaccatccaaaaacgatgaggacagtttaaaaagacattccacagcttgactgctacattgaaaacttcgcatcaccaatgtgtatactgccctccttaaattcttcattaattacttaaaatagagattctcaacagtgctttttattctg

SEQ ID NO: 184446 - DNA, 347 bp, Homo sapiens
tcccttaccaatcaacgatcttactcttgtgtcagctgggcacgcatgcttccttttcctgctgtctctgttcccaatgggaagccccaggagaacgggtctcatcggcgtcatcactgtcctctcagttctcgttccaaacaaataacaaaatgaacaaatgaacattcacttggaccaacacagaagatgagcaaacgaggaagtgagctgcttgctttcactgccattcgttgattgtaaaccattcattccaagggatgtgcctccccgttcctggatcccacagcatcctctctgtggccatcaggacccacagtagccccagtggactggatatgttcagg

SEQ ID NO: 184447 - DNA, 341 bp, Homo sapiens
ccggaggctgaggcatgagaattgcttgaacctgggggacagaggttgcagtgagctaagatggcaccactgcactccagcctgggtgacagagtgagactccacctcaaaaacaaacaaaaaacaacaaaaaactggcattctataagtttaaggattcaaaaagaagttaactgatgggaagctcttagaatagtactttgcgctaagttttatctatgattattttttcttctatacatgcatttgaaaaacacaacagacatctaagagtaaggaaaggtttatttcctattttcagtctgtggatggtgtatggataacttcatgattctgataag

SEQ ID NO: 184448 - DNA, 371 bp, Homo sapiens
aagcatctgaaagcaggatgcacgccagaattttgattcttaccttacatcttttttcggtatcagtaaataatttaccacaacctttgttgctgagaactataatgttgttactaacagtatatcttttagaaagtcataatttgaaaaaaaaaaaccttttaattaattaaaaacaatattttactgcattatgaaacacgtctggagaatattttttatatctaagttgttatggtttgtctaaatgcaatcaagggtttatatcgggatcgcgatttttcttttctgggtggggctttatgaagtagctagtgtaaatgcaagtctaaatggaatcagtctaaatgcaatcagtctaaatgcaatca

SEQ ID NO: 184449 - DNA, 532 bp, Homo sapiens
tcattcctaggagaagaagcagcagacaccaatgcaggattggtcttccacttccagtctggacaagatagcatagactcatttctccctgcttctcccagatggagtcttgctctgttgcccaggctggagtgcagtggcacgatgttggctcactgcaacttctgcctcccaggttcaagcgattctaccacctcagcctcccgagtagctgagactacagtgaactacaggaccatgtgaggaataactctgcccagagaaatctgttcaaacctcagggtctgcggcttttatgtgtagaggaacagctctgtcatggcaacctgacaacagagaccacacagacaaagacttgacctgcagtttatctgaatcttggcagaactccttgtgatcttctcggtatacaagaggataagaggtcccttttgttttgatgtcatcctttttggtgtgtgaaacaaggaccacagggagctggcacctttggctacacttcttttcactccccaggtaagtaataaactgt

SEQ ID NO: 184450 - DNA, 593 bp, Homo sapiens
catgtatggatttaattgccatggctaccatgtgaggtcaagaggaaggaaactatttttatccctaatttgtagatgagtacaaaatgcttccatgatttaatggctcacccaacttcatacaactggtgggtctgaattggacctatgctttaagattcctcattctgactcttacttttgtatttaccacccttcccctagtttcaagtttcagtgtgaaatacctcttgacatatgaaggatttagagctcgaaacctcaaatcaaatgttacttaaacaccaatcccagggatgaaatgtcatttaatgaggtgtctaatggcaggattatctgtgaagatatttcactaaggaagggtgggaggcgggaagtggctgcctctggaaggtcaattttgatgtggttgaggtgagatgggaagctcacccaatgggacatagaaatcctaccctccagcccagctccaccctcaactagctgtatagcagctggcagtttccctgactgccctgggtctgtttcctcatcaacaaatagacagaagctcaaactaaagtaatattatgtctttcccagccctaaaggct

SEQ ID NO: 184451 - DNA, 517 bp, Homo sapiens
tgtacctcctgccccacacccagcagcaagtgaactgtctgcctgctgaacatctctggcccttcctcaacagcagcctctcctgccctggggaaagaagcagccccctcctccgtgcccccgctgggtcccagggtatcccactgcctgtgttctttatgtcatctctgcttctgaactgtagcctcctgagagtggggactggtgtgcccacaggccccctagagccagtgtgagccagcagctgctcaatgagggaatggtgagaccctggttgcccaggctggagtgcaatgacgcaatctcggctcactgcaacctccacctcccaggttcaagtgattctcctgcctcagcctcccgagtagctgggattacaggcatgcgccaccatgcctggctaattttgtatttttagtagagatggggtttctccatgttggtcaggctggtctcgaactgccgacctcaggtgatccacccgccttggcctctcaaagtgttgggattacaggca

SEQ ID NO: 184452 - DNA, 438 bp, Homo sapiens
acactgattttttttttatatgctctgtttttcttaggcaggatgatgtagaagataattgcacagatatggaaggagatgtttctctgtatgtgaagcctttaaatccagaacaattaatttcttctcttcttaaaaccccgtaacatcacttgactctggaatttcctattttcttttactttctccattttttttccatctgtccctcctacgaatatgttttacatgaaataatgtattgggttttatcttttgtcccagcagacctgaaaatcccagtatattaccacagacacacataccatctggtcaccaacagggacatcagggccaagagcagtttatacttctttctttagctcacaaactactatagcttgcctgttcagttttttttttttttaatattcagttttgtgccatactctcccccac

SEQ ID NO: 184453 - DNA, 249 bp, Homo sapiens
cctgtaatcccagctacttggaaggctaaggcaggagaatagcttgaacccgggaggcggaggttgcagtgagccgagatcgtgccattgcactccagcctggatgacagagtgagactctatctcaagaaagaaaaaagaaagtgggaaggtaaacagggctatttccactgtgacagctcatgatgttttatttctaaggagtcaaagtccaggactggctcacctaatccgaggccctggtgacct

SEQ ID NO: 184454 - DNA, 667 bp, Homo sapiens
aagcatagaatgtgatgacaaaattactcctgaaagacaaaataccctttgctgagggttctcaaggactaatgtcttctattggtaaagctctacttagaaatgatgtatagttttgcaaaacagggttcagaagggtaaggaaacattcttttcaaatcagccctccaatgttataacaaatttttcacttcttaagtcctgatagagatcatcctgtgaatgtgttaattttttttcttgagtgaggtgttatatattttatcacaatgagttcttaagagagtttatagcaatttgttttaggggctgtttttcatctttgaattttgccatatctacagggaaatttttttatataacggtttgactctaggattatatactttgcaaggcagtaattgttaaattatattcacatccagaaagaaatggttcttactgacttgaatattttagtacattggagcttcatgagaaggctgtcctcaagatccataccacatgactgtgtcatagttggactgtaaaatgctgaaatcatataccttcaatactcaaaacattttaggtggtaaaatgaacctaatattaaaattcatatagtgttagctcatgctataaggtccatggtattaagggggagaaatcttttccagtttagaat

SEQ ID NO: 184455 - DNA, 200 bp, Homo sapiens
caagcgcagtaccatcccatgcaccccctgctaccatgccactgcagcaactccagacagatcaccatacctctcattggtgtctggataggagagttcaccttccatgttcattcacatcccatgttcattcacatctcctcttcctaacatgattacgcatctgggagaccgggatttgccttacatatcctccacag

SEQ ID NO: 184456 - DNA, 361 bp, Homo sapiens
ttatttgtttcttgtgtatctatagatattttaatacatttataagcaaaatgcacacatatacacacacatatacacattcaaaatgtagtgtattttataatttgtgtgtgattgtatgtgtatgttttttcctcaaagtttcctatgtcctatacagtatttccagaaagtttacactgtcatagtagtatatggaaatgtctttttcccataaccttaccacattggattccatcagtctttttgattttgcaatctgttggtgaaaaatagtatctcatttcttgtgctatgttttctttaattaagagtgagtttgaacatcttttcatatacttagcatgtcctttgtctattt

SEQ ID NO: 184457 - DNA, 192 bp, Homo sapiens
gggaggtcaaggctgaggatcgcaccaacatactccagcctgggcaacagtgagaccctgtctcagaaaaaaaacaactcgcagtaagggctcagaaggaagtgaggagcagggcagagagggctttgttgccctagagcaggggtcccccaccccctgggccatggactggtaatggtctgtggcctgtga

SEQ ID NO: 184458 - DNA, 207 bp, Homo sapiens
gctgggattacaggcgtgagccactgcgcctggccaagaccttgtctcttaaacaaaacaaaacaaaatcctcttctaaacaggtctgtggtttcctgaattgactgggaaagggtaccagggaacttgttagcataatagaaatgttccatatcatggttatggtagtggttacatgggtgtatgcagttgtctaaacttattgaa

SEQ ID NO: 184459 - DNA, 354 bp, Homo sapiens
catatattttaggatctctgaggaaaacagatgacaacacttcactgtccctaaataagcttttgactattaccttaaaatcaccatgagttttgaagagttgagaaacttgctggtatttatttctttatattattcctaataaaattaatttctcatctgcgtcaacaaaaagaatattacaacagctttaaaaaaaaggactatgaagggctagccaagaggcagagcgactggaactcccatgtactgctgggaagaatacaaaatggtatagctacgctggaaaactgcttagctgtttcctgtacagtgaaacacgtactctatgacccagcaatttcactcctgggt

SEQ ID NO: 184460 - DNA, 515 bp, Homo sapiens
catggtggtcctatctttggaatatttagagtttaataccgctgtacagaaagtacttgctgtgtacccgcaaaaatagaatcagattctcaagtcagatcattgtgaacaagtatttcatctaaatgtgtgtccagtggaatattaaaaatttgttttaatagtgggagaatcttgttgtccagggctgaccttgtgtgttgcaagacatcgtgaatccttggcccctctgagcactacgttctggtcattatgacaaccagaaaaatagagttctgaaatgtcccctagggggcagtcctgcacccacagaggacctcgctatggggtccttcctgtgacctctgcttcctcagtgcactcagtacttaagcttttccccaccttgaactgctcaaattattagtcctactctcataaacaggaggaaaaccagcgcctaagaagtcactccccctgcagagctccaaggatctgtacagtctgcacttccttttgatgcttgtcttactgtt

SEQ ID NO: 184461 - DNA, 598 bp, Homo sapiens
tttaattagtttaattaatagcaggacttttgcctgtttttaaatagtgatttttttcctaaaggaatcagctttttttttttcattgtgtgtgctttttttattttagagttacaagagttatccctcaggagattccttttaaaaaaagcaggattcatggatgatatgtaacataatttttccgtcgattactggtattatatctaaaataacttgagagtttgaggcctgaggcattaaaaaaatgaggaattcatcttgctttcaaagtactcaaagaaaaactgttctaaaacatttcaccaatatttgatggcacattagcattttcagctgaaatcagttacaatcgtttttgttttagctgaaagaaatgtgaagcatacggatgtaatgttcatttcagttgggtaatatctgagtaatcttaaattgtctaaacagaacaattgagtttgaatttgatatgctacctatagtatataccatgtataaataaatatgcatatgtatttttgttattaaaataatatgactgattaaacataaatcacattttggcagatgtgggaatctttcacagttttctagcacc

SEQ ID NO: 184462 - DNA, 460 bp, Homo sapiens
ataaaataaaaagaaaattataaagaaaattaaataaacctaaataaatacagagatatcctatgtttatagattggaaaacagaatattgttaagatgccaattatccccaaattgatctataaattcaatgcaatccatcaaatccaggaagactagatttttatgttcaaattgataaggggattatagaatccctacggaaatgcaaaatacctagaatagccaaaacaacattgaaaaacaaggacaaagtaaataactcatattcataaagctatagtaatgaagacagtgtcttattagcataaagatagacaaataaatgagcgaaaacagaaagcagaagcagacccagatatacatggccagtgggctttcaacaaaagagcaaaagtgattccataagcaaggattgctttttccacaaatggtgctagaacaaatgaatatgcatatg

SEQ ID NO: 184463 - DNA, 1189 bp, Homo sapiens
aggatgcaagagacagtggtccattgtcatacttgctgccttgtatgctgtcttgtacctctcttaatgtccccgtagtctcttgaatctaccaccatgatttaatccaaccttctgcctattctccacctgtcgccatcctgtgattggttacattctagatttgcaaccttagtgctacccagctgtcatgctctatccccccatcttgttctctcctagacaaccatttcatacctcgtccactttcttcaacctgcagtacttggaaaagtccacacatttctatatcttccctttccccagcatttgtacctcacttctctgtctttacacttcttgctacaaaataaccatccagtgctccagtcaaagggttacctcatcttttagttactcagatccatttgcaatcgtcttttattcctcttttgctctcaagccatatcgaatacattagctaatcctgtccacattatcttcaaaaatatatccagaacctacccatttcatattgcctccactgctacccctttctttgagctcttcttcagtagctgccttaaaatgtctcttccatacattatggcatggtatcctaactgacatcttgtttccctacttgctctccttagtctgttgacaacccagcagccagaatgatcctggagagatgaaagccagagcacttcactcctccactcagaacccggtttcatttagtcaacatgcacgtcctttgagagtctcacccatctcccccatcctgtcccatcatgccctgtcacctctgtcctagtcactcactttttctttctgcttcctgtttctctaacatactaatcaccgaatcagtgatttgcttaaatccccccaagagctccccatttctcccagactaaaagccagattccttttgtggcctacaaggacctacgggatgtggctccttgcttgttctcaccctgcccttactaactctgcctgccagggcatgccagtctaagaatgctcccttatgcctcaccattgctgtttttctgtcactattttattttcttcagatcattattattgacatcgtcttgtacttgatttgtttgctcatttattagctgtttttcccaattcttagtctggcctcgggtctttggctcggcctatgccatgccttccctcgtttcccgcc

SEQ ID NO: 184464 - DNA, 1332 bp, Homo sapiens
aggatgcaagagacagtggtccattgtcatacttgctgccttgtatgctgtcttgtacctctcttaatgtccccgtagtctcttgaatctaccaccatgatttaatccaaccttctgcctattctccacctgtcgccatcctgtgattggttacattctagatttgcaaccttagtgctacccagctgtcatgctctatccccccatcttgttctctcctagacaaccatttcatacctcgtccactttcttcaacctgcagtacttggaaaagtccacacatttctatatcttccctttccccagcatttgtacctcacttctctgtctttacacttcttgctacaaaataaccatccagtgctccagtcaaagggttacctcatcttttagttactcagatccatttgcaatcgtcttttattcctcttttgctctcaagccatatcgaatacattagctaatcctgtccacattatcttcaaaaatatatccagaacctacccatttcatattgcctccactgctacccctttctttgagctcttcttcagtagctgccttaaaatgtctcttccatacattatggcatggtatcctaactgacatcttgtttccctacttgctctccttagtctgttgacaacccagcagccagaatgatcctggagagatgaaagccagagcacttcactcctccactcagaacccggtttcatttagtcaacatgcacgtcctttgagagtctcacccatctcccccatcctgtcccatcatgccctgtcacctctgtcctagtcactcactttttctttctgcttcctgtttctctaacatactaatcaccgaatcagtgatttgcttaaatccccccaagagctccccatttctcccagactaaaagccagattccttttgtggcctacaaggacctacgggatgtggctccttgcttgttctcaccctgcccttactaactctgcctgccagggcatgccagtctaagaatgctcccttatgcctcaccattgctgtttttctgtcactattttattttcttcagatcattattattgacatcgtcttgtacttgatttgtttgctcatttattagctgttttcttccccaacttcttaagttctgtgacatcagggatctttgtacttcatggtattattgccaatgtctttaacagtgtctagcaggcaaacagccaagtgctcagtaggtataggtacttttgttgaatgactatatggcatccaaggtgaaatggaatatttctgagagaaatatgttaggaacattgaccacagaagtagaaagcctt

SEQ ID NO: 184465 - DNA, 468 bp, Homo sapiens
tccagtctgtcaggtttctccactgtaacgttattctttccccccactttccctactgtgacctttggaaggaagtcactatacacagtccacacttaagaggcagggcattatgtcccatctcctcggaaggggagcatctacatgcagtatttggaattcagtacaggagattcttatttattcattccataatttattcatatcatatagactcataagcatttcttttctgtgcttttctaaatgggagctcttcttccattataactgtttgtttgtaaatcagaaaatgaatgatttttaagaagtttattttgtaaccatccatcttatcgagttgtattgtttctattttccattcagttgatcatcttggttttcctatgcatcctccgaaaataatgataattttgctgcctcctttcaataattctacctctaatttctttcatttatctattagta

SEQ ID NO: 184466 - DNA, 374 bp, Homo sapiens
aaatcacagtgtatctgaaaataaattcagtgaattgggtaaggatgggaaaatatttctggagcacttgatcttgttttctctgagctgcttttcaaaagtaagaatttcttgttatactgatattgctttattggaggtgatatggcaggtgagggggtcatccacctttattgcagaggtatccagaatgtgttaaatatacaacatttattatagagggagcaagattttataacctgttcccaggtaaggcctatttctatttgagtttattcaacaccacttttgatctccccaggtgctatttactgattgctggcttattttgtttaaaaacccttggggtcttttctgtcctgtgcctctgaatg

SEQ ID NO: 184467 - DNA, 206 bp, Homo sapiens
ttgtagtatgtttagaagtgcaatgcctgcagtttaattcttcttgctcacaattgttttggctatttggagtcttctgtggttcgagatgaattttagaatttttttcctatttctgtgaataatgtcattgggtttttttgtttggttgtttttgtttttgagatggagtctggctctgtcgcccatgctggagtgcagtggcg

SEQ ID NO: 184468 - DNA, 241 bp, Homo sapiens
tatgagagctagaatacttcgagatcatatatggcaataattgcatgagcacattaaaaggcaatcagaaatactagggaaaaaatttaagaaattcatggtccaaatatgaaaaaactaaaaggtaacacaaatttaaacaactgatgaagagtgagaaaacaaaaaatcccatttgactttggggctagatatctcatcctttgattggcccaggaatcctaaaaccagacccacagtg

SEQ ID NO: 184469 - DNA, 1367 bp, Homo sapiens
gctggtagcgcgccgctctcggtcgcgcggagtgatcgtgtggaatcgcgggtcgcggacgctcgccgccggccatagctcagcctagcgccgccaaggccgacggccctcagcctctgccatggacttcgaggacgattacacacactccgcctgcaggaatacttatcagggctttaatggaatggatcgtgattatggccctggatcttatggagggatggatcgtgactatggccatggatcctatgggggtcagagatccatggattcctacctaaaccagtcatatggcatggacaatcacagtggtggtggtgggggtagcagtttttcttcaccccatatgaagcctgcacctgtaggctctcgggggagaggaacgcctgcttatcctgaaagtacgtttggaagcagaaactatgatgcttttggaggaccatcaacaggcagaggccgaggccgaggacatatgggtgattttggaagcattcatagacccggaattgttgttgactatcaaaacaaatccaccaatgtgacagttgctgctgcaagaggaataaagagaaaaatgatgcagccatttaataagcccagtggaacctttatcaagaaacccaaactagcaaaacctatggagaagataagcctcagcaaatcacccacaaaaactgatcctaaaaatgaagaggaagaaaagcggcgaattgaggctcggcgagagaaacaaaggcgcagaagagaaaaaaacagtgagaaatacggagatggatacagaatggcatttacatgttcattttgtaaatttcgaacatttgaagaaaaagatattgaactgcatctggaaagttcttcacatcaggaaacattagatcatatacagaaacaaactaaatttgataaagtagttatggagtttttgcatgagtgtatggtgaataaattcaagaaaacatctattcgtaagcaacagacaaataatcaaacagaagtagttaaaataattgaaaaagatgttatggaaggtgttactgtagatgatcacatgatgaaggtagagacagttcattgcagcgcttgcagtgtgtatatccctgctttacatagttcagttcagcagcacttaaaatctcctgatcatatcaaagggaagcaggcttataaggaacaaataaaaagagagagtgtcttgactgctacaagcattttaaataatccaatagtgaaggcgcgatatgaacgttttgttaagggtgagaatccttttgaaattcaagaccattctcaggatcagcaaatagaaggagatgaggaggatgaagagaagattgatgaacctattgaagaagaggaggatgaagatg

SEQ ID NO: 184470 - DNA, 180 bp, Homo sapiens
tatccgggaaaaacactagtcacaaacgagtggctgtgtactctgaagaggttttcaatacatgtttttaaaggagagaaggaaggatggggaaggataggcatgaggtgaatggttacattcctgtgagactttagttagtactcagtaaatctacactttacataagataaggtgaac

SEQ ID NO: 184471 - DNA, 279 bp, Homo sapiens
cttaagtgatccacttgccttggcctcccaaagtgctgggattacagacatgagccactgcgcctggccaatctactgactttctaattatgatttcatttatgtcttatctaagtttattatttgtttttgcaattcagttccaagcttgatgagggtaaggattttttctgccttgattgctgctgtatcctcagccctagaacatacgggtgctcagtagatatttgttagatgaattaaacaataagtgaatactgtttcttaatgcagcagtac

SEQ ID NO: 184472 - DNA, 470 bp, Homo sapiens
tacacctgctaagctaagctaattcctgcttagcttagttttaagaatttataggggtaaagaaaaagagaatatatcaggtgaatcctttagtggtaaatttggctgacatgaaaatttattgctaaaggattaagtataggccctgattgatgaagcacagtcagtaaatcatctcttcattccccagttcttaagccaacatcagcaacactgagagaacattagattaaaggcaggtatagaagagagacttagggtaacaagttagtgggtgcctgaaggcatgtgggaagagatgtggtaaaggtgtgcacactattccttacgtgacttaaaatgtcaaggggcttggtgtggtggctcatgactataaaactagagcactttggaaggccaaagctggaggatagcttgaggtcagaagttcaaggccaacttgggcaatatagcaagactgtgtctctacc

SEQ ID NO: 184473 - DNA, 293 bp, Homo sapiens
tgtacagctcagagcgactcttgagtatccctcatcagtctgaataatgcgagcacacgccataatgtctgtttactgacaaactatagaaggcttttcagtcactcagtaaatgaggcagcatccagggagcagttctttcagcaaggaggctggcactgcttaagcacttaataataatgatgatgattattaacagatattgagtacttatgatgtgtccaatattattctaaagacttttatatgaattaactcattttattctctcaacgacattttctttatgaggg

SEQ ID NO: 184474 - DNA, 169 bp, Homo sapiens
gcaataggatcctgagtagggaggagggaagcatgcttgtggaacacctttatgcccagaattctttaccatttgtagattagcagctatacctatactctaggggatccacagccccggtgcctcaggactctgtactcttccccataagctcctgtacgtcccatgg

SEQ ID NO: 184475 - DNA, 567 bp, Homo sapiens
taccacctaaagttgcccatagaggtccaaggagacactgctgatagcagaaagtcttccagaaagaaattaggcgacccacaccaagcatgtatggctttgagtcttacagatggctttttaatagtttagtctcttaacctaaggaagtttctgaagttccggtcagagagtctaaaaattcacattttacctaataaatgataatgaggctatttatcttgtctgtctggattttttcacttgacatttaatgaaatatcccatattacctataatttttatttgaaggtaaaaatagactacagaagaatgtgtaaaatttgtatcaatcagcagagcacaaatcaagtttctaccagtattgcttataaatatttcgatcttatttaggcatggttaagctgtttttgatggttgaacttgaaggtttgttgagaattacattttttgtcttaatttttctatttttaagtgtctgaagcgtgggtgttcaaccttttggcttccctgggccacatgggaagaagaattgtcttgggccacacataaaatatgctaacacta

SEQ ID NO: 184476 - DNA, 286 bp, Homo sapiens
cttctgggaaagtgtgaaaacgtcaggtctccccttcagtggccctggggcacagctgaagcccccgtttaagggctcactttcctgttggatgacagccggctttctggtcctctttcctagttgagtggaaaggcaggaaatgccgtgggggcctggggttttgattattcgaggtttcaatgtttgctgaaactgagaggagaggggccggctagcttgaggtctcagggcctgtccctgcgggcggggcctcccccctgggggcctggtcctttccactgcc

SEQ ID NO: 184477 - DNA, 616 bp, Homo sapiens
taatttaatccatgaacacaggatgtttttccatctatttgtatctgccttaatttctttcattagcgttttataatttttagtgtacaagtctttcacctccttggttaagttaattcctaagtattctgtttgttgctgttgtaaatgtgattgctttcttaaacttttttttggatagtttgttgttggtgtataacaggggcccccaaccctcaggctgcggaccagtgtggtgcatggcctgttaggaaccaggccacacagcaacagatgagcaccaggccagtgagcattactgcctgagctccacctcctgtcagatcagcagcagcattagattcccataggaacatgaaccctattgtgacatccgcatgcgagggatttaggttgcacactccttatgaggtagaacagtttcatcctgaaaccttcccaccagcccctcaccggtccgtggaaaaatagtcttctatggaactggtcccttgtgccaaaaaggttgaggactgctggtatatagaattgcaaccgattttttaaatgttgattttgtgtcctgcaacttgactgaatttattctaacagttttgtgtgtgtgcatggtctagga

SEQ ID NO: 184478 - DNA, 526 bp, Homo sapiens
aaccatggaatgagagaaaataactgcaaatcatgtatctgataagggactagtatctagaatgtataaagaatgctcgcaactaagcaataaaaagacaaacgtggctgggcttggtggctcatgtctataataccagtattttgggtggcagaagcaggaagattgcttctgccagcccaggagttcaagaccagactgggcaacataatgagactccatcgctacaaaaaaagaggcaaatgtcctaatttaaaagtggacactaagcgcatgagaagaggctcaacaccatcagccgtcaaaaccacaatataccactttttccctactaggatggttaaaataaagagaataacaagtattgatgaggttgggaagaaatcagaacctttgtacattgctggtgggaatgtaaaatgatgtagccgttttggaaaacagtttgacagcttctcaaaacgttaaacagagtgactgcatgactcagcaattccacccctaggcatatacccaagagagtgga

SEQ ID NO: 184479 - DNA, 574 bp, Homo sapiens
ccaacgctgtcacagagtatagcagttagggcaagtagtaggttagaaaatgtcctactctactattgcatttgtcctcttcctatttatttatgacagagtctggcactgtcacccaggcggagtgcagggcgcgatcatggttcgctgcagcctcgacctccctgggcttaagtgatcctcccacctcagctacttgggaggctgaggcagaagaatcacttgaaaccgggagacggaggttgcagtgagccgagattgctccgttgcactccagcctgggcaacagagcaaaaattccttctcaaaaaaataaataaattaaaaaaaagtgtaatttgttgcttagaaagtgtatcttcattctcatctaatcagaatttgaattgaagtacatattgatttcaagttttttctccttacattaattttcctattaaaaataataccttgagttctgatctttgttgctaaataatgtttcttcctaggatatctcacggtttatagatcatcttgtacatatttaattccatcactagacaggtatagaactgtgtaaatacagtaagaa

SEQ ID NO: 184480 - DNA, 521 bp, Homo sapiens
taggtagtaggctagtccaggtggctttgcatttcaactgttgctcaaagagagcttgttggttcccctacagatacatatttaagtggaatttggggtctcaaaagcactctttgctcttccttcaacatcaccttctcttagctacctcagagctgcccagtctgcacccctcccaacaaatgccaatcattcgatgacttgctaaaaagagagcacacattagtgagggtaggaaggccaagggaaatggagtattgacatcaggagtttcattttttctgttcagaaccttgacgcactgtactatgcactctctgtttaggagcctcagctgatacacaccctgcttgccaaatagaaaatttagaagagtcttttcctctcttccctcagaaatttgtggtgcctgagtcggttgacatttgtgacaatgattgttgggaatttccaatggagtcttgaatctcaccaccattcccttttcttaggagagacaactaggggggctcctccccatg

SEQ ID NO: 184481 - DNA, 481 bp, Homo sapiens
aggaaaataatgcaaagtctcaaccctgggtttagaggaggaatccttagggggccgccaggacaactgaccaaaaaactctgggaactaacaagcagttatagcaaggatgcagcatacagggttaatgtagaaaagtcaattgcaattgctcttttaacaccagcgatgagcaattggaagttgagttaaaaatataccattatgttcacattcctccctgcaaatggaatacttaggtataaatctaacaaaatatataaaagatctagtaggaaacctacaaaattttgatttaagaaatctaagaagaactaaataaatagagagatagtccacgtttgtagatatgaaggcctaggatttgtgaaatgtcagttctccccaactcgctctatagattccatgcaatccccattgaaatctcaacaatttatcttgtggatattgacaaattgaacccaaggtttatatggagagg

SEQ ID NO: 184482 - DNA, 452 bp, Homo sapiens
ctgctgggaattttgaagatagcccgtcctggccatcactaatagaggtagtcaggtctggcaggggtccacacaattgggtttttatgatatgtgagtgtaagaggaatagagtggtcaagaatgagcctcaagtctatatcctgagctgctggatgaatggtaaagccaggagctgcagtgtataaaactgtaagaaaaacaggtttgggagataagaccaagttctattttgaaaatgttcaatttgaaatgcttattagacatctaatggaaatgtcaagtaggtggcagaatatgttaagtctggagctcaggggaaatgtcagggctagagaatatagatctgggagttattgacagagagatagaaattaaagccatgggactggataagatctcctataaagtgaacgagtgtatttaaagaacagaagatgtttaaagaaatt

SEQ ID NO: 184483 - DNA, 561 bp, Homo sapiens
acttcctcaagtcaaactctccaggcccaccttctgcttcccggtggcatgaacaggcccagctttgacttgagaacagcctctgcaggccctgctcttgcctcccaggggctttttccagacccagctcctgcctcatggcagctgccccaggccaaatttctgcctgcctgccagcagcctcaacaggcacagctcctccctcacagtggcccatttaggcccaactcatgactgtcgggccatttccaggcctagtgcctgcctcgtggctgactcttgaagcccaaaacttcctcaaatcagccttttgcccaacttctgtctactgtcggactctacaggccagcctctgcctcacagtggaccctccagacccagatggtgtctcactgtggcatcctcaggcgaagctcctgcctttccgcagcctctacaggcccagctcctgccttgcagtggcctctttaggccaagctcatgccccatggcgacttttccaggcacagcttttgccttttgcagcctgtccaggcccagaatgtccttaactcggcatct

SEQ ID NO: 184484 - DNA, 153 bp, Homo sapiens
acaccattggatttctcagcttcttagtagtaagatttaccttttgtgatgcctgccatgtttacagcaccttgctgggccctgggaggtgctaggagcagctgggccttggcccatgctcaataccttctataagatgtccagatgaatgcg

SEQ ID NO: 184485 - DNA, 353 bp, Homo sapiens
gaatcaaccaaatgactgcaggaaaaagctgacatggctataggggaaaaaaagaaaaaggggggaggataaccttaatgacctgtatctacaaaagaaattgatgtagaagttaaaaatgtttccataaagaaaattccaagctcatatggttttattggaaaatgctaccaatcatttaagaaagcagtaacagaaacgttttgagttctaaagcattctgaaaactcttcctgaaaataaaagtaatagcaacaacttccagagagtatttgtccatattcaacttgcattaatgacaaaaaccattcagcaaatgtggggaagaaggaaaaattatttaacctgaaagg

SEQ ID NO: 184486 - DNA, 365 bp, Homo sapiens
gaacttaacagaccaaaagagtgactcatccaaatgtctagaattactatattttcctcatatttttcctctcattttaaaggaagaaaaaaacctcaacacagagcttctgcacttatcctattctctaaactaaccactaagcatgaaatccagtataaactgattattctgccaagaatgtgcatatatattaatttcaaggacaagtaaaccaagcagtcaggatttatcaaaaagcatcaattatgatgaaaactggaagggtattgtaaagagcaatgacttatcaatcgatattatataataactgtaactcagagttaatgattaaatagattaaataaacagaatatttttccacc

SEQ ID NO: 184487 - DNA, 221 bp, Homo sapiens
caggtgatctgcctgccttggcctcccaaagtgctgggattacaggtgtaagccaccatgcctggcctacagcaaaatggaatctttagttcttaaagttttatatatgttatcactcaagtagactgttgtttccagagaaaacaaccatctgtacaattgcctctgtacagttccagaatgaacatcctgcagtttctgaaagagcatttgtgagccaa

SEQ ID NO: 184488 - DNA, 643 bp, Homo sapiens
tgcatgctactggcagggtgctgtggaaaatacagagatggatgggaagtactcttgtgttgagaaagaagacggaaaccatgtaaaattttctgcctatgacatgttggggctcaagagaggacagaatcatcatagactgcaatatttggggaaggatttgtggaagaggagacatgggagaacagagaggagaaggaagggcatttgaggtagaacaacccttggaaaggctcagagcaagaacaggtgtctgaatggatgcttttgtatgcgttggttattctgaagaaagaatagaaatcatccaaagtgattacatgcaaacacggacaaatttttgaagaaaccttatgaaaatattctagttgaaaattcagggtaagttccaatttttgttgtgacttttcctgtcttattcagcattcccatggtaacaacttccattaacatatattatgtaaaaggaaatattactttgggttatcactactaatcaagtatccagttaaattagaaataagtgaaataacaaactttcgtaacaataataataaagataaaatagataaaatgtattggatgttttctgtgggcattattcatttaattttattaatattccactttagataggtacttt

SEQ ID NO: 184489 - DNA, 202 bp, Homo sapiens
cttgggaggtggcttagtagaaggttgagtcaggcaagctggggctgtttattcagtgtgctgtgctgtgctgtgctgtgctgtgctgtgctgtgctgtgctgtgtctgaatgcctgggagtttgcgttgttaacctttccagggtgctagatccctttgagattatgatggaagccatgaatccttttcccacacctgtat

SEQ ID NO: 184490 - DNA, 177 bp, Homo sapiens
caataaagcagctctcatgagaaagagctccaggagagaaaagaaaggagcggagtagtgtgtcatcttttgtaaaagaaaaagtcagggttaggggaggatggaataagaatctgtaagctctggagggagagagaagaaaccaagtctgtggctacctcttgtggtggtgggggt

SEQ ID NO: 184491 - DNA, 149 bp, Homo sapiens
cagaccacgtctgagcagagacccggcagggactccagaaggggaaagaccttgtgcttggggtcagggcaagacccagaggacatctacctttctgaacaccatggccccttcagtaggatgcctttgcagtctgaatgtggcttcct

SEQ ID NO: 184492 - DNA, 361 bp, Homo sapiens
ctgcctactggttccgactgatatgtcaagattcaacctgactgtcccctccctggccccggacgggttgggaaccgggctgggaatcatattaaccctgactcacctctcctgcccacatcctttcttttccaccccaatccacctctgagtttcttcccaccactgcaatgaacagctaagcaggagcagccatttgtctctgtagccccagctcctggtgctgggcccagttgtaatcagcaaagtaaaggatggccgtattgcctaagcaataacaaagtcatctgataaaaagactgtcttggccaggtgtggtgacacacacctgtactcccagctacttggagggctgaggcag

SEQ ID NO: 184493 - DNA, 218 bp, Homo sapiens
cttcattttcatgtacaaggtgggtaggacagttatggagttgaaccatatgaaactgatgtctatgtaggtgaaaacgaactgaaaatcaacacatttacaggttcaacttctgatataaccctccttttaacaaatcaaaaaagcaaacctagagattatagcaagggacttggagttacccactggatcaatgatggagccgaggctaagtccta

SEQ ID NO: 184494 - DNA, 310 bp, Homo sapiens
tgagctggtacttctctcctcccacctcccatcactcagtagtttcattaatgaaatgattacccaggaaaatacagaatctcaggaaggaatgtatatagtaaaagaaagaataaaaatgtatggttgattaaaacaacaaacaaacaaaaaacaatgggccgggcatgggagctcacgcctgtaatcccagcactttgggagggaggccggcagactgcttgagctcaggagtttgagaccagcccaggccacatggcgagacctcgactacactaaaaatacaaaaaagtagccaagcatgatggtg

SEQ ID NO: 184495 - DNA, 411 bp, Homo sapiens
agtagtcgtaacgatgttctcctagttccaaatttagtacactactgagatcatacctatttcaaggtatgttattacactgattaatgatggaactgctgcattctgaaagtcaagttttaaaagtgtatttgtcactcttaactcacatctggctttacgtgccacaggatacctctgcagacttctcagcaggttgcttaggtaagcatttgctattcaacaagagtctgactgcaatcatcatcagggttatggcaaaggttaaagctctgattttactgaggtataggagtaaagagaatgatgaggatgagggtaacagtggaggaactgaagaaatgggtggaaggggaaaagaggtcaagaagattattgcacataaggtatggcaggagttctcagatcatg

SEQ ID NO: 184496 - DNA, 501 bp, Homo sapiens
gtatttatagcaatacgaggataaactaatacagtgaatattgttgcaataacatggatgttttgggtttcaaaaccctgttacatcactgtgttagccaggatggtctcaatctcctgacctcatgatcagcccacttccgcctcccaaagtgctgggattacagacatgagccactgcgcccagcctactttttggaaaaatatttttaaaaattcttacatttacatagaatttcaaggaccatcatggcccaatcttagaaaataagaacaaagctagaggcacaacacttcttgtttttagaacagaatacaaagctacataaataaaaacagtgaggtatttgcaggaaaacaaatagatgatagaacagaacagagaactcaaaaactaaccatcatgtatatgctcaaatgatcttcaacaaggttgctataaccatacaataagaaaaagacagtctctttaataaatggtgttggaatactctgtatccac

SEQ ID NO: 184497 - DNA, 478 bp, Homo sapiens
gtaccggaattgagtgtcactggtattgagtggcatgtgaggacacagcgagaaggtggctatctgcaagccagaaagagagcctcacgagagcccaacccttctggaccttgatctgggacttccagcctctaggactgtgagaaaatcagcttctgtgatttagccacccaatctatggtattcttttatggaaacctgagcagactaagaccaccctttcccctgtggcaagacattgcctcatgccgtagctctcctcttctctacaatgtagcttacaggccaagccctttcagaattcaaaacttaaactctttgatctgaagtacccagttcttacaagttcaaagtgttttgctgtcagacccttctgtctgaaatgggcttcaggaactgatctgtcatctcctttgtccttggatgcctcactgtgagggccatggagcaacacggtgtcacctgccacaaacgaata

SEQ ID NO: 184498 - DNA, 526 bp, Homo sapiens
gtaccggaattgagtgtcactggtattgagtggcatgtgaggacacagcgagaaggtggctatctgcaagccagaaagagagcctcacgagagcccaacccttctggaccttgatctgggacttccagcctctaggactgtgagaaaatcagcttctgtgatttagccacccaatctatggtattcttttatggaaacctgagcagactaagaccaccctttcccctgtggcaagacattgcctcatgccgtagctctcctcttctctacaatgtagcttacaggccaagccctttcagaattcaaaacttaaactctttgatctgaagtacccagttcttacaagttcaaagtgttttgctgtcagacccttctgtctgaaatgggcttcaggaactgatcatctcacagtcctagaggctggaagtcccagatcaaggtccagaagggttgggctctcgtgaggctctctttctggcttgcagatagccaccttctcgctgtgtcctcacatggccactcaata

SEQ ID NO: 184499 - DNA, 788 bp, Homo sapiens
gcgactacccaggagaaccagcctccagattgagattggagatgaaggccactcagtcccctccattgcaaaaagaataaaagaaaggagtaggattggccattgcttgcaaataaacaggagggggcagtgttggggtaatgacctccatccggggagggtcaggaagggagctgtcctttactgggcacccaggagatgcacctgtacaatttcattcattctcacgaccacctcgttaggtaggcactatctctgtggctccatttggccaatgaaaaggatgaagatctgagaagtcaagttacactgctaggaagaggttgacttggagtggaaacccaggactgcctgtctgactgctgaatgggtgctttgcgttccttacctgccctcccagggctccagaccgtccctcctgcacatctgcctctcccaggccgtgcctgcatgtccccagccccctccaacagctccatctcccgagagctccttgaatctcctcactcactcctcactcttgcttcctctttggaatccagccacaggcttttttcttccatctgagggagagaaaatggtctcgttccccacccccaggtctttccatcctctcatccatccaaacctaagcatctctcactcctcccctccccctctcttattttttttttctttctgtttatccatcactagaatctaccccccttccctcttgcctgtaggttctgtggctataaacaaatcataacttttattaaatttaagattactttttaatggaatca

SEQ ID NO: 184500 - DNA, 493 bp, Homo sapiens
acgaacatttgcctacatgtacttgcagaggctatctgcatgttgtggacggaaacttccaagcttacatctttggtcacttgcaacctcctcccttctgaaatttgtaatgtgcattggcatgttgaagcttttgagaagttcttcagtaaagaagtctatttaacttaatttaggaacttcttaatgtgtttgtccaggcaccttttaaatttttttgaattgtaatttacattgctaaaatgcacagacttcaaatgttcagttctgtgagtgtttttgagatagagtctcactctctcgcccagggtgctggagtgcagtggcacgatctcggctcactgcagcctctgcctcctgggctctagtgatcctttcaagtagctaggagtatagacatgcacatggctaacttttttctgtattttttgtagagacagggtttcgccatgttgctcatactggtcttgaactccagaaatcaagcaatctg

SEQ ID NO: 184501 - DNA, 527 bp, Homo sapiens
gcaaactgatgcaaggcattccaagaggcctttgagcctcttgcaagtcaagctgattgcaagacactctgcctttgataaaatgtagtggacagagaagcagtggtttcagtggcagagatgacaaattgttgcccaatattcgttgtccccttctttctcaacaaaatggaacctctgattatgctgggtttagcatagccatctagaataatggttacatatcccagtgtcgggcctccgagcccaagctaagccatcatatcccctgtgggcctgcacatatacatgaagatggcctgaagcaactgaagatccaaaaaagaagcgaaaatagtcttacctgatgacattctaccattgtgatttgttcccgccccaccctaactgatacgatatattctgcctggtccttaagaaggtactttgtaatattctcccccgcctttaagaaggtactttgtaatattctccctgcccttgagaatgtactttgtacgcccatcccaaacctataagaactaatg

SEQ ID NO: 184502 - DNA, 308 bp, Homo sapiens
tgagatatgcttcattatcatagttagaaaccatcactcactcttttctcatttttttaatcatttgttcaatatgcattgtgaatctactatgcttcattattattatcctgttgattataacaataaaaattcttttgctacttaaagtctttcatgtggaacattatgcttttcaagtctttggctttgatatttttaccttacaaattccatcatcaaacagctgtcattcaaagcttgttcagcttcatgttctttcctgcctggtctcaaatgccacacttcacttgccattagtgtgacag

SEQ ID NO: 184503 - DNA, 174 bp, Homo sapiens
atcctcattcaggccatcaataaatttggttagattgtaacaaaaaactattgggttactctgtttcagcattagctcttttccatctttttacatgctacccaccagttgaaacttcctaaagtacaggtttgattatcttttttccaactcaacaccaactgctttcaactc

SEQ ID NO: 184504 - DNA, 355 bp, Homo sapiens
ggagggcgtgctgtgtggcgctcccactgcagctgcttctgctgctgttcctcctcctgctgttcctgctcccaatcagggaagaggaccgcagctgcaccctggccaacaacttcgcccgctccttcacgctcatgctgcgctacaatggcccaccacccacctaacccactggggcacacaggtgactttctcctccaacctccatcagtcccagggcccctcctgaggatgctcgccagggaaactggaaacaggggcagggcaaagactgcagagctgcatccatatcagtgctgtgtcagcgttcccagaagacacttactttttatacagtgttgtcttagtctattta

SEQ ID NO: 184505 - DNA, 693 bp, Homo sapiens
gatttgttgtctgtgtctatgattgtttctgctgcaagctggccagatgagttcccctcctgagcctgtgtgaacagactccatcttggtctgatatggtttgggtctctgtccccacccacatctcaccttgaatggtaatccccataatccacacgtgttgaaggagggacccaataggaggtgactggatcatgggggctgtttctcccatgctgctctcatgatagtgagtgaattctcatgagatctgatggttttataagcgtctggcatttcccctgcttgcacttctctctcctgccaccatgtaaagaaggtatctatgacaaacccacagccaatatcatactgaatgggcaaaaactggaagcattccctttgaaaactggcacaagacagggatgccctctctcaccactcctattcaacatagtgttggaagttctggccagggcaattaggcaggagaaggaaataaagggtattcaattaggaaaagaggaagtcaaattgtccctgtttgcagatgacatgattgtatatctagaaaaccccattgtctcagcccaaaatctccttaagctgataagcaacttcagcaaagtctcaggatacaaaatcaatgtgcaaaaatcacaagcattcctatacaccaacaacagacaaacagagagccaaatcatgagtgaa

SEQ ID NO: 184506 - DNA, 544 bp, Homo sapiens
tggagcccaggaatttgaggttacggtgagctatgatcacgccactgcacttcagcctgtgtaatagagtgagaccctgtctcagaagaaaaaaaaaaagcaaaccacacaggtggccatgatgctggaccgctaagcaatctattcctctttgtgttgagccttcattgcaggccatcacccaaaccatctcctcttccccctccaagtgtcctgcaggccaggctttgggaacactcttcagagggcccacacctgccctgccctacccagcgctaccatgtgaatatccttaattttctgtagtacttgcaataggatggactcatgtgtctgtgcccagcagtacaaaaccaggcaggaatgagaatagcagagggtacagtcgggctcagtactccctttggtttggaagtggacagtgtggaggtctcttgccttaaggagcatgtgtgtgagtgtgtggtgtaaacagatttctctcttctgcccttctgaacacaagggtagagtgggcctgccttagtttactatggctgccata

SEQ ID NO: 184507 - DNA, 407 bp, Homo sapiens
ccttgctaagatctctttgttgacaaggtgaagaaatatgaactacatctgaatagcttagtaaatgttcaatttaccctacaaagtgctgattaatgaacagaccaaggaaggtctctagtgggaggccacaggtctctttctgagtactgtagatttcaacatttttatcaattacttgaacgatggcacagataaaatgtttatctaattcaaagatgacaagtttccaggagcaatggcaaatacactggatgacagagtcaagagctaaaaagatcaacagattggaattgcaatagagaggaaataaatgctatttggacacttgggtgcaaaaaaagaaatgcacaaatgtaggaggtgtgaaaaagacttaggagatttaattggatataatttctgta

SEQ ID NO: 184508 - DNA, 261 bp, Homo sapiens
tcccatctccgctgctggttcctccctctccaggccttgaactccagccttctctagggcccagggcttggaataccacctgtctgctaaggattcctggatcctgtctcccctgatgccagcctcctggctcccaccgtccactcatcagctgcactcaaatgacctgcagacgctgtgggggccagttcatccacgcccagtgctcaccctcccaacagcctccccgtctaatgatgacggggtctctcctgcagccca

SEQ ID NO: 184509 - DNA, 209 bp, Homo sapiens
  misc_feature (180)..(180): n is a, c, g, or t
gtcagactctacgaaggatcccccctagttttagaagtttcaatagcagtagtacaaaactaacatggtgagttatcggtgggagtgtgaatgagcaaacgaatgagtgaacatgaagtctaaagccacccttagctgggcagtgtggctcaacacctgtaatcccagagagatcagatnatattgctattgaaacttcttaaactagg

SEQ ID NO: 184510 - DNA, 364 bp, Homo sapiens
ttgagaagaatgtgtattctgtagcttccaagtggaatgttctttcaatatctgtgaggtacatttgatctatggttcagtttcagtccagtgtttctttgttgacttttttgtctagataatatatctgttgttgaaagtaggtgctgacataccctactattattgtattggagtctatctctctctttaagtctaataatatttgctttatgtatctgggtgctctggtgttgggtgcatatataattacaatttttatatcttcttgatgaattgatccctgtgtatcaaatagggatccctatcattatctaatgacctacttgtttccttgtacagtttttgacttaaaatttatttt

SEQ ID NO: 184511 - DNA, 521 bp, Homo sapiens
tgtctctcagaggcggcctagaagctggagaacatgtctcagaactagtaacttccttcttctctcccttcctcgttttttaacttccttccaaattttggtgtctttccgactctaagccaagttcccctcaccaatctttctgtttctagaactttttcctattcttttccttgggttcgtcccacccaagaataagttgctttcactcttgctatttgctacagcaatgcccattcccctaccatttccactagtctaaaatatggattttacacagtggtttaaaaaaagaacgacgttgctaatacgttggtttgggcctagggggatcttctgagatccttccgggcagaggaagaactcttaaagtcatatttgaaggcactgatgctggagctgagaggactggatgatggccttaactcagatgccatggcaccaggtagctgcctcctactgttggtcagtttctcccttcaaggaacaaaaacttccccattctcacttcaccagacaca

SEQ ID NO: 184512 - DNA, 311 bp, Homo sapiens
ttggcatagactaggcatgtgtgtgtttggagtcaggaggagtaccagaagagggaataccagaagagttttcctgcttctggggaaatccggttgtcacaatgaagctaatgcctataggggggagaggaggaaaaaagctatctgagggataactcaagaaggaaagtacataggaacactctgaaggcaggactctgcctggaagccaacagaagacaggaaataatgctataccactgaatgtatcacaagcctaaaaaaactgcatatccctcagatatggatggatcaccaatgtaatgttgagg

SEQ ID NO: 184513 - DNA, 411 bp, Homo sapiens
ctccttgtcagaagggaggggagatctcttggttttccacggctgggatctctatgagaagatatcctttatcgggaggtcggagctcttattagatgtgggtccctgagagtggaagcctggggaggttgggccgtttagaggctgcaaatgtctaggtcactgttcgatggaagaaggaagtttgctcacagggtctggggtgcagagctctgaatactgaaagaaaaggaagttgagagatggggttttcagagcctgtggaagacaagcgttttgttctgacacttgggttgtggcaggaggcagaaggaggatgcttgaatccgggaggcggaggttgccgtgagtcaagatcgcaccattgcactgcagcctgggtgacagagcgactccatgtaaaaaaaacaa

SEQ ID NO: 184514 - DNA, 333 bp, Homo sapiens
tggccgccttcacctttttgccttttaggtttcagcatagatatttcctcctccaggaactctctctggccatcgtcccccttccctgaccccagggtgccccttctaggagtggacctagcaccagctcttatagcagcggctcttacttgtccctgcgtgtcttatgttggttgtgaatactatttcttgcctgcaactcccttctctgactgtgggctccatggcagtggggactgtattggtttcactgttggacccccaaaggcatgagagtgcctagcacatagtaggtgctattcaatgagtgtaggctgaataaatgaatgaatg

SEQ ID NO: 184515 - DNA, 164 bp, Homo sapiens
atcatctttactccaatagtctttgttctgctattaaatatattctattctcagtaccagacctgaaatcattggagtagctttgattaaaggtctggtactgagaatagaatatatttaatagcagaacaaagactattggagttaaagatgatggaataata

SEQ ID NO: 184516 - DNA, 702 bp, Homo sapiens
acagaaagtcatgtcttcaagcagaaagtaaaatatgtagtattttaggtggtgataagtattgtggaaaaaaatagagcagagtaaagggataaagaatacaagggtagggatggggttgcaattttaagtatgatcgggggaaaagtcacagagaaggtgacacttgagcagacctgaaggaggtggtgggatgcagatatctaagggaagaccattccaggcaaagggaagagtaagggaaaaggcagaaatatgcttgacctttggaaggaacagcagaagaatccagtatgtctggagcagaataagtgagggaaaaatagtagacgatgaggtcagagttgacttagggccagattgaagagagccttataagcagttttcaagatttgggtttttacttagtgaaatgggaataactgcaggattatgagcagagaagtaatgtgatctgacataagtttggaaaagaatttttctgcttgtggttctgaattggggagtggaggtggacaagaagcaggaagtccaattaagaagctgttggcattcatccaggtgagagatgataacggcttgaatcatagtaataatcgtggacgtggtgagaaataaacagatgctggttatattctgaaggcaaaatacagggtatttgttggcagattggatatgtagtgagagagaaagaaaaggagt

SEQ ID NO: 184517 - DNA, 562 bp, Homo sapiens
tcacttcataggggccgacttgatctgattggtggaagggacataccacccacaagtccacgtggcttggatatggagggaaactccgcagtcagcacccttagggagtcagtgcagcatggtggttaagcaccctgacttcaggctgggcgtggtggctcacgcctgtaatcccagcactttgggaggccgaggcaggcggatcacttgagctcaagagtttgagaccagcctggacaacatggcgaaaccccatctctactgaaactacaaaaattagctaggcatggtggcacatgcctgtaatcccagctacctgggagactgagacacgagaatcgcttgtaccttgcaggtggaggttggagtgagctgagattgcactccagcctgggtgatggagcgagactctgtctcaaaaagaaaaataaaaagaaccccaactttggagtcactctgcttggcttcaagtctgtctcgccacctatgagctgtgtgttatttaatctttctagcctcagtgtccccatctggaaaatgggcacgatgatgatcgcattta

SEQ ID NO: 184518 - DNA, 672 bp, Homo sapiens
tttataccttgttcctgaatgttggctgagaatgcttctcttggctccagggctggccgctatgaggtggagtctggctagaggctgctagctcaccctacaaacttgttgtatatgctgtgggtatggatgccatctcagactaggtcttagattggcagttttgaagaggccctgagacattataaaggtcactcaaaatcacacagcacctacatcttcttggggctcatgtgattcagagccctgaccttgagtccctgggccagataaagatgggggtggggggtgacagtgaatgaacatcaggaaacctgaatttcagttcctcttctagcataactgatcttgtgactacaggctgtgatgggtgttagataacaggggaggatatctagccccatgctagtcatatagtaggtgcttaatagactctatagtgctgtatagtggctgtcatttgttgtacccatactatgtgctatgtactgggctatgtgcttttttcctaaaaaaaaatttggaataattttaggtttatagaatagttgcagcagggcgtggtggttcacccctataatccagcactgtgggagaccaaggcaggcaaatcacttgaggccaggagtttgagaccaacctgaacctggccaacatggtgaaaccctgtcc

SEQ ID NO: 184519 - DNA, 706 bp, Homo sapiens
agagtcccttcaagatcaaaacctgactagtttgtgggatgtgcatgtctgtagtgcccgtacaacttcagcaattgtttgaaaactgtagccgtagacaatgatggtctgtaaggttgaatcaaaacaaaacccacaaacagctgtatttttatatctaaatgttacataaaaagctgtttgtgctgttaaaacttttaccattaaaggacagaataagagcacattggagcagactgttaccaaactttttttagggcatgcgtgctagcactttatgtacttagtcactcataaaggcaatacctggttcttgtaaattctacaaatggcctcccactactgccaattcaaagtaaaaaacaaacaaaacacccaggtactgctgtacagatttcttgaagtagcctttttcccagctttgcaccccacctgaagatcctgtccactgcagcttgcaggtgcctatacagtgtttccagcttcagaactacttttttaaaaaactcttttcttcttaattgtggtacgatacatataaaagtttaccattttaactgttcagtcacattaagtacattcacattgttgtgcaaccatcaccactatccatctccagaactcttcaccttgcctgagactctacctgttaaacagtaactccacccgcaaccaccattctgctttctgtctctgaatttaacta

SEQ ID NO: 184520 - DNA, 434 bp, Homo sapiens
gtcggtaccggacagcacgcgctaacaacttggtgagggttgataaaagagggatgtataatttgaactttataaaatcaccatagaagcctgtagaatacagtttctatgaaggtcctgcttatcacatgagacaaactgttctttgttcttgttaaagattgtgaacagtgtgttaaataatattaatggctgggattgtcagtacttaacagtaccgtccttctacaagtgattttattgatcgatacagactcaatgtaacgggggcagattatttttactgattttatcgaaaccttaaccaagtttgttagtgtgccacatatctttaaatagatctagatgatgatatagattaagaaaagcaaaccaccatccatctctttttgatctgttaataacttaaatccatcattgttagcgcgtgctgt

SEQ ID NO: 184521 - DNA, 613 bp, Homo sapiens
gaatttgagcactctagatacctcatatatgtgaaatcaaacagtatttgtctttctgtgactggtttatttcacttagcttaatgtcttcaaggttcatctatataatatatgtcataatttccttcctttttaaagttgaatatattccattatgtggaagcaccacattctgtttatccattcactcactgatgggcacctgggttgcgtccatctcttggctgctgtgaacagtgttgctgtgaacatgggtgggcatggcttatgtacctctatttgggcacataaactaaatcagttctaaatggaactgatttagatcataaggctactgattttgtctaatttgacggaatacctaatatactagaacaactagaaaatgctttatcaccatcattagaaataagactaatattgaccatcaattccctcatcactttatcacacctggcaaatgtgtatgttaacagtttaatctgacctcatgctggcctgagagaagctctgtagggaaaaatcttgaggaactgtcaggccatcagtaaacacatcacagtaactgtgtgcagcatatttatagcttcagaacaagacagggctttttcat

SEQ ID NO: 184522 - DNA, 544 bp, Homo sapiens
tgcttgagtgatttaatagaggttacccagctggaaagtggccgagatgggcttaagcttgatgtcttaaaagcccacatttctgaccatttctaaccatttctaattagatatcacatgccttctcaatagaattaatttctattcatccttttttaattagaagaacttacctagaacttcacacctatgtttttctttcattctttatttttttccagaaaccatctgctggaatgaaaaaatatttggaaaaattcagagaaaatacacagaagagaatatgctggcacatacatgtgtaaaaatctctctttgggagcaaggctggccagattaaggaggaagagtaaagctatagaatctggcccagtatctattgctttaatacaaagaattcaaaatcccagggagatagctctttacagaattggggatttaaagtgcaggagttattgacttattggactatcctgaaacagctgtctgttggaaatgcttttctatatcaaatgtcttaaaattaaagcttcatccatttcta

SEQ ID NO: 184523 - DNA, 290 bp, Homo sapiens
ggtgacatctgagctgtgtcttaaaggacaaataggaagtttcgggtggagctggcatctgcaagagcacaaagccccaagagctagctagtgtccacctcgtcaaacagaggtggcgtcagaacaagaaactctccagggcaagaggaaagtgcctagatttcttgtttgtattttataccatatagataaaattgttatttgttttttgtaaggctttcagtcaccttgagtatctggctaaaacctattttttatcttaaactatagacacaaagattaatgttgtc

SEQ ID NO: 184524 - DNA, 264 bp, Homo sapiens
  misc_feature (5)..(5): n is a, c, g, or t
  misc_feature (8)..(8): n is a, c, g, or t
cgganctngaaatgtgagtggctgaccggcgagtgccggtccagtcagttctgagtcacatatctcaggtcaccgtaaatttataaaataccttcagaggcgagccagggaggcaaggcatgcattccctgcacacaggagaagactcaattggaaagaaaatctcctcttttttatgtgtatttgataaccagtctttataatctaaaagtacaaataaggcacgcattataaatctcacttattgtcctaatgagttagcca

SEQ ID NO: 184525 - DNA, 346 bp, Homo sapiens
tttgagcacttccttactttctggcaagacaagatgctccagagtcatcttgtgtatttcctatccctgtcctagaatcagccatttctccacttatagaatgtctttggaaaaagcagcacaagctggggcaggtatggagggaaatgcatcctcattgtattctcttttggatattttgaatatgtcttctttacatatacagatccaaaagatagctttttaaggggttattctagtggttcccattagaaattttcaagtagggtcttgggagagaagagggttgggtgtcagccatactaggaggttgcatcagcaaagttcagtgattaatgggacacag

SEQ ID NO: 184526 - DNA, 286 bp, Homo sapiens
tcctactagtgttgggaaacccaggatggttttgatctcctgacctcgggattgcccgccttggcctcccacaatgctgggattataggcgtgagctactgtggccagcccctgtcagctgctactgaataatcaaataatgatgaggaaaatgctctcctgaatttgctgcagagaggaaattgcttgagtgggagttgcttcacggaatatgacatggtagacatggtccttgcctttgtggactttgcagttagtggggaagtgatgtaagttaacaactgat

SEQ ID NO: 184527 - DNA, 146 bp, Homo sapiens
gctgtcacttgtttttatttccactttgttcagaaataggactgcttacgcctttgaaacacaggacgaaaggctattgaaattggctcgcaatgaaaaagttgactcatgagattttttttccattaaagagatgaagatggcgt

SEQ ID NO: 184528 - DNA, 503 bp, Homo sapiens
ttggctactgaatattaagagttcactagactcgctacctctgaaagcatttaactggatatgtatggatatttgcagaaggatatagcatgatatgatagaaatacaatgaaaatcatgggaggaggcagggacgcaaatacttaaatcgttttaattttactaaaacagtaagaacacaagaacactcagtaattagctaatagttttcaaccatgatatcgttttaacagtaaagaataagcacaacacatacacttcagaaagatcactctggcatcagtacaaaagactaaaaagttccaaaagtgaaacttttcaactttttactctggtaaatataaggagctttaaacactgacttcatttccaggttcttcttccctcagacctaggctaatcccctccctccagtaaaccctgaaatcctgttttcttgaaggttcacattttagaggtgaaggtttgacgccatgcatacaaaccagctatgaaaagaatgt

SEQ ID NO: 184529 - DNA, 350 bp, Homo sapiens
aaaaaaaaatcacagaactccgtagattacctttctgagacaacccctcatttggtctacataagaatcctatattcttattgttaatataacttgactttattgtggtacaagaactattttttcataaccatgtattacattgcaaaccgctctaccattaacatggctttaagggatatcatggccaattgtgtctctgtaattttggggcttttttctgtgtttgcagaaaggagggactggacagccccatcactcatatgtttgtggcaggatgaaattttgagatattaaccagggttccccaagctcctttcctactcagtcagcagcaggaattgcttcag

SEQ ID NO: 184530 - DNA, 400 bp, Homo sapiens
tccagacaggccaggatgaacttgaagtgagaaagagagagacgggacagagactagctatgtaactacttcgtccaagtaaagaaaagggatcaaatggtggtcatagggatagacgtaaaaacaggaatatgagaatcaatcatgtttgtgtttttttaacagacacccctctagcagtgtgaaaaacttatccataggcttgaacgtgaataccaagctcctgcaatagtccagatgaaagatggagaagtgggcaatgcaaagaaaggtagttatgtttttattaaagattaatatgagaacaagtgctctatatccatagaaaaaagaaagctaagagatggatagactcaggtccaaaatgatctcaaagaatgaaataatgagctatacttag

SEQ ID NO: 184531 - DNA, 350 bp, Homo sapiens
gacttgcccttttcatgaggcggccgttcccatttgttcttggggaactgcgtagcaccaagctacctgacaggcatggtggtcatgaagtctctgtgttaagatcaggaaaccaaggccagaatatgctcaacattatagtggagcgaagctcagacagaggattagaactctttatcctgatcatttattcaaaacactttattgactgcctaccctgatgcactgatggcttcaggaacacaaagatgatgagaataatccctctccccagcagagcctctggttttaaagtccattcagacctgaacagaaggggagagatgccctaataaagacgtgtataaaag

SEQ ID NO: 184532 - DNA, 288 bp, Homo sapiens
cagttccacccctctgcaagcgtgctgaggccagttcatcctacctgtgagaggctgggtgccttgtgcagaaggcagcctacaggagttaccaaaaaagcagactgtccctagcctactcaggactttgctaggctgaaggaaatattaagttggccaatcaattcccattgcctgctgcaaatgctgagcctttgtcagccagggaaacacagtcccataacaaggcaagctcatcctccatccctcggggcttctgctcaggcaatgtaaggcgcagcccatttg

SEQ ID NO: 184533 - DNA, 615 bp, Homo sapiens
gtcctgtcccggggagcagctgagctggtcgggggtctcgacctgtggggctcagaggactcggggtcatttcactgggctgtggcgatgctgggctgtggaggtaggcctagggctcctgtaggcctcagtgagactggcggccgatgcccagtgttcaccctgctggcggcagtcaggaacatgttcacaaaggctttaccttcaagtggtctagaggtgatctgaggtggagtaacaggtccagataggctacgttcataaaacagcttcagcggggtttaggaacactgtgcatttacgggacgcagtgggtcagagtgctgctgtccgtgggaggtggccccagggcaggtcagtgggcacgtcctgtggtaagtgggactgtggatgtgggctcaggctggactcagcagccctgctggataccaaggcctgcaagggctggccccctggtgaattgtcccgtgccctgtgtatctatgagtcctgcagagatgacaaatcaggggacggggtcatgtctagtcaccgtctgggaaaatgctccaggagtgaacacatttcaggctcttgatggatgtacctccaaactcttctctggatgggtgggcc

SEQ ID NO: 184534 - DNA, 296 bp, Homo sapiens
ctgcctctcaaagtgctgggattaaagatgtgagccactgtgcccagcctaataatttccagtagtattcatgatgatctgtttttctaagaataaactggcatgttttagttcagccctggataccagtggccttgacttatatttctatacaaagattaaagatggtaatgtgcagataccctgagttttcagtttaatcttgtggttataactgaagatttcaacatttttctaaattgttaaatatagataaatgataaaggtatccagatgctactctaggtcctgaggat

SEQ ID NO: 184535 - DNA, 618 bp, Homo sapiens
  misc_feature (1)..(1): n is a, c, g, or t
  misc_feature (22)..(22): n is a, c, g, or t
  misc_feature (25)..(25): n is a, c, g, or t
nttgcattgtcttccagcctgngcnaagtgcgaggctgtctcaaaaaaataaaaataaaataaataaaaattggccaacatggtgaaaccccgtctctactaaaaatacaaaaattagccgggcatggtggcatgtgcctgtagtcccagctacttggaaggctgaggcagaatcgcttgaaccctggaggcggaggttgcagtgagctgagatcgcgccactgcactccagcttgagtgacagagtgagactgtctcaaaaaaatgacaatactaataaaaaaagaaaagaaaaagggactacccaacaagtaaaagactcaggtagaattccaatgaagttggctgggcgtggtggctcatggctgtaatcccagcactttaggaggccaaggcgggtggatcatgaggtcaggagttcaagaccagcctggccaacatagtgaaaccccatctctactaaaaatacaaaaaattagcagggcgtggtggtgggcacatgtaatcccagctacttgggacgctgaggcaggagaatcacttgaaccggagaggcggaggttgcagtgagccaaaatcatgccactgcactccagcctgggcgacagtgcgaggctg

SEQ ID NO: 184536 - DNA, 210 bp, Homo sapiens
gtaaagcaggactcagggtggtgggggaggtgggcagtgagggataggattcaaataaaaaccattctttcccttggaatccactacacaattaaccaacaaatcccataagtggaccttttaggaagataacatttctatccatgagcatagccactataatcacaagacatttatctcaagcaagatagagtcaagatactctcacaa

SEQ ID NO: 184537 - DNA, 251 bp, Homo sapiens
gacagggcatgtgcctgtgtcccagccacttgggagacgaggcagaagaatcacctgagcccgggaggcggaggttgtagtgagccgtgattgtgccatggcactccagcctgggtgacagagcaagaccctgtctcagaaattaaataaaatacacacacacacacacacacacacacacacacaatcagccaagacagcaccacctgctgagctcccaaacactgtttctggtcacatccagaagtaca

SEQ ID NO: 184538 - DNA, 532 bp, Homo sapiens
ccctactctagagcatcccccctaggtatatgtcgtgccaaggaaagaacatagcagcaaatggccactcctcaccttggtatttctgggaattttatgaggctactgtagaaaaatggtttgatgaaatgaagcctgtgatcacctagtaaattgtagagaaatggcttccacatgtgaggttgtcctttcccgaatacatgaccttaaggtgaaatggataaaacttctggcttggaaaggtagttagtataattaggaccatatttatttttcaaatacagagttgaggacccctgtcgttttctgcaatgcaagtctaagtgggctcggagggactgtgaactctggtcctggaactgatttcataacctggggcacgttcatggaaatatacggttggaagggagcttggacaggtctctacagatcccactgctgattggttttgatagaagaaatcacttacgtgcctctgtagttgactccattttaataagacagcgcagcttcctctcttctcagctttgaa

SEQ ID NO: 184539 - DNA, 222 bp, Homo sapiens
ccaacctcctttcagtgcattgtggcaaatggtggggctccaggattcttgtgggatgtctttatcacctctcccctctgccccacccccttttctgtgatctgtacccttgcacttgtctcccatagaggatatggcatcaattcaggtcacacctgaattgtgggttttgatggcccacccagtttctcacaattctgagttgaaatttaaaaatgggaa

SEQ ID NO: 184540 - DNA, 393 bp, Homo sapiens
gaccacaggcatgcaccaccatgcctggctaatatttgtatgcttttacagagacagggttttgccatgttgcccaggttggtctcaaactcctgggctcaagccatcctccatcctccctcctcggcttctcaaagtgctgggattacaggggagagccactgtacccagctgacaatttatgatataaccaaatagtgtaggataaacatataacagggagaccttatttaatctggtgtgttaaggaaagcctctctgagggaatatttcagcggagacttgaaggatgaggaagacttagtcaagtaaagagtatggggaataggatttcaggtataggaaacacactctgatgctggggagtgtttgctgggttaaattagaagaagg

SEQ ID NO: 184541 - DNA, 554 bp, Homo sapiens
ccggtgcaagttctgttcatgctctgattgggggtaaatctgcaaagcccttgtgtgttgatgattttcttaaggcctctcctgattttataactgtatagtcaaaacttttttcatttgtgtactgtggctcatttttattttgtcaggtatgtgctggtcatacttgctggatggactgtgtaaatcaggggtctgcctcttgtggctcataaggtgattttgagtgacatggccaaagtcagccctaggcacagtcaagaagtaggcgaagtttctctttgccttcccagcttttctgtccgtgcttctttcttctctcccagtacctttcagtgaacctgatccccacctgccagtgcctactgtctttcttgctcaacagtgtatctcctttgtaacttgctaatgatggtataaggtataatccatttcacgcatatttgcatttcaaaaaggaactctttaagatggaaaagccttcaagatccacaggaatgaagctataatggtgaagctataattggtcattagctccaacagaggaagagaga

SEQ ID NO: 184542 - DNA, 308 bp, Homo sapiens
ctctgctaggccttgctgtatatatctcttcatttgcctggtctgatttatattaaactagatatagcaccagaagataactgcagtgtgatgggatacacttctgcctgaagaacttcctccatctcacagggcagatctactggcaacaaaccccacaacttttgtctgaggaagtcttttgtgggactaggtctcattctatcacccaggctacagtgcagtggcacaatcttggctcactgcagcctcaacctcccaggctcaagcgatcctcccacttcagtctcctgagtagctgagaccac

SEQ ID NO: 184543 - DNA, 628 bp, Homo sapiens
tttttcttgtcaaggtattgtttatagaatttgttcaatatccattactttaaggcctcttacaaaaatattggataatccataaaaatttctctaagaatattttgtttgttagtggtcaattttaatacttaaaaatataaagttgctatccttggcaatctggatcaacatcttggcagctatctgttaattatataatatctgtatgagctcaatattttgacaagttaccttacctcagtcagtagtttattcttgaagtttctgatgatactcttttaataaaaaaaaaagtaattactttctgaggtattttttccctctcaaatgtcagatttccatgtactgaatatgcttgaaataaagtacatatgtaagattttttatattaaaaatgtctgaagcaaaaatcagtaacttaaaatttgaaataaaaatgcaagtgtataacttgatatcagaagatattaagtctaagcacttttgtgggctgtaaatcttgacctcttctaataacctgtcttttcttcaaataggttcttgcattggtaaaagtttaaagaaatatgaatatatatgactgtgacaataagaaaattaaaaaaatgaaaataatcactctcaa

SEQ ID NO: 184544 - DNA, 723 bp, Homo sapiens
cttactctccttgaatacacatatagatagccataagttttactaattctgtttaaaatataaacgttatacagcatctcagctctggaattctccaattagtgaggccccctcatcactaattaaatctgagctatggagtaagctggtcttttccttctccttggttcttcaatccattcaaacactaagtctatagattttccactagcacaatctccagtctctgcaacctctaagtcatcttgtgatctgatggcttttaccatatacttctctaaaaacctacaacacctcttttctgcctgtcacattaaacttttcagttgacctctcagcctgcacctccgctggccctctattaccctaagcagcctagcttccactgctcaccaaaacaaaattcctactctgccacaccgctatgatgatgggtcccctgtactaccacacacaccaagctcattctcctttggtgtctttcttcttggtgcttcctgcatcaggaaaccccactcaaagatggttttatgttctcatgaaaaaactggggcattccatgctattttgcggtcttccatggttctttgagagtatgtacttgttattaccttaggaagttgtgaacaaagtaatacaaataaattctcacaatgtattagcactcaggaggttttaccagtgctaccacctacaagatgcccaggttgtaaaagggagagc

SEQ ID NO: 184545 - DNA, 510 bp, Homo sapiens
ggaacatctatgggtcccagagcggctctgtcctgctgctgcaagggagatcgaacctcgggacaggagtggttcctgcagcccttggtggtgctggtgtcatggccctgctctgtatctgtctgtgcctcatcttctttttaatagtgaaagcccgcagggagcaagcagctgggagaccagagaaaatggatgatgaagaccccattatgggtaccatcacctcgggttccaggaagaagccctggccagacagccccggagatcaagcatctcctcctggggatgcccctcccttggaagaacaaaaggagctccattatgcctcccttagtttttctgagatgaagtcgagggagcctaaggaccaggaggccccaagcaccacggagtactcggagatcaagacaagcaagtgaggatttgcccagagttcagtcctggctggaggagccacagcctgtctgggggaaaggacaagtcagggaccacttgctgaagcacgaagag

SEQ ID NO: 184546 - DNA, 317 bp, Homo sapiens
cgaagtgaacagagtacatagttcatcagccgtccagtacagcaacccaggaaactgcactgggtctctttgcctaccgtattaacattaaacattgatgttctgtatactgtactttactgcacccagatgactttcaacaactcattgaaccggatagcttgccgacccttaccctagtagagcttaagaactgtgggagacagaggtcactctgccaggagagtgccgcagggtgagcctctgcagggcctctgttggtgggtgggccactgcagggcagcgaggggtcccctgaggaggggaccattgagccg

SEQ ID NO: 184547 - DNA, 181 bp, Homo sapiens
tcatgtctcttctgtcagggaatcccagcagctctcaatccaccctatggtttacatcccaggatcctttatcttttggagtaatttaatgcatgattaccagaggtgtcccatatatagtagccttcctaagagttacatttcagtagttgttgttctttgatcctggatgaatttgaaa

SEQ ID NO: 184548 - DNA, 470 bp, Homo sapiens
tccatttaatcttattgttgaatgagtcatagtataacctgtacacagacatcacaccttctgcccaaactaattaactaaatataaactaacaaaaccaacatgcataattctgatactactacttgagccttacgggacggcggtgcactacagtgagacctttaacatgtgaaccacatgctcacatacttgctcctgtcccagttcccctccttggcagataagtacttatcttggcagataagtacttgccaagtctttgaacaagttcttaaactagaacgttgggcatagagcctggatctttgcagacctaggacaaaaaccaggctcctgcctctcacaggcagagcggggctttgagcaaactgcataatccatgcctcggtctcatctgaaaagcatgcacagtacctcctaatgctgggtcacaaactttttctgtaaagggccagacggtaaatagt

SEQ ID NO: 184549 - DNA, 548 bp, Homo sapiens
actctagacggatcccccgcttggcgtcttaacagagcttgcgtattagtagtaaagaaacatgaaatttcaattagatagatgacaaatagataaaatttagatgagatagatataaatatcatgatgaaaataaatagggagatgggctagagtttgtggtgggttactttagattgagtggccacagactatttttgagtctgaattacaagatttggacagacaatattctcagcagggaatgacaatgacaaagcctgaagataagaactagctagttttagaaaacaggagaaaagtcagtgaagcaaagtaagcacagtgaaaaatggtatgacatgactttggggtgttggtagaaactaaatctcacaaagcctcataggacaacataagagattaattttattctatattctgtgttttatcaatcgtatactgctgggaagcaaatcagtccaaaacttagtagcttaaaaaggaatattgggctcagtgcagtgcctcacacttgtaatcccaacaatttggaagacggcaagcgg

SEQ ID NO: 184550 - DNA, 2445 bp, Homo sapiens
  misc_feature (323)..(323): n is a, c, g, or t
  misc_feature (561)..(561): n is a, c, g, or t
  misc_feature (1022)..(1022): n is a, c, g, or t
  misc_feature (1066)..(1066): n is a, c, g, or t
  misc_feature (1389)..(1389): n is a, c, g, or t
tatctctgcccaaaactgaagtgtttacattatatacttaggaagtccaagtaaagacatgagactagactttaggttgtggggctctggtggtggccagtaagccatgagaatggatggactttcctagagagagtgtgcaggatggtaacctcaacaccatttatcagattcttcctctgaaagtctaaattccagaaaaatcccagcaacagattttttttctttaatctgccttttaaaatcttatacctttgaagtgattgcagagtacagttttgctgaagtggacttcacatggtcttaagatagccagaggggcntctgtcagctgcccacatggtggtatcacagctgtccaggccgtgctctgtggacagatcagtgatgataccatgggctgtcacaaaccaggctctcaccagcaatgctctagttgtagtgtttttagttattgatgtgtttcaggggccaagaatggccttaattcttgaattgcaattgtgcaaatatagtttgtacactccattccttaatccacataataaaaggaaaagccanaaggatgcattcaacaaatattggggctgatcagatctttatctgattatgttcttttggagttaaactaagttctagaaatatggaacaggtcaggcccagaacattcttgattgagtagttcaagatcttttgatagaattcagagcctccatggtggctaagccagttattgctgctttaacttgacttctccccacatttggaggatattccagccaagaaaggactttgattcatagtcatcatcttctatgtacaatttgaaatgttttgcatttagggttcttatgcttttttcctaacttaaaattgttttgtatttacatttctatccataggtcaattcacatgatcacttaaagttttaaataatgtcatagaaatcctactgaattgctatattgaatttacttaacccatttctctgtggttggatatttagacagattccattttanttcttaataatatgctgttagaaacattgcttacattggttacntttctttctgtgggtctcttttttgagcatttcttcaagatatagtccctaaagaagaattaaggataaaaaatatggatggttttatagctctagttccatattgttagacaactgagagaaacactagagtaatgtacaatgcccctggcagtagttgagtgggcttgtcgtccaacagctctgcccagtattttaccattgtgtttcttattgtgttcaagtaggtaaacagttattttcattcatgtttctttaattgtgagactgaacaccttccctgtgttagcttatagggtcatttcccagtgtgtgtaatgcanctataaagtgcctggcacagggctgccacctgctagtgtccttctctttcctgctttccccctttactctttagccatttgtcaaatgaagtctcattactgatgacaatatatgtttatctcacactataagattttattattattttggattataaatatttatccattatatttatcataatttaaaattttggggggctccctttgtatttgttttgttacttttcttatttatttatttgatactgagtcttgctctgttgcccaggctggagtgtagtggcacaatctcagctcactgcaacctccacctcccggttcaagcaattctcgcgcctcagcctctgagtagctgggattacaggctcctgccaccatgcccaactaagttttgtatttctagtagagacgggctttcaccatgttggccaggctggtctcgaactcctgacctcaggtgatctgtccaccttggcctctcaaagtgctgggattacaggcgtgagccacctcgcctagccagatgttttgttacttttcattaaggagattttttttttttttttttgagacggggtcttgcttacccatgctggactgcagtggcgtgaacacagctcattatagccttgacctccagggctcaagccattcttccaccccagtctcctgagtagctaggaccacaggcgtgcgccaccatgcgtggctaatttttgtttttttttttttttttttggtagagacagggttttgccatgttggccgggctgaccttgaactcctgggctcaagcagtctgccttccttggccttccaaagtgcaaagagactttaaatagactttatgatattcgagttcacctacctcagtcttataatactatttagttttttaatcatgaatttctctctctgctatagctgggcgtggtggtgggcgcctgtagtcccagctactcggagaggctgaggcaggagaatggcatgaacccaggaggtggagcttgcagtgagccgagattgctgggcgacagagagagactccgtctc

SEQ ID NO: 184551 - DNA, 2602 bp, Homo sapiens
  misc_feature (323)..(323): n is a, c, g, or t
  misc_feature (561)..(561): n is a, c, g, or t
  misc_feature (1022)..(1022): n is a, c, g, or t
  misc_feature (1066)..(1066): n is a, c, g, or t
  misc_feature (1389)..(1389): n is a, c, g, or t
tatctctgcccaaaactgaagtgtttacattatatacttaggaagtccaagtaaagacatgagactagactttaggttgtggggctctggtggtggccagtaagccatgagaatggatggactttcctagagagagtgtgcaggatggtaacctcaacaccatttatcagattcttcctctgaaagtctaaattccagaaaaatcccagcaacagattttttttctttaatctgccttttaaaatcttatacctttgaagtgattgcagagtacagttttgctgaagtggacttcacatggtcttaagatagccagaggggcntctgtcagctgcccacatggtggtatcacagctgtccaggccgtgctctgtggacagatcagtgatgataccatgggctgtcacaaaccaggctctcaccagcaatgctctagttgtagtgtttttagttattgatgtgtttcaggggccaagaatggccttaattcttgaattgcaattgtgcaaatatagtttgtacactccattccttaatccacataataaaaggaaaagccanaaggatgcattcaacaaatattggggctgatcagatctttatctgattatgttcttttggagttaaactaagttctagaaatatggaacaggtcaggcccagaacattcttgattgagtagttcaagatcttttgatagaattcagagcctccatggtggctaagccagttattgctgctttaacttgacttctccccacatttggaggatattccagccaagaaaggactttgattcatagtcatcatcttctatgtacaatttgaaatgttttgcatttagggttcttatgcttttttcctaacttaaaattgttttgtatttacatttctatccataggtcaattcacatgatcacttaaagttttaaataatgtcatagaaatcctactgaattgctatattgaatttacttaacccatttctctgtggttggatatttagacagattccattttanttcttaataatatgctgttagaaacattgcttacattggttacntttctttctgtgggtctcttttttgagcatttcttcaagatatagtccctaaagaagaattaaggataaaaaatatggatggttttatagctctagttccatattgttagacaactgagagaaacactagagtaatgtacaatgcccctggcagtagttgagtgggcttgtcgtccaacagctctgcccagtattttaccattgtgtttcttattgtgttcaagtaggtaaacagttattttcattcatgtttctttaattgtgagactgaacaccttccctgtgttagcttatagggtcatttcccagtgtgtgtaatgcanctataaagtgcctggcacagggctgccacctgctagtgtccttctctttcctgctttccccctttactctttagccatttgtcaaatgaagtctcattactgatgacaatatatgtttatctcacactataagattttattattattttggattataaatatttatccattatatttatcataatttaaaattttggggggctccctttgtatttgttttgttacttttcttatttatttatttgatactgagtcttgctctgttgcccaggctggagtgtagtggcacaatctcagctcactgcaacctccacctcccggttcaagcaattctcgcgcctcagcctctgagtagctgggattacaggctcctgccaccatgcccaactaagttttgtatttctagtagagacgggctttcaccatgttggccaggctggtctcgaactcctgacctcaggtgatctgtccaccttggcctctcaaagtgctgggattacaggcgtgagccacctcgcctagccagatgttttgttacttttcattaaggagattttttttttttttttttgagacggggtcttgcttacccatgctggactgcagtggcgtgaacacagctcattatagccttgacctccagggctcaagccattcttccaccccagtctcctgagtagctaggaccacaggcgtgcgccaccatgcgtggctaatttttgtttttttttttttttttttggtagagacagggttttgccatgttggccgggctgaccttgaactcctgggctcaagcagtctgccttccttggccttccaaagtgcaaagagactttaaatagactttatgatattcgagttcacctacctcagtcttataatactatttagttttttaatcatgaatttctctctctgctatagctgggataaatatgctctcctttttttcttttaaatgctttccatgtttaattagttcattaaccaatttagaaagtactattgtatatggtgagttatggatataatatacttttcttcatattgatatcaggttgttccaccagcatttattaaatggtgattccgacatctattgtcgtgattcttagttttgttttgtttgccatgtcctcaggacttataagtgcttgaatccatctctggaatcactattttagtagagtctttgtcctggctttgattc

SEQ ID NO: 184552 - DNA, 316 bp, Homo sapiens
catcccatcctcacataataacaccctttcttctacctcttcttaaggctcggaaagccttctcagaatctctccctccagcaaatctcctctcatatctcattgtccagaactgcgatatgcatgctcctaaaccaaccactagcaagaggaaagaaatcaaaataagcttaagctaatcaagattggtcaacttttcctgaagcatatgattacacagtacctatacaaatgtgggattctgtcaacaagcaaccaactgtatctgccacatcttccccaagtgttgcagtcaccctgtactgaggagaccatg

SEQ ID NO: 184553 - DNA, 355 bp, Homo sapiens
caatttaccatgcagtcattaggtgccaggcacatacattatatacacaggtggaggtaacgtgaaaactttttatttcactataatacttatccttttttatatatcttcaaacttttttttgtttgcttttcatcaaaatttggtaaaaatgaaatgctaaacttctttaaatttcaggctgtagtggtatgaactagctagaataatgaaggaacatttactgagtatctaggatacaccacacttatagtaggtacataatactctcacaataacatctgagataggcattatcatccccttttacaaatagaaactggaggttccgagaactcaacagcaacttctccaa

SEQ ID NO: 184554 - DNA, 266 bp, Homo sapiens
ataatatcttgctttaacggcaaattagaaacctgatttgtgaaaatatagattgatctacaatgttcatctgaaggcaacttttacacaataattatttgtttcatataaggattcaccataaagtctattaaacaatgagcttcctggctgggcacagtggctcacacctgtaatcccagcactttgggaggccaaggcaggcatatcatctgaggatacaagttagatgactatgctgaccaacaaggtgaaaccccatttct

SEQ ID NO: 184555 - DNA, 238 bp, Homo sapiens
acctgcatttccttgggtgtggaaaaaaaaagttataccaaacgagactcaaagtcccttaaacacaaaaatctataactgcaaggtaaaagtaatatccttgaaaattatcaatcagtggtttatctgaaaacagatgaaaaattttttgtcctcttttttttttttttttttttttttaaaaaaaggagaaatcaaaagttacacgggaacatgaaacccctgcgtatttttgtgg

SEQ ID NO: 184556 - DNA, 333 bp, Homo sapiens
tgtgagtttgttaatttttctttccctgtgaacatttggcagagttaaaattttagccatcatacattttattccctgaaatgtatcagtcacagttcccacaggctctagatacacatttccttgtgggtgtatgtgtaaaactaccataacaaaacattttctatttcctcattttgattaaaaggaaagaagaaatgctaaactgcacttacataagtgacagtgcaatagtgacacacccatctgtgtacacaatttgtattctgtttaaatttaaagttataatgataaggtgagaaatgctaagagctaggaaataaaaatacactt

SEQ ID NO: 184557 - DNA, 506 bp, Homo sapiens
cattttagcctaccacctaagacatccagattcacccagggtccatgcttgaagaagccaaaatcacatggagagactacacaaagcacttttgttaaagtcccagctgcaccccagccttcaagtcatccctgcctaggcgccagacatgtgcatgaagaagcctctggatgattctagctttgagccgtttgtgtattctttgctattcaaacattttcagctgagatcacaagcattacggagaaaaaacaaaacaaaatgattcagtatatatccaatatgaatggtgtccttataagaagagacaccagtggtacaagtgtacagagggatggccatgtgaagaggcagcaagagggcagcagtctgcaagccaaggagagaggcctcagaggaatccaccctgccagtgccttgttactggacttttagcctccagaactgtgagaaaataaatttctgttgtttaagcaaacaaataaacaaaaaactatctaaactgt

SEQ ID NO: 184558 - DNA, 425 bp, Homo sapiens
gaatgcattttttaaattaaccagcacatattttctggtaattgaataaggaatcaaattgcgactggtgaacacaagcacctaaatgcaaaacttccaaaacctctcattctcagtttcagtcaggaggcccgcctctctcctcagctgtcaaccttgctatcggggggctggcctgctgcaccagagcacccaccacactagagaacggcgagtcgagtgtgtgtgcgtttgccacagctgaagcctctgagcacaagggaaggggaatgaaccttccttttctccctgccctatgtccgtggcacaaacaccagaaacacagtagggcctccaagtaaatgctaccaaaatgcatcattaaagagtgagcaacactttctaccctcccgggggagatgcgtttaaagaacagcctcaaaaca

SEQ ID NO: 184559 - DNA, 561 bp, Homo sapiens
aacagctccccattctagctaaagtcttcacaaagccatcctatttaaattgcaaaatctccagagtcactctgtatggttgtgcaagatatttattctgcaaaatgcctggtccaggggaatcaaatgagggctagctcaggctctgcttgccaagccacgtcgcttggtataaggctctgtctgtataaatttcccaaacaggttgtcagcaaccctcgacccctctacatctgtactccttatccctcttactttgctttcttttttccttaccttgtaggctccttttacatactatagaatttggttccttattctgtttcttgtctgtcttcaccaactaaaagataaactccatgagaaaagtgcttttgtcttttattccttaccatgtctccagcatctaaaacagtgcctggcacatagtagatactcaataaataatttgaattgagtttttctgtagagtagtggagaaatgcagtggtagatagaaacataaatgggggtcaagagagggaaaggtttctaatgtgggagagagaaggagacgttgct

SEQ ID NO: 184560 - DNA, 373 bp, Homo sapiens
cacagactgatgacgatgattacttattcgaccgtcagtaaccccgattgagcccgcttaagatactagataattctatcttgaataacttgagaccctttcggggcacaaaagccataaaagtttaaaactccaacaaatgcccacaaacaaaagggcctcaaagagcaaatcaacccatggtaataattcagggtaagaagctgagttacaccaaaggcctgtggaatggagagtgggctggggagaaattctggggtctaatccattctttgacttttactaagagttatgaaactttgaggcaagtcacttgaaccaagttgcagtttcctttatcagccaaagaggaatacttccggtgcgtaagcga

SEQ ID NO: 184561 - DNA, 619 bp, Homo sapiens
cagaggcacaagagatggtaacaagctgagataagctacttgctatacaaaaagaataaaggccaatacttgtatcgagggtgaaatgggtttgaaaatgttgaaaaggtttattccattagggcttggatcattgcagtggtcttagttctgatcttaacactcatgctcagctggtgctctaatactcaagagcaggagaaagagtatgggctctgtggttagaaagtcctgggtttgaatcctgattacccaactcactagttgtaaggccttgggcaagtcacctcacctctctaagattcaaatgtgactacctgcctcagggttgtggatggttttatgtaagttccatttactcaataagtattgaatgtcttccatactggaatagaaaaattaaatgatgccatctttgcctgcctgaagtagctcccatttgggagcctggcatataaactcactgcagtactaatgtgctaagtattgtaaaaaggaatacatggaaggaggagggaacaacggtctgcctgggggtgaaagtgtaggggaagcttcagagagtggagaacaacagagatttgaagaagtagaagctgttctttaagcacacaaagga

SEQ ID NO: 184562 - DNA, 803 bp, Homo sapiens
gctgacctccaggggcacttcctcggctcatcactgggccggtgctctgcagaatgagctgtgagagccactgtggctggccagagggtgccactcacagtcacttcagactcacaggagccttcgtcccgacccctgcattcatctgtgttctgttttatgttttttcccagtcacctgagctgcaggccttggtcaccccagactcctccctcctgtcacccttatcctcaccccagcacctttacgtctgccccaggctccatttccccctcttctgcctggatcaaaccaccctgactttcctgggtcttcgtgcaacagcctgctccggccgctgcctcactgcacctgcaaatccacttgcacccacacccaggccagggtttttaaacagaagcctcagcagatccctctctctggccagctccctgttgaaccaggaagcaggtccctgttgaacctcagcatgacccgcccccacccctgcatcccacttctgctctgggagcctctgggttcctgggcgcacctgctgcccttccctgtttgtcactgggtgacctcccgtccttgtgggcgctcccgggccctggtctcgggccttctgaggacttgctctcctggtagcggctgctgactgtgagcccagagagcaggcgtggctgttgaccttaggtcctcccagaacctggcggatcgcctggctcccaggcaggaggcgctgcatgacgcctccaacttccgccaatctagcccaaggatggcgttctaaataaaacgcgttctacagaaaagtgaaa

SEQ ID NO: 184563 - DNA, 958 bp, Homo sapiens
  misc_feature (656)..(656): n is a, c, g, or t
  misc_feature (658)..(658): n is a, c, g, or t
  misc_feature (743)..(743): n is a, c, g, or t
  misc_feature (787)..(788): n is a, c, g, or t
  misc_feature (879)..(879): n is a, c, g, or t
  misc_feature (900)..(900): n is a, c, g, or t
  misc_feature (903)..(903): n is a, c, g, or t
  misc_feature (919)..(919): n is a, c, g, or t
gctgacctccaggggcacttcctcggctcatcactgggccggtgctctgcagaatgagctgtgagagccactgtggctggccagagggtgccactcacagtcacttcagactcacaggagccttcgtcccgacccctgcattcatctgtgttctgttttatgttttttcccagtcacctgagctgcaggccttggtcaccccagactcctccctcctgtcacccttatcctcaccccagcacctttacgtctgccccaggctccatttccccctcttctgcctggatcaaaccaccctgactttcctgggtcttcgtgcaacagcctgctccggccgctgcctcactgcacctgcaaatccacttgcacccacacccaggccagggtttttaaacagaagcctcagcagatccctctctctggccagctccctgttgaaccaggaagcaggtccctgttgaacctcagcatgacccgcccccacccctggtacctgggattacaggcacatgtcaccgtgcttagctaatttcttgtatttttattagagacaggggtttcaccatattggcctggctggtcttgaactcctggcctcaagtgatccacccatcttggcttaccaaagtgctgggattacaggtgtgagcaacatntncagccagaaaatattttttaagtggagaaccattaagattagatatagcttagaaaatccactatagtagcacaatgaggaaaanatggactgaaatggaggagggcaagattaattaggaagctctgnnatatacaaggtaggggaaaattgggaaccttgaacaaaagacgagcacttccctggggtaccccgagcctcgaaattcgtaaatcattggnccatagcttgtttcccttggnggngaaaattggtttattnccgcttcaccaaatttcccccaccaaacaataccgaagc

SEQ ID NO: 184564 - DNA, 265 bp, Homo sapiens
acacacaaatccataaatgtgacacatcataacaacataataaaggacaaaaactctatagtcatttcaataaatgttgaaaaagcatgtgataaaattgatataaatccccaataaactgggcatagaaggaacacacagcataataaaggccatatatgaaaaacccacagctaacactatacttaatgggaaaaagctgaaagcattccctctaagaactggaacaagtcaagagttctcattttcaccactcttattcaac

SEQ ID NO: 184565 - DNA, 379 bp, Homo sapiens
tgcactcttggctgacccgaggataattagcatggtgagtcccaattagatttcaggagacaggatctgcccactgcagatgtacatctttataacaagctttatcataatagagtatgattacatttgttagttgcagtcctaaaacagtactctggtgttattttcacatgaaattataagaccactcttataggcatgtgctttttaactttactaattcgaggtcatccactaaaaaatatttcttgatggcctctgttttaggtattggagatgctttgtgacgagttccttctctataaattctctatggattttttcctttcttatgagctgtttcttattagcttataaattgtcattatttctcccaact

SEQ ID NO: 184566 - DNA, 203 bp, Homo sapiens
cctgatggtttgttttttactagacagccttagagaagtagaagagcttttcttcttaagcagttacaaaacctgtgagacattttatctcacaagagaacgtgggctcagccaacacaaatatgtttcttgttgcaatttcaaaactatcttttaccatgctttgttattttttgtttttgttttgcagctcatgaagtgaa

SEQ ID NO: 184567 - DNA, 356 bp, Homo sapiens
ccctaagctcccagcctgctgcttatgagtcagttccacaggattttctcccttcaagctgggatcagctcagctccccatccctctgctcctccacccccaactccactgcatgatgcaaggtctattccaggcaagagcccttctccgaggtgggcagcttgtgtacatgtggggcagggggcactgactgatgaggggccactgttcgcacacaggcaccaggtcatcgttcccagctgtggctcaacccagtagtctgcgcatcccaggagcactgcagccccctcacccctatccaaccctctttcagccatcagagcttctgagcagaagggcctggccctctttacagg

SEQ ID NO: 184568 - DNA, 561 bp, Homo sapiens
aatatttatgggtacttactgttgtggatatgtcaaggaaaagacagacaattgcagagaggacagtaaagaaaaaacacaaaaaacttttaaagattattatttgttagaaggtggcaagtgttaggggataaacagcaagtgaatactaggagagggcttgcaaaattaattaggcaattaggttatgctgcgatgatcagctaacattttagtaacgacagaagtgaggaaattattaactcacttagaggaagactgaaaatgatgatcaggagtttagtttgagacatgttaaaattgaaatacttactaaacatcaaagtagagaagcctaagaagaaagattcaaatttagaagtcaacagcatattgacatttaaaagcttgagactggacataaccgagtgagggtgaatgtaaaccgaacagtaaactaaggactgataacaccaaggtattgtaacattaaagatcatgaagattgagaagccagaaaagaataaggaaaaagagagagagagagagagagagaatgaatgtgtggtatcttggaaccca

SEQ ID NO: 184569 - DNA, 549 bp, Homo sapiens
caattttgctttaagcagtgttagggaactctttacaggtttgtgagctgggagtgacaagccattattttatccacaccaaagctttgaatgataaaggggttgaaccactgtcattcattaaattcattaactgttggaattcctctaaggatctatctgcaggccccttctcttctcactctgtacacggtctccccaggcaacttcataatggctaaaattaccatctattccaagagcatgctcaaattgatatttctggctgaaatctcccttttgagattaaagcccttatcacctacttcctccttgacgccggagttctcaggacaccttaaaaccaagttcagtatctctgcccatttctgcttccttacctttaaacctgttcctcattcagtcctttctgtccccaggagtggcagaaacataatccatttgccctagcctcaaacctgggatgtctgtcttcctccgtctacaattaatcatcagccagctcctatcagtgtcacttgaatccatattttctcccctactcactgc

SEQ ID NO: 184570 - DNA, 831 bp, Homo sapiens
gcaactgggggtgtcactgtctacccttctgcatctggatctcctactcagacacaaggattcctctggtaccttaaatacagcaaccacccaacacacaaattgaaggagtgtgtcagtgtcaattcccgtattaaataatagtaaaatttaattttttgtattttggtaaagtataaacattgtaatattttcttcttcatcctagtggatctgcttatacatgccacattagagatgattgctctgattgtttcttctatagtaaccttgcttccctaacaacctttgattgacataaaggttgagtcttgtcttttctgttgtttatagtacctgacagtgctgtgtttcactaatatttgttgactgaatagtgctgaggagtgtcctgttctctgacctcagtaccataaggtcatatttcttggacaacaaagtccagtagcagatttctttggtggctgctagagccatttcattaacagtattgaaagcttttgtgatattagagaaacagctctgtggtcctgttactgttggctgtgcatccttctgcatctgacaggtagaaagggatggtggcagctctagtcactgccatgttgtgatttaggaagtagatggttgtgttcagatgctctggaaatgagctggcagagattgctagaagagatggctgtggtatctagagcagccagctctcttcttcatgagaggggtatatgtctttgatgcattgtttgatgtcttccatcagtttacatgctgaaagtattggtgcagatatctgagatgtatgcttctcctccacctggatagtccaggagg

SEQ ID NO: 184571 - DNA, 302 bp, Homo sapiens
ctctataacagtgtgagatgtgaaattagcaaaaataactcaggcaaaatgtagactttttcaaaagccagaaagttttcataacttgatcaaaggaaaggttcagatgaaatgaatgtgggacaccagagtgccctaatattcttcttcttagaaaggatgggttttctttcaaaagggaggctctgtcaaggaaatccgtatatgttatcttttcactaacagctaaattaactttgtaatatactttggcagtgtagcgttcatgtttggaatttatttaaaccatgtcaatgtttaag

SEQ ID NO: 184572 - DNA, 242 bp, Homo sapiens
tctgattccagcccaaggagtcggccctatactcctcactctcaatcatacctacatttcaaaagctcatgatgaagactggatgggagaagggggaaacttttatcactgcccttggtgggtagaaagaacccaatgtggccattataattattataaccttgaggcacatcaatagattcaggatacaatgactaagccaaggtcagtcctgtccaagacactaactcatcactgaatta

SEQ ID NO: 184573 - DNA, 479 bp, Homo sapiens
gagagtggtgagaacttgggaggtggagcttacagtgagccgagattgcatgactatactccagcttgggcgacagagtgagactccgccccctccaacaacaacaaaaaaaattagccaggcactgtggcgtgtgcgtgtaatcccagctacttgaaaggttgaggcaggagaatcgcttgctcctgtgaggtggaggctgcggtgagccgagattgcactactgcactccagttagagtgacagagtgagaccacaactcaaaaaaaaacaaaaacattggattgtctttttattattgaattgtgagactcctttatactgggtgcaagtcatttgcatttgccagtgttttcattgcctcctatttcacaatcgattaccaggcatctcatcatgcaaaggtctatgcaaatctgtagtttggatttggttctcctgcaaataactaagtcctctgacatcaatgatggtcacag

SEQ ID NO: 184574 - DNA, 341 bp, Homo sapiens
ctctgaaatgtgtcatctagcacagtgtgtgaaaatattgagattaaggtggcctcatcagccctaagcaactctgactctgtccaactccagaataaagatttggtttgtgcttggactggtcctgctgtccaggctggattggcagtcaaagtcagacagatggagagatcacgtgggtcagacaggttggaaggaggcccactcagtatccccccttctggaaagacactggcttcagcattcaggcaatcttccttcttcccaggcttccagtttcaagagtgatgaaatctgttatcaagggagtacttgcttttttgactgtgagaaatcctgca

SEQ ID NO: 184575 - DNA, 281 bp, Homo sapiens
ccatgacccttcaccctagtacttcaagctgtatttcctaagaacaagaatatttctccaacataaccacactgcaatgatcagatgcagaaaatttaacactgcaatattcagattcaggtatcagcatccatccaatgctaataactgctattcacatttagtcaattgtcccaaataacattcttgctagcagtattatttttcccaatgcaaggacacacatgtcatttagctgccatgtctctttattcccttttaatctggaatagttccttagt

SEQ ID NO: 184576 - DNA, 398 bp, Homo sapiens
cgaaggagacacagacatggatgaaggagggatgcaaggggagagtggggacccgagagatcacaagttagtcacatgagaactcagttaccatagtgaaccaaaaagtgtcatgatatggatgcagggggctgcagaggctacagtgaacaagcttgtgggcccctgcactagaggaagtctgtatgctgaggcccaggggccagccctcagccgcacgcccatgcctgactcctctaagagttacgtgactctgtccttgcctgtcctgcgcccctctcaccacttcactccccagggaagatcttggccattcacccagcacactgttcagtaaacttccactgggatctcctggagaccaggccatgacccagtcatgaaggagggatgagcat

SEQ ID NO: 184577 - DNA, 391 bp, Homo sapiens
gtacagagtgaatgtgaacacaggcagagcgaaagtaaacacaacactcagcgcctgctgttttattttttaaagtcttcggaaaccatgttaagtgaaactctttgatgagagggaatcttacttggatcactaaagatacttcactggatacttctgttcttttagccccataattaaagatacatttgactaagatacaaggtatagtaaatgtaggcaggtcagagcaaatgttcagcccaaaaatatgtctgtgaataatgttcagccgaaataatgttctggggaaattattggcaaggtcatgttaaactattgcgtcgttctttggtggcaccccagacctaatataacttgacatttggtgagaacacattagctggtcagt

SEQ ID NO: 184578 - DNA, 565 bp, Homo sapiens
  misc_feature (6)..(6): n is a, c, g, or t
gataangcggaaattggtcacgttacttatatccccagcttttggctcagcacagaacccatactaacatttagattgaacagaactaaggctaaaggaaaactttaaaggaacttattaaaattaccaatcccatttcaacaatgggaagataaggagtggcacaacaccatgggattagaacagggactataccaccttgctccagctccactgtccctgcttctggaaagggccccactccaataaggagaattccacagctcctgctcaaatcttgtggttcttgctccattcttgtccagatttctctgattagattgggtgccattgaaggtcatgggtttttgtcctggtcattgttgtgctcccagatgattgcacaaagcccagcagatagaatgtgctagataaagcacctaatggaagcaatgaggaaaagaatgagtcttaagcagacttcctaaggtgtttgagaatcactaaggaatttgaaatgtatcatagaccgtagggctgagttacaatcaacaataaataatctttttaaatgaaaccaaaatct

SEQ ID NO: 184579 - DNA, 423 bp, Homo sapiens
gaaatgatattgtgttcttctcaggacataatattaaaaggttcttctctgctggtcctatctatatttaaaatatcaccttgtatgtgaaagaccctaaaatatgtggctataatctgctgtctatcaagttacaattttatttctccagccttctgaatgttgccacatggacttcccaccatcatttcactttaacatgtccaaaactgaattaatcatgtaactctaaaaatctttctctactctaactttcttacttttcttaatattatcactgtatctgtttaccttgacttaaaaccccaagtttgctttttgatcttccctctcctttgcttccatagtcctctaactgcttaacctgcttttagtctgtctttcaattttgcctactttgtaaactgtcagatagtattgatc

SEQ ID NO: 184580 - DNA, 311 bp, Homo sapiens
ctccaaaagtactggcaccaaaatagaataacaaatcaatgcaagaaaacatccagaaagagacccccaaataaaaatttagtatactgtatatttaatagtggtagcttttcaggtagatgaggaaagagtggcttacttaacaaatggcattgggacaatcagttaatgattttgaagaaaaaaagttagtttcttatgttatatacttaaactaaaataaattctagatgagttaaggatgtaaatgtaaagtacaaaaggtactagaagagagtgtaagttgaggtaaggaaggccttccaaagcct

SEQ ID NO: 184581 - DNA, 1009 bp, Homo sapiens
acattgaaatgccctcctgttccctttgcccaaggctgttgcagtgacctcggtcctgatagagttgggaacttcccttgttcttgtcactttctcataccaccacccacagcttggtgtcttgatcccaaatctcagccctgccttgtctgatgctgggctgctgccttgactctgaggcttattcccacgggggactatctcatcgtcagtgatcaaagccttttccccttagccttgctgatcctgacctggaccaatttcatggattatctgttgatggcacatcctcttagattccacatttgctgtatcagctcagagttttcttcctttgatctctcctgtcaccataagaaagccaggcctggtatctgacaaacttagtaccaaattgtacatcccattttgctccccctgatgaaccgtcagccctactaggctggtcagtttctttttctagatgcatattctgcacatgtctgcctcataactttgtcctcaccatcctttgcccatcctctgctcatcctctgccctggcccatcctctgctcatcctctgccctggcccatcctctgctcatcctctgccctggctcctcattaaaaatcctcctgtaaatatttaatgaaattctacccatctttcagggtcaaatttgggtaccacctcctattcatcccatcaacccctgagttctttctctttttttgaacccctggaattggttgtacagacatgtgaccacttaaaacacaataaccacttgagcttgcaccatatagcactgagtgtgtgccaggcactactctacacacataatggcaagcctatgaggtaggtgcactgtgattatccccactaaatagacagagaaagtgaagcacagagaggctaagttattgagccaaggttttataactagtaagttgcagagccagaatttgaaccaaggtggtctggctctagacatggtccggaagagacccccacgggatcctctaga

SEQ ID NO: 184582 - DNA, 300 bp, Homo sapiens
tactcctccaagctactgaaatgttgtaccctttgacaacaatctcctctttttccatttctcctctccccaaagcctctggtaaccacctttccattccgtttttatgacactgactttttcagattccacatttaagtgagattattaaaatatttgtgtttctgtgcctggcttattatacttagcataatgtcctccaagttcattcgtgctatcataaataacagaacttccttctttttaaggatgaacagtattacattgtgtgtacataccacagtgtcgttatccattcat

SEQ ID NO: 184583 - DNA, 319 bp, Homo sapiens
gtgctattgttcagaaaaacaaagaaatgtgaaattcttggaccatttcaattgtcttcaatgttataaagaacagatagtttttcttagtggcaatgagtgagggatttgatcacagcacaaataaaggtagagatgtaggcaggcctaacagtgacaccctcctgactacatttagtcagggatgtgtcggagaatagtaaaaattaaggttgggtggaaaaggggccctgttttggggggcattgaagcaaaagagtttggattgaatatattttgctgcttctcacactattctaccaaagtacccctaagacat

SEQ ID NO: 184584 - DNA, 188 bp, Homo sapiens
agttttattccacttcagttctatacttgaaagtaagcctcatggaaagtacttatttccccaaacaaaatcctggcgatttagaatacaaggaacttggactgttatcggagccataacgtcatttcacaatgacaaggaagccatcgcagcaggtgcaatgactaaatgactatgcctaaaatcag

SEQ ID NO: 184585 - DNA, 372 bp, Homo sapiens
tcacagatgagtctaaggcaatcctggtaggaatttgaggactattagtacgttattgccatcaacttagttgatgagtaaggggaagggataagggaagagcaagaagagtcaagggtgcttctaggcttgggtactgggtaagtagcggtgccattgtcagagacaggacacagaagagaagtaagtttgaggaagatatactttagggttccattttatagagttcaacaacagtccaaatgaatcaatggtaatgtcaggatggtgattacctttggtggcgggggatgtgtcggagcattgggagcttctgaggtgctggaaataatttatatcttgatcctggttatggttatgtggatgtataca

SEQ ID NO: 184586 - DNA, 350 bp, Homo sapiens
ctccccaagtatcggcctatccataattagttattttatgagtaggattacataagtcaattattaattgtgaggatataaacccataatcaatgttttattcataagttttattatttactattagttattgctgctgttaataactagctgccatttgtagaatggctagttgttcttagtatcatttgtttttacgttattgctaattcttaagaacagttctttagatgtcctatttcctagatgagaaaatagagatttagagaagttaaattatttgtctgcaatcacagagcctgggatttggatctaggtctgcttgtgttcatattgtcccacgctgtcat

SEQ ID NO: 184587 - DNA, 165 bp, Homo sapiens
aaaaggagaagaggtgagcaggcaagggtggcacatgctgtctggtgtttgtagagcatggagggccctgggtatcctactgagggatctggacttgattctgtaggtaatggggagccactgaaggagaagaccatacatgtcttttaacatttattgggaaag

SEQ ID NO: 184588 - DNA, 295 bp, Homo sapiens
actttttcctgggacactgtgttggcaacatcctgccaaattttgtgtctttggatactccttataaggaagacggctatggtttggctctgtgtccccacccagatctcaccttgaattgtaataatccctgtgtgtcaaggatgggaccaggtggaggtgattgaatcatgggggtggtttccccatgcttctcatgatagggagtgagttctcaccaggtctgatggttttataaccatctggcatttcccctgttggcactcagtccctctcctgctgccctgtgaagagg

SEQ ID NO: 184589 - DNA, 342 bp, Homo sapiens
ttttgctatccctattagaaaatatgaaaagataagatgtaattttgtttcactatatgatagaaaaatcagtctgtaagatcgaatccctgcaagtcactcttgtaggcttgctctagagattcagaagccctgaggcagcctcgttaagagctggtgctcttaataaggtagacctggtcaaatcccagctattccatctgagttcccctatcttctgcaggtttacctaacctaagtctctgttacctcattggttaaaactgagataatagtataatagtaatgaagttacatgaagattaagtgagatttcatatatatatatatacacacacacat

SEQ ID NO: 184590 - DNA, 321 bp, Homo sapiens
caggggactttcacacttcagagaatagcacatgtcatcctgcacttttgtggggtgattaaaagctcacggtatccttttatgtttagcccatccaattcttccaactggcctcagccagaaaagcagggaaggcacccccagtttgcagctgagagactccagcctgggagagctgaataaatcttttgcccagaggggttcctcagtaaatgctggagatgaggctcagacctgacctttggattcccagatggagtgctctgaaccgtgtacctggggctgtcttcaccactcaaatatcgatagagataacataga

SEQ ID NO: 184591 - DNA, 341 bp, Homo sapiens
gaagctacccaattcacaaattctttgctcaattaaactctgttaaacataatttgtctaaagtttttaacaaggaagattatcttataccctctgccataatgtcataaatatttttcagttaaagtcctgttttatatttttgtttgtttttctctattacattatggaccttagtttatgaaccaaatttctttgcaccaatacttaagacaacccaaggaatgctgactttaatgtcttttctatcattgtccattgcttgctcatgagttgttcacaaaacagcaattttgctcccctcaaacctagtatattcattcatgaactaaataatattt

SEQ ID NO: 184592 - DNA, 230 bp, Homo sapiens
ccacggtttcagagttactggaagtatttgctatcagcactggttatcgcaggctgatagctttagattttgacaatattaagactggccttcctcaggagaatccaagtgtgtccttcagggtaatgcaggtaaagaaccatggtgttaaactagaacttaactctgacctaaaggtctactgcaatttctcttatggcactgcgggattttgctgaggtggtaataac

SEQ ID NO: 184593 - DNA, 497 bp, Homo sapiens
tcctgctctggccatgtgatgtgcctgctcccccttcaccttcggccatgattgtaagtttcctgaggcctccccagaagccgagcagatgccagcaccctgcttcctgtacagcctccagaaccatgagccaattaaacgtattttctttataaattgcccagtgtcaggtatttctgtttagcaatgcaagaatggacaaatacaataattaaacggtaaggggattattttgcctgccattccactccaagtatctaatttagaaggcaatgtttctagaagtgtgaggactggatttgtcttcagaaagcattttactcttccattagaagcttttgctgcattcaaaatccagttgagtctatgcacttgagctgtccagtcaaccaccactcttaaaaggttgaatgtttttatttgaatcgactcacatggccactcaatacccaaactcatctgaacatcattctgtcacatgccactcaatacctata

SEQ ID NO: 184594 - DNA, 512 bp, Homo sapiens
taaggtttctttctttttttcttcaacttttattttaagttccggggtacatgtgcaggatgtgcaggtctgttccacaggtaaacgtgtgccacggtggtttgctgcatagaccatcccatcacctaggctttaagcccagcatacattagctttcatatatatatcctacacaaaaacaattccaggtggagtaaagccttacaaatgttaaaaagtaaaaccaagctgggtgcagtgatgcaagcctgtcattccaacattttggaaggctgagacaggaggattgcttgagcccaggaattcgagaccagcctgggcaatatactgagaccccatctctacaaaaaaattaaaaattagctgggtgtggtggtgtgcacctgtagtgccagctacttggaggctgaggtggaaggatcgtttgagcctgggaggttgaggctgcagggagctgcgactgtgccactgcactccaatacaggtgaaagagtgagactctgtctcaaaaa

SEQ ID NO: 184595 - DNA, 254 bp, Homo sapiens
gaggaaaatggtgcaggcagagcgcacctggtctcgggaaaatgctgcccgcgacaacccactgcgggaccctaaatgtctcgacaataaggcctcctcggcacgtctctgaggtcgggtcccgctggaggaggaggcgtttcgaaactgtgaggttggaaccactcttttggtaccatcttcaaagagacatttcagatcccattgaggcgtacagaggaaaaccaaatatcctgcaattaaaaactagaaac

SEQ ID NO: 184596 - DNA, 495 bp, Homo sapiens
tggccctgcaggctgaacttcagggatgagggttgcaattagttcgggctgtttccatggtaatgagtcccaggagtgggtacagagggggtggacggttctttctggggtgagatgacacctctgagggtgggaagggggacgaggggagggtttggtgagtcacccctcaaaggacaggcagaggagaaactgtggttactgattccaaagccagagtggagccatgggctgagggcaggggagggaagccaagtgaaccctccacaccattgccatcactaccaccatcaccaccaccaccatcactaccacagcctcgaataacctctcttccccacagagaaagcgaagtctaggcctccaaaaaactccaggtcagtgggaaatgaggttaggcaggttccttctgaaatgctgagctttatccctgggagtgaggccctatgctgaacccagtcactcccatccctctacccaactcatctacccatc

SEQ ID NO: 184597 - DNA, 246 bp, Homo sapiens
tgcagcacattcagcaagttttggggctggagcctcgatatgtttgctgtgtgggttaaatgtggtcacgtgtgtggggctttaggccagtggccaccacatggcaagacctcagtcatcacttggtataaatgtgtctccttagtgtggtatagtcatttccttcccgaattttagtacctttgcaataagaacatgccaccactcctcacagtggctttatctaggtgttggccatgaagagtg

SEQ ID NO: 184598 - DNA, 346 bp, Homo sapiens
cataatctcagcagtgtcatcagccaagtgataaggaagggccttaggtctccgcccctgagggaacggcccaggagatctgagacccgaggcctgctcagacgccaggtgcgcacagacttcgcagggcctcagcttccccagcgtaaagtgaagagcttatctggttctttctaggagcatcttcacgattcttgcagtatccttgtactaatagcataatcactactttttcttctgcagaatttgattaaattttcaaaaatttaaatgaattcatgccaaaagaaaacaaccataaaaggaaaatcagtatcacttgtcatacatactcagaccatcatcc

SEQ ID NO: 184599 - DNA, 387 bp, Homo sapiens
gtattacctagcaagcatgtctgtgattataaaaacaatatagtaaaaagaaaaccccaggttattgatgtgctatatatgtgtgtatactttaaacagacctagttttacttttatgtggaataatcaggaaaatgtgtgtaacagttcaacagtaaaatgaatcttagcagttagaaaatcaatacagagattcaagcttttcctctgcttaaatatctactgttccgtatgatgtcaaaccaaactgtgattcctaaaaatgcataactgatgacatttttaaagtagagcaaaaattttgttcagaagcttagaggcagagaggggggaagtgccttgatatttatctagtcagcttccttgcttttcgtctataaggtgata

SEQ ID NO: 184600 - DNA, 253 bp, Homo sapiens
ccagctggtgatcattgtgcagaaagctgaagaatgtggcttaacaagattctgactcctcccagtttattacctagcatggatttccttcaaaatacagatttcgtgtgaaaagtccaactgccacaaactgcttgggaagggtggatgctgacaggcagggcttttgtgaaagacgggaatgaaccctgacctgtcgctaataggagttgtgccaaactcatcacatacattaaaaaatagaaaaggattt

SEQ ID NO: 184601 - DNA, 288 bp, Homo sapiens
tggcgcatgcttgtaattccagctactaaggaggctgaggcacgagaatcgcttgaacctgggaggcggaggttgcagtgagccaagatcacaccactgcacaccagcctggcgacagagcaggaaaaaaagaaaaaaaagaaaagaaaaaggtaacttcttcactccctacagagttcaatgctctctaaatcatatggccattggcttccagcatttaaaataaaatgtcccttctatacctgttttccaagaggaaacaaccacttgccaaactgcaaaggtctt

SEQ ID NO: 184602 - DNA, 479 bp, Homo sapiens
gtcccttgtctctatttctattatttcctcctatgacactatgaaaaagtgagcccagcagaagaactggggcaatgttgccccccaggggcatttggcaatatctgggcatatttttggttgttacaactcagaaggggactttcctactggcacctagtgagtagagggcagggataccgttaaacatcccaccccacccaggacagccctcacagcaaagaattacctggcccgaggtgtcagtattgaggttgaggaacttggctttacagcattttcctgcgctcatctttgattcctgccctgcctagccctgaggctcagcatgagtctgtacagaccctgctggaccatttctctagcttcctgcagcgctgtggtccttggccctcagtgcacactggaaccaactgggaagctctaaaaatatctacccagtgcttggacccaatccaactccattaatttatcatctg

SEQ ID NO: 184603 - DNA, 473 bp, Homo sapiens
tcctttatatttatcaggtcaaccaactgctaatcctttcacatgactggtaaagccacctttgacagtaccagctatcttcctgtatctatcttcctgtaagataactttgatcatgtcacttctttgctcattaagtttaaactctttaagtggcactcaagttccttcacaaaggattctgacctgacttctggacttctgaattactcctatccagtaggattcctaaactccaagctaatagtccttctctactgtcctttgaataagtagaggaggcccagctgtttctatctcattccttattcatctaacactatttggatgaagatgttgtcttagtagtttaagattgggaggatgaaggatatagatgaaatatttagtattaatatccaatatatgctatgtgctaaaggagtggtagaggctattcattgatgtatattttccttttctctctaactggt

SEQ ID NO: 184604 - DNA, 418 bp, Homo sapiens
aagcagtttaggggctgtcatgtagtagattttagtacagagagtgatcaggagagactggcattaaaaacagtattgagatatcaagtcggtactgtgtgctattgctaggaatatgaagcagtttttgtttgtttttctttgttttttttttctaccctggttctttccctcttgacatagaactttgcagctagaatgattttcaagagtgaatttggccctttgctttagaaaccacctggtattttcaccttcagctgatctaagaagaaacagtaaatctttcccaagagttcactttcctcatgcttcctatctgttagcagccacatattctttgacatcaaccctatgagaacaattgattttcattattacacccttaagtcccttaatgctacaacattttgctcat

SEQ ID NO: 184605 - DNA, 362 bp, Homo sapiens
tagttttccagctagcactgcaggcaaagtggtatctgatcttaattcacagggtgtttttgttatgaacagtgttcattttacctctccccaccctggcttttaatcagctactttcctcttttgtgcggtgtctggaaaaacaaagtgtcttttaattaactcacttccaattgacaaagttttttctagggtaacacactgaatatgcaagctctatgacatctgaccctctaacagtttcgcaccttagagggagccatctattaaagttcacacacattactttccagacccttcctgaagttagccatgtgaaggcaaattccaattcttcactgaatttctacgctttcaaacct

SEQ ID NO: 184606 - DNA, 253 bp, Homo sapiens
catagtggggcaaagggactaaactgggaccttatcccagtctgtctggcttcaaagcttctactcctgagaaaaagacatgcatgacagaggggaaggggaacctaggctggttaggactaattataagcaaatggtctaatgaatgagtgatcaggtttacaacccagatttcaaggaattgagtactttttttgagacagggtctcgctctgttgtacaggctggagtgcagtggcgtgatcatagctca

SEQ ID NO: 184607 - DNA, 268 bp, Homo sapiens
ctagcaaccaaagaaagagggaaactgatcacatagaagaatcacactgcatgtaagatgggaccgatgaacccgttgctcagaagcagaggtgagtttctcctgcctttatcgcctctccaaagaagcggcatcagcgctggtttgcagtttgctttctggcattacctccctgctcctcagcctgcaccttcctccgctacccgtcgacagcctcctgcgtgtcaccttctgatttcaccagggcctcatcctggttgaagttgtt

SEQ ID NO: 184608 - DNA, 715 bp, Homo sapiens
atttgaaagatttttactgagtatgatcatccgaacaccagctactaaacaaaaatcagatctccttgttcctattaagatgcgctaattaataagatggcaacaaagaccaccatataaaagggttccttcagtaatgttttcttgagtgaacaaaaatcaagcctgccttatattgtattctactttgcatcacaaacagttttagtgtatttctggaaaagcatcagcagttttttcgaattttaaattctggagttatgtaactatataggcaggcttttttataacagaatataacagtgatacttaaatagaagacttcaaatgtaaatatcagtagagcctcgttaaggctataaatccagactttgtgataatgtggattaaatattatttacataacatataaggaggccgggtgcagtggctcacgcctgtaatcccagcactttgggaggccgaggcaggtggatcacctgaggtcaggagttcaagaccagcctgaccaatatggtgaaaccctgtctctactaaaaatacaaaattagccgggtgtggtggcacatgcctgtaatccctgctccttgggaggctgaggcaggagaatcacctcgggaggctgaggcaggagaatcgcctgaacccaggaggcggaggttgcagtgagctgagattgcaccattgcactccagcctgggcaacaagagcaaaa

SEQ ID NO: 184609 - DNA, 186 bp, Homo sapiens
aactttcctcattatcttgtctttgtcacttaatcaagtttgctattttccagccttaatcaaaccagccaatgcaggtcacagtttatccaactttgggactgccaataattattttctgctgaaattgaaagaactactggctctgagtcatctggtataaacacggaagtgacatagataggc

SEQ ID NO: 184610 - DNA, 332 bp, Homo sapiens
tcagcacatcccagcccatggaaagagggaaagaacgtaagcaaagatgaacaatttccatctcatcagttacgctgatgtgtatcagtgatgtatatcacagacatcacttcctcgctggacatggccacatctcatagtacaataggaggtacgtcccaaagggaccccaggagtcctctggagcagtgagctaggacagagcccagctggaggtactgaacccacattcattcaggttccccatgaaatatgtacttccccactgctagggtgggggaaggtactgtaattactgcttatcccctaatatcatggctgttttctatgct

SEQ ID NO: 184611 - DNA, 357 bp, Homo sapiens
aatattcggcctatccttgaaacctttgaatttataaaattctattactttcactgccttttctgaaatgagattcctcttttctcttctccttcctcccagttcccccacatcccccatccaaactatattctgagatcaagttccaaatataatgattttatgaaaccatatttcaggcttttgtgtcaaaaagcgaggtcctcggcaataaagagggactagtgtatgtacagtgggtgttcgaaaatattgtttatgatgaaatactcattaatttcatgctttactttctcctcgattcttattttaacatacttatttgctttgtgactatcaattatccattaaaaggac

SEQ ID NO: 184612 - DNA, 351 bp, Homo sapiens
tcgcccaggctggagtgtagtgacgccatctcggctcgcctggccaatttttttgtatttttaatagagatgggttttcaccgtgttagccaggatggtctcgatatcctgacctcgtgatccgcccgccttggcctcccaaagtgccgtgattacaggcgtgagccaccgcgtccggccctgacttctaaatttcacttaagacttagacttatttggattctttaagatggggttagctgtgccttccatgtgctcaccaaattccagtcattccgggaaactcacctctttcccctgctggattggagggtccttgagcacatgactcctcctcactttgtccatcac

SEQ ID NO: 184613 - DNA, 478 bp, Homo sapiens
ggcctttaaattgagagataacatgctggaaagaaaaaccactgaagcttctggaggatgtgtggggatggtgcaacaatttggaaatctcaaagtccctaagcatatggtgcttttattcccatggtatattttaattgatgtacttgggggctgcatgggaagttagggagctttgaaaagtcagacagaaatctccgatagtacagaattatttcagagacaaagagctgcttgaggaagagaatctgcttcaaatacatggccagtctcttcatcaagacaccaaatttggaaatggtatagggcagaaggctgaagaacagaataaatctcccatagtttaggaagtgaaggagaaagaggcccaactaggctctatccagctcccgattctgggcatttgaaatcaaaggtagggttgagtctaattaaaaatgcaatttaggggcaggcacagtggctcttgcctgtaatc

SEQ ID NO: 184614 - DNA, 361 bp, Homo sapiens
ctcgatttcaggatcttataccatcttgttcttgttgcctctgtgaagaagcttttctgagcctgcaaatagatgattgcagtgtatctttcagcttttcaatttgttctcagcaagagttagtcttctgcaagctactctagcccatctggaaccaaaaccttttgaatgcattgatgagaatactttttaaaaatagtttggattttaagttttgctgtttacccaagcataagccatcatctttcactgttctttcttcctcctttccttgtcttttttgatagctgattctcttagggtgatagattcgggacattgtagttatcacgattcatctggcagaaactttctctcattg

SEQ ID NO: 184615 - DNA, 189 bp, Homo sapiens
cttcatgaccaacatctatatgctgtgatgttatccagtgagtgaaacacaggtcaactctacacgaagcctttttttgtattcctattttgtcttctccatctctcctttcttattatagcatatttttttcactctaaggaaagaacatttatgcagggcttgcttaccccaacaaagcatagcaca

SEQ ID NO: 184616 - DNA, 478 bp, Homo sapiens
tgaggtacccccattgtttgaggcagtgaaagtaattctagatgaaggtatctcctaattgaaaacaagtacagttggccaggcgcggtgtggctcacgcctgtaatcccagcactttgggaggccaaggtgggtagatcacctgaggtcaggagtttgagaccagcctggccagcatggtgaaattctgtctgtactaaaaatgcaaaaattagccaggcattgtggctcatgcctgtaatcccagctactccggaggctgaggcaggacaatcacttaatcctgggaggcaaaggttacagtgagccaagactgtgccactgcactccagcctgtgcaacacagtgagacttcatctcgagaaagaaaaaaaaacacacaaaccactgtggcaggagcgtttctattcactctttgctctcccactggaggcaaaaagctacacaggctagagagtgaccaggcaagagagtcacc

SEQ ID NO: 184617 - DNA, 615 bp, Homo sapiens
attccagaggatccccgtatagtccaaccatacgaaggcctatacaatacatttcaagtggtaattagttttgataatttctccaattatttttgctctctaatcaggaaaatgaagcatttgaaacaaataattgtgaattcattgagaggtttaatcacctctgagtcagtaggcttatcatgattttgtttggcatgctttacgattacgttaatatatcaaccaacacctgaaaaaccatgcacatgtaaatgtttagtttgattatagcaaaaaatgctgaaatttttctgaagacacacaaaaatgttgtcgttcatacaacctggagaacaaatcttttacctccaccccctgactccttcggcgctgagtacagcacaggaagttagtaagtcctcatgtttgcgatcattcctttgcagaaattaacataggagatgacagatgtcttgctgctgaaactaatgctgcttaaagaaagaaaaaactgcaattttagcattttggcttggtatgtgtacaagataataagctgtgtgagtttagaagcttggaaccaattcaactaacagatgccagtatggctcaacagtaatgtcacatgccgtc

SEQ ID NO: 184618 - DNA, 762 bp, Homo sapiens
aatgactgcagtgatgcacataatttaggatggaattgatttaaataaaattcatctaaaattcactaaatttagatttagattactacccaggaaggtgaaatgtaatgtttgcagcttcctatctcttatttgatttaactataatatggttctcaactcataaatgtttcatttttggaaggcctatacaatacatttcaagtggtaattagttttgataatttctccaattatttttgctctctaatcaggaaaatgaagcatttgaaacaaataattgtgaattcattgagaggtttaatcacctctgagtcagtaggcttatcatgattttgtttggcatgctttacgattacgttaatatatcaaccaacacctgaaaaaccatgcacatgtaaatgtttagtttgattatagcaaaaaatgctgaaatttttctgaagacacacaaaaatgttgtcgttcatacaacctggagaacaaatcttttacctccaccccctgactccttcggcgctgagtacagcacaggaagttagtaagtcctcatgtttgcgatcattcctttgcagaaattaacataggagatgacagatgtcttgctgctgaaactaatgctgcttaaagaaagaaaaaactgcaattttagcattttggcttggtatgtgtacaagataataagctgtgtgagtttagaagcttggaaccaattcaactaacagatgccagtatggctcaacagtaatgtcacatgccgtc

SEQ ID NO: 184619 - DNA, 537 bp, Homo sapiens
tgagaagaggtgcagagccgattcaggacatcatttagatctaactagacctctaataaagtcagtgtgaggagtaaggaaaagagaggaatcaagaattgagcccacagtttgacttgaacagcagctgggtggatatattgccactcacactgaggcagagaagatgaggagataaactaacagaggtcaagaagatgaagagttgtttcaaacatggtacagttgagattcctagcattattctagtcagacgtgtttgtcaagtaggccattggatatcgggatttggatttgaggggaattcatagatggaaatataagttcaagaggcatcagcatggataccctatttggatctggatgaaattacctaaaggagaaaatgcaggaggacgtgatgctgggtgattttagaggagaaaccatgaaggattccaaggagcagcagttggtcaggtgggaagaaaggagtgtgacatcacagaagatgaaaaataaaagtattttaagaaacagaaaagtggacaaatgctg

SEQ ID NO: 184620 - DNA, 466 bp, Homo sapiens
tccatctgtggccaagactcggttctctgcccagatccttttgggtcccctctcttgatttggcctgccagcccccaggtttgtcatgccttcacttctagaggcctgcctcacttttagagggtaaagtggcttggggttactacctctggaacagccccaaccaatgactggcagatacaggagtgtgagaccccagctcccctgcttccaggcaggaccaactccgaggtcaagatcagggtggagctaagatggtccctgaaatctcacccttgcttcccttctcctctttcctatcctgtcccatttatttctgggtctcattaggagcatctccctaaataaactgcttacatgatgccctcatctcagggtctgcttcttgagaatccagcccaagacaccatctgacttcatcttgaatgcctgatcttccttgtccacgtgggaaattccttcaata

SEQ ID NO: 184621 - DNA, 943 bp, Homo sapiens
  misc_feature (551)..(551): n is a, c, g, or t
tgcagcaacttctggttcaaattcccgcgcaccagctcgaagctggagcactttgtgtctatcctgctgaagtgcttcgactcgccctggaccacgagggccctgtcggagacagtggtggaggagagcgaccccaagccggccttcagcaagatgaatgggtccatggacaaaaagtcatcgaccgtcagtgaggacgtggaggccaccgtgcccatgctgcagcggaccaagtcacggatcgagcagggtatcgtggaccgctcagagacgggcgtgctggacaagaaggagggggagcaagccaaggcgctgtttgagaaggtgaagaagttccggacccatgtggaggagggggacattgtgtaccgcctctacatgcggcagaccatcatcaaggtgatcaagttcatcctcatcatctgctacaccgtctactacgtgcacaacatcaagttcgacgtggactgcaccgtggacattgagagcctgacgggctaccgcacctaccgtgtgcccacccctggcacactcttcaagatcctggcgtncttctacatcagctagtcatcttctacggctcatctgcatgtacacactgtggtggatgctacgggctcctcagaagtactcgttgagtcgatccggaggagagcagtacagcgacctcccgaagtcacgaacgagttcgctccatgctggcctcattgacaatcgaaccggctactcaaggcgtcgccgctcctgtcggaggggtgggaaactgggacgtgagctcacagaggtggtggcagccgcggctccagggcagtcgcgttgtcgcgttcggtccaaggttcggtgggtctcggtgaccacgatcccgatgcgggtcgggggtgccgcgatccgcttagaggtacaacgttcgtcgcgtccgccgccgttctctgctctccttctc

SEQ ID NO: 184622 - DNA, 483 bp, Homo sapiens
tgggctcaaatgatcctcccaaagtgctggggttacaggcctgaaccactgtgctcaaccaagagagattcctttaaggaggaaagaaaaaaaaagatgaataaatgatgagttttaaatttgtttctccgctaggaagcacattggacacatatgcatttatagagtcagacagatcatagagcacagatagcttcctgtaagaaccttcttaaatctgtctaggacagaccgggtcatgcagctcagacatcctgagctcagcacacctggagaaagtgagacatgaggactgcttcacagtggtagattcatgtttgtttgttgttgttgtggatgtttgtgtgtttgaaaccccagaaacacacaagtaccatctaatctgtgatagaacaaataccctacagtttgctgttacagatagtttctgcccaagactggtctttccgtactagacaccaaagccatccattaggcaaggat

SEQ ID NO: 184623 - DNA, 291 bp, Homo sapiens
ctgtgcttaaggatgaagcaggctgaaacaccctcgaggcatgaagtgatgcctcaggctagtggggatggggaatggacaagagaagagcttgtggggtggtatttgagcctatttataagcaaaaagaaagaacctagtagagaaaaagagatttacatatgatctgggagagagaagggatgattaataaagtgagttatggaggaggtgggagtagatggattttgaccacaaggagaagggatttgaaggaatcgaagatttgctggatactgaagaaaggaatga

SEQ ID NO: 184624 - DNA, 173 bp, Homo sapiens
taccaattggcctcacaccgatacacctatgcagtttccctctgcttaagtgctgtgtactttttgagaaccgagcactactctcaactcataaataccttgactttttaaacaaaatccaaatgcagcctatggcacatcgccaattcactctcattgtcagcatcggccat

SEQ ID NO: 184625 - DNA, 284 bp, Homo sapiens
ttggttgtggggtatggatctggaaggagtttggtacttaaaagaacacacccagagcaagcagtcttcaagtaattcttccccggctctagctttccactctcccactgcttcccctgttgagtaaatgagctatatccatcagtgtaaactcaaagcattacttgctctctgaaccgtcagccaggtttaagcaccagctgccccgtctgtctaaatgctcctccactgcttttctagccttaaggcctgagtcagacatcctgtcccctgcgaagtcttct

SEQ ID NO: 184626 - DNA, 470 bp, Homo sapiens
ctccacagttttagcttgggattggcactaaatggcaagatcttttatgttagttacaaagaaaaaacaatcattgagaagatggcttttgagcctttctaaagggtaggtgaagtaatccaggatccagcactaattaccacttttttcccctatctctttatccacagaaacccattcccgctcttttgagtatccttcagagttctgactatatccccttgtctttgggcatgtttatcctcttaatcccatgataaacccatgaaattccaaatacttatacatcccgtgtcaacttcctccattattccctcgactttcttgttgctgcttctgtttttacatgttgactttattccggtgtcagttttcttcccttttttaaaaaaaaatttactccatcagtttctcattttcttctttcaagttgtcttaccagctgcagaccagcttgggggatccttaga

SEQ ID NO: 184627 - DNA, 453 bp, Homo sapiens
ggactcttggggcagccacagcaccaggtgctggtgtccagggggtgagtccgggccttacaatgcccactccccatcgggggctgcgattagaggactgctcgcttccagtgatgcttccctgaggatttgaaggagacgggtctcctggcgaactgtccacaaagggggacgacaaacagagttccccggtgtccagaactcacgcctggcttaagttcacggagagcagaagagagaccgtggtcctggggagcgatggcccaggtcatagctgatgaccctcaggaatcatgagctcacagcaggtgggccaccccgagcatgcacccttggaataacagtccccagcagcatgcagcatctgacatcaggaagcacggatggaaaaggagcatgatggggatgcccagagacacacagggtgcgcagagtgggaacagccccacgaga

SEQ ID NO: 184628 - DNA, 372 bp, Homo sapiens
tattttaattagaatgatctaacaagagggaaaaatcgctgatttaacaggtaaaaattatgtaacacaaaattagaaaagctagaagtctattttgaaacttttgaaaatttcgcttagatttaaaggggctttattgatcttatctgtagtaggagatactgattttttcccctgcctttccaaacattcagacgtatgcacctatatgtacactaataagagggaggaacgattgatacgagacctatgagattattcgaaatgcaaaacctttgagtatataagagaggatacagtacctggcttcgataggagcggtaactgttcatatatactaataggtaaggattgcttctgcctttctcactg

SEQ ID NO: 184629 - DNA, 386 bp, Homo sapiens
cttgaacccgggagatggaggtggcagtgagctgagatcgcgccactgcactccagcctgggcgacagagtgagactctgtctgagaagagaagagcatcactgagacaccaactcatgacttcctggatgcgcttccttcttaagacaaggcaaaaattaggtgaagtacaaaaaaaaaaatagccgggcttggtggcaggcacctgcagtcccagccactccggagtctgagacaggagaatggcttgcacccgggacgcgcaatttgcggagagccgagatcgcgccaatgcaactcaagcctcggggaccgagtgcgactccgtatcaaacaaaccaaaaaacaaaaagaccgtcaaatggcattaaatatcaaatacattt

SEQ ID NO: 184630 - DNA, 262 bp, Homo sapiens
ctgccttggcctctcaaagtgctgtgattacaggcataagccatcacacccagccaggctctgggttttattgaggctttagcaccattttccacatgtcacagaacatgacagagagtgcgcctggtcagttaccaaggtgcagtgtttacctggtggtctcccagctacacagcttgcttacatcataaatgaagactactggtgtgtagagaaaatccctatttttatttgtttgttttctatcatgacctgcaagccc

SEQ ID NO: 184631 - DNA, 301 bp, Homo sapiens
caccctcccacccccattctttaactttttcacactactctcctgcctatctgacatcttaataaacctggagcccacctaaacctggcccaatggaggtactaataggaagggaattatgtatatgattcagtagaattttactttgacttgtgcagtttttcctgagtttgaccagatgaagaatattacaaatttatatctggattatagatgtttgtacacttgtgaggtagggatgggagggggagcaaaactggagtagataaaatatacaaatctacacattgaaaaaccatct

SEQ ID NO: 184632 - DNA, 357 bp, Homo sapiens
tgctttgaatctccaaacttgaacgacattatgactgtgctcatagccaggcttcccttgcttgtggtcattgctgtggatcaaggttgttttgccttccatgcagtggatttgctgaggtgcttctcaatctgtatctcagaattgagatgtatgagaaagattctcaggaggggagagatatcctcttggggacacgaccattggcttccttggcctcattgagtagcagtgaatatggaccaggggaggagagcggcaggactcacagggatggtctcagcagtggaggatggtggcaaagagtgaggacttaagattcagatgaaccttgcctggaactgtgcctctgtgcct

SEQ ID NO: 184633 - DNA, 384 bp, Homo sapiens
catagacggcttcattttgaggagtaaattacaattgaacatgaccaaatatacatagagaaggcgtggaccacacaaatgtgattgaaagctggcgtggagtcatcttaaattgactttttcccaaagggcccctaaaagagggtagaatcccaacagatagagtctatggagagatagactgctgagacccatattatggtcagtgaagtgcaggcaaggaagggatccttagcaaaatggggagaggaatggatggtctgaaaaaccctgaaggaactgaaacactctgcaaaggaaagaagaacaagtatcagctttgacccctgccagacctaggcagcaacaacggcagctcacaaagcaccagaacaaacgcgcttt

SEQ ID NO: 184634 - DNA, 238 bp, Homo sapiens
tttttgtcacgatctttgctgtcttgccttttctgcattgttgtttaattctgttgattgttttaatttcaagggtattatgtataggatgttttaatcctatcaatgtgaatcatgactagttgaaagaatgtttatttactctaaatgaaatagagaatctattcttaaaagtcctctttaatgtgttgctatgcataggatcgttccaaactcttaatatttcactcttttgttt

SEQ ID NO: 184635 - DNA, 544 bp, Homo sapiens
gaggatccccggacagcacgcgctaacaagcctttcctatctccaaactgaatcattcctcctctggcccttccttgatcccatggtgtagcccttattcctctccctcacaggtggcactcaacctctgccagaatgcttccagggagggagagctattcagtccgcaagcctcagttccatttttgggcagctctgattgttaaaaagttcactttcctgtaatttccctttttagatctgcccctggaacaaccaaagagaagtctgcgtcatttcctttcaaatacatgaaatgtatgccccttctctgttaaagatctctagtcctttcaacttctcacatagtgtagcctgaagggcctctccacccctcattctcacatccctgcaattcgttgttagcgcgtgctgtccggacagcacgcgctaactaaaagagaccctatctctgaaaatgggcaaaatgaaatagaaatctacaagagtttagaagaactagaaaagaataaatgtaaggacaaagcaaggagatctaacatat

SEQ ID NO: 184636 - DNA, 213 bp, Homo sapiens
cagaagctggagtgggaaggatggcttgagcctcggaggtggaggctacagtgagcatgactgtgccactgcactctggccagggtgacagaatgtgaccttgtgttaaataaaataaaacaaaataaaatagccattaaacccaaaaaaagtagaaatcaaagtacatttaacaatagtcatctctgatggtgggattagtgaatcatttta

SEQ ID NO: 184637 - DNA, 1001 bp, Homo sapiens
ctaggattggcatgggatactgtgcctggccccctgtctaatcctgaagcttccacttcctctcctcttaggtgctcaccagtccattcatatagctcttgccatgttgccaaatcctgtggccagttctcagtcttgtctgatatggtcgtcagctgtattgggtagttggtcactcccttctccttgagactcctgcatgtggctttttcagggcataatggtcatggttctccctgcctcattgggctcttcttccccatctcttttcttggactcttgttgccctgattttgggacactggagcatccccaaggagccctggaggtcctctcattcccctggtgagctcacccagttttctggtgctaaatgccacaaatactctaatgttccccagtgtatctccagtctgaacttctccctgacctccagatttgggtgtcaggcatgctttgtgttcctagacaccagtcagcatctcaagcttggcacatttaaaagcaaactccagatttgtccctgctacctccttcctcagtgtcctccttttcagaaaagggcaagtcctgcttttcatttgcttgggccacagtctttgggatcacctcctattcacaaccctcatccaatctatcggtgagttctgtaagctgtgccttcaaaatgttctcagaatgaccacttctcactgcctccaggctctgccttcaggttcaagccactgtcctccctactgagatcatggcagaggcctcctttctggcctcattcagccagagtgatccactgaaactagtcaggtgcctctacaactttgttcaaccctccagtggctttccatcatattcagggcaaatttcacagtcacagtctccacctgtgtctgcagatcatccacccctctctggcctcacttcccactacccttcccctcacccactcctcttcagcagtgcttgcttctctgctatcttttgaacaggctaagaccttttcc

SEQ ID NO: 184638 - DNA, 328 bp, Homo sapiens
gcacaataggcatttatgatactatgtaataggaagcctgtaataaaaatgggaactgtttgatagttatctgtaaatagaatgttagtaaatatattttgtttcatttctcttcctactgcagtctggggtcgggggaaatcagtaggctcccaccttaaagaacatggtgtatatagtaatgaaatgaagtgaagactggtgctcgaatgaattgaatgttggtagttgtctttgaaaaaccaagagggtacggtactcagattaaaaatatgtctaaaagtacagaatttaaaagtatagttatctatacttatctgtgatagat

SEQ ID NO: 184639 - DNA, 324 bp, Homo sapiens
acctcagagtaccatttatactgattcatttactgacctacatattgatccactacttcttcaacaatctgcttttctgttcccaagacaccattttcatgctgaactaaatgtaaacacctagttagcaaatgtggaggacatctgttctttttacatgtccagcatctataacccttttatcttttgcaaacgaattagctgtcctgagtttgctctttttgttgttgttgtgttgttttttgaggaaacagtctcactctatcacccaaactggagtgtagtggttccctcatggttcactgcagcctcgacctcccgggc

SEQ ID NO: 184640 - DNA, 595 bp, Homo sapiens
tcgtgtccaagacctttctctttcaaaggcagcggagtcacctgctgtccctctcagtgactgctgtctgctggtcttccgcttgcacctcgtcatccattgaggacttgtgttcctggctgactgcgttctccatccttcttgccgtcttgtagagcagcaacccctctacattcccccagcaggtttgcaacagtgatttcatacaagacgttggtgtcgtcacccacgtggacaggccagcctactccgcatctctctgggcacttagactgctgcagctccagtgagcttttccaacatgcctctcagccaccactccctgcctgcggtcacacctgggaccctccatcacccagaaaggagacttcagacagctctctgctgacctctcttctgttgctccagaactctccacttggcctccccacctcattgtcactctctctgtggtcattgccttccttaatcatggttcataattaaaatcaactcctgcagggcgaggtggttcacgcctgtaatcccagcactttgggaggccgaagtgggtggatcacttgaggtcaggagttcgagaccagcctggccaaaa

SEQ ID NO: 184641 - DNA, 298 bp, Homo sapiens
gaataagtgctttgaagaaattgaagatctttttttcatatgctgaatctgtggaactttcaagagaataccacacagttttatcagtattgaatatcacagtccagacactatttgaaatcagacttatatcctgtggttttaggaaattaaaatgcagttacatgctggaatgtattcagcctgctgtgaaacatggtcatttgaggtttaaatggcaatctgtgagaaacggttctcttctctggggccagttttacttttacatgacccaaactttgactcagaaaatagagct

SEQ ID NO: 184642 - DNA, 370 bp, Homo sapiens
tggcagagagaaggtggcaggttcttataaggatcctaatcctagtggatcagcacccgcccatacgacctcatttaaccataattactgccctactccaaatgcagccacactgggggtttgggcctcaacatgtgaattgcaggggacacagttcaatcaatggtgcctccacagtcccacctccaaggctttgccagatcacgccccccacggagcacacccggtacagaaccagcccaatcgccactcggccacccagccacccaggcagatctaggtcctaatcagcccgcgccaggccaagggctccagagggcaggaaccctgccttctgcccggaagacgcaggccctcgttctctccaatt

SEQ ID NO: 184643 - DNA, 383 bp, Homo sapiens
gttttcacaagcacgtatttatggaacgttttacatttcttataatgttaatccctgattcaaaggaattaattattcctatatcaaagtattaatgtagaaaatgtcaaaaagaaaataagatttttacttttcaactatacaacttcaattaaacctacatcgcagcttcaggtttcccgtgtgagtcacgcgtttctagaatgcattctaaaactggtgcataggtttggtggtgactgggtaccaggtactgtgccagtcatttttatataccatctgatttatgacctctgagttcagaattctcttcattttaaaacgaggaaatcagctcgacatccagttgagtgggctggtcaatgaattggcaccatctgagt

SEQ ID NO: 184644 - DNA, 362 bp, Homo sapiens
gtgagaaatttgattcaggataagcaaaaagagagtagtaggcaatatataaaataatgcataaattagaactacttaaacttgagggaagcgagtttttatgtaagatttactactagtattacttgattgacaacttagctactatagcaaaaaccaactccctgtgatattttaaaaagaaatactccatgtcataacactgaaggtgactcaccattaacttcctgctcttgcctaaggaccctcttgcattagtaatgactaactaaaaccatttgccatgtctattcaaacaggaaaatcctgattaactacaccacgagttagaggaccaacctccccttgtgacatgggcgtga

SEQ ID NO: 184645 - DNA, 175 bp, Homo sapiens
gcagttttaatatatgcagatgtgtatactccagaattaatttatagttgggaatggaaacatcttcttggaatttaaggctagttttgaactatggaagatgatgaagatattttctggggtttgtcaagaatagaatgtcatcatggttcaggttccactggggtgttttgag

SEQ ID NO: 184646 - DNA, 381 bp, Homo sapiens
tcagcttgaggattgagctatgtgttatgattcactttggtaatatttgcctcagaaggatttctgtgattatttctcttttagcgatgtagagaattctcagggacaatcaagccttcagccccagtacacagtgacccacataaaaaatgtccctgaaatggcactgattataggactagaagtttctaaagagaaacaagtctttcaacaagatagcaaatatttcccacattttgcttttgtctcaaattactgaaaggatataacttaaagatagtaattcttatgccatagatactatccaacagaacatagattgttctgatttatcccttcttgaaaaactgatcttttatttgcctttacaacccctctgca

SEQ ID NO: 184647 - DNA, 343 bp, Homo sapiens
tcagaacatgtggcctgagcctaagtgactgggggaaaaatgagtggagacttggggatctgtgggaatatgacaaaagagctaccttttgtgtcatcatagtgacagaaggaaaggaggaagggggtgggactgaaaaagtattcaaataaataatggctggaagattctaaatacggcaaaagacacatgcctgtacatttaagaagctgagtgaaccccaaacagaataatcttaaagaaacctacaccaagaagcatcacagtcaaacttctgaaaactaatgacctatgaaaaaagtcccaaaagcagagagagagagaaaggaaaccttacctatac

SEQ ID NO: 184648 - DNA, 275 bp, Homo sapiens
gatggcaggcacctgtagtcccagctactcaggaggctgaggcaggagaattggttgaacccgggaggtggaggctgcagtgagccgagatcgcgccactgcattccagcctggcgacagagcgagactcctcaaggtgcatccaaaaaaagaaagaccagaggacccagcaatgctacctctggatgcacacacacgaggacagacaggagggactcaaacagaagcttgcacacgcaggtgcacagcggcacgactgccaacagccacaaggt

SEQ ID NO: 184649 - DNA, 242 bp, Homo sapiens
ggattgctgaatctcaaagggttcatgcatttaaaattttgataaacccttcacaatgattatacaatttgtacttgggaatatatttttaaaatacagatttattgggccccaccccagaactactaaatttacaatttctgggagtagtatttgagaatttctatttaaaatgcagcttttggggtaattctaatgcaactagttctctgaccagcatgttaaggaccactgctagagta

SEQ ID NO: 184650 - DNA, 292 bp, Homo sapiens
atgtaaatatgatgatgttctgagacacacaggcacagattccagggatctttttcagtcacacaggatactatttgtctccagatcaccaactaccaaatataggtgaggtacctgtttcaggggaaccaaggcacaagattgctgagaagtcttttatatacacaagttgcagccaaaatcaggcttttaaaacagagttagatcatccacctattttcaaaagacaggccaggtgcagtggctcacacctgtaatcccagcactcttggaggccgaggcgagtggatca

SEQ ID NO: 184651 - DNA, 245 bp, Homo sapiens
tgctgggattacaggcaaagtctgataaatattttttcaaacagagactagtagtcaggtataatgagtttgggtctgttacaacataaagtcaacaggaatgataaggcttccttactatttgaaggagttacctggaaccaagctagaaagcttagagaaagtaacaaccccttgtggattcaaggaggctggagaaccagtagggaccgaaggaacagtaagtccaggatgtcattcctata

SEQ ID NO: 184652 - DNA, 360 bp, Homo sapiens
aaacatttaaggaaaggacttcttttccatgagagttcttggagccttcagcacatccatgcatgctgtaattctccagaaggctagagatgtgtccagtagctcgtgggactagaatttcccagaacactcttgcagaaactaaatctcttagatactgttcggttctgtgatactgatagaaattaatcaggtcagttctccagcacatggatcgacagctgagctctcatcaactggctgcatgaagtagccctccaagatttcacattgaggcaagaaaaccggcctttgcccttcctctgcttctcctcagacagtgagcacacatgatgtgtttagtatgttgtagacactggg

SEQ ID NO: 184653 - DNA, 380 bp, Homo sapiens
tctgacaaatcaacatagaagtgacttgttacaagtgagaactggtaatgacaggaaccataacagcatgctaatggtctttgataaatatggtgaatgcacatggtagaatttaaaggtcttggtttgaagccctcccaagagtagttgcaactttgaggttgggtttaggaataacttctgcaacctttagcttcactcctgggagaaactttggatacattttacctgcctctcttgagcttcagttcccatatttgcaaaatgccatgacttatctcttaagaatttagttagaataaaacagataccgtaagttaaaagaatacttggttgtgctccagcgtgtgtctgtatccggaataggatacagtaggtaa

SEQ ID NO: 184654 - DNA, 322 bp, Homo sapiens
ggctcggacctctactacggtatctaactgtaaaaacaaatgcacatatggaatttaaaggtcttggtttgaagccctcccaagagtagttgcaactttgaggttgggtttaggaataacttctgcaacctttagcttcactcctgggagaaactttggatacattttacctgcctctcttgagcttcagttcccatatttgcaaaatgccatgacttatctcttaagaatttagttagaataaaacagataccgtaagttaaaagaatacttggttgtgctccagcgtgtgtctgtatccggaataggatacagtaggtaa

SEQ ID NO: 184655 - DNA, 274 bp, Homo sapiens
ttccttcccaatctgtttgcttttcttttcttgtcttattgtattagcttggacttctaggatgacattggaaagcagtggttagatgggacatctttgtcttgttcctgatcttaatgtgaaagctttgagtttctcaccatgaagcatgatgttagtggtagggtttttgtagatattctttatcacagtgacaaagtttccctctattcctagtttactgagagtttttatcatgaatgggtgttggattttgttgagtgatttttctgca

SEQ ID NO: 184656 - DNA, 147 bp, Homo sapiens
tcttgaaataaaaatgccatgtatgtttagtgatgctaccataaccaccggtttcaccagtcagccatcaagaaagtatttaagaacccaaagagctcagatgctaagaaagtctctaaagttgatttttccacctcttaggccaat

SEQ ID NO: 184657 - DNA, 138 bp, Homo sapiens
ttgcgtccctcaagggctaatttcaattattgtgaaattgattcatttgaaacatttgactccccagtgatgacagatgagagagggcagccatctcctaagcatgagtcttggttacattctctgtattgggcttcc

SEQ ID NO: 184658 - DNA, 186 bp, Homo sapiens
acctgttttctgtatcttgggtgtaaggagagagtaatgaaacaacacattgttttgccaaaaagcattctaagcttatctgaaagaagtaacagcttccaactgttgtctaagaaccagcatttttgtactagctttgctagtgggattgggctggggaaaggagaagtaatgcaaggaagttaa

SEQ ID NO: 184659 - DNA, 311 bp, Homo sapiens
atcttggaccaaaatgtgcactcttctatatctaccacaaagagctttgtaggccagatccttggcacaatctctaattatcattgtaactgcaccaatgcacaccttttcagagaaggaggaattcctctcttctaaactaatcattccctctgtgcccttaatcccattgtctcttgtctactctgggaccttatttcaccatctctttcttcctgcctacattcttttcttttctagctgtttcaaacaccaagaccacaaccaaaaccattacatgtagatatagaagagtgcacattcggcccgag

SEQ ID NO: 184660 - DNA, 353 bp, Homo sapiens
cggccctcctccccagtgccccaatcccagtcttacattgacacaatgccagagtcagaggggaccccagggatcatagattccaagcgccttgttgtgcccacgacaagtcctgatcccaaaaaggagaagtgtcttatccaaggttgcatgacatgcctggacaccctctggcccccttccccagaatccttgccctcagccacttctcagagtccacactcacatctcctaaggtgtcgatgataacaatggctttcctttactaagggaatttgcatttggttaaggttagggtgagatttaaggagaccaaactcttgagacccaaaggaatgtgttggtaatagtgg

SEQ ID NO: 184661 - DNA, 245 bp, Homo sapiens
cccgccttggcctcccaaagtgctgggattataggcgtgtgccaccgcgcccggcccacccactctttccagaccaccacaccagcctgctgatggcgtcctggcctccattccgccttcccctattagccagactgaggccaggggactcgttctcaaatgcaaacgacctgtacatccctttgtttcaaacctctatgactcctggtcactgtaaggatagagcacagggggtcctcacttca

SEQ ID NO: 184662 - DNA, 241 bp, Homo sapiens
tgagaggctgaggcaggagaattggttgaaccagggaggcggaggttgcagtgcgccgagatcgtgaaactgcactccagcctgggtgacagagagggagactctgtctaaaaaaaaaaaaaaaaaattatagttacctttacctttaactgctctatggatcacaacctggacattacacaacattaagtgttccctttgagatattccttcagactctgggaggccaaagcaggtggat

SEQ ID NO: 184663 - DNA, 146 bp, Homo sapiens
gcacctttctaatgtcgggacaaacaaggcattttcaagatcttttctacctattcattagttaatactaaatacctctctggttctgtgtgccaagcccaagattttgttgttttcatttcaaacattaaagtacttgatgctac

SEQ ID NO: 184664 - DNA, 682 bp, Homo sapiens
gaaacattttttggctattctcaccttcaatatattcatagaattatctcaaattgcctgtttatttccctctcagtctgaaacgaaaatgagagaaggaaagggctagaacagcatcatgcattctgtttatgcaggtcttgcacctaaggtgttacgaggaggaggaatctaaggtgttatgaggaggtgttatgttcagaagccaggcctgccccttggtccctaaatattatttcccaggctttctctttccttgctctcttttgttatttgtagctaaccctgaagtattatgaaagcttctgctgaaaaagtacttgtagagccaggtaacgtggctcatccctgtaatcctagcactttgggaagccagggcaggaggattatttcagtccaggagttcgagactagcatgggcaacatggcgaaacccaatctttaccaaaaacaaacaaaaataacaaaaattaactgggtggggtggcatcaatcctcctgcctcagcaggaggcctcccagaatgttgggattacaggtgtgagccaccacgcccaagaaggggtaggttttatttggtggagggagcggggagacacagaagcgattggagttgtctttttccagtgggagatatttgggaggagttagtgttggagatggaggtgggcaaagaaagcta

SEQ ID NO: 184665 - DNA, 544 bp, Homo sapiens
aataggtattgttttgctgccgaagactgagaaaagttttatggataccaattttcccctcataaagtagatcaagacaatgttcttgccaaaaccgggtacttcttagtcatgttgagctttgggaggtgtctattttctccagaagaagaggacaaagagatgcaccatatttcttaaagtcctggataggaagtttgagcatctgtttccctctatccatagttcattcacagtggtaacttcagcagtcatccagcagaactaaatagtgtccccatcatcttcaggtgctctgaataagtagtgatttgggctgctagaaagatccttgggtgggctggcagtaacacatcttccagtaatcattactagaagtgtcagcctaggtaaattcatgttcatctgggaccattttctcttactttgcttaaatttaacccagatcttaagatccaagtgttatattgaacattggtgaggtacagcgaaatttgaagaggtgggaaaaagttttcctttccacccttacagagacaacacg

SEQ ID NO: 184666 - DNA, 290 bp, Homo sapiens
cgccccctgggttcacgccattcttctgcctcagcctcccaagtagctgggaatacagatgcctgccactacgcccggctaattttttgtatatttagtagagacaggatttcactgtgttagtcaggatggtctcgatctcctgacctcgtgatccacccgcctcggcctcccaaagtgctgggattacaggcgtgagccacgcgcccggcacagctccatcttttttacttacctctttattggtgggctggtaatattgatgatttgacgctcttttatgtatgatt

SEQ ID NO: 184667 - DNA, 323 bp, Homo sapiens
tgctgggattacaggcatgaatcaccacgcccagtctggaataacaatgagattttttttcattcatggtttttaaaaatctatttttaaaatgcatatatttgtgacttgttcgttgtttaaatttcttcctctctgcccctttttaaattatttttagagacagagtttcactttgtcacccaggctagagggcagtagtgtgatcatagttcaccgcagcctcccacctcagactcctaagcagctgggactacagggatgcaccaccatgcctggctaattttttacttttttatacaggcagggtcttgccatgttgc

SEQ ID NO: 184668 - DNA, 101 bp, Homo sapiens
atgaaggtgaaaaactaaaactttcctgatatgctgcggaagagggtatccaaagactcagaagatttggaatgctgagtggatttatcctgtaagctctg

SEQ ID NO: 184669 - DNA, 623 bp, Homo sapiens
ctgaggcaggagaatggcgtgaacctgggaggcagagcttgcagtgagctgagatcgtgccactgcactccatcctgggcgacagcgagactctgtctcaaaaaaaaaaaatgaaacagttgccttttttgactggttaaatgatcaggtaggaagaattttacatgtatttatgggcacttatttgtagtttttaaattacatacttggtactggcataataggagagcttgctggtgatctttatgaagtgacatagtctcattgggaagtcatctgtctacatttgttgagagccttaaaacttttagaacctgttttattctatttgtggagacctgaatttaaaacatagagaagttttgtacgtaaagatgtttggtgatgtgattttacaattgaaagtgggctaagtgtcaaactacaggtcagccattaggtaaatcacagtatatctctcagtgaagttttccatagtcaaccactataaaccataattatgccagaattatgaaagacaacaatatagataaatgtgaatcataaacaacattaaaagtctgatagaaaatagtaggcccatccagcctgggcaacatggtgaaaccctgtctctacagaaa

SEQ ID NO: 184670 - DNA, 450 bp, Homo sapiens
gatactattcatggaatacgatgccaggaacttaacaggtagtcaataaaaactagttccttcctcatgtagttttaactattgacaaccgtaacaagctgcacataaaaacatccaagattttgctgtttttttgcaaacatgtagtgcaattagttttgccacataatagataagaaaaactgaaagcacagaagttaattgatggccaaagtcttccagtaagtccatgacccaataatttcttatactgttaagaaaatggtgaggacattttcctgctacaatgaaaatgcaactgaggaccaagaagcagcttctcggctccttctggaatctctgcctggttcagcctgcctgactccactcctgcctccaccatgtccatcagggtgacccagaagtcctacaaggtgtccacctctggcccccaggcctttagcagccgct

SEQ ID NO: 184671 - DNA, 162 bp, Homo sapiens
aagcgcagagaaattgttgcatgggtgtcctcaagtctaggatgatcattaccttatctttgtaatggtgaaagactggaatcaacctaaatgtccatctctacaggaatggataaatatggcctattcgtgtgttgccggggtccgggtaccggagctcga

SEQ ID NO: 184672 - DNA, 588 bp, Homo sapiens
gactggggatagcaaggaggtgagtgggaaatgcaaccacaggccagccagcgcccgtgcatggagtcaaagggaggagtcagcatggtgaccactgcccctgcaccgggggaggaaggcatgggggtcctgggtgaacctctccctgtactgcccagagcccagcctgactccccccgaagccgggtagggatgcatcactccgactaacaaatgtctcagccctaaagggcccctggctccaggtcaccctccagctctacagaagggcagggacgaatctgatccttgttagcactgacacaagagggcgggacctgagtcagccccaggggaagccagcatgccctggaaaggctggtcccaccaaagcatgctagtgtgtctcccaggctgcacccaggaaggctgggttggggaggagcccagggccagatgggcagcaaagtgtatccggctgtagccagccacaaaagaggacactgatgtctggcagcagcacagaaacccctgtggctgatgtttcttcctcttggatgctgagggtggtttttggagaatagtcagcttcactcccaccccagcccc

SEQ ID NO: 184673 - DNA, 481 bp, Homo sapiens
ataaggattaaacctataccttctaaatcactaaagagaaaaatgctagccaatgttattcataaatcagtaacatttatgtatatattcatttgtgtgtgtgtgtgtgtatatatacacacacatatctacttcaaacagctcaaaattactgaaaaaaaaaatgtaccaaatgtttaatcccaattaatggaattatgagtgacacatttttctgtattttgtaaagagcatgtataatttttttttttttttgaggcagggtcttgctctgttgtccatgctggagcacagcagcgtgaacttggctcactgtagcctagaggtcctgggctcaagcatcttcccacctcacgctcccagtagctgggaccacagacacaccaccatgcctggcaaattttgtattcttttataaaaatggggtcttgctgtgtcatgcatgctggtctcaaacccctgatctcaagcaatcctcctg

SEQ ID NO: 184674 - DNA, 600 bp, Homo sapiens
  misc_feature (20)..(20): n is a, c, g, or t
cacacttcgatcgcggagangatcttctccgtaggccagcagacgtgcacatgtcccccggtttacaaaggccttataaacttagcctgataagtcatcccccaaattcgtgtgccatgtctgtctctcagtggggatatttttaactcctccttctaactcctctcagttcctttaaggaactgtaatccgaaagggtcaggcacttggcttttacttaggggaaaactttgaaagaatttctgaggctccctctggggtagggctggctttccccaaaagaactggcccttcagagcgtcttttccacataagggcttgtgtgaggcctcaggcaccagttgatggccgtgtcttccccacgacagatggtcaagctttcaatttcagcaagtgatccactgttgagggggcaggcgggggactctgccagcatgccaagtgacaggccagcttagggtaacagggatctggtgtgtgcccggcatagcttttgtgctaacgatgggctgctgacaggcgccctgccccagctcatctttgaggcagaagatcctctgctcccttgattctgtttctccgcgatcgaagtgtggtgtc

SEQ ID NO: 184675 - DNA, 408 bp, Homo sapiens
ctgtccattttccacatctcgacttttgcttagttgcttgatgtaactcacttcatgctgagtttagacagctctcacagtttcctcagcaccaggttaaacagaactatcctttcaaagagcttccctgctgagatgcagagtaggagtaaatagaagagtgtgggatgtccacaaagcaaggaattaaacaaagtaggccagacagactatagagggagctgcttgtctttaagattactctaaggaactctgccacttcctctagcttagtgaatattttggtagattgttctagatactgtgatagccggctatcacattatcgctggttatcctgtgcattgtgactgtctgtgtgactattgtgtgcacatatttttaacctaaatgcagaagattaccggt

SEQ ID NO: 184676 - DNA, 642 bp, Homo sapiens
  misc_feature (393)..(393): n is a, c, g, or t
  misc_feature (397)..(397): n is a, c, g, or t
  misc_feature (401)..(401): n is a, c, g, or t
  misc_feature (523)..(523): n is a, c, g, or t
  misc_feature (533)..(533): n is a, c, g, or t
  misc_feature (591)..(591): n is a, c, g, or t
  misc_feature (603)..(603): n is a, c, g, or t
  misc_feature (605)..(605): n is a, c, g, or t
ttagtggcaataggtaggtcagtctgaagataatgaatttgaagtgtgtatatgtcaactcaagtggaattatcaagttagcattttacctatggatataggcaggagaactggtgatgtgctatagatgtggatgtaacttgcttataatattcattgaaactctaatgatgaatgagattatccaagaggagtggggaaaatacaggaatctaatacaggtcttgaggaacagtgtcattaaagacacaggcagaagaaaagaagtctgcaaagtagcatgtgaaaaacagcaacataggttagagcaagccctagagttgattgtcacaggaggcgatatttaaggaagtcctagtaataaatgttataaagcttctgagagaaaagtgngtgntggngaaaggaagaaagaggttgagaaaaggagatctatcagagcagttgaaaagaaacaattttttaaaagtgacctatggcaatcagagtaattatgtaaatatagtgacagaatgatacaggnaatggttatnaacaggagcaaaggagacacagagaaaaactccaaaggctgtgacttgggtggttaancatatgaatgtncntggatacctgaatgaacactggcaaaatgaatgcgta

SEQ ID NO: 184677 - DNA, 120 bp, Homo sapiens
caacccggtaggtgacaattaactaagaaatgggatcagagttagattttaggatgtcatgtatattgattagggattgttatacacagaattattgaaagttttatctgaacaaaggcg

SEQ ID NO: 184678 - DNA, 375 bp, Homo sapiens
taggctcccaagtcagacagtccattcttctgaggcatgcaatacattctttcccagtttcccatgtcatcccacagtcatccgggctacccaccacggcatcttgacttgcatagggccatcttgggtgtgaggagggctatgaagttcctgtactcactacagtgactgcacatagttctgcccaccagtttgtcacagatgggtcttggaatccgctggcacgagtatgctctggactctggtggatttctctttgtgttgcctgttactttctttccatatgttgtgctactgtgttacttggtgctatgtgaataaagacgcatggtggatctgctgtttaaatggtgccctctcttcttcctacttgct

SEQ ID NO: 184679 - DNA, 498 bp, Homo sapiens
gaggagaaattctgagcttagctccactctgtagggagatacatgtatcctacagggtagagacatttggaactagatggttctgagacagctggagcatctgctgggagagtcaggggaggacagggtcccaggccccacccaaacatttcctgtttgtctccatccagctccaggatgactcacttgacccatctccagataattcatgagcaaagaatagcatctcctgggtcgggataagctgaaaagatggggaaactatttttcaaagcctcccttaaactgtgaaatgtgactagctctctttaagtcttagggaacagtaagtgcctggttataaaagcaaaagctccttatccttcaatgctcagatgtactgttaaccacagggaagctggtggctggccacagttgccaaagaattcagcctaaccgagacacgtgccaaactggtttttcactttattggggatttaaaatggcagaagacagaac

SEQ ID NO: 184680 - DNA, 413 bp, Homo sapiens
atacccaaacctgtgggatatagcgaaagcagtactaggagggaagttcatagctattagtgcctacatagaaaagaataaaaacttcagataaataacaatgcatcttaactaaaaaagcaagagcaaaccaaacccaaaattagtagaagaaaaagtaaagatacgagcagaaatacatgaatttgagatgagaaataatacaagaaatcaatgaaacaaacagttggctgtttaaaagttaaacaaaagagacaaacctttagccagactaagaaaaaaaaaaagatccaaataaataaaattcgtttctagttcttcagcttccatcctgcttcaccagcaacagtaataccttctctttatgatagtttccagtctgcttctgaatgtagaagccttctttcctcctt

SEQ ID NO: 184681 - DNA, 534 bp, Homo sapiens
cacctcatcagcataaactcaggtgcagtgataacgaataacagaagacactcccaaactcacgcctgtaatcctagcactttgggaggccaaggcaggtggatcgctgttgagctcaggagttaagcctgagcaacagagaccctgtctacaaaaatgttaaaacatcagctggcaggaggatcgcttggaggctgtggtgagccatgatcaagctactgcactccagcctgggtgacagagcaagaccctgtctcaaaatacaaacaaatgaaaaaagacactcccatcattcaggaaacttccagggttctcagccctcagtgctggtgccaggatcaggtcaaagaacaaacaaacctttcttcacctggcttcacccttgccactcctgggagagcctccctacctgacctccacctcctccccaggcaatctcttccctgacttgaatacacacgccccacaggtctgatgggcacggcacagtccacacctccaagaactctcaactagcgcccctcctcattctgc

SEQ ID NO: 184682 - DNA, 553 bp, Homo sapiens
actgcaactacggttaccataaagtgattactatgtgctagattgtgtactaagtgctttccatgaaatatttagttgtcacggcaaccctacacaggtctggccaataaacatttctgcaatgatggaaatgttttataatactagcaccacctaactctggtagccattaacacatgtgaatattgagcattgaaaatgtttctagtgtgactaagaaactaaagttttaattttgtttagttttgattaattaaaatgtaaatagctagtgtggccagtagctatggtattgacatgatgcagatacaagtactttgattctcatattacatgtagagaagctacagttcaaagaaattaaataattttctcaaggtcacagaacttgcaaatggcagagcaaggatttgattttgaagtcagtgtccttatccctatagtgtatggccactatttagactgtgcctgctctttttgtatccaaatttgttaagaaacacctctggtacatttgcaattaaccattgaaagaaataaaactgataattat

SEQ ID NO: 184683 - DNA, 166 bp, Homo sapiens
tgcagacagatttttccacaaatgccagcagcgtccccattggaaaacactttgttctgtaaccattttggtgcactgttactttcatgttcgctctgaggacagatctctgataatatacatctgtaaaatactcatttcagctctacttagccctctgaaagac

SEQ ID NO: 184684 - DNA, 305 bp, Homo sapiens
agttaacggtaaaataccatgctaaaacaactagctcaccttcgattttaagtagaaatcttataaacactgtctccacaattttggaatatggtcaacggtcaataagaaaatttaaaatattatgcttagggcaggcacagtggttcacatctgtaatcccaggagtttgggaggctaaaatgggcggatcacttgaggataggagttcaaaactagcctgaccaacatagtgaacccccatggcttatgaaaatacaaaaaaaatagctgagcatggtggtacatgcctgtaatcccagcta

SEQ ID NO: 184685 - DNA, 421 bp, Homo sapiens
cctttatgatggccattcctaggccaaccaccaaaattcacccttccacataatcctctccacagctccatcattacccccagttcccagtacagggaacaatcttaagggagggccacatgacttcctaaggtcacacaccaggacctgcagacaacctgggctcctacagcacctgagctcctgtgtggacccctcactgtgccaggaccctgggggaaccctaaagaggaggtgtggggttagagaggataggccccatgtgactggcagctgctaattcaggtcatcaaatatctttatttggagacaagcgtctccctctattgcccaggatggagtgcagtggcgcgatcttggctcactgcaaactctgcctcccaggttcaagtgattctccggcctcagtctctccagtaac

SEQ ID NO: 184686 - DNA, 328 bp, Homo sapiens
tgaggggaggccagatagggcagggcttcatcgggctgagcagtaacatggccctgtaccctttgtttgaatgcggctgggccacaaacctgccggggtagcactccccaccacgctgggcgtccaggctggaggtcttggggccgtgggtctctagcatgggcctctcctgtggctttgaccttcctctccttgctggacccctggagcactgctaaggagcaggtgccaccccctcatgctggagcttgagcctcaagaccaaggctgccccaggctggaggggaggatatagttgtatggtgtgcgttcagctgtcagacctcct

SEQ ID NO: 184687 - DNA, 972 bp, Homo sapiens
atcctgccctgcctccagcttggactgaaagaggaagagtttcaatcaaccctgagcacatggacaagcctggcaggttagactggacagctttcctgattgcttgcaaatagaaggcagttcaaggtaagtagaagatccataaatgacgtgcaagccttcagcatggacagaaaaccggacagaaaatgatctcaacagatggagtctctctttgtcacccaggctgcagtgcaatggcacaatctcagctcactacaatctccgtctcccaggttcaagcaattctcctgcctcagcctcccaacactgcctgagtgcctgcgatatagacaaggctgcgctgccagaccactgcctgaattgtgttattcgtaattatttacttggtcggacgacgaggagataactcagacaatgctggctatgagcacgggtgcaacggatactcacaagacatccataaaccagcgtagatgatcacagacatcactacgagacttcaccgaaggatagccacgcgatatggaagaaatgggacgtaccatacggttacgaacttccatgaatgcttcaacatttgtggttgcatcccaagcgctctgcgcaaagtaggcacgatgggcaggatagaatactcctgctggcttaggccttaccaaagctacgacaaacgctatccgccaagacctctgatccaatgaccactatggagcaccattcccccaaacacaggaatgaccccgggaaaggaaattttcgcacagcccacattcatgagccccctgcggacccagtccacatccgccgcgaattcaatggtaggcaacaacggttggatcggcacgcacatgataaaccactggccccatgtgatacaacgagtcacccacaatcaagatatcataggtgagcccacttgtgatagcaacagtggcaagcacaccgccatatgatgaaccatcctaggga

SEQ ID NO: 184688 - DNA, 481 bp, Homo sapiens
tcccagggagtgtaaaactttagtgtaggtccaaatccttcttgtgtcaggcctaaattcaataaccaacaagatttgctcatctaagaagaacagtatccaaatgctctcagatcatttaaataggagatcccaagtcttattttcttttttcccagccttttctgacaacttttaattcaatacaatttcaagtcttgaaatgtaaaatatactacattctcccattttgtgcatccagagatcttgtttatcttggtaactattacatggccagcactttgcacaatgcttggtatagagtaggtgttcaattattttttaatgaatgaatgaatttatatatctcttacactctcctgattgttccttcaaaatgatgcatttctggttatctccagcctccttgaaatagacaagaaatattttttcttcttctcccaagcccattcatttcaggttccaactggcatggactact

SEQ ID NO: 184689 - DNA, 506 bp, Homo sapiens
ccattcagtcgcctgcttgatgttcctagagaaagatcctgaagtgcagcgaggcactgtcggaagacccaagaagacatcttggggaaagtgaataaaagagattcctgccaatgtgagtttcaaaatgcacggtgctaaatcaactttagcctaaagctgcctccttacatattttaagttcggcctaaaggtttttctgcatattgtcaactataacaagtggaggtgtaaacaggccagagcctacacttgtgcctatcactgagatttggccgatcacatgtagccagctgtttgaactgtgttcaaataaggcaaacaccaacctgtaacaatccggctgtgtctgggcctcacttccatcttctgtgcgttactttcctttttctatccaaaattattcttctgcccgagggtgcactggagtcctggagcctgctatggctgggaaggctgcccgattcacaaatcatccattgctcaattaaattcctttacattta

SEQ ID NO: 184690 - DNA, 406 bp, Homo sapiens
tgaatcaaaaagaggaagaaagttattgaattgacaaatttgtgtattccagggagattttaatcccaaataacacatacttttccatatttattttcttctttatcctcataatgtccccaggcgatagtcaaagaacagggaattaactttctttgaagatattaatacacagaggtcaacctttgctgcctggttcagatacagtcagcagcagaccaggagacccaccctgtccctcacacttccaccacaggctcgagccatgactgcctccaagcacggtcactgatgaagactgagagtctgcctgtggcatcttcatgcctttatgctgtgattaacagtggcagcagagacagtagtgtgacacgtcttgacagctggtctcgttgatttatgaatt

SEQ ID NO: 184691 - DNA, 492 bp, Homo sapiens
gggcctcatcactccccaccacaccttcctggaatctgaatcttgagccgctctcaaccactcagagcttcggcgataacagtggccctctgcctacaaactgaccactatcccagcctagcaaaatcctactccatccccaagttccagatcaataggaacccaatcctgggaggactttactaatgcccagccagccccagcaacattagccagacctcccccaacccaccacctatcccaggcagtgtaacatcaagtttgcaaaactagtagcctgtggggtgtttgtaaaatctgtagtagtttacaatgtttcaaagtggggcttctcttgaaaattctggtcttgtgatactatgtcttgttttattcgagtacttttatggtttcatttttttaatgtttaaatctctttcctatagagatttgctttggtgtaatgaatgaaggattcttctcctcacgtggctaacccgctgtattttagac

SEQ ID NO: 184692 - DNA, 643 bp, Homo sapiens
caaagagactcaaatagagatgacacatatatctttcacatgttaatttgcatttgaaactttgagctttgatacaggttggcttttctcttttggaatgaagaaatcaagagactaattttttacccatccatccatctatccatctatccatccatccagccacatctttcctaagtgacaggtaaatcactagttgttgggaatgcaaagagataaaccttgccatcacagtatatttagggagatagacaaacagcagtgaatataatgtaaatttagtataataatcaaacgacaaagtgctgggggacacggcttgttgaatggcttgctggggagaagcagaaagaccatagcattcatggagatggtgggcatttgttttccaaggctaccataacaaacaaagaatcacaacctgggtggcttacacaatagaaatgtactgcctcacagttttagaggctaggagactgagatcaaactgtcaacaggattggttctgaagggtgtcagggagggatacgcttagggctttctccaagcttctagtaacctcaggagtcctcagcttctaaatgacatcctccgtgtgtctcacatcatctgatcctctgtacatgtcattctgtgtccaaat

SEQ ID NO: 184693 - DNA, 268 bp, Homo sapiens
tacttactcctcctttcccattcctcagctattttcaaccctactgagcctataggcatgatcaagtctctatcatcttaaaaaataaacagcaaggtgcagctgctcacacctgtaatcccagcactttgggaggctgaggcaggtggatcacttgaacccaggagtatcacttgaacccaggagttccagaccaacctgggcaaagtggtgaaacctcatctctacaaaactccatctctacgaaaaaaataaaaaaaattagcca

SEQ ID NO: 184694 - DNA, 337 bp, Homo sapiens
  misc_feature (3)..(3): n is a, c, g, or t
tgntgcagcatccattcagctaaccaccctatgtgatcctcatcttacagagtagaaaactgaggttcacagagaataagtattcgagtaccttccaaacatgtttattggccagaaagaaaccccctaaacagagaggaaaggaggctgaggtttttaaacttaatcttgcccacaaaacaatttgttcgtgccttgctctggctctagtgagttcttttgcaggccagggcaagcctgcctttcagaatgctgcctgggatcaatgagatggtaggctttgctgttaggcaggccgggatttgaatcccaggtcatcctcttgccacatgtttca

SEQ ID NO: 184695 - DNA, 172 bp, Homo sapiens
gtcttttgcatccctccttcccacatactgtgagggatacctattgagttgcctgccctgattccctctctgcaggaggtagcagccatgatggttaatgccaccctgccacctggtcacaggagaaggcctctgacccaagccagaccaagtgatctcactcccagaaatg

SEQ ID NO: 184696 - DNA, 536 bp, Homo sapiens
ccaacatttgctgagcccctactacatgctagtcgcagcactagacttggggaagtaggtgacaattgtggtccctgacctccagaaactcagtctggggtagacggcaggtgcatgaatgcatctgggatccgtccaatgcccatgatttctagtccctaacatcagcacatcagatctgacaatggatttctctgggagggagtatccgtcgaggccaaaatttctaaaatcaggaatgcagtgaaaactgggctgtctgatcactgtggtgataccctggtgtgctaagtgccctgggggacagtaaggtggcatgactaattctgcctagagggaagggagagattagatagacgtggcacttctttgttgcatcttgaaggatttgtaagattttaccaggcagacctgggagttgggaacccaagtgactagtgggtccctgatggagatgagtctgtgcaagggcccaggggcacagttctattcctggcacctcaaatggttcaatctcctgcttctttgtgttcaca

SEQ ID NO: 184697 - DNA, 505 bp, Homo sapiens
ttcgtgtgaatgtagctaacaaatggttgttgctgaagggaaaatttcaaactttgaagatgtcagaaacaaattaaaactacaatgtaatatttaaagagtttttaaactacagtaattttggaactactttaacaaggataaccaatcaattcagatgtgtaatttaaaagtacaaaatgcaaggtaacaggttaccaaagattttaaattaaagaaacagaaatttgtcactatgtatttctgaaccttggctgaaagtaaaccacacaaatcaaaaccaaagtgagatgccacctcgtgcccagcaggatggctattattttttaaatgcaaaataagtgttggtgaggaggtggagaaattggaacccttgtgtattgatggtaggaatgtaaaatggtgtacctgttgtggatccaacagttccacatctaggtatatatccaaaagagttaaaagcaggaactcaaacagatacttgttcattaacattcactctgta

SEQ ID NO: 184698 - DNA, 311 bp, Homo sapiens
ctaattcctgctggtctatgcaaggcaaggctaattgctatttcttgatttctatcttgaaactctcctatctcgaaaatcctaacatgttcttttatttgagctgtcaaaatagaataaaaatcttcatcatcatcaagaaaattcaagtatctcttttgtactttgctactggcttctaaaacattaattctcccacgtctgttccgtttttttttatggcaattttacctctgctcctcaaatgcagatgttgtctagcaggttttgcgtactcaaattacataatctctgtgggtgatatcatttat

SEQ ID NO: 184699 - DNA, 290 bp, Homo sapiens
ctttttccaggcaagaaaaatagactccagtgctgtaatttttttcactggaggagtgctaatgttgtatcaatctttacagtatccaaatacacaatgaacaaaagttagcccccataagagatgaaaattgtactacctggaatttgcacaattgtttgaaacattttcccgtttttgtgtgataaaagcacaatctagggtggagggttcatactaactggaagtaagtttgtcagaagaattaactttaaatacaatgctaacttggattaaatagtaaacataaa

SEQ ID NO: 184700 - DNA, 197 bp, Homo sapiens
gtctcttgtatttgagtcattgtattgttttgtgtttatagcatcaccacaactagtacagaaaatggtacactgaagtagactgctaccttaacagaaatgaaaacagtgtatagaaggcattataactatactcagtgacagaaaggaaatatgttcatgttgaatgaagagatagaaatcttggcagagaatag

SEQ ID NO: 184701 - DNA, 488 bp, Homo sapiens
cccaacagcttcgggactgtactaaagtgctctaaaaaaagttaacttgatctgtttaatttaaatgtcataatctggtatatagtactgaagggtgtgacaagcagagattttagagagttgattctcagaatttagggttggctttgccgtcccagcagtggattagttgtggcaacaggttttcttttttaaaaaaattagtgatgtgaacgtgcctttttaaaaacagctgttacttattgtgggccaaaccctgtacactaactgcccttctttcgttatgtcattggatagtttaaatgacccgaagagacagatggtatcctattttacacataagaaaacagattaacatatccagggtcacacaggtagttagggtcctgatagggatgaaaaaaatctagatcttgctgcctccaaaacccaactactgtacatagaaacagtagtcctgtgttctaagaaacaacagaatcgactcc

SEQ ID NO: 184702 - DNA, 324 bp, Homo sapiens
tctgaactctttcttgtgcaaatgaaatatctttagttattttagcctaagacttttatgcagaatttgggacacccttctttatgaaagactactttatactcactaactttctagctgctagagtcacccctaactctgtcttgtggtttttattcaagcttccgtcacctacacaaccaatgaccgagttctgtcctctgggaaacatccacaaaaaatgaaatgctcatcttataccattctatcttccaaatgtcaacatccttcagtttcttcctactttctgtcctcctactgtgctttcacatactttttttatat

SEQ ID NO: 184703 - DNA, 563 bp, Homo sapiens
agtgaatcaatttacttagagtcgtgtagatttttccttgtttcactcatttccctggtgaccactggacacagcatggcctccattaggagacagcatgtcagaatcactggaccaaatgatctataaattccctgctaactccaggtttctgtgattccagtggtatcttgctgttagaatagtggttctcaactggggcaattttgtcctctgggagacatttggccagctctgaagacatttctagttgttagaactgggggcagggggacattgggggaggccagggatgctcctcagcatcctacagtgcacaggagagcctcccacaacaaagaaatatccagccccaaatgtcagtagtgctgaagttgagaaaccttgctggagacagaagaaatcccattagacaattaattaaatgcaaccctatcccattagaacaggattagaaaatagtgtgattgggtactgctgcagcctttatttgtgaagtggaatttttgttccattaaggtataactgcttcttcaaaataaaatgtatttttttttaaacac

SEQ ID NO: 184704 - DNA, 209 bp, Homo sapiens
gcacctattacaagcctagacaatggtaaatgtgtttattggaggatgactacatggtggaaattcctccaaacacttgattgaaaagatttggggctgggcgcggtggctcacacctgtaattccagcactttgggaggccgaagcgggcggatcacgaggtcaggggatcgagaccatactggctaacatggtgaaactccgtctct

SEQ ID NO: 184705 - DNA, 372 bp, Homo sapiens
tgtgtgtttatagagagggtaagactatcagccactatatatatctaacataaaacttaccattaaccatttctaagtgtacaattaagtgaaacagcataaatatcaatcaagtatattgcccggtgtggtggctcatccctgtaatcccagcactttgggaggccaaggcgagtggatcacctgaggtcaggagttcaagatacagaaaaaaaaaaatagctaggcatggtggtgggtgcctgtaatcccagctactcgggaggctgaggcaggagaatcgctcgaacctgggcggtgtagtttgcagtgagccgagattgagccactgcactccagcctgggtgacagagtgagactacatcacaaaaa

SEQ ID NO: 184706 - DNA, 466 bp, Homo sapiens
ctctgttaaatcctttctgaatagactgatcttaggtttccctcttgtagaatccactttgagcaagaatcccgctaagtcagttttcggaaaatcccccacccttgttatctgaccaccctggatattatcaccctggcattggcttcagcaatgatcctattcagtcagctccttatccttgatgtttcctcttgatacttttctattcgctgatcccccaccttgctccttggttataaatctctgctcttccttgttagaatcagaattgagccaatctcttcccctcactccaagacctcattgcattagttcctccacctattgccatgggccctcttgaataaagtctgctctgccgtcttaacaagtatgatgaacaactttttctttaacaggcccatccacattataaaaggtaatgttttattcaaagtctgaagatttaaatgttaatcacatt

SEQ ID NO: 184707 - DNA, 244 bp, Homo sapiens
ccgggaaagggaatgctatgcgcagaggcgcccagtataacatgtcgtatgaagtccatgccaccccctttggcaggtgacaaactccccagtgagccgctgaccttctgagagcaggaggctccaagaagccacggggaagacccttccttcgtcagagacccaatgcctctatgactcctccttctcttcctgtccttggccaccagcctgtcctccatttctgccccatccacctctgctc

SEQ ID NO: 184708 - DNA, 427 bp, Homo sapiens
gggcaccagccattcagtattcaccgaagaacaagagacagaagggagaagccgagggcgccgtgccccctgtccaggctttctcatccacaattgttttgctcacaggggaaatgtgaggaattccttgcaggtggctgagaaatgaaaactgaagattgctggattcctgggccctggacggccagggctggctgctccacaaggaactcattacgaactcacggatccagactccatcctcagagaacccgattcagtactggggtgggcccaggatctggattttaataagcttccaggtgattccgatggacagccaggttgacagatgggcaaacagaggcccagggagagcaccgagcttaggaaaaccccagtagctgcaggtagcagagcctgggacttgaatcccggtgtcaggact

SEQ ID NO: 184709 - DNA, 511 bp, Homo sapiens
tgcctcctgggctcaagcagttttcctgcctcagcctcccaagtagctgagactacaggcacacgccaccatgcctggctaatttttgtattttagcagagacagggtttcactgtgttggctaggctggtctcgaaatactgacctcaggtgatccactcaccttggcctcccaaagtgctgggattacaggcatgagctactgcacccggccggttcttgtcttgctatcctagttctgtaatatattgtccttcaaagtgacttctgcagcctctgtgcaataagcattagggttggaactgttgatagatccagtaagaggacagataacaacgaatgccttgttagcaaggttaactagtatatttgatcataattagttatccatttgctttattcttccaatatgtgaataacaaaggtattttgtagcttctgttgtttcctgccacaatagtgtgttaaacagtcatacttaataataaagttagcagatgatgaaatgtta

SEQ ID NO: 184710 - DNA, 235 bp, Homo sapiens
caagatcacacatacacccagagctgccacatctgtgtggaaaacaaaacagttctcaaagtaaaagccagttgatattcctgtcagggcaaatgtaaaactgttaaagaaaggaagttaactgacaaagaacacatgacaagggagatggcagacccgttttcctattccaacctggtccatgacacagttttcaaactacaggtcacaatccaatgaggggtcagtatagata

SEQ ID NO: 184711 - DNA, 654 bp, Homo sapiens
ccttctctttttgttcatactagtcagcaggagcaaaagcattctcttgacttggctttgtatcagtagaagttaatggaagttggccattttcccaccattgtttagtagaataaaatgtataactgtgttgactgaaccaagcttcattttttcttgatagaaattgtgtgagtattgcatctggtggttatggattgtgcttgaacacttttgtctagtggtgaccatatatgggttatgcctgctcaccattggctatttccctgaagctaattatgctttagggaaatgatcagtccagtacagtttgtgtactacttaatgttttctttacacagaagaatgagggaggttgaaaggactgttgaaatgattataaaactcattcattctaacaacaaacatttattcagtattttactagttgttgtcattgtgccaaagaatgcttacagcattctgaatgtgtccaaaatgaaaaacaagcaaaataatccaaatgtgatccatgaccatgtaacagatgcttcagatacctttcgaaatgttacttcttagagcagtcttgtagagaagtggacttgaccaccatgcccactgtttggacattccaggcagctgtattccaatagtaatgatagaaataataat

SEQ ID NO: 184712 - DNA, 469 bp, Homo sapiens
cgcacctggccacacagcagtcttgtttcctttactggcagctcctggaatggtgctgggcacaccctaggcacctgggatgtttgttgaatgcatgccaagtctctattgggatggtttggtctaactatcatgctggcttacctgtaaggaacagtggttctggaaccagagagaagagggttcaaaccctggcacccccacttaatcagctctgtgggacaatgggtaagacattttccctttctgagcctcagtttcctcatctgcagaataggaattgcaatatcaacattgagggttgttgtgtagataggagatggtgcagggggtgaggttagctctcagaaggtacccacaaaggatcagctgttattgtcattatccatgcatctgtggtgacacccagggttgtgagccagtactgtgggattgagaaggtggggatagagtgcctgctggacattgt

SEQ ID NO: 184713 - DNA, 605 bp, Homo sapiens
tgttttggcaacttacatcaatagctaaagagtgtacacaggcttaccccgttctgtaaatgctgtgtcgagttgtttaacccacagcagtaaacagccaagccaaagtcaagaggacaagtgctaacacactcatcaggaatgtatcctagcaatttggctgcagggaacaacaacaacaaaagccttgctcatgtgctttgcaaaccataccctgcagtcggcctgcttcaaaatatctggttctctagagatagagaacaaatctttaaggtaaataagatgctacaatctacagcgctggggtgctcgatctttcctcttcaactgttcatcctctggcatatttatttaaattgatcatcttctagaaaagctgcatgtcaactcatgaaaaaaatcaacagaaagaaaactagtgggctgttctgtccttatttctaaacttgctaataaattactatctctcattgtattgacactgtgttaggtagggaactagctatctgtaccttattccacttaaactcaccaagaaaagcagtgtttcattaactttccaggaactttttttccaggcaaggcgatatctcttgccctctttc

SEQ ID NO: 184714 - DNA, 241 bp, Homo sapiens
agggaagaatgaagttttttgtaacaaagtcataaagtatttttccctaattttcttgcatttcctatttatataaagtatcttgatcactgtgttgcgctacagagattttcaatggagttaatttgggagactgaactaatctctgaaaaagaaattgactagttacagttactttttggacactttttctgtattgtgaattgtgtggaaatgtacagaataaaaatgaagaaatgta

SEQ ID NO: 184715 - DNA, 137 bp, Homo sapiens
gacctgcaagagattagtagtggtgttccatagccttagacatttcttacacttttatccacagataagaaaaaaatagtgatatttgatttgttttgccaaggcttagaaggatctaatatgtgttactcgttgag

SEQ ID NO: 184716 - DNA, 179 bp, Homo sapiens
gtgtgactggagctgaaggagtgacggggaagagttgttggaggtgaggtcggagatttagctgaaaccaagaccatgcatgcatggcttcttggaagttgaaaagtactgtggtgtgaatagttgtttctccctaaagtctttgttgaaatcctaactcctgagatgatggtgttagg

SEQ ID NO: 184717 - DNA, 1156 bp, Homo sapiens
accgtgttagccaatctcctgaccttgtgatctgcctgcctcggcctcccaaagtgttgggattacaggcgtaagccactgtgcccggcccaatttgaggattttctaaactatacttgctgtatttgatataaagaaaataaatagagaatacagaactgtagaaaaaatttcagaatcaaatggtttatcctcttactccctctgactgaagctcattttttctctgaagcctgatctgctgcagaaatgctaaataaaatcgtggaagtaatggtgtttaacaataagaaatcactatgcgtgattacttttttgtgatagaaactatttttgaaacattaatcaaagatttttactagctggattataagtattttgtggaaggtaaagattatatagcaattgaatatttttctggtataaaattctccccatctgaaatgtatttcgattatgccattatttcaatgaaaaataaaccattgattttcgtatatttggcctgcatctgttttgctccatatggtgtttgaggagaggtaggtaaataagaaagatcctgtgacttaggatgctaagattcttacattgcaatttagtgagtatctcaaatcttaaacatttgcgaatgtttaagattttatttctgatactaaaatatgatgtacatttaatccctattcagtatgttaaattttgacagcatacttatttctaatgattatataaaatgtggcttgtatttatttatatttaatctccctctcctgagctatcaattctacttttgctactgtctgctggtgtgttgggaaggaaaccttaggaagccagaagtagtgatatggttttctatctagttacttctttggcatctcaaatttagtataggcagaattgacctaatcgtatttcttccctaaacacaattctcttgtattccatatttctacttaaggctgtcatcacttttcaagtctctcaagctcaaagcttaaagtcacttttaacttcccctattattgtgaagtctgtaatgactctcctcacttttactactctcacaaggactagtttatgttcttggcaagtaactgttcaatctagtggatcatcagaatcacttttggaaaaaaaaaaaaatagattccag

SEQ ID NO: 184718 - DNA, 252 bp, Homo sapiens
gacacgacatctctgtcctcactctgctcagtccatgcccccaaaccaacttctgattaaaactcagcgcaatagacataggaataccaatcaacagaagtaggccctattacaagttaataaattggtctccgattttggtatcagtgacttctgggtttgattagagtatatcagtccactgagcttgaacttccatttaggctgaggacctggacagaagtaaccacagtaaggtcctgccaccccatg

SEQ ID NO: 184719 - DNA, 360 bp, Homo sapiens
agtactaccccacgacctcctacccccacctcctacccagtatcaaacaattctcctgcctcagcctcctgagtagccgggattacaggcatgagccaccacacctggctaattttgtatttttagtagagacggggtttctccatgttggtcaggttggtctccaactcctgacctcaggtgatccgcctgccttggcctcccaaactgctgggattacaggcgtgagccaccgcgcccggcccctctggttgacttttaatctgagttattatactcttcagctccataattttgatttcgtgcttctttacaatttttatctctttattgatactctctgataagatgtcattctca

SEQ ID NO: 184720 - DNA, 195 bp, Homo sapiens
atgagtaggtgtttttctaatcttcccttcagagacaaggcactaggaagtgaagtgacactcgtccagccacccggtagtgaagtggtagagtcaggctttgaaccgcaagtcatttcagagtctgcgtctgtaaccgatctgagcctgatgtttcatgtgtattatctgatctcattctcaaaagactccatg

SEQ ID NO: 184721 - DNA, 429 bp, Homo sapiens
tgctgccaagggtgagtggggagtctgggatggagccgggggctgccgagggaccgcgacctggaggggccccggggagacggttgagggaaccgggatagtcagctctggaatggaatctgaagcaaatggaggttgtcgaactgagggcctgaaggctgagggataagtggaggccgaggaacgagagggagagagcgagagggggaggcttgaagagcccagagcttgggggcttttgaaagctgcgcagtgggggaaaaagatcgaaggtcctgcgggaatgtggacccggaagaagagatgctctgggtttggcagcggggatgaggagtcagaggagcaagacctgggccggtgttcccttcccagggcgagggagggcgatcggggctgggactggagccctctcatggggttctcctctta

SEQ ID NO: 184722 - DNA, 153 bp, Homo sapiens
ctgccttggcatcccaaagtattaggattataggtgtgagccaccgtgcttggccaaagctcacattcttaaccactgtgctatatctgactagctgactaaaggctaagtgaccaactaactaacagctgtgtgaaggaggggcaaagaaag

SEQ ID NO: 184723 - DNA, 152 bp, Homo sapiens
agaccaaactaacacaagggcccagcagacacacgctcctctagccataaccttccttctctcttcagctcaaccctaccctctggaaaggtatccccgttctaaaaagatctccccggctagtccaccctgaagtaaagccctgcttctct

SEQ ID NO: 184724 - DNA, 139 bp, Homo sapiens
actcaacatattgtctgggagatacatctttgttgttttatcagtagtccatcctttttattgctgtataaatataccacaattctgctggtggcatttagattactttgtatttggggctttaatgagtaaagctgtt

SEQ ID NO: 184725 - DNA, 129 bp, Homo sapiens
agaatgttcccccctcccacctaacttttataccaatagggtttcagtacaacagtagagtgcagctaaacaaacaacagatagacttgttattcaaaggaggagaacttaagaaaccccaaatcaagg

SEQ ID NO: 184726 - DNA, 222 bp, Homo sapiens
tttttttcctggtgccatataccttttctttagaacttactagccgttttgaattttcttcttttactttataaagaagcaaccctattaactgacttaccatttgaaaggatgtttgtaagaaacacataattacacgctatatggataaagaaaactagtttaagttagaatgaatgtctagagtgttgaacagaggcttccaataaatatttcccggat

SEQ ID NO: 184727 - DNA, 369 bp, Homo sapiens
gtctctggaagaatgagtataagaatagaattatttctttcttgaatgttggatagcaattactggaaaagccaactgggtctggagttttctttatgggaagatttaaaaccattaattcaattatgttaatatctattggactatttagtttttccgttgtctttatcagttttgataaattatattttcctaggaatttgtccattttgagtacatttcacaaattatttgcttgaaatattcatgatattctgtaaacatctttgtattgcctgcagcataaagtgttgtctcagttttattcctgacactagttatttgtgcctcctccttctttcttgtggtctttgtcagtagttcaagagc

SEQ ID NO: 184728 - DNA, 265 bp, Homo sapiens
tggcccatgcatctccagagaccatgaagactgctcaagccctacataggatgtggatccaggctgttaaaaagttgaggagatggaaaggccgtgtgagtccctctgcaagctctccccttgttttccccaacctttcttcatgggaaggggagggaagcaaaaccattctcacagtgagtcctttatcctcagattgatttgtgcttctggcatctttcagcaacaaattgtgagattgtaggttgtagtcactggtgggttt

SEQ ID NO: 184729 - DNA, 580 bp, Homo sapiens
cttcacagtagtacctagattagtgtttgattgaataaccacaggagggaaacctcaggggagctatttttagaattctgccagccacatctgacaagtctggtggccaaactttggacaaaccctaccatgtgtgacactgttgtgaacctggaaataaaggtgggaaaaggcaactatatgggattggtctgtttttgtattccaagggcccagtaatagaaatggcctctaggcagcaatgactatcacaaaccccatgtgcttggttgaatagaaaagacagagtcatggcctcatggccatagctgaagctgtctcatccaagtaagacagctaggacaacctgatacagcaagaagtgtttgctggtagcagcagcagaagaaagtatactataaaagcacagtgatctgggtttacatacttctgtccttcccctgatgacagagcaccaaatagtaatcatgagcctaaattgacaaaagaagttaagttctatgtactcagtctaagagcagaaaatctataagcagttctctctcatcgatggattcactttccatagttacctattaaa

SEQ ID NO: 184730 - DNA, 640 bp, Homo sapiens
tgccaaacgggaaggcaggttctcaatctggttcaaggatttaccagggactgtttccagcttgaaggttgggtttcaccagggacctgccccatctgcctaggcatttgtctgcctcccgcctctatcattatcacctgagtaatgtaaagtgctgttctttttttaaaaaaacatatttattatatttgtgatctctcttacccattagaattaatttcttgaactcctggactcaagctatctgcctgcctcggcctcccaaagtgctgggattacaggtgtgagccactgtgccaggcctagaatgtaatttctatgcaggcagagatttgggggtctagtttatttgctgatgctttctcagggcctggaataagccggacacttgacaggttttcagtgaatatttgttaaatgaatgaatcaagaagccctcattgagtgtactctcctacctatatctagactctaatacatttttattttttatgattccatcatttggggctttaaggttgttttcccacccccctttccattgtgtatatgtttctttttcacctaggttcaagttttttcccataatacattattataccaggccatccagtctgggtctcacctcaccactcacctg

SEQ ID NO: 184731 - DNA, 213 bp, Homo sapiens
gaaagaatatctgcttagtttaagccacagccctagctgatgaacccttgctctcaatggatgtagctctcccattcacctttcacttttctgagatgcatttaaaaccatttgaatccaaaggttcaagtgttattttaaaccactcaccaccccatcccattcagtgcctatcaaccacttccaaaagcttcctctgaaatcagtaactca

SEQ ID NO: 184732 - DNA, 267 bp, Homo sapiens
ttaatagaaggagactgaaagggagtataaatccccaaaacagttgagtcttcattttgctgatactttctgctattctcatttacctaaaaaaaataaaaatataccccatgcaagaatagtgatagccagaattacacagaaataaagacctatagataacaagcattggtgaagatacctggaaaagggaacccttgaacattgtcagtgggagtgtaaattagtacagccattatggagaacaatgtggaggttcctcaagaa

SEQ ID NO: 184733 - DNA, 444 bp, Homo sapiens
attctgcctccagggtctgtgttcttaaccaatacactatattgtgttgtaactggatacatgcaataagaaggactttaattcccaaaaaggaaaagtggatgatatatgctgaatccctactatataccttatctcatttcttctaaaaagtaatttggactctggaatcagggcataccttgaaagttatcctattattaggagtaaatgagatacaccaagtataaagcataacaccttacacaaagcaattactcagtaagtgtcaagtgtcattattttttcatgacaaatttggagtgacagtctagctgccaaagctgagaaggaaagaaattctacctagcagtacttcatgtgcaaaaaaacacgacttgaccactagtcaaataaattgcagtaccttggtacagcaaaaattcaggaatagaaggatgaaaa

SEQ ID NO: 184734 - DNA, 305 bp, Homo sapiens
gatgtggggtggatgacgattggatacctagaagggaaagttgactgcacagggctacgcagtgaataccctattttaccaggtcagctgaggctaaattctctacttctggggtgggggtactaactgaaatggttcactgaggagggtgaaggtttgtaagggaagatgtaacaatacttttttaaaagcacctaggacaagttttagggtgttgaatagcaccatttaaaaattataggggtatccagcaatttatggagctctgattgagaagtatcattgttaggattttattacccatt

SEQ ID NO: 184735 - DNA, 176 bp, Homo sapiens
accaacaacctgaatgaacttggaagcagattttcccaggccctccaggacagaagacagggctgttgatgccccaattttagcccagtgagacctgttgcattctcacctacagaactgtaagataataaatggctgggtttgttttttgttttgttttctgagatggagtcttg

SEQ ID NO: 184736 - DNA, 594 bp, Homo sapiens
agtggactcattcactggacggtgctactgtcacagaggtgaggcatgcggctcacactgagccaccgcaggtcatgattgggccagcaggtgcctgtgaattgcctgtgacatatgagcagaagactccatccatgggaccccaagagcccgccagctgacaggcacctgaggaatgtggcacaagtagctcctcacatagaagtggccagctttggggcccaggaccctgctcatcctgcccacagctgctcagtctagggatcggccaaaggcagttatcaggccgactggctgagtggtaaagaaactggctcaatcttgtcatcctagggcaccaggaatgtgagggtgggcagaagaggacatggtggcaaaagaagcaggtgagtcgcagaggctttttgagccaagtcaagtcaggagaacaggttgcagtcatcacttgtctgtaagagacaagatgaccagatcaccagggttgctgctggctcctggatggccacaatgtgcatggcagggccccgcaaagccttgctctacagttgaagcttcctgaggatggcagtaatgaatgcgtccgtcgaagtaatc

SEQ ID NO: 184737 - DNA, 159 bp, Homo sapiens
agaaggtgggaacctgagggtcctgggctggcagaggccttgcccccgctttgcctagggaggcagtgagcttcctccttcatttgaactttgccctgaagagctgggccttccttgttcatggggagcctgatgcttcttcccagcacaccacagcca

SEQ ID NO: 184738 - DNA, 492 bp, Homo sapiens
gatgacatttcatcttaggaatgtgccatgattttttttcaactggtcctttttgttctttgcctctactgcaatattctgctcataggaataatagtacaatgaacgtctttgcaaataaatttgtgtgtgcatgtctgattatctttctagaataagctcttagaaatggagttactgggtcaaagatcataaacattttagaggcttttggtacaagttgtgagattgcaggtgacaaatgaccttctttccttaaatttagaaaagttgttttggggctataaatttgggagaaatgggtcatctaaatcatctgtgggaatttgtgctttcatagtttctgttacagaagtcaggcttctctaagcttgctggaggcagtgaacacagagaaaaagaggaaagacaaactttggagattaaattgtagctacttacttgctttatgaccttgagcagctatttattcatttttctcttctagttaac

SEQ ID NO: 184739 - DNA, 671 bp, Homo sapiens
actccagcctggttgacagagcgagaccctgtctcaaaaaggaaaagaaattttatgagaccactcgtatatgcagtctgtcgttgactgaaatgtcgttatgtggcatgtgactgtactcaccagaaacatctggagttcttggactgattatgatgagttccagcacctctcaagatgctctcagcctcagacctctgccagcccctccctggtggagaagccttctgggcttcaagcaccttgctcaggatgcgtgtccccttctgaaagttttagggttaagtgactcttctagctgtgtgcctgagggtcctggacatctcaggagtggggagttggcagctgaagaattcctgggagtctgagcctgggctgagtttgggatcggctcctgaaaacccttgtaaagattttacattcccgaatataaaccaataaagacagcaggctaaatcaaggccatgcccatgtcttgggcacattccgaagatggttgtggtgagtcccgcaccattaattcccttttgcgtctcattcctgcctctctggaaacaagcaggtccatgagatgcagttcagtgggttttgctgtggttcagtggggtttccctccctagacaccccaggagtgcaggtctaaggtttggaaatactttcctttctacata

SEQ ID NO: 184740 - DNA, 426 bp, Homo sapiens
ggagaagaaggagatgaaagcatccaaaatgggccatgtccttccatttcacattcagaatcagctctactgctgagacccctatatgtaacatttatcctgttatttggaaaatggtatggtgtgtttgaagaccaccctccaggcagtctgaaactccagactggaggctcagctcaaaccaaccatcacaaattatatgactgcacaaatcaatttctctctcttaacttcagttcaaacatcttaaatgtgagtgcagtggactagatcagaggcctcagaacttcttgtttaatacggatagaacacaagtatatgaaaagagataaaactggattggacccagagcaatcctaaggaaccccagggctctgtgtgactcagtttccaaaccgctagatcaagagattccaaagacattct

SEQ ID NO: 184741 - DNA, 408 bp, Homo sapiens
ctcactcggtttccggacggtgcacaaaaatgcatgtatactgtttttatatttacttactctattattccatgggtgctcttatttcttcatgtgatttgagttactattttatgtcctttcatgtctgcccaaaggactctcttttagcattttattttgaggcaggtctgctaacaatggattctctattttggcttagctcgcactgttaatttcatcttcatttttgaaggaaagtcttaatttctttttttctgtttctcacgtgggataatctcaattggcctatcttcagatttggcagttctctcttcttcaggctaatatctgctgctgagcctcaccagtgattttttttttcatttccgttattgtagttttcaactctagaatttctatttcact

SEQ ID NO: 184742 - DNA, 391 bp, Homo sapiens
gaaggtggggtccccacaagtttgtttatatatgagaaataacattttcaggaatgagccagtggagtggggaaattgttgggagattaagtgtgccagctgacggtgggggcccttgagcaaggtagcagaatggagtagatggaaacatggtgctgagtgggtagatgggagccgagtccaaggtcttctgatgtcgttccttttcttggtgaaataggaagttgggccatctgctgcgatattaaatgagggagtgttccaggggtaatgagagtgttccaggggtggagaaaagagagggaaggtgtgaaatggtaggccgggaaggagaagaatggaccagggaaaagtagtttgatttccagacagcattaaggacccacctgcg

SEQ ID NO: 184743 - DNA, 453 bp, Homo sapiens
tcagaaagaaggcattgagaatgaacagaggaagagtgcagaccctggactgaagggagaggaagctgggaaccctgcatggggttgctgagcactggaactcactcctggccctgagcagctactggagaagggatgaattaaataggcatggagtggccccctctctccatggacctccaggatcctagctgcaggagaagccataaaccccctggtcatttgagctgatagggagagctgcttggagaattgttaaggacaagactacagcttgtgtccagcccagagtgtttggcacaggagaagctacagtggaacatggccaaaaatgcccatctctcaaagctcaccatgctcctttggggtagctttggctttgttgactgtcagacctgaacagaacaaaactaccttgcctgtgagatgaggccagtctgatctgagcacccc

SEQ ID NO: 184744 - DNA, 475 bp, Homo sapiens
gaccatgatcaaaggattcaaaggtcggcgctagatatatatggctaccactgatttatggttggttaagaggcatttgaggggaaagatctctttccagagacctaggaatctatatgaagaatggtttcctgtttgggaactatatatagaaaaagttttgattagtacatttttaaatttaggtgttgggcgataacataccgtatttatccccaacaccctttttaatgatacaacttacctaagttttacagaaaagcagaaagcaaaaaagaacaaaatttaaaactacctgaaatttcctctcccagatatgtagttttgttctattttttgctacttgtatgcatatgtgtatatacacacaaattaaaaattgaaaccatactgtacatattgtcttagtgatttcttcacctaatgatatactgtgatagtgttgggcgataacatatatctatttcttcactac

SEQ ID NO: 184745 - DNA, 686 bp, Homo sapiens
atggaatgccagttttctcagaactctcaattctaggccatgcctgtgtctggtttctgtggctagactcaaagaggtttttgatagtgcctaaattatgtttttccttatgatttcaggttgaagtcttggcctcggaggatgcagcctttggactcaagttttaatctcctcataaaaggataagtgtcttttcttcagtcatcttaatgtgttaacctgcacttcatatcatcatgattttaaaacatgcattgaatgctgctacagtccaagaataacaacgcctgtggcctccaaggagtaagggacccctggaacatcagcaccagcaaaaggaagagagacactctcagttgtggggtgtctctccctgactcagcccccacctcactgagggtcttccatccccacagtttccatctcagatgcccagaagaatgggaggggccaaaggaggtccactttgtatatcatcaatgaaaccccctgtacccagtcccccaacaaggaagaacaacagataactcaatttaaaaaatgttacttgtggctgggcatggtggctcactcctagaatcccagcactttgggaggccgaggcgggtgggtcatgaggtcaggagtttgagaccagcctaatcaacatggtgaaaccccgtctctactaaaaatacaaaaattag

SEQ ID NO: 184746 - DNA, 618 bp, Homo sapiens
agtgcgtctgctcacacaggggattgcacagtggcccgagggacaggaggaccgtttccactctgctcactcacactactcagccactgagcagctggttagacacagcccatgctggagacctctgcggggctgtcagccagctcacctgcacatggcctctccttggggcccttgggcttcccttgggcccatgcttcccttgggcagcatggcagctgcgggctgagagcagttacccaagaggcaggaagtgggggctgccaggcctataaaaccaggcccagaaactacctcagggtcacttccacctgatcctattggtcagagcagccaaggccaccagcttcaaaggatgggatagatagaaccacccttttgaggagaagtgtcaaagagtcaaagaacatggggccaattctaaaactgctgtagatattaaacagcataccattaaaaagtaaactaaactaaaaagtaaaccaaagattgtctttggacaatcaatgaagaaaaaaagccactagggaaataaaagccatcttggaagcagcaaaaagagacaaaactaccgaaaagatagggtagtggaagatttctgtatgaaaacaaagcaaa

SEQ ID NO: 184747 - DNA, 869 bp, Homo sapiens
ccatcctccaaaactcccctgagtacatttgtagttaactctcttctccagcccctggcaatccttgatctgctttctctgtagtttgccttttccagaatgtcatatgaatagaagtatacagtatgtagcctttggacctggcttcttaatgcacataatgtacagagatccatccacattgtgtgaaccgtgcttgtctcctttccactgcaggaggtatcccgccacatgctgcattccaccatgtacgcaaaccacagcttgttcatccattccccagtcgtgggacagttacgtagtttccagttttggcaaatatgaataatgccattatgaatcccaagagcacataaatttccatttcccttggataatatctaagggtgggattactgcgttgtatgagaacatgtgtttagctttataagaaactgctcaactattttccaaagtggttgtaccattttgcattcccactggcaagggataagagttccagctgctctatgtccttgccagtacttggtggcatttttgctttttttccccccaaagccactcccctaggtgtatagtgacataatgcagctttctataagtttgctataatggtgcttacgacacgccaggtatcatgctcaatggttcacacacatctcaattaatgctcactcaatactacacagtaagttccaatgttttctctgcttttaaatgcatctaaactgaagtggcatctgaaccaaggtcaaatgaccacagtacacgaggccttaaatgagagccctcctgggatggtcttatttactcctgcagggattctccacaattctctcaggctctgactcaatgttacctctttcgtg

SEQ ID NO: 184748 - DNA, 412 bp, Homo sapiens
cctgccttggccttccaaagtgctaggattacaggcctggccgcagcctgcattttagaaaggcctgttatgctaaagcgttcatatgtatgaatacttaggttgagccccagcagtgcagcctgtctggcttaccccgtgtggtctctggtgttagggaagcagtaacgttctgttattgccacgcaattgaggagcgtgggctcagtcatttcctaacatgtccataagccaagtaggtgtgtagaataattattttgccatgtttcaaggtgtctttatattaaagagtgtgcatgtgttctgtgcactcccctcgcccaatagagtggcagcctgagaattgaccgttatgagatgaagaatgtttgacaacatgcctgactttcaagtccccccaactcctgttaaa

SEQ ID NO: 184749 - DNA, 964 bp, Homo sapiens
atcacttcccaagattagcatgtctttaaactaataatacatcagggaattttatgctcttggtgccaagggggccatgtgtaaacacgcatgcacacacacacgcaggaaacatgaggtctaattttggctgtggtcataactactctgttaccctgggtaagtcaggtaacctgtgaatgtctcagtttcttcatttgtgaaatattttgatagtttcaaagttctcttaagttctaacattctatgattctgcctgcacagccccatctaggcaataagacctatctcggatgaatcagggagatccgaaaaggtagtatttgccaaagacattgacaaaactggccacttcttatttctgtggagactctgtccaccacacaaaacccttcttcactctcttcatcttctccataccaagacatcaagatatttgacaacagggtgggtgctggcaccagactgtctgccttcagttcttagcatttcttattacttgactgatattgaacattaaagctaggtgcctctcttccctaatttgtaagatgggtctagtaacaggaactatctcatagggttatttgaggattatgtaagttaaacatatgtaaaatgcctgacgccaaaattgtaaactgctgttcttaccattgatgaaaaattcccattagcctcatgctatctacaccagtgctgttcagcagaaatttctgcaatgaagaacatgttcatatctgtactttctgaggtcgtagttatgagatacatgtggctacttgcatgcaatgtggctagtgtgaattggaaatttttatttaattttaatttaaatagtcacatgtggccagcagctaccatattttatggtgtatcgaggccactaataacttgtcaagtattttgagaatgacttcacaagggattattattatactttatatttatatgtacaatttta

SEQ ID NO: 184750 - DNA, 438 bp, Homo sapiens
cttaaaagagttaaattctaatttaagaagacaggcaataaaattgtaaataaacaaataacttttggatgtcgtttatgtgatggtgagtatgtgtggagatttcttagtacttatgctgttcttaccattgatgaaaaattcccattagcctcatgctatctacaccagtgctgttcagcagaaatttctgcaatgaagaacatgttcatatctgtactttctgaggtcgtagttatgagatacatgtggctacttgcatgcaatgtggctagtgtgaattggaaatttttatttaattttaatttaaatagtcacatgtggccagcagctaccatattttatggtgtatcgaggccactaataacttgtcaagtattttgagaatgacttcacaagggattattattatactttatatttatatgtacaatttta

SEQ ID NO: 184751 - DNA, 352 bp, Homo sapiens
gaaggataaagtttgtgctgtgcattgcccaaaaacctgtcatgactcccttgagagtctagatattaagggtggtaggtgactgcaataaaaaagtgtatgtgcttctctgttgtaacttagaactctatgatgctggcctgcaggtgcagaggcagaaagagaatcatttcttaactgtagaatggccatgcaatgcgggccttggttctgttactctcctgtattgttaggtttcattcattcaacaagcattataaaagtgcaagtgttggactgcaaaaaaaatggggatggggaagatctgtctaggcactgggaacttggagaaggaaggcactggcagctcagg

SEQ ID NO: 184752 - DNA, 211 bp, Homo sapiens
tgttgggttggctttgtcccgaattgcctggaagttcatcttctgtctagccttagatcttgttgctaaataatttgggggacaaggacgtgagaatcccctcagccaggagtcagtctatatgcagtggcaggggtctagacagagtccccagagccaggggtgttgggagaagccccgagaggcagcccctctccactctgaacccggg

SEQ ID NO: 184753 - DNA, 434 bp, Homo sapiens
aaatagagaataaatacaggaaagatggaaatggacatatcacttgttttgcagatgatataaaagtgtaaatagaaaaagcaagattaaccaaatgcataccactgctatgaagttagaaaaggcaatgaaaaatggtgctattcacaacattaaagaacatctgagaatttatatatctagataaatatctagtgagataaaaataatacaattataatgggaaaaataaaggaatacctaaagaaacaaagttatatccattgctcttgatttagaaaatttagagtaataccagtaacattaatccataaaacaaaaaatagattaacataataacaattatattcctgcaagaatactctagaatgtgataaatgactggcaaaattaataaagaaaaataaatacacaataattccaaagaagattgc

SEQ ID NO: 184754 - DNA, 501 bp, Homo sapiens
ctcagctcacctagtaactgggattacaggcacgcaccaccatgcccagctaatttttgtatttttagtagagatggggtttcgccatgttggccaggctggtctcgaactcctgacttcaggtgatccacccacctcagcctcccacagtgctgggattacaggtgtgagctactgcgctggcctggaattttgattctcttattttgtataccatattttctagataagcaaggttatgcccttttgagtttttaatttttttctcagctatttcatcattcttttaatacatattttttaatttgcgtcttatccattatttatggagtgttttatactgtattttatgaaatccatagtatcagcaattacatgacaatgtttatgggacactaaaaaagaaaatcactgacagtaaactgtgaggtgccatcagtaagacacattccaatttcagagatgttaaaatggggagaaacgtacaacttttagaattga

SEQ ID NO: 184755 - DNA, 284 bp, Homo sapiens
aacacaccacaagggtgcaatccacaaatccaggctgtgggaacctctatgggacaaacaacccagtttcttcaacaaatacatttcagaggaaaaagaaagggggaactagactaaaagaagggtcagagacgtctaacaaatgcaatgtgtggattttggatcatgatgtcagcaagacaactgtttaaaaaaaacaactataagacatgtggattgtctgaacactgctacatattggatgacattagacatctttttaggtgtgagaatggtgttgccgt

SEQ ID NO: 184756 - DNA, 493 bp, Homo sapiens
gaaggggagtaaaggaaggtaatggaggtaaggaagagaggaagggaagaaagtaatcttacaaaacaaaggaaaagaaaatgtgagctgacaagcattaacactaaacatttgttgagacatacacaaaagaaaactaactggaactccacataactcaaatagtttacatacatttatgtaaatattagtttggagaaaaattaaaatccatttgaatataacacctttatgctatatttatcattatcagatttacagggacattaatctgtatttaacttaaagagtaaaataaaccaaaataacatacagatactggtattaaaaaaaggtatagcacttaccaaactgaaccaaagttaaaaaccacaaaattttttttgaaaatagctttttagaaaaatgtttaaaagattttaatacctataatatatagataaataaaataccatgcatatataaaatataataagttagactcaggggtctg

SEQ ID NO: 184757 - DNA, 312 bp, Homo sapiens
agtcccagactccagactcccatggtacacaggaccatcgcctgtggtggttccaggaaagaaatcactgaacactgggaatggcttgagcaaaatctcttgcagacactctccatctttgaaaatgagaatgatatcaccacatttgtgagaggaaaaatacagggcatcattgcagaatacaacaaaatcaatgatgtaaaggaagatgatgacacggagaagtttaaagaagccattgtgaaatttcataggctgtttgggatgccagaggaagagaaactcgtcaactattactcttgcagctattgg

SEQ ID NO: 184758 - DNA, 426 bp, Homo sapiens
ataggtagggtcagcacactttttctgtaacagatcagatagtaagtttattacgcttcatgggcaaagagaccaaatcgaggtatgtaggtactcatgagatgattacataatgagaaaaagacattttccacaaaatttttattgacactggaatacatttttttttgtaatacaggtctattaatgagaaaaataaaataatttgtggtgggggaataataacatttcatttaattggagttcagactgagtgttcccatcaccaacattgattgcaaatgtttattaaggctgatttgtaataagatagattttacgtatttcacttttgaaaatatcttttcacacagacagatactgctgattcgatgtcagtccacagttagataatttgcattgagcatcttcattgcttagaagacg

SEQ ID NO: 184759 - DNA, 463 bp, Homo sapiens
  misc_feature (26)..(26): n is a, c, g, or t
  misc_feature (29)..(29): n is a, c, g, or t
ccataactcctcatcttatgctggcnagntaggatatgctagaaaatttgactcttagagtatttactttctttctgtagcttcatccatgctgtaattttttactgattgctagctacaggccacgcgaataaggcagttgtggtaatagatgcgacatgggccctgctctcatgaagctcccaattcagcatggtgggacaacaataagcaagtgagcaggtacattactacctgtgcctcattgcgagtgctcagtgggtcacacagtgacttgataacagcacctctctatgttcctcatacatatgacatttgacatttattgcctatcacactgtacagttatttaattgcttttatgaaggtattgatatagtttggatgtgtgtccccacccaaatttcatgttggattataatccccagtgttggaggtggggcctggtgggaggtgactggat

SEQ ID NO: 184760 - DNA, 912 bp, Homo sapiens
agccccactccagccccagccatctgtgctgtcttgataggggcagacctggccatgcagcagggctatacagacccttgcgggccccggcttcctactgacattctcttcccaaaggccctggcacacagtgctgagcacctgggcactcacaactgcagctccaggcagatgtgtgagcaggttgcccatcaaaactccagctctgggccacttggtgcttgggttgggagaggcagatgtggcatggaggacaggcagagataggaaacccctgtgctgggaatggttctcttgggggtcggccctggccatagcctcccctatattttactggggacctaaggtgccatctacaactctcctttccttttgtagggaaagtccctagatctcaactttctcatgggaatcataagagagatgagacccagggttttttcagtctcttcccagctacagtccacatatttcctccacgtatgtttggaagtcaaaagacccttcagaaccctaaatccacccagtttatacttgttcctgggctatgtcatcctagtcccagaacctgggaagatgccaccatacctagaggaggccatgaggctgtcacatctaacattctgtggatatgacctgcttatgcgctctactggaagtatctgacacttcaagtagaattgaggcccaggcattgtcatctgctttctttactaaattatgccaagccactggaaaagtgactgcataaattacatttttcatatatatctgttgaatgaatgaacctcaaccagaacctctacagatacctgagtgagcctggggcccctccttcaggacccaagggaccactgttctttctctgtcaaggacaaagaccagttagaaagaatcacagacatcctttac

SEQ ID NO: 184761 - DNA, 519 bp, Homo sapiens
aaagtgctagaattacaggcgtgatccactgggcctggccaagaaaacatgttttagagctgtacgatattttgtcacatggatattatgtattttatttagcttcttcagtgaattttagagcagatactgctgagtgctgaggatacagaggcattctaaaatagatatcgttcatattgtcattcatggaactatcaggttaaaggctttaatcatatttcagttctcaaatcattatttgttttttcttctattttaaaaaatgttgcagagaagtacatttgtttgtcttaaaagtgaattatggctttcccatcctgctattctcccctctcagcctcccgaatagctgacattacaggcatgtaccaccacacctggctaattttgtatttttagtagagacagggtttctccatgttggtcaggctggtctcgaactccagacttcaggtgatccacccacctcggtctctcaaaatgttgggattacaggcgtgagccatttccattaaa

SEQ ID NO: 184762 - DNA, 583 bp, Homo sapiens
atccgatttttttgtcctctcaattgctgggattacaggcatgagccatggcgcctggcccgccccagtctaattattagtctgacataagtgtattttggataaactacttttcctaatattcttgctctgtgtttatgtgaaaaacatctgagaaccatgataaaggtttaaaaaaaaaaagatgatggattaatttacttaactgaaacaatgtgctgaggtttggttaacactgaaaccatccttcgtctgggatgtaatccctttttgtcccagaattcactgatttgaatacattttcgattttaggaaggtgtgagtttttttctgatctttttgctgtgttatattttgcagtatttgaattagtgtttgtggtgtattttgatattgcttgtaattttatgtgaatttgagaaatttaaaggaatttaagaaaatttcaaacacccatactttaagaaagattcttttctttggttcatatttaatacgtacttgagtggttgttttattatgcttaccacttcacgttttaaaaacgtactcagaacattgtgaagtacacttattttttagg

SEQ ID NO: 184763 - DNA, 570 bp, Homo sapiens
aaaatgacaaggtatttcccacataagcacttccttttttgtttgctataattagcttttgcatgtgttgctttctcacagataggaaaatggattacttaggagtttggacactaactggggttcagatcacctgggttctgatcttgaccctgtcccaaaggtgtcttttcctttccagaccgcaatttcttcactcttaacatgagagctttgaaggaagtgattctaatgctttctagcaatttcctcattgggcatgctgtgtcagggcatttaaatgatttcctgtgaacgcaccatgtgcgcttaaccctgcacaaactcaccagccacatagccttgacatttctttccacagcttggccacatttggctggccttaacagcctctggtctaaccttgaccaagtctgcatgcattggtcacttggctctctgcccttttccccttccagaactgaaatttgcatcagcctctgtacagatcagttctgagcacccaaatttctgagcacctactgtgtgtcatgcctggtgctgggggccctaaaggtgagtctgacccac

SEQ ID NO: 184764 - DNA, 173 bp, Homo sapiens
ctctgtctcccagttgagagcgcttctctggacatccacaaaacgtccatccagggctttggtgataagattggaagggcttatcataatccagctgcccattcaagacacagtaccctccacaaacaccaccgtgaccaagtcatggtctagccccaacttgattcaataac

SEQ ID NO: 184765 - DNA, 201 bp, Homo sapiens
tggtcgtgcgaggcgtgggctgacggcagctggcatgcagcaggggaggtgtgctgggaccaggcctggagtggggtctggtggccctgccgtgtatggagctgagtgccgcccagagatgccatcttgtcctcagaagtggctcaggcctgctggggacagggcaggtggatggaagctgctgcatgccctgtgccatgt

SEQ ID NO: 184766 - DNA, 390 bp, Homo sapiens
tgataatgtattatatactgtgttcttacaatcaagtaagctatagaaaagacagtgcccttaagaagatgataaggaagagaaagtacatttacagtaccatactggacttattggtaccaaaagtttaggttgtatgtgtatgagatgaattgtctgtctgaaatggcgggcaactgcagccgcagacctgaagtcagttggtacgtttcaaggaattcaactttttcttgtaatgtcatgactttgcttcttgggagcacttccagcatcagtggcattccctgtgggtcctacgttttactcagtgtttatggtgttgcactaaacacgatgaaaaatatgtgagaacaaggagagatcactttttactgtgacagataatttact

SEQ ID NO: 184767 - DNA, 295 bp, Homo sapiens
taaccattcatctttgcagacctccgctgcagggaggccagtgtttgatccggcacactcgaacaggtcatcagggagaaaatggccctctgtatttttaatgtctgatgagaaaagacctccatgcggcatgtgtgcgcccacacatatgtgcaaatggcacttagcatgtgccatgctgctggatgctggcgtgggacattgcagttcatgtaactatagctcaacccaccttatttaaataaacttttgggggaataattttagatttacagaaaagttgcaaagaatcgta

SEQ ID NO: 184768 - DNA, 369 bp, Homo sapiens
tgtgagccaccgtgcccagctagcacagagaaatctgaataaagggaaagggagcctgccatgtggctctctgggaactgtcaatccaggaagaggaaacagcaatataaaggccttcagccctggcctgggaggaggtcttctgcacgtggagctggggaggagtggaggaaatgagttggagggtgggggtgtggaatgagtcaggattatttaagcccttatgggtcagaggaagaactttgagtttttgaattttaatctaaatgtgagaggaagccattggagggctttgagcagagaaataccagaagcttacttatgtttttaaagggccgctcttacagtttcgtggataataaagtgtag

SEQ ID NO: 184769 - DNA, 441 bp, Homo sapiens
acacatacattcacacaaacacgtacacatacacacaaacatgaacacatacacacacacatcttggctgttagccttttcattaagctgacttttaatcatggagctccttacacaaatttgttttttaaatcttattaccatatttcagctaggacaaaatgctgctatttcagaagtacagccattgctctttcagtctggtctggctggcaaaaaggtggccttgttatgtaaataaagccccttttgtagttaaaattaaaaatcttttttttccttttgatggccattttcctcccacttcagagaccctgttccccataatttagggttccccttcagatttgaccaagacagaaagaaaaaaacaaaaccattaagcaaaactaacaatgatcacacaaattatatgatttctgaatgcgtccgtgtaagcag

SEQ ID NO: 184770 - DNA, 977 bp, Homo sapiens
  misc_feature (815)..(815): n is a, c, g, or t
ccagccctggaggggaaaaggggctccctgcccagaaagacagtgatgggggtttctagaacaaggaaacccagaaggttcccagatgtccaggagacaggaaatgagaatttcagagccagcgggaagacaaggtgcctcactgagctgctggaccatgaaaggtgaaaaacacactgaagatgagagccatctcgggagcacccgaacacagatgtccataaaggagctcgtgaacaccacggaccctcccgggacccatcccatccaggcctccttcccctccaccatgctctctctgtggctactctgggtctaacacaaccactagaaaaactatccccaaacaggcacagtgagagcacacgaacagacatgctgatacagttcggacattcgtcccttccaaatttcatattgaaatgccatctccagtgttggaggtgaggcctggtgggaggtattggatcatggaggtgaacccctcatgaatggctttgcaccatctccttgatgatgagtgacttctcactcagttcacacaagatctggttgtttaggccaggtgtggtggctcacgcctgtaatcccaacactttgggaggcctagatgggcagatcactggaggtcaggagttcaagaccagcctggccaacatggtgaaaccctgtctctactaaaaacacaaaaattagggctgggctcagtggctcagctgtaatcccagcactttgggaggccgaggcgggtggatcacctgaggtcaggagttcgagaccagcctgcccagcatggcgataccctacttctactnaacatacaaaaaattagccaggtgtggtggtgcgcgcctgtagtcccagctactcaggaggctgaagcaagagaatcgcttgaacccgggaggcggggcttccagtgagccaagatcacgccactgcactccagcctgggcaacagagcgagactccgtctc

SEQ ID NO: 184771 - DNA, 203 bp, Homo sapiens
atggcttaccaggatcagagcatctgccccttccaagggacatccttccaccacgagttcaaagtggatccacagactgttccatcctgcaaattacagaagacggggtgtcattcagctttgtccctcaagggccagaatgtaacagcatgctggtttcttaagtgaactagtgaataaatgtagctcagtgagtgtggaca

SEQ ID NO: 184772 - DNA, 936 bp, Homo sapiens
gtgagaacccacggaggggaggaacgaaactccgatgaagtcagagccccttacccgccgccgcggccaggccccccaacatggactgtctctgtatagtgacaaccaagaaataccgctaccaagatgaagacacgccccctctggagcacagcccggcccacctccccaaccaggccaattctcccccagtgattgtcaacacagataccctagaagccccaggatatgtgaacgggaccgagggggagatggaatacgaggaaatcacattggaaaggggtaactcaggtctgggcttcagcatcgcaggtggcactgacaacccacacatcggtgacgacccatccattttcatcaccaagatcattcctggtggggctgcggcccaggatggccgcctcagggtcaacgacagcatcctgtttgtaaatgaagtggacgtgcgcgaggtgacccactcagcggcggtggaagccctcaaagaggcaggctccatcgttcgcctctatgtcatgcgccggaagcccccggctgagaaggtcatggagatcaagctcatcaaggggcctaaaggtcttggcttcagcatcgcagggggcgtagggaaccagcacatcccaggagataatagcatctatgtaacaaagatcatcgaagggggtgctgcccacaaggatgggaggttgcagattggagacaagatcctggcggtcaacagtgtggggctagaggacgtcatgcatgaagatgctgtggcagccctgaagaacacgtatgatgttgtctacctaaaggtggccaagcccagcaatgcctacctgagtgacagctatgctcccccagacatcacaacctcttattcccagcaagtggacaatgagatcagccacagcagctcgctcctgagttgtggatcctctagaaacggccatc

SEQ ID NO: 184773 - DNA, 1037 bp, Homo sapiens
gtgagaacccacggaggggaggaacgaaactccgatgaagtcagagccccttacccgccgccgcggccaggccccccaacatggactgtctctgtatagtgacaaccaagaaataccgctaccaagatgaagacacgccccctctggagcacagcccggcccacctccccaaccaggccaattctcccccagtgattgtcaacacagataccctagaagccccaggatatgtgaacgggaccgagggggagatggaatacgaggaaatcacattggaaaggggtaactcaggtctgggcttcagcatcgcaggtggcactgacaacccacacatcggtgacgacccatccattttcatcaccaagatcattcctggtggggctgcggcccaggatggccgcctcagggtcaacgacagcatcctgtttgtaaatgaagtggacgtgcgcgaggtgacccactcagcggcggtggaagccctcaaagaggcaggctccatcgttcgcctctatgtcatgcgccggaagcccccggctgagaaggtcatggagatcaagctcatcaaggggcctaaaggtcttggcttcagcatcgcagggggcgtagggaaccagcacatcccaggagataatagcatctatgtaacaaagatcatcgaagggggtgctgcccacaaggatgggaggttgcagattggagacaagatcctggcggtcaacagtgtggggctagaggacgtcatgcatgaagatgctgtggcagccctgaagaacacgtatgatgttgtctacctaaaggtggccaagcccagcaatgcctacctgagtgacagctatgctcccccagacatcacaacctgtgagagcccttcaaacaccaaagttccccatgacccatcccgtttaacccatgacatgcagtcccacgacatccctgtagctgtccctcttcagatattccctatgaaatagccacaacctctgatccttgctgttgttggagaagagatggaaaatcaattaccataaaagaactag

SEQ ID NO: 184774 - DNA, 1035 bp, Homo sapiens
gtgagaacccacggaggggaggaacgaaactccgatgaagtcagagccccttacccgccgccgcggccaggccccccaacatggactgtctctgtatagtgacaaccaagaaataccgctaccaagatgaagacacgccccctctggagcacagcccggcccacctccccaaccaggtaaacgcccccgagctggtgcacgtggcggagaggaacttgtcccacctcgaggctggccacggggtcgtgggccacgcccacctctcccccttcaaggccaattctcccccagtgattgtcaacacagataccctagaagccccaggatatgtgaacgggaccgagggggagatggaatacgaggaaatcacattggaaaggggtaactcaggtctgggcttcagcatcgcaggtggcactgacaacccacacatcggtgacgacccatccattttcatcaccaagatcattcctggtggggctgcggcccaggatggccgcctcagggtcaacgacagcatcctgtttgtaaatgaagtggacgtgcgcgaggtgacccactcagcggcggtggaagccctcaaagaggcaggctccatcgttcgcctctatgtcatgcgccggaagcccccggctgagaaggtcatggagatcaagctcatcaaggggcctaaaggtcttggcttcagcatcgcagggggcgtagggaaccagcacatcccaggagataatagcatctatgtaacaaagatcatcgaagggggtgctgcccacaaggatgggaggttgcagattggagacaagatcctggcggtcaacagtgtggggctagaggacgtcatgcatgaagatgctgtggcagccctgaagaacacgtatgatgttgtctacctaaaggtggccaagcccagcaatgcctacctgagtgacagctatgctcccccagacatcacaacctcttattcccagcaagtggacaatgagatcagccacagcagctcgctcctgagttgtggatcctctagaaacggccatc

SEQ ID NO: 184775 - DNA, 373 bp, Homo sapiens
aggtaccggcctatccaaggacgggaatgaggctctgatgccagcacaaggtaaatgttatggcatgaaggcagcaactacacagcaccacgcgggcctcatgggaatgcacgcatgtcacctggtaggcctggatgcaggacagtggacaaatgcaaagttttagaggttcagttaaagaatcgcacgctgccccaggtgatcttggaggagtgagacttgggcggccgtccaaccccttctgctgcccccacaggcagaggacaccgccacacctgcgtaaagccacccaccatctcttggttctagagatggaattccgggtgggagtcatgaatctgatcagcatgaggctcttatcatcttccaactc

SEQ ID NO: 184776 - DNA, 728 bp, Homo sapiens
agtcttgcactgtcgcccaagctggagtgcagtggcatgatctctgttcatcgcaacctccgccttacaggttcaagcaattctcgtgctgcagcctcccaagtagctgggattacatgcgccaccacacctggctaattctttttcaaatttttagtagagacggggtttccccatgttgcctaggctggtctggaactcctgacctcaagtcatctgcccgtctcagccaagtgatctgcccgtctcagtggttacaggcgtgagccaccacgcacagccacattagtgttttcttatgttcacttataattcaactttggagaacgttgccttcttccccagggataccactgtcaaagagacaaatatggagaggtgcagaaagaaagagatagctcataatcttccagaaacatctatcacttatgataatccatgttgcaaaggtgttccagaccgaccacttacaaacccaactaatcaatctacttttaaaataagtaaataaaaaaaggaggatgtatctttatcatgttcaccctcataacaaattatcttccctccttgaaatagcatactttaaaaaacagtggttgggccaggcatggtggctcacacctgtaatcccagcactttgggaggccaaggcaggtggatcacttgagctcaggtgttcaagaccaacctgggcaacatggcaaaacctcatctctacaaaaaataca

SEQ ID NO: 184777 - DNA, 154 bp, Homo sapiens
acagagtttcaccccagtaaaataaacttccacgtgagagttgtgttcattcaagggttattttttgagagtggaagtacatttcctgcatttgtcacagataatatcagaaattttgttgttttgattaaaatgttgccatctacttataagt

SEQ ID NO: 184778 - DNA, 206 bp, Homo sapiens
caagcaaaacaggacctgtggcccttcccactggatggggaggagctgaggaaggcatttcggaggaggtgacgtcttacggggaaatttgtgtgttggaatcaaagtgagggaagggctttggggtggagtggccagcaggagcaaaggcttggaggccagagagaatctgagcggcacacaggctggggaggggttggccgtgc

SEQ ID NO: 184779 - DNA, 214 bp, Homo sapiens
agcttctgtcctggaaggggaagggcagcaggcctgtctgggatgtccccagccagcaagcttgcactgggtcgaagagcttttattcctgggaaggagtggatttgttttttggttaagatgaggtaaatcaatgtgaagactggctaaatttttactgcctactctgtgaggcattgttcaaaatatattcttaaaacggattcttttctat

SEQ ID NO: 184780 - DNA, 455 bp, Homo sapiens
tcgcaagctcgtacccgatatgtattttttatttcctttacaaaagatcattgaattaaggcactttctttggctctactagattgttatttaaatataattcaaacagccatcgaggataactgttaataaatctaggttttctctgaagtctcccagtgtatattactgtactgatgactgacaaggaagaggttttgacaaggtccaattctgtatatttctcttaaaatatcctaggcagttcccaggataggagtatctgactcatgcctcatgctaccaggaacctttgcagcctcatcccagaaatgcagaaacacacttgttttgtctgtagaaataaagttttgatggttagatttccaggcaaaccttcaaaatcatgttaaactataatatagggaaataaagtagtgtatgttcttctgtctgcagagtcaagtgagattttg

SEQ ID NO: 184781 - DNA, 558 bp, Homo sapiens
atccatatgaattgcttgctgtagtagcaatttttaaatttgagatataacatgcatatagtaaaatgtacagatgttaattgtatagcatggtgagttttttatgtgtacaaactcttacaattaacactcagatcaagatgtagaacatctccagcactccagaagcctctccttcatggttttcacaggttaactaatatccacttctcctgtcactcccaagtaattattattctgatttttattatcatagattagtctttcctgttcttgcacttcatgtaaagggaatgacttctttcgtttattatggttatgacattcatccatgatgttggtataccttggttctttttattgctatgtagtgtttcattgaatgaatggatcattatttattcttctgttaatggacatttgaattgtttctaatttttgacttacaaagaaaacctgctatgaatattctcgtgtatttctttttatgaatatattgtttcatttttaagagtataattgttggatggttgtcttccaaagtggctgtaccatttt

SEQ ID NO: 184782 - DNA, 349 bp, Homo sapiens
actacatatggtttttgttcacaagtctcttcccaaatctgcagaccgtattccattcttatgtgtctatcatcattgcctccatttctcaatgcccacttactgcttaatctcttggaatctagcttctgccactatcaagtgatgccctgaaattgttctttctataattactaatggcctggttggtttttaaaaaaaaaaaaaaaaagtttttttcttagttctgattctatacatgatcatctcccttcagcagcatattattttggttatcccatttctcagtttaaccaatgccttttttagtgcctacaatatgtaagatactactcatctaggaacccct

SEQ ID NO: 184783 - DNA, 522 bp, Homo sapiens
tgtgtaacaaatgctgcataacaagctataaatattcctgctgaagttagtttgtaacttcaagtcagagatggaaaatatcaatggtgaaaaaataatattgatttttcatgttaaaaagacactttttccaggctacaaaactaactcttgctgaatttgaagagaaattcttcttcctttattttctaagtatcttttgttttattatgtgtattccagctatgtatgcatcacagcccttctccttctttttcagtattatatctatggttttctcattgttgtctttatgccatgtcattttacatggtactttgtaggttttgatgagaaagttggtatttttttaatgtactaaaaaattagttttaactggagagtttgtcaatacaactttcagatcagttaattaagataaaaggcattcagtatccacaggtgagaggaataagtcagttagttttctttttttctgcttgtaaaagaaaaaaaatcttacacaaagtgtggcaaatattt

SEQ ID NO: 184784 - DNA, 465 bp, Homo sapiens
ctctgctcctctgtacatttctgcggaactggcacttgaaaggtaaggcgccggagctctccctgccccagtcataatgggaaaagttttcaccccaggccagcccaaacactcaattgtgttctttctctaccagatacataatccgtgtttaaatctcttggcagtcactcattagtttttttcccctacattcttttcttctttgacaagagtacaccagctatgacccaacctctctcccaagaaatacggaacactcttaaaaagggtaaggcttgtcaatgcttaaagttctctgggtttataagggaccagaggctactaattacccctaaaaatcccaaaggcaagagctgatggcattgaaagcaataaacaaagattccattcacgttctattcaaagtgactggaaatacctggagaaccgcctccacctccctgccggcttcttttcatattg

SEQ ID NO: 184785 - DNA, 251 bp, Homo sapiens
taaagatgactgggttggtgttaagtgtgcaatcaaagatgttttataactagcagaaactattgcagaagagttaacttctgtttccttataaatagtcatctggcaacaccttaaatgtaagttctgagactctacaaaataactgaagtcagcctccctcaccacttgcttcagaatatattggagaatatatttgctcaccacttgcttcagaatatattggaaaatatatttgcagaaaaggaaaa

SEQ ID NO: 184786 - DNA, 143 bp, Homo sapiens
aaacaaggtgagaattactccgtttgctctttacagtcctttggtttttggttcacaaacttggaaagaaatctgtgctttaaataaagccttcttatactccaggttcctaagtggtgtggaggaatttgtgtaaacatcag

SEQ ID NO: 184787 - DNA, 318 bp, Homo sapiens
agctgaaaaccctaggagattagaggtgaaattctgtctcccctataattgaatgtattataacacaaaaatatactcagaaagaagtcattaatttgagtatagtgataatgatagctatcagagtaatcccttttaaaatagtttcagttcctgtaataccaaggcccactcacatgttgtagtattgttaccactgtcgcagtaattagtttccatgacacaaaatcacctcacttgctttcccacagaggcagcaatatgctaaaagagcagactctagaccaggtctcccggggtccaagtcaagtgtgtgtt

SEQ ID NO: 184788 - DNA, 173 bp, Homo sapiens
ttgtatgaaggcagtgaaggataaaagttacacatcttcacatattctgtgaggaccaggctccagctgcgaaattaaaatctatcagaaattcagacaagaactattcccagggtcaggctctcggctttatgtttaaagcaaagaagtaattgggaagaaggagtctgcat

SEQ ID NO: 184789 - DNA, 494 bp, Homo sapiens
acacgggtgcgctgaacgctgcagtgaaaagacaaccattgtgcggctggaaaacagtaagcactggtgtgatcttcagaaaagccacacagaaaacacaaggagatggaagggtgggaatgaagaaagcgcccctgggtttcaccagatccagcggagggggcttcccgcagacaggctgctccagaaggctctgtgggccctgaggactcaccgggatcggggctgtggcagggcgctccccctggtaagcctcacagccccagcccccttcacagccgtgaagtctgcagggacttctggaaacattggtttttggataagagacacaggtgagaaaggaactccctggctgagcccttctctgtccctggtctgcaagcgtcgtgtctgcagctgtggcagcagctgtgatcacaaggccaccaacaggaggataaaaaccaacagccaaggatggagggtcaggacagcgaggccctgccctgtcacca

SEQ ID NO: 184790 - DNA, 349 bp, Homo sapiens
gctgtcaggcacttttgctataagctcatcccttaattatgtatatctctacctcaaaatagtacaccctaactaataacaaaaaagagcaagggaatgacagaaataagccatttaattacctgctgtcatacattgaaaacacacacacacccaaactcaatactatcttgttatccactgtgaatgacaacttgggcaagaaacaaataaggtgccaggatcaattaaggtaattatctagttctcttgctaaatgcttccaaaagacatttcctcctttggcattattcactaaaagcaatgaaggaaggagatagggaaggaaagaaggaaggagatagggaag

SEQ ID NO: 184791 - DNA, 391 bp, Homo sapiens
tgcctcccttaagtgttggaattacaggcatcaatcagccactgcacacggcctatacctgtagctacttagaagtaggtactggggttatccattctgaatgatgggatggggatgcaagaggaagagaaccagtttttagcttgtcttaaactaagtcagaatacagattgatgatttaaacacctcagctcagcggttggtcctcatttcatttttgctcaaagacagtgtggaatcagtcccattggttactataattaggttagctccttaacttcttttgactctgatttctaacaaatgaagaagggcagattttagacaataaatcttgtactaaaatgaaatggtatttgttaaataccataaagaagcttgaaccttaagc

SEQ ID NO: 184792 - DNA, 247 bp, Homo sapiens
gtcctagacaacctcaggtatgtgtgcccaggatacatgtgcaggaatacatgtgcagtgttgctcataggttccccaagtggaaaataaccaaaacgtccatcaagtgtagaatggttaaatcagttgcgtgcaattacacagtagaatactctacagggatgaaaatgggcgagccctgagcgctcacagtaacatgaatgcatctgatgaacaacggtgagcaaagacagcaagacacgaaaga

SEQ ID NO: 184793 - DNA, 775 bp, Homo sapiens
agcccaccggaagtttagcgaaccaccctcaacctccggaagagcgcgggaagtttgtcggaaacggacagaaaggagtccctgcgaccgcgtagcctcctgcagcgccccctgttggcagagtcgtagcgaggccgagatgaggtccgtgacgtggctgcgtgagcatcccggctgcctgtggatgagtgggcgtggggctgagaggcgacaacagtggggagcttcctcagcgatcctgggcttctcgggtcaggccaacttcagtccgggctggaggccgtgcacaacaccaagcgcatggtggggtcctcagctgcctcgggactggctccgcctctgcccctggccctgggatgggggccaaaggttttgggcagtggcagcagcaggaggaagtagcacctggaaaacgtgtctcctgagtcgacccttcctgtctgggggggccgaaccctggctgtctttgttcccatagcaacgaatagggctcccctatgttccagccccttagatacggtgtgccccaggagggctctgcaggagctacaggtccttctggtgggaagggaggcgggaggtgggctggggcagccggctggcctgtgtggagacatcacacttcctggttggggacagggtgaagagggttggtccccacctctgccttgagcagagcttctagtgggtgaagcagtggggatctcctgcctgccggaaggatgggtggggcttccacatcgcagcccagtagggtggactgaccggtcttctg

SEQ ID NO: 184794 - DNA, 375 bp, Homo sapiens
atcagctcggtacagactcggcaccgtcggtacagtatcaccctgactactctacaagggcctcccctgacctgaaaccgcaatgcctctgagcctgtccctgcactgaggatgaggccgagccaggagtccaggcctcctctgagccacagctgtagttgggctggcagctctgcatcttcatgatgtcacccgagatgctccacgacctttccctctgtctccccaactcaggaaggacaggcagggtgaggtttcctctagtctcagtacttgagccttctaagcaaggcccagtccctgccaacagccttctatggctctcactgatcctggcccagcggaaggccaggctttgcagatgcagagcctccc

SEQ ID NO: 184795 - DNA, 436 bp, Homo sapiens
caaggtacatgggattccaggagaagatttctatgaacatgttataataattctgtagacgagtgtatttttgtttgtagctcaaacagttacagtccacatactagagagcacctttaaacacagcaaatgtttagtcagagatttcaacctaactgtgcttagaaatgaaatcctgtaaacaatttggtgatactggcaaatttaaagcatctacctccttccaatctaattttcctcttcagattgttaattaaagaaaatgaaaagtatactttaattttattgccaaaagcactagtttgctttattcatgcaaaacaataatactcaaacttgctatttgcccgcagatctacaaaaatgctgggactggatgatttcaaggatgtacttatcaatggtacaataaaaccatctttttcagaaactacta

SEQ ID NO: 184796 - DNA, 264 bp, Homo sapiens
gggatcattggtccgagagaaattagaatcttaccagaatgatgtacttatacaacttgcaaagttttatgtgtgctccttggaattattgatgtccccgaagtccatccttagattctgagatcaaaatgcctcttacttttagcacatggcaggattttaggagcacctggtatattgctgcttattactggatatttgccaagttgcctttgttttagcagtaacataaattaagaggcactaatttctctcggaccaatg

SEQ ID NO: 184797 - DNA, 532 bp, Homo sapiens
gcagggaaaccacatgcccgtggaagaggagaggtgaactcgggggtgctggcaggggctggaggtgggaggtagtgaataggagatgccaaccttttcttaacaatttagttgcatcttagggaaaatgggggctgaggagggccctatgatgacaacttgaattgggtaaaatttaaggataaggaattactaattagtaataaggtagaattcttaagtgtatgaaatgaataatatgtagctaaaaaataatgatatagcattaggcatttgagacatgtggactccaagcaattaacctctattcttcttctgaattgcaattgcactaattggctgctttactctgacggggcgatattaacctttctgcttttctctaaaggagccagtatgttgggtggatgtgctgctctggtttggaggaaaggtatttttcctgaataataacctatttgcaatttttctcccaaatggttgcattgaaaaggttctgtcaaattttcttgataaagcttcatctatggaa

SEQ ID NO: 184798 - DNA, 506 bp, Homo sapiens
aagtgaataagaatggaatttgcaggggacagccaaatttgaagagaaacaaactcttagtttgatagaaatgagggttttagggaaaaatctgaatatttggtttaatgcaagtttgataaagataagggaaatgataacacaggatgttgggagctatcaagaaaggcatattagaatatggcattcaaggagttctgaagagtttgctgcctttttgtttgtttaactggaggaactgacaaacttcaaggttttattgaaaaatgttaaaagaatttgagccactggaaagagtctccagaggagataggaatgtggtatcatcttcttccatcccagcttacagagggcttagaatccctcaagaactagggagctggagattgcttaagtacatagatctgtgatccagggtggatgtctctttttttctgactcttttctcaattctctcatgtacatgtagggtaggacaaatgtaggattggccggcaaaccagcaa

SEQ ID NO: 184799 - DNA, 398 bp, Homo sapiens
aggagatatacaagtagccaataagtaaacaaaaagatgcttaacatccttactcttcagggaaatgaaccttaaacctacaaacccaccgtgagataccacttcacaccaactgggatagctattattattattattattttattttaagttctggggtacatgtgcaggatgtgtaggtttattacataggtaaatgtgtgccatggtggtttgctgcacttattaacccataacctaggtattaagcccagcaagcattagctatttttcctgatgctctctcttcccccacttccacaacatgtgtgttgttctcctcctgtgtccatgtgttctcattgttcagctcccacttataagtgagaacatgcattgtttggtgggatggctatatc

SEQ ID NO: 184800 - DNA, 215 bp, Homo sapiens
ggaatgaagagcaggatcctaactgttccatacataggctttcaaacaagcaaacaagtggactcctcctccccagtatctaacacctcaaattctggagactttctaagaattcctggggagtcccccactataaacaccgagtctgacctttttttggtcactaagtcattcattgactccactggttcttacatcctatggttagggctact

SEQ ID NO: 184801 - DNA, 388 bp, Homo sapiens
gctctgttgccctctgcctggtggtgggactagggactggacttactcttgtgcctggccttgcacctgggaggtaattggagctccaggattggcttgagcataacagaaactaagagccaaagacctagacccaaaagggacagggaaggattcattcactcattcatccattaactatttatttgaactccatttgtgtttggcatggggaagcaaaaatcagtcactttttatcttcaaggtattatggtgagagagacacttaaacagataattattaaacaatgtcttgagtgcagtgacagacatatgctttgggtaatatgaaaattacaagaaggaatacctaacccaagcttggtgttcaagggacactttcttaagg

SEQ ID NO: 184802 - DNA, 234 bp, Homo sapiens
cgatctgctgggtagtgatgagtggcttagctggttggtaaggggcctggaaggaagtagactggatgttcaggaaaaaatatgtggatagacatgtcaaaatgggtataaaaggcatgctatttcccaccaataagcattcaatacagaagagtacctgaaaaaccaaatgggcaggatgatttgtccaacaaatatcagttaatctctgttctcagacaccccaaccgctcg

SEQ ID NO: 184803 - DNA, 3233 bp, Homo sapiens
  misc_feature (608)..(608): n is a, c, g, or t
  misc_feature (918)..(918): n is a, c, g, or t
  misc_feature (936)..(936): n is a, c, g, or t
  misc_feature (1021)..(1021): n is a, c, g, or t
aaataaatacatctgggatgactgaccaagaacaaagaatgtaggcatcaactgaacaccaactgtatacctgggactggatctgagggtaggattgccagattgagcacaaacaaacaaacgaaacacaagaaacaacagaagggtgcctgttaaatatgaatttctggtaagcaataagtaatttttattgtgttcctgtgcaatgataggacgcacgtatcctgaaaacctgtctgtagttcacctgaaattcacatttaactaggcgttctgattttatgtggccgccctatctgctgggaacataggctgatgcccctgggggttctgcgtttccttggccaggttcctgtagggctgaggtcatgggggagccgtggccagggatggtgtccttgccaggggaggtgacgggcagagctgcaggccctacaacttggggttgggcagggatgagtcgctctatggtggtgcctctgataatagctgttattttagtttctgaaaaatgtgctgccctcaagagcttctgaggctaggcctacttgggtgaaaatagctttccagggagccacattgtggggacgtgaggcagcagccccacnctttggggccacttggctgtctctaactcatctcacttgccagggctggacaaggagatgaaaaagaaaatgccaaggggtgggcaggcaggagcctgttggcgttggcaggcgctgccagccctgtgtcccagtcaagctctggggcgcccttcctgtccatctgggagtagggggtggagtctgaccatgttggggcggagtgttaatattaggagaggatcctccctgggacagggtccccaggcttgggggcaaggccttctgcctggacccccttcctttcctctctcccaggattcctccaggncaccgtagtgctgtgcanggtttggccccatcggtgtgcctgctccttccagccactgctcccttctgcagaaacttgcctgggattcccagggtgcaggggngggggctggtcaggggctggtcagggcctggtcagtgtagagcagggagcttttcacttttagcatagatagagtggccagggccccatggctgcacctccctggacataaccaggatgtcctgtcatctgccccccaaacaaaactggggtctcccctttattttgccaacagaatccaatttttaggtgatgagacaagtgtttgacttgaaaagaccctcctgccctgcctcctggaaggtctggagcccagcccagcgccccggatcccctaggcatgtgaaacggggaatgcagtgtcctccagtggctggctgcagcttggggtgggcacctgggtggtggctggtggtccccctgcaggccactgctgccccctcttgggtcctgttctgagtctcaggcctgagtccctggggaaggccccacacctttgccctgtacctgggtatggggatggccctgaggggctgccttgcttgggagaaggggggaaaacagatatttttatataaataagaaaaagacagcccctctgggcagatgaggcctgctgtagggcagggggcttggtaaactgtgtgtccactggtctgtaacccttcagctgggtccttttgtgcagtgaacagcctggacaactgtccaggtggcccttcagggatatgttcctggacctttcttagcttctcaccgatctttcttccacgccaagtccatgttcctcagtcaaacaagtggcaaagaggaggaggaggaggggaaggaggaggaacctgcttcaccctctggcacctgcgggttttgttccacgtgtcttccttgggaaagacaaggggttcttttacagcctaggggtggtttcccctttctacttctgagtgagaccttctcaagtcacggctctttgggcccacatggctaaggtctagccacctgtgggtgtcctgtgctgcctcagtgggtggtgtgggggcggggctgacctcccccgcgcctggctcagtgcagcagaccctggcccctgtgcccgctctctgccctgagcaggagtttgattttcctaccccgtggtgaagcaagcacaggtgggcggaggtgggcagcggtttccagccccagccaccggggcagggaggcctctgttgctcagggcaagggaggcagggggcttagtgggacgaaggctcaccccacactcttatcattagcattatctgtatttttaatttttaagttgagaaattttctacaactgtcaaactagacaaatgacagtatccagttcccctcacccagacgcagccattgctgacagctgtcagtgttgaagatggccagcatctcatgcccttggtttcactcgttccctgggtggccctcgtccccctccccacgtcccgcgccccgcataccctgagcagccatggccaggaacttggcacgtgggtttgttttttctgaatctgcatgtgcgcagccatgagcatgaggtcactttttgaatgtgaccgaagctgcatcctgctgcgtgtattgctgtgtggctggctttcctccctgtcttctgttcaggaatactgttcaggctgaataccgtcctgtgacatgggtttaaaaacacaggccaggcatggtgtctcacgcctggaatcccagcgctttgggaggctgaggtgagaggatcgcctgagcccaggagttcgagaccagcctgggcaacatagacctgatctctacaaaaaattaaaaaatgagccgggcgtggtggtggcacgtgtcattgtcccggccacttgggaggccgaggtgggaggatcacttgagcccaggagttcaaggccgtggtgagccatgatggcaccaccgtactccagcctgggcgacagagagagaccgtctctaaaaaataaaaaataaatcaacacataaacatacgttctcctcctgagggacagagcttgccccggttgttccatgttgactgtgctgcacacaggccgccccccttgctctgcccctcactgtattaagtctctttgggcctcagtttctccatctctaaaggaggtcggggaggccaggcgggtgttgagtgagatgaagaggcccttggagtcattccaggagtctataggtgactccagtctcttctcacttctgacagcctggtggcgggggtggagtctctgctggggatgtgggtacag

SEQ ID NO: 184804 - DNA, 626 bp, Homo sapiens
acgttcgttccacatttattggatgatggtgaggagcggctggggagccagatggaagaagaaaggggctaacaggcttccacattcccaccccaggtctggggagctcccagccgcagctaaggaggacatactaaattggggttctgaaaagtacatggagccaactctgcctctgggggtccctatccctcttctccaggaaaagtgaagatctccatggcggccagcccacccaggacacaaggcccagggtgctatgtggtgggggatctgtgaccaatgagggcaggcaggttccaggaccccctggagctggcatgggagaattagccccataacaccacactccaggattagaacattgtactgttagcatctccagaggaagaagaggcacattcagtcacaatatgtgacccccacagggaccacatggaagctcaaagccatcttagtggtcccgagcaagaaggggcacaagttttgtctggaaagatgtggaatactcaccacagccaatattcagcctggaaactgaggcccactcctccctctcaaccccaggctctgcctctgctacatccagaggaccgatagtgacaccacacacacacacacacaca

SEQ ID NO: 184805 - DNA, 566 bp, Homo sapiens
  misc_feature (503)..(503): n is a, c, g, or t
ccagtatctccttaacataaccacaaccaaagaatgggggaggcaaaactttaatgtaggggtctaaattctgctgataggaagcaaccttttctctctcaggggttcacctttgtggaggtacaaagtaagaactatcagaacatgagattctgatctaatccgctaagggtccttggcccaaatctggcttgcagacaggtctgacttacacagggtttaaaaatagttttttttttttttggctgggcttggtggctaatgcctctaatcccaccactttgggaggtcatggcgggtggatcacttgaggtcaggagttcgagaccaacctggccaacacggtgaaactcttgtctctactaaaaatacaaaaatgggccaggcatggtggtcctgcatgcctatagtcctagctacttggaaggctgaggcaggaggattgcttgaccccaggagtctgaggctacagtgagcagtgagctgggataacccactgtatnccgcctaggtgacagagagaccctgtctcttaaaaaaatgttatccctttttagtacaggaag

SEQ ID NO: 184806 - DNA, 744 bp, Homo sapiens
tttcttctataatcacatccttatcccatgcaaaactactttctgaataaacgacatccctgacagcttttccaatagagactggtctaggagaaggaagacttctaagttctcctagctccttgcatactcaatgactgctctattactccaaactcttcctcctcacaagctgatgatctacattctatttctcagtttttgtcatcaatagatctctacacccttctcccagattcactgagtatctacagcaaacccacccaatacctgagatcacaccaaggtatggtgcagccatgttccattcaacagagttctttgctctctactcctagactttcacttgtccacacccatgaccatgctgctccatactagaagtctgaattgcaacactccactcttggcccgtggcttcctttttcagttcctcttctcttattatttctatttagggactcatcaggacatctggactctttattttttactttttctttctttgattcagagtttccctcttgttgccaaggctggatggagtgcagtggctcgacgttggctcattgcaacctccacctcctgggttcaagcgattctcctgtctcagcctcccgagtagctgggattacaggtgcccgccaccatgcctggctccagcatacatagttttttacttttagttttatttattctttttttttttttttggaaacagaatatcagggtaccgagctcaat

SEQ ID NO: 184807 - DNA, 904 bp, Homo sapiens
tcaacaggttattctggtagtcttttaggggactatgcacagacaatggcaaaaacagtgtctaagcattctttctcttagtgtagcttcagaagaacttggttctatggtgagttgatgaaatgagaacgtcatcatttcagggaaaaatggaaatagttgccaattcagccactgatagtgtggaaagtcaaattcctccaacaaaatcatagggacttgaaatttatttagtccaattcatctgcttaatatgaatggagaagaggctcaaattgggctcaaattagagtaaaattttttcctatactgctgaagagtcctcttcagtgcaatcaagggttttatgtttcctctctgatcctcatcttcctcttcccttcgcctgtttgggatcacactgtgtctctgtttttcctcttttcagacaattagaggaaatatcaattctccatcatattttggcagaggaagtcttttatctctacgttgccacaggatttttaggcctgtatgttttgaacaaaaatatacttttaagatatctcacatttcatcaagttaacgtgtgctttccattatctgaaaaatctcattaacagataattttatgacattgacacccaatttttgaagttgaaggaaaataagggtttttttttttttttgtaaaatctcataaataatagaacaaactttcttgcagtataggctttcctattcacttcgcccagagtattttagaaggactgagggaaaaaagatattttaccttgtatatattggaaaaataactagatgggagggttctggattagttgtttttttcagatatttgtatttcagctaatttatccttttaaaaatgtgattgcattactaggttcttaccatatgttaatta

SEQ ID NO: 184808 - DNA, 439 bp, Homo sapiens
aacatgccactgtactccagcctgggcaacagagcaagactctatttcatatatatatatacacatacatatacacacacacatatatatgtatataatatcaaaaataaggtagaatgaaaacaagtagaaaatagaagaggaaagaaataaattagaggatcagtttaagatttatttaaatttaaaagatttaaatttaagaatattaattttatttttttaatgattttcttttctccagtttctctagttagagaaactcctcatagttagattttggatctcctcatagttaggttttggcttatgaagtgaaagaaatcatcaaagaaattatacttttcccagtgtggagagagagtgtggagaaagagtgtggagagaagtgtggagagagccagtgtggagagagcgtgtggagagaggggtaccgagc

SEQ ID NO: 184809 - DNA, 112 bp, Homo sapiens
taattagatttagatgatgttatgagagtgggccccatgatgggttaatgtccttacaagaagaataagagaaactgaagctcactctctttctctctccaccatgtgaaga

SEQ ID NO: 184810 - DNA, 237 bp, Homo sapiens
tgaagatacctagtcccaagctggctgaggggcccagatagatctccaactgggcacttgacctctgaactcccagaggacaattcttactttccctgctaagccaggactgtctggtcccatgcagtttgcctggtattggtctgagagtcctcggggctgggtgattctgagcaaggatcatatggtgttggcctggtatccccagggaagtgtaccaagctcacagtatgtcgg

SEQ ID NO: 184811 - DNA, 556 bp, Homo sapiens
atctttcattcttacttccaacccaagcaagcaaactgatttacaccaagtctacacacttgtatctgatggcctcagatttcactgctgcaaacctgcttctgccatgcagtatgtaaaagtgaagcccagaaccctaagccacatcttcctcttaaaagcacactctgagcagtacagactaacctcttcctaatgaggagatggagcaagtggcagagttaaacaatttccaccaaacactttagaatcctgagttttctgcaaaggagcacagatgttcatatctctgacagcagccagaagcctctgccaacacaacagcccatttcaagagaaaaacagacacaaatactaagtatatgccaagtttcctctcaaatagctttcccccgttttcttatttcatccagtttgacgttctttctaccttgcccaccacatattttctgatctcccagtgctcacccattttgcaatgatcagccagaagggctcaaaattgcttgcacccttccgaaatacattctgctctatatccaacaacttcctcaag

SEQ ID NO: 184812 - DNA, 1934 bp, Homo sapiens
cgcggccccgctgcctgccctgctccaggctccacctgcgccgccgatcgcccgggtatcgcgggggcccaggccagctgagtccgttttccgcgccggggtggcgcccctccaaccgtcctaacgccgggccggcagcaaggagtgttcctgggacctcagagaccaggctcagagcctgacatccctgcgaggggacagcctcatccgcccaggccggtgggggtctctacaagtgcccaggctcaggtgcagcccccagcaatgcatcgccggagactggccctgggtctggggttctgcctgttggcgggcacaagcctcagtgtcctgtgggtgtatcttgagaactggctgccagtctcctatgtcccctattatctcccctgcccagagatcttcaacatgaagctgcactacaagagggagaagccactccagcccgtggtatggtcacagtaccctcagcccaagctgctggagcacaggcccacacagctgctgacactcacaccctggttggcgcccatcgtctccgagggaaccttcaacccagagcttctgcagcacatctaccagccactgaacctgaccattggggtcacggtgtttgccgtggggaagtacactcatttcatccagtccttcctggagtcagccgaggagttcttcatgcgtgggtaccgggtgcactactacatcttcactgacaaccctgcagccgttcccggggtcccgctgggtccccaccggcttctcagctccatccccatccagggtcactcccactgggaggagacatccatgcgccggatggagaccatcagccagcacattgctaagagggctcaccgggaggtggactacctcttctgccttgatgtggacatggtgtttcggaacccgtggggccctgagaccttgggagacctggtggctgccattcacccaagctactacgccgttccccgccagcagttcccctatgagcgcaggcgtgtttccactgcctttgtggcagacagcgaaggggacttctattatggtggggcagtcttcggggggcaggtggccagggtatatgagtttactaggggctgccacatggccatcctggcggacaaggccaatggcatcatggctgcctggcgggaggaaagccacctgaaccgtcacttcatctcaaacaagccgtccaaggtgctgtcccccgagtacctctgggacgacaggaagccccagccacccagcctgaagctgatccgcttttctacactggacaaggatatcagctgcctgaggagctgaccacggagctgggggttgccatggatggggacccaaagacctgcagccaccagtgcttcactagcgtgcagaccagccctgtcccgcctccctgtcagtcaggcgaattcaaccggaaaagggacgtggaaaggccactgtgaactgcagagggctgtgcacacagtagcacacaggatctcacagtaacgcggcatgggaacagtgagacagggggaggggaggcgcagttacaaaggcagggcccggcaggcttgccacgttctgcagccgtgcctttgcggggcaggctctgaagcctcagcccgactcagagtgcctgaaccctgccgcgccagtcccccgtttattgcatattgcccttaacgtagcatttctaataccctggtgtgaaggcgccctagaccccttttctctggtcacaggggtcctgggtcctttgatgtctcccaaccacatgtagccaattcctcactcaggcccccagagtgagcctttgaaatggaacaggtctaggctccctcggtttcctgcaccccaaagtgagccgcactctcaggggactagccacctccttcttaagagggtttggggcagtttataataaagggggcgtgtgctcaaac

SEQ ID NO: 184813 - DNA, 1271 bp, Homo sapiens
cgcggccccgctgcctgccctgctccaggctccacctgcgccgccgatcgcccgggtatcgcgggggcccaggccagctgagtccgttttccgcgccggggtggcgcccctccaaccgtcctaacgccgggccggcagcaaggagtgttcctgggacctcagagaccaggctcagagcctgacatccctgcgaggggacagcctcatccgcccaggccggtgggggtctctacaagtgcccaggctcaggtgcagcccccagcaatgcatcgccggagactggccctgggtctggggttctgcctgttggcgggcacaagcctcagtgtcctgtgggtgtatcttgagaactggctgccagtctcctatgtcccctattatctcccctgcccagagatcttcaacatgaagctgcactacaagagggagaagccactccagcccgtggtatggtcacagtaccctcagcccaagctgctggagcacaggcccacacagctgctgacactcacaccctggttggcgcccatcgtctccgagggaaccttcaacccagagcttctgcagcacatctaccagccactgaacctgaccattggggtcacggtgtttgccgtggggaagtacactcatttcatccagtccttcctggagtcagccgaggagttcttcatgcgtgggtaccgggtgcactactacatcttcatagcgtgcagaccagccctgtcccgcctccctgtcagtcaggcgaattcaaccggaaaagggacgtggaaaggccactgtgaactgcagagggctgtgcacacagtagcacacaggatctcacagtaacgcggcatgggaacagtgagacagggggaggggaggcgcagttacaaaggcagggcccggcaggcttgccacgttctgcagccgtgcctttgcggggcaggctctgaagcctcagcccgactcagagtgcctgaaccctgccgcgccagtcccccgtttattgcatattgcccttaacgtagcatttctaataccctggtgtgaaggcgccctagaccccttttctctggtcacaggggtcctgggtcctttgatgtctcccaaccacatgtagccaattcctcactcaggcccccagagtgagcctttgaaatggaacaggtctaggctccctcggtttcctgcaccccaaagtgagccgcactctcaggggactagccacctccttcttaagagggtttggggcagtttataataaagggggcgtgtgctcaaac

SEQ ID NO: 184814 - DNA, 357 bp, Homo sapiens
agccttcccacggggaaaggttagtactacagccccaggacttttcattgctgcctctgttttttcctcagaaagaatcctctgtcttgaggcataatctggatcttatttggggaataaagttggaaaaggcagttggggaactctgtgttggtatgttacactttcacgtaatcaccttttggtaaggcaccttccttcttgttcccagtatatcaagcagtttacgttcagagcttcttgggctcaatctttttcagcaagtaaaccttcattttcccactagggcatgtgggaacgtagttattgggctacacagagtgggaaaagtgaactgggagtattacttctttttct

SEQ ID NO: 184815 - DNA, 503 bp, Homo sapiens
gctaaaggagatggcttctgtcctggagacctcagtagtagcaccagtggacactttagaaagaacagtgtttgcttctgtggctaagctggtctcttcagaggtgctggtctccctcaatctggtggtcagtgaggaagctggctctgactgaattttcctagtgttagataaggcaggagttaatgtagaaacacttgtatcccccataatggagatggtacccatcgccgatgtggctttggttgtctctgagtcaggtaggacagaggaaggggattcatgtccagaactggaagttccaactttggttactgccgtgtttgagaaaggatgaattttctccgtatctgtggtgacttcagaggtggccagtatttcaactgaggtgctgctcaaacttggaggtgaactggtttcaggttctgcacttgcgtccaacacctcagtagtcttcacgtggcctggtgtgagaagtgaagtcacagaagcagaagaggagt

SEQ ID NO: 184816 - DNA, 240 bp, Homo sapiens
gcagttcccttgattagtctactgcgcaggtaaaaattgtttacattcttttcctgtgaattgttaatttcccactagaaaggctatagtacattttaaaagagaattctcttaaaacaagattagaagactggataagatcttacagaaaaggtttacccaattatcgtggatattgaatgtatagtgcatagtaggctcctactacagcaagtccttgaactcttgggcgtacgggga

SEQ ID NO: 184817 - DNA, 794 bp, Homo sapiens
cgggaactgacggggtcccagacggatgagagctggggagaagggggtctcggctgaggggtccggggctgaggcagggtcatggtccggcaggacccggactgacgggtcgcgggcgggcggctcacgggtgaccgggtgaaggggtcttgggctgagggcacccgggctgagggtcgcgtctaccggagcgcgcactaggggcggagggcgcgggcacagagagccgcggccggtgccgactcgagtggacgcgagccggtgcgtcccggcttccaggacagcccccctcgggagagcgccgggtgggcgcggagccggggacacggggacctccgcgtccccggcggaggtgcgcaagcgtcgggagccgctccgggggaactttggagcagggtgtctggacccggggaagcgaagatccgcgtgcgtccgtcctgaggccgcgcggcacccctgctgaggaggaggtcccgttcgctgtccagagcccaggggcgaccgccgcttggggaccgggggaccgttcagcgaggggcgcgcttgtagctggccaggccctgtgccctgacgcgttgtgctggccctacgcccggcggaggggctggggacggggactgggtgcctccgtgcctccgcggatggagcgcgcagccaggacccccagccgcaccccggggggctggaaaggcgaagtcgctgctttgtgggctcctgcaagtgccaggcgctgaccactcctcctgggagcctaactgaggggggtagaggcagcagaggttaacagaaatctc

SEQ ID NO: 184818 - DNA, 352 bp, Homo sapiens
aggactgggagctagttcttatcaccactgttttcattattgtcaattaaaaagataagtctatctattttagtgttcaagggtataatctgaaaaagtaccacatcttacctttggcaggggtgggggagtgtactcataattttcccaattatgagttctcttgttgttctatgatttcacagcaaaaagttttaaaagccttcaaaaccagcacattttgctcacttgaaatatgtttatattttagcataaaatatactcggcagctcctaacatagttggatggctacgcattgcaaaaacttgatttctttttaatcaaatttttagaaccgcactaggtttcttg

SEQ ID NO: 184819 - DNA, 202 bp, Homo sapiens
agttaggtgactcatagaggatccccagtgttcttcaagagcataagattttttcaatttatttttgtcatctcaaattcctttaatcagtgtttgatagttttccttgtaggtatttttcacttccttggttaaatgcattccagatattttatttttacagctattgtaaatgctaacaaactgacaacttgatttggtt

SEQ ID NO: 184820 - DNA, 370 bp, Homo sapiens
aggaggagagaaagaagggtcaggaggaagtgtgttgggtacagagacatggaaataagaaacaggaaccctgaaagacacacccgcggaggttctgtaactgtacatgtgctcttgttaaatcgccagtttcagaggactcagatctgaggccatatagaaatctattaatttgcatcttgactttggggcttccagtaacagtaagtatttgtatttcaggatccactcagcagaaaggccatacatattcaagtcacataataaattggtgaattccaagtgaattgtgaataccaaaaaagaaaactgattatgtgactttctggaatatgatgtagaaattgacctaacaaaatgtatatgcaca

SEQ ID NO: 184821 - DNA, 563 bp, Homo sapiens
actacaggcgggcttggcaaagctccctcctgaatgccacttccctgactcacttccttccccgtatctctctggccctcagggacctaaggcccaggtgaagtgggggaacagcaggattgaggagaagccagcctgaggccacaagcaatgaaatgccgtagccagaagccaagagctcagaggtcaaagccatccagcactgggtttgcttgcagcagctgagatggaggaaaggagccccgggagctctggccttgcagggaggactgggttcctgaggggagggtgagctatggtgtctgctaagcggaggagtgtctacctcccactcagcttccccatggatgtgcaggacactgtcttcatttgtgagtcaaaatacattggcataggagccttgcccattactcatacatttttgtggctgcctactaagaaggcagaggagaccctgatacccaggagctctaagctttgaagggccctaatcatgcatagccttcgcccccaagcccaaggctcatccttccaaaattgggcaactccagacctgaagcagg

SEQ ID NO: 184822 - DNA, 480 bp, Homo sapiens
acctctatgctgaaaaccaaaaaatattactgacagaaaataaaaagacaaatgaaggggaataccatgatcacagatcggaagactcaatgttgtaaaggcatcgattctaccctaacttatctatagccttaatgtaatactaagcaatattctagcagataactctttgaaacttgaaaagctgattcgaaagtttatgtggaaatgtaaagagccaaggaaatcttgaagaacaaagctggcaaaccgattctagattattgagattaatgataaagctaggcacagtggctcacacctgtagtcccagctacccaggaagctgaggtgggaggatcacttgaggccaggaatctgagactacaaagcactatgatcgtaccattgcactctagcctggctgatagaacaagaccctgtatctatcaatcaatcaatagaaagagttattataaagctgtaacaattagacaaaca

SEQ ID NO: 184823 - DNA, 273 bp, Homo sapiens
cttcttcagtcccattcatgtgtcattctctcctgaagaataggccttttgcacaggctattctctctgtccctgctctccagctaactccacctgatcatcaggtcttatagcttgaatgccacttcctccaagaaaccttccttaactcccaaaacagttgggagtctgtgtacacgctcttcatagcaccctttgctttctactacctagaattacaactaaaaccagtgtatcagaccggtgtggcagctcacacctgcaatcccagca

SEQ ID NO: 184824 - DNA, 422 bp, Homo sapiens
tagtccctgaagatgcttttgaaagagaatgccacaagacagttaaagcacaccagtaagatctccaggatgactgtgagggcaggaagtaaagtgaaagcacagcactgcaggtgctttattttcacctttcttccacttagaaagcaactcttctcacaattatcctatagtgcctcctaccctttggtttaactgaccatgtaagatgcattgagtatgagggctatctgttgtaatgacgtaatctctaatgttattctgcctatggaaatctctgattgttctggtaatgctgacacttcttacattatgacaaccattcttgaagagttttgtgaagattaaaaaaaattaagccacagtgtttgatatactagggattgccatctcccccatgaaggcctatagcaaatcatttt

SEQ ID NO: 184825 - DNA, 338 bp, Homo sapiens
gtccccctacccccacagaacaggaagcacatgtcacagagaacttcatgcttcagcccattagctgaaacaacacagagcacctcacagtaaacaaagatcagttacatatccatctgttgtacaaccactagctctgaaccataaaaccattgataaaagaaaaacttcagttgaattatatttttaaaagtttaatttagcaatgaacaatttgtgaattgggcagcccctagaatcacagcagattcacaaagactccagtgcagccacatagtggaagatttatagacaaaaaaagggacatgacatacagaaattggaagtgaggtacagaa

SEQ ID NO: 184826 - DNA, 439 bp, Homo sapiens
gaaactgcaggaaagcctttatttggttttctgaggaaggaatgggcaaaactggataagcaggcttgaacaggtttaaaattggctagttgaaataattttggccgacttcgggcgtaggggatatccctagttgcctggtagctggtctggagtgattaggatagggcaatattggccaggagtataagaacccaagatgtctgtgttgggagttgggggattctggattggttagtttgcataggaattagctaaccctgggagaggtagtacctctccagtcatcaaggacccacctagataccaaatgattaacaatacaaaaataagaaagtacaattaatacaaacagtcataataaagatacagtattaacacagttaagacgtggaaattttaataaataaacactattaagacgggccggctcgatcga

SEQ ID NO: 184827 - DNA, 485 bp, Homo sapiens
gaaactgcaggaaagcctttatttggttttctgaggaaggaatgggcaaaactggataagcaggcttgaacaggtttaaaattggctagttgaaataattttggccgacttcgggcgtaggggatatccctagttgcctggtagctggtctggagtgattaggatagggcaatattggccaggagtataagaacccaagatgtctgtgttgggagttgggggattctggattggttagtttgcataggaattagctaaccctgggagaggtagtacctctccagtcatcaaggacccacctagataccaaatgattaacaatacaaaaataagaaagtacaattaatacaaacagtcataataaagatacagtattaacacagttaagacgtggaaattttaataaataaacactacagtaaatgtaggactgcacccctcccaaaaaatttgagataatttgatggaaaggtgtgtaaggaagg

SEQ ID NO: 184828 - DNA, 603 bp, Homo sapiens
  misc_feature (14)..(14): n is a, c, g, or t
ttcgagctcggtancctgatgttatccccaacacccacctcccatgtatgattttactaactgaattgaatttttaaaatctcattacagacttgaataatcatcccatgaatgttaactcccctaacactataaccgaggcccatttctaaagttgatcttaaaactggaaaatttgagtctatctaattttgtgaaatatagggatgccttttacatgatgtaaaagtcatatttgtaaaatggttaaactaggaggcaatatttttattgcaagtatgatctcttaagtgaaaggtttctgtcatttaaaatttttagagtctttatattttcataaacagtatttcaaaggcaaatgttctttctaacgttgtgtgtgtgtgagatggagttttgctcttgttgcccaggctggagtgcagtggtgagatcttggctcactgcaacctccacttcctgggttcaagcgattctcctgtctcagcctcccaagtagctgggattacaagtgcccgccaccatgcctggctagtttttgtgtttttagtagagacggggtttcaccgtgttgggcgataacgggatcctctagatgacctt

SEQ ID NO: 184829 - DNA, 435 bp, Homo sapiens
gagtgagtccacgctctggcctctgagttcttctcatgggaggctgagaaaagtctgggggtctgggacagccagggccgggtttccccttccaggcaatgagaaagaacaggctctgcctcccaccataagagtcaatcccaagttccagatgtgtcagggaagcgatggagagccccagacttgaggcatctgcagacaggttcctgctcagacatccacgtggagggtgttagtatcctgggagccttcagaaccttgaagcatgccagcagaggagaatgagggaagataaaatcaaagtgacttatcacaattaaggaaatgtgctatttcatgtacaactgtgtgtgaggatgagattcctacctgccatactgaggtattatgataagaactaagagagtccaaattcctacaggatgaacagctgag

SEQ ID NO: 184830 - DNA, 130 bp, Homo sapiens
accaagataatcaacggctgctaaaacattaggttagaggctggtgaaggactttataatggatggattcagccaaccacgctgatgaaggattagaggctgatgaaggattttataatggatggattct

SEQ ID NO: 184831 - DNA, 499 bp, Homo sapiens
ggatcctggggaagtggaatggggctggagtcgaggaggatgctggagtgagagagcctgatgactccaggtcaaggccatgagcccaggacagctgtgatctgcctggacctcacaggcagcccctgagaggatggagcaggacgtcatgcccagtgcagatgaggaaaccgaggctcagaatgcagattcaggggccttcagactcctgcgtccagctgcctcttactgtgccaccccaaactcagtgggacccaaacagaagtcctgcttcctccctggcgcccacccatctccatgaataaacccgatctggtgagaagtggcatgggtctgtagtcgaggaggatgctggagtgagagagcctgatgactccaggtcaaggccatgagcccaggacagctgtgatctgcctggacctcacaggcagcccctgagaggatggagcaggacgtcatgcccagtgcagatgaggaaaccgaggctcagaatgcagat

SEQ ID NO: 184832 - DNA, 825 bp, Homo sapiens
gaattatgatttataaatttatcattattacaaagaaagcatgtatcaaatctagaacttttaaagatatgactgtatcaagtgttatgcagcattaggtgatctggtggttgtgaaacatcactgagtacattacacaaaacaaaatggtatagcctactatctacgtaggctatgtgttatagcctatttttcctaggccacgaaccttaacagcatatcactgtactgaataggcaactgtaacacaatggtatttgtgtatctaaacataaaaaaggtacagtaaaaatgtggttttataatcttatgggacccctgtcatacatggtccatcactgactgaaaagttgttacatagcacatggctataactgttgtaaaaatacaatgggataagaaacaggttctctgtgtctagatggaaagaaggatagaaataacaatgatcaggagtgcttatgttcaaataaggcagttgagatcaatttttaaactgtaataaaaattgaagggaggttttcctagctcttgggaacttggggaaaaaaaactgaagggcgggagaataccgttatgattttctgttctatttcaaaaggacctacattacttttattggccattacataagattatcagtgatgttaagagaacatcagaaaacatactaatagaagtgaagttacagtaagaatgatgatataatttattattattaaataacaattactttatagataacatttactgagcacttaatatatcctagggggtattgaaaacactttgcaggccaagcacagaggctcaacacctgtaatc

SEQ ID NO: 184833 - DNA, 878 bp, Homo sapiens
aatgaaaaatgcccagaaggaaatgaagcacaagattcagttacacaaagatgaaagctattgaccacttggccacttctcatactaaaagagaaggaaataacacgaagtactggaagtgacattatattgtcctcatggtgacaaccaggatgggcctgacataagccagtccaggctgtatgtgtggcccgagtgcacacatgcggtttctctggccaccgaatcagaaccagctgggccccacaagtcagtctctgggggctgtgattctgcattgcaaacaagtccttgggtagctctcagggttcaccaagatttgagaaccactagtgtggctgactccagtgaaacagtcccacttttactgctttcaactgtcatttatatagattcaggcaaagaatggtttttagaatgatgcccgatgtagcaaataaaatgatctcaacatatagtttatctttgctgcagtcttttctcagatgggaagaacagattatccctctctgccacataatttgttcccttgaggtttcatagcatccagaaagttcaggtgttcccatgtccacttcccattgccttgccaggttcccatggaggaaggctgcccagctcttgggccagtcttagatgggcattttcattctccaggtatacacagcacatttcatatcagtgtggactgcctacttcaggccatgccaaggattataacttcttctataaccaggaacttcttacactcacctccagctcagtgaaattatactaagaggtgatcacttaaagggcacgcagctcagcccttcctagacagtctgggtgtcatccctggattaagccagacttcaaagaaccacagttatagacca

SEQ ID NO: 184834 - DNA, 582 bp, Homo sapiens
atggggtgtcatgagtgctcaactgccagaggcccaaacgcagctcagtaagaaaatgcttttgagctataacccaggttgagtaccattggtacattagaatcacagagtcagattttactttttggggcagtggtaggtgtggataaagtatctccagtccagatttcttgtactggtgctattgggtttgcgggtggagatttatgacctcagggataataaccggaagaacagtgagtagaaagctcagggatatgagttttgctgtatatcaaagctgtgtgactttgggaaaattacttaacctttctgggccttagctttgctacctattcatcaagaacaataaaatccatcttgtttatttcatgagattggtgtgaggaccaaatgaaatagtatatgggaaggtgtttaaaaagttgtgagttctacacgacttaaaaatgccagtattatgaatgcaaccattctttgttgtcatttgggtagtcgtggatagcgtggtggtaggagagccactatcggagcaagactgttccagagggtaaaacacacgcgtgcctgtagagcagttgt

SEQ ID NO: 184835 - DNA, 491 bp, Homo sapiens
tgcccaggctggtcttgaactcctaggctcaagtgatctgccctccttggcctcccaaagtgctgggattacagggatgagccactgcgcccaggccaaaatctttttaataagatagaggatccagggttagtttttgtagccttggctggcccatcagcctctgatgtgcttgaatttctggtccctggagtggacacagggcttagtgtggctatgctgggttcccagggccttgctgaaatgccagtacacttcttggcccttgtgaggcccagagagcaggatggtgccacagcctttgagggtgtccagggtcagctggtcaaaggtgagaatcttgtccccagccttggggatttggctgcaggcccaactgctcatgtgcagtgcacacaccttcagtttgggcacctcctgaacatggtccccacaaccacagctgttttgttttcctggccaggaagcttcatcttccagatcatccagga

SEQ ID NO: 184836 - DNA, 538 bp, Homo sapiens
caccgttgaagacccagtcctagaaaggagctttctaaattattgtttaattagtgtaatccaagaatttatgagacttttggaaaagcagagcgctagaagtgccacctttcggaggtcacggatttagtcaggtgacccagcaaactcaactcgttggggttagagatggagaattagaaccaaagctgaatcactttctgcttatcactcatagactgccagattttctttttttgttggagggaaagcaccttacaacaaataataatactattttgaatttcagagctttccctttttcaaagcactttaccacctctgacttattttgtcctcctaacaaggccataagataaggaagggagggctttttagagcctgtctaacaccctaagacagagcttaatattgctgaaggcattgaaaagtataggttttgttctctcatccctggccacactcaagtacttagtggcacaacttgaagcaaattgacatagatgtttaatcctacagtggactgtgtttttaatag

SEQ ID NO: 184837 - DNA, 242 bp, Homo sapiens
tccctttgatgcccatgtagccaccatcccaggctgtgcacttactgcaggctggggcagggcgggtgtggcttccatcaatctgatccccattatcagctcagccggctcagccacagaggaaacgagatactggtcccgctaagctctggcacaaatgggagggagaacgggtggtggccagattagcaggctaggcctcaagaacctgggtctgaaccacccagtcacctcttcactct

SEQ ID NO: 184838 - DNA, 384 bp, Homo sapiens
ccaggcatgcagagcagcagaatataacctacaattgagaagaaaaatctgtccgttgagagtaacccagaaataatacttgaaattagtaggcaggacattataacacttattatggctgtattttatatgttcaaaaagctagaaaaaagattgagcaaattaagcaaagacatggaaaatatgtttaaaagattaaaagacacaaatagaatagatactgaagaaaagactaacaaacttgaagacatatcaataaacaattcaaaatgaaacagtgaaaaaaataaatacagcaatgaggaacaggacaccttcacttggactaatatacataaaattagagtccccaaagaggatagggacacataaatgtttgaagaa

SEQ ID NO: 184839 - DNA, 178 bp, Homo sapiens
tcaagttaaataaataaagaaccaaaaaaaaaaaaaaaagtcagggaaatgaaggtcaaaagtgcaatagaaaatggacaaaagacatggacagacggttcacagaaatagacacagaaatcatttatatatgtatatgtggacatctgctcaaattcactgataaataaatgagatg

SEQ ID NO: 184840 - DNA, 369 bp, Homo sapiens
attctatgtggaagcaaatctctgacatcatgtattccatgcataaatagctcagtgtgtcaaatctacttttgaaaaggaatctgaattcatctgttcgtgtttacgatattctgtaacattagagtttaagttaaggcattaacttattacagaatcacatacagaaaaccaaagtgaaatcacagcctcagacctctcacagatatcatgttactttcaaaagatatctgtcagataaatgcagtcctgtatcacaagataattcactgactcactcaaggatggcaagatgaatacagtattgcatggctgaagaacactttttaatacaatcatattactttaggaacaaacagatagtgttat

SEQ ID NO: 184841 - DNA, 673 bp, Homo sapiens
acagtcctgggggtttattctgcttagcttttgtttttatttttatgtatttatttgttttgagatggcgtttcactgttcttgccccagctggagtgcaaatggtgcgatctccgctcgctgcagcttctggctcctgggttcaatctgcttagcttttaaatggtagcatacattaatatgggtatacaagggtacagtaaacaaacacttaggttaggattaggagaaaccacgttcttggcttacggttatttccctgagaaggccaaccggttgtccttcatttctttgtcatattatttttgtagcgttaagattaaatggtcccaccctgaaagccaccatgatgagaacaaaagccattgggtttccagaattgagacaatatcattgcagaaatgtttgggtcacatgtcagccatggccctcagtgtagctattgctggtttggagccttgggtgcaagggatcagaaaggcaggtcccactggcccagggctccaccgggagcctttgatggaatcaggccagacccctactgttgacaggatttggtggtttgttttatgttttccaaatttggtagttacctgtctcctgtctttccccccaaacctctccactccttagcttttggctttcttctgcacagctcttttccaaaggaagg

SEQ ID NO: 184842 - DNA, 160 bp, Homo sapiens
tgaggcatcaagatcaagtctgaaattcagagaccacccctaggctctgtgggactttgatcttctgttccaaggcaatgtttaggggaactagaaggcagtaaaaaaaattagtggactaggtgtatgatcgtttatccttaagctcaccattgatcag

SEQ ID NO: 184843 - DNA, 179 bp, Homo sapiens
gattaattggtgtggaatatttaagccacgagaataagtactataaaagcaagaatttataatagggtctttaatgatcagttctgttcttacacagcttctccccactcctactccttggaagcaaccaagtggtatgagttggcccctactcaccccctccctggtgtcagtggacc

SEQ ID NO: 184844 - DNA, 363 bp, Homo sapiens
gtgcccatattgtgggtggggatctctacccgtgaagtgagcgtggggctttaacggagactggatcacttatgttctacctataaatacatggaagacttggcatacctggttggtccataaaagtcttttcaattaacataccattttgtagtcagcgaattggtgaaactaacaaatagttattgttaattctgatgtttgataagagtgtttgaaattaatatctaaacattgcaaaccaggtcttcctcctggtgatctggggacatcttgagattaagagtcctccagggtaaaaagcagaaatgacagccctttcctagactttattgatttccctgtgtgcggcacctgtcacaa

SEQ ID NO: 184845 - DNA, 449 bp, Homo sapiens
gacctgttgatacctactgagattccatttaaaaaactgctacctgttacctgagagagtagggggccagctctggccagggcccaaccaacctggcgaagcaaaggcaggtatgcaaaggcaggaaggtgaaggcagtcgggcggtggttgagagtcactgaagacaaacttaagatgtctcacggggcttagccaggactagaaggtagctatggggccaggcagtgggtggatgcggtgaagtcagtgggcccctgccctgccagacatcaagctggaagcagatgaaagtgggccaagaggacagatggggcaaggggttccagcactgcatggctgcacctcttaccaagttggtcactggttctgtatctccctttccccatctacaagatgggcgtgctagactcaatgtgcccaatgttctcagcagaaaaaagtgagaag

SEQ ID NO: 184846 - DNA, 362 bp, Homo sapiens
tgagctgatttggttaaaggtgatcgtaaaatgctatggttattgcttctattttctggagcaaataggaaacaacatgatagactgagactgaggatagaagttggaagtatgaggagagaagaacaagtatgaaataagcgtgtatacttgagggagacagaatgggttagagaaatggagtgtgaaagttggccattgaggctggagatctgatgtctctgtattattattttcttcaagcactgcaaggaatgtttgagtgggatcagaggatcattaaagtcaggacgaaatataaagagtgagcaagttggaaagatggctagtggtgtctgtagagtagggtcattgaaatcgag

SEQ ID NO: 184847 - DNA, 420 bp, Homo sapiens
atttcctatatgtatgattatattgtctgaaaacagggactatttgacttcctcctttgcaatttggatgccctttatttctttctcttgcctaattactgtggctaaggtttccagaactatgttgaacaaaagtggtggaagtaggcatccttgtcttgtttcagatcttagaggaaaagctcattcatggattactaggttaagaatacttgtactagattatgagattgtagaggtcagaaccatttctctctctctctttctctctctctccctctcagttttttcatctgtaaggaccatttcttatttttaatttttttaataacatacaatgctttgcacaaagtaggtactcaaaaaacattgttagcacaagcagttgatatgcaagattactttcctcattcttagtcc

SEQ ID NO: 184848 - DNA, 309 bp, Homo sapiens
tccaaactggaaaggaaggagtccaattatccttgtttgcagattatatgaccttatatttggaaatgataaagactccataagaaatctattagaattgataaatatattcaataaagttgtaggatacaaactccacatacaaaaatcaggaacatttctatatggtatcagtaagaaatctgaaaaagatatcaagacagtattgtcatttacaataactacaaataaaatatctcagaataaacttaaccaaagacgtggaagatctccacaagaaatactgtaaaacattgaatcaagaaatta

SEQ ID NO: 184849 - DNA, 538 bp, Homo sapiens
ccctcctgtcacatgggccagcctgcgtgcaccgagcttgcttcctgttaacccaggcatcctgtgcagcactcactccactcagaaccacaggggcctgctctgcatcaaaggcataaggaaaggcacagtgggtgagggggggttctgagtgtcatgaagacgtggccccaggggagacatgccacatgcccagaggctgaggacccacacagcctgctctagagtttgggtaagagctcggcttctggatccagcccatgtcctggctggacaggggcagccccaaggggtgaggactgacgtagttgaaatcctctccttgcggggcggcctgagcctcagcttcacctgctgcaggcaccatgccacacctgcctggtcacccatcctcactcagccacggtggtcacacactgtcggggtccacacaggcacctgcccaggctcttccacagccacggtgtctgtattccgcatttcaggctcctccccatctgtcaacaccaacgcacccccgctgccctcatcatctaca

SEQ ID NO: 184850 - DNA, 400 bp, Homo sapiens
gcaatttttgaattagacgcattaagcagtagggagccagtgaagggcagtgacctagtcagagcaacagatgacacaaatttttcttactatggcattttattaataaattggttatataagaaataggaagcagagatttaaaaaatgaaagttttttaatagtgtaagggttgtaatgcaaaccctaaacaaaaaggggccataaattaaaagaaagatacttaagtaacctaagcaacttaagtgggattcagagggagtgaactaagacaacaatatgatgtaatgcctggaaaactgaggtatttttaaaactttgcactaagtatatcgtcaagtactatggcttttgagttttttgatttgacctatagtaagaaatgtattttacatcatg

SEQ ID NO: 184851 - DNA, 377 bp, Homo sapiens
cagggtgcactgcatggtgcttttggtggaaaagctcgtatagcaaaaacatgtgtctcgcatggagaaataaatcatgtaaacgactgtggccccacttcatgcactggcatgtgtaaaatgtgtttattagcataatagctcatttcactgtattttggctcttaaggaatcttgcagaaacactttcttcttttcctgttgagacatccttttagtccattatgggccaattgcctctgggaattgttaattctaaattaaaatcattaaccatcagaagtgaagcctgtgcgtatacagatcacaatttgtaatcaatatggcctcgcgggtcccagacttgtctacctgactgtgtacttgtcagctcaacg

SEQ ID NO: 184852 - DNA, 102 bp, Homo sapiens
tttctttttctttttttctttcttcttagagtcatgtttttaacaagcactgctgtttggtcagtcaacaaacacactgaatactcactatgggcacaatga

SEQ ID NO: 184853 - DNA, 231 bp, Homo sapiens
tgctgttgagatgtttgaggtccctgtacattttggacattaatcctgtcagatgaatagtttacaaatttttttctcccattctgaagtttatcttttggctctgttgtttcctttgctgtgcagaaggtttttagtttgatataatcccacttactttttgttgtctatgcttttgaggtcttatttataaaaatgttttcccaggccaggcggtggctcacgcctgta

SEQ ID NO: 184854 - DNA, 452 bp, Homo sapiens
gtaagatcgagcgaggaggatgaacaaagaaactgtttatctgtctccttgtgaaatacatagagtaagggagcgccgtaactaacacatctcttatttaatgtctgttgccctcattaggtttaattacaaaatttgatcacgatcgtattgtagtctctcaaagtgctctagaaattgtcagtggtttacatgaagtggccatgggtgtctggagcaccctgaaactgcaccaaagttgtacatatttccaaacatttttaaaatgaaaaggcactctcgtgttctcctcactctgtgcactttgccgttggtgtgacaaggcatttaaagatgtttctggcgttttctttttatttgtaaggtggtgttaactatatagttattggctagaaatcctgagttatcaactgtatatctctatagtttgtaaaaagaacaaaacaaccgag

SEQ ID NO: 184855 - DNA, 195 bp, Homo sapiens
tccctgacctccatatttaaaataggaccctcactgccctaccctagcccctccccattaccatctttatcctgccttgttttggtccatatgacttaacagcatctgatataccatatacagatgctccctgacctacactggggttacgtcccaataaacccattgcaagttgaaaatattgtaagtcggcca

SEQ ID NO: 184856 - DNA, 475 bp, Homo sapiens
ctgaggtctaagactctcacctgtggctctaaatctttgtgtccaactcccacgtgggccccactgcctgaggtctaggatcattcttacctctggctctaaacccctggcccaaagcatcactgggtccctcagcccgaggtctggagcctcctctcactgctggctgacagctgcttctctgatcctcagctgggacctgctcttctctccgtctcactacttcattccccattccccagctcagcagcctgaggtctagggctctaggagcactttccaccttcagctcataatcccgaacccaaccccatctggacctgaagcctgaggtctggcaccttcaccaccatgtctcaacctctacccttgtccctagagtggccctcacctctcttcctttttttttttcttttttctctttgagatagcatctcgctctgtaacccaggctggagtacggtggtgcaatcat

SEQ ID NO: 184857 - DNA, 306 bp, Homo sapiens
ggggagcgttctagaggatcccagatgatggtccaccgcgtcgtctgcacggacttcattccccattccccagctcagcagcctgaggtctagggctctaggagcactttccaccttcagctcataatcccgaacccaaccccatctggacctgaagcctgaggtctggcaccttcaccaccatgtctcaacctctacccttgtccctagagtggccctcacctctcttcctttttttttttcttttttctctttgagatagcatctcgctctgtaacccaggctggagtacggtggtgcaatcat

SEQ ID NO: 184858 - DNA, 262 bp, Homo sapiens
ggtgccaaccagatgttgatgcctccaggaggaacctgacctgggataagagcaaggagcttgtctgcagaggacagcatgggaaggccatcgaggaactgactcgcctcactctcgccaaccagtgtcggctctcttccccatctgcatgtgctcaggtgaaccttggcccatctctgcgcctcaagtcctagatcagtttacctacgaccgccataacaaattaccacaaaggcttaaaacaacagaaatgtagtctctc

SEQ ID NO: 184859 - DNA, 593 bp, Homo sapiens
attagaggacaacgtggcttgatcccagatgggcttttaatgacttcctcctgaactggatttatcctcaggccttgtcctggccgccttacaggatcacagcgagtagacagacccgaatgactcagagggacgagggctggctgggcacgcacagttcctgctcccagttccataggaagagtgaaagaaaagaaagctggccaggtgcagtggctcacccctataatcccagcactttgggaggccaaggcaggcagatcacctgaggtctggagtttgaggccagcctggccaacatggtgaaaccgtctctactaaaaataagaaattagccaggcatggtggtgcgtgcccgtaatcccagctactcaggaggctgaggcaggagaatcgcttgaacccaggaggcggaggttacagtgagccaagatcacaccactgcactccagcctggcgacaaagcgagactctgtctcaaaaaaaaaaaaaaccgaaagatgtagactttgttgttgaagccccttaattgtccctccccactcctttttcctctgcggggttgaccattcttttgagttaaggcttatcat

SEQ ID NO: 184860 - DNA, 587 bp, Homo sapiens
ggctgtttctgagaagtgccatctcttgacttccatgatacttaattcagtcattgtttgataactcctgctctattctgtcattaattgaaaagtcagtatctattgaggttcatcattagatttttttgtcctcaaggattgaagagcgtagctagaaactggctttgcaagttatgtttgggacctctaactacaataaaacagaagctctagaatagagagttgaacagtgttcacagctaatttacattgactcaattctcttgttttattgttggaataaagtcatcattgatcattgaagcatcctggaataatattctggaactgattttagttttctaaggcttttttcccttgtatataccatctattttctaatacttcatttattttcaagtatgtactttacacgttaatgtttctgaaattgagatggctctaccagccaatggaacatcatttataattgagtacatttttttctctcttaatgagaaataaagtaggtgttacaaccagtaccatttaatgaaatatagtattttgataatatatagtactgtgtcaccacttgaccccaa

SEQ ID NO: 184861 - DNA, 196 bp, Homo sapiens
gaggaggcaaaaagggagggaggggtatttactccacatgaatcttgaccctgaatcctcactcgagctctctgccagacatgtggagcgcttttctggcattgcagcttgtagttcagtctcactctttggagtgattggttcaacagggctgcctccgcctggatccttagactgtttggtgatcacccagcat

SEQ ID NO: 184862 - DNA, 128 bp, Homo sapiens
gtccaaaatatacaatgggggatatacccccttaggaggatgaatacctttcctagcctactttctgtcattgacacttgagaacccaaagatcactttggtcttgaacagtgacagtctctcttagc

SEQ ID NO: 184863 - DNA, 109 bp, Homo sapiens
tgtacactctatgtatagactatgctctgggtggctgctagacaggcataggtgggccaggggtagaactggatactatatggaggccactagcatttcaggtcttagt

SEQ ID NO: 184864 - DNA, 513 bp, Homo sapiens
catttaagatgtaaattatagggataaaatatagataactcacatggggtgatttgattggcatctgttttcatttttctttgtttctttttagataccaccaaagtccttcctatttcaggcaaaaagatatgttttaaaaaccactcacaaggcctctacaatatgtcagataatgcatgtgcgtgaatgtccttggatgtgtatggtctcttgcttgaagttatcagccagcaaaatggtgaaatacttagaattaatcaaacatctggaggtcaagaaacgcagtacctatattcttctccttactttaagaatgaaactaataaaaaataaggcggagctggcccttcagcaaaggagggatttttattatatgagtgaatttgagagaaagggggacaagaaaagacctttgagatcagggcccaggtctgttttgttactactgtatccttactgcatagcacagtgcctggcacctagcatggtcacagtaaagattgaatgata

SEQ ID NO: 184865 - DNA, 275 bp, Homo sapiens
gaagtggggccttcggggaggcgtttaggtcacgagggctctgtcctcatgaatagattaatgctgtcataaagtgacttaatggaagaagtttggtccctttcttgcctttctgccttctgccatatgaggacacaaagtgtcctcccctctggaggatgcagggttcaaggtgtcaccttggaagcagagactagaccctcacaagacactgaacctgccagttccttgatcttggatttccaaaactgtgagaaataaatttctgttcttta

SEQ ID NO: 184866 - DNA, 648 bp, Homo sapiens
ggagggtggtatctgagccaaggcctgcgtgtggcaagctccgcaggaaagcccccaggggagcctgctgcacgttcatgccgggaagccacaactgtagaccatccccctgtgttcagaggggaagctggaccgtggaggcaggaagggagacacagagtactccatgccctttttacccacctctgttccctctggtccagcaaataagcatctgtgggcgggtggtgggaagtcaagtaatgaagagttgcaaggtgtggggtaggtataaagtgtctcaaggcagctgggccaccacttggggggtcaccacttggggggggcacctttctacctcttcctgtttcagcctggagtctaagtcatcagttccataaaggtaccaccactactactaaataaatacacagccttaggatttgggggcagtggggagagaagatgatgaacgtttggaaagtgaaaaaggctttccctttcctgtgatctcccatctcttaatcaaaaaagtcttaaaacacggtagaggctgggctccgtggctcacacctgtaatcccagcactttgggaggccgaggcgggtggctcatttgaggtcaggagttcgagaccagcttggccaacatggtgagacccccgtctct

SEQ ID NO: 184867 - DNA, 413 bp, Homo sapiens
tcgacctcgggccccgttttagcaccgtggtaggtataaagtgtctcaaggcagctgggccaccacttggggggtcaccacttggggggggcacctttctacctcttcctgtttcagcctggagtctaagtcatcagttccataaaggtaccaccactactactaaataaatacacagccttaggatttgggggcagtggggagagaagatgatgaacgtttggaaagtgaaaaaggctttccctttcctgtgatctcccatctcttaatcaaaaaagtcttaaaacacggtagaggctgggctccgtggctcacacctgtaatcccagcactttgggaggccgaggcgggtggctcatttgaggtcaggagttcgagaccagcttggccaacatggtgagacccccgtctct

SEQ ID NO: 184868 - DNA, 713 bp, Homo sapiens
tgcatttgccaccacgtgtgggtggccaccgctgttccccttgattttaaacgagggctcataaatattgttgaccttgctgagatattacctggtggagctggaaggtttgtaaaccttcttccgatgcccgtttattgattagaacaagctaacaacactgcacttaagtggaaaaaacagctggtaaaaatgtaattctttcagccttagggctgctgtgctccttttctggagagcaaatgtggaaatcaagatctgtggccttctggaaccttcaccaggaaaggtgaaaagaagaagaacccatccacagctgagagtggatggcaggcccgcgggtttccaggtggccagtaggattgtccgatgtctggaatgagtaccggggccgccaccaggaacacttgtcatttctaccatggagaggaaagcccagtgcatttctgtggttcagaaacttgacacaaagagaaaagctggaatgtttaaaagcaaaaatagggcagagatcagtgaaagtgcaggatgtgtgtgaaacaagggtagagtgagcactggtggggatggaggtggtgaggggtcttctgagctggggacgtttacttacaccagccctgcctcccaagaacccatcccctgtgggtccagaagaccagatccccgccaatgtccttccctttcagagctgtctggaggagcatgccactagt

SEQ ID NO: 184869 - DNA, 769 bp, Homo sapiens
gaaattacttgcaaataactaggaatggcatttgagttggaacctaaatgatgggcaaattttggacaaaaggcagaaagggcattccaggcaaggaaagtacggactgatctggcacattgtgggtgagaaatggaagtgtacattggagataagtcatgagttttaagctgaagaagtttggctttttttcccccagtctttggttctaaaactttgctgaacacaaaatcagatgggcacatttattaaaaatacaaattctcgggccttatctcctgaagatttgaatttaggtttacaggatagcctagaaattagcattgttagctgtgatgctgagcaggtctgcatgtggtctgtgctttgagtaagttaagggaatttttaagtgattcagttgtatgtgtctctgataggatcacatgggggagatttgaagaaattagaaaacccagagttttgagggtagggtttgataaccaggtttaccaatgggaaatggggtgggggaaggtttaagttgaagcaagaggagtgctttaaactctggtggtaactctgatttaacaaatgctaggaagacctgctttttgctaggtcctgtgcaacactgtaatgatagtgatccataaaatgcactcctagatggaggctcaaagtctagaaaatctttccaaatttaatcctcataaactccctgttaaatacgtgtgaaactattttgtgccttaatatagagaaggtaacttgtccagtgtgcagctag

SEQ ID NO: 184870 - DNA, 376 bp, Homo sapiens
caaaggtcgagagaattagcggagcagtatggtgactacatttcatctctcaaaagacagcagcaataggatgctgatctcaggaggaagcagagcttagaaaacacaatctgtcttcaaggctcattcaaatgcaaacattatggtcaggggcaagatgtccactgcctaatgaggtgcccatataactacggattaggacaatctccttacatgaactcaaacagccagcccagcaggcactcctaaacagacccaaattgctgaagcatctgaaagtaggaagccccggcacctaagaattggtggcaggaaggaattagatgtctaatccatgtatttttgtttcaccagactaatttctctcggaccaatc

SEQ ID NO: 184871 - DNA, 596 bp, Homo sapiens
ctacggtgggaggatcacttgagcccaggagtttgaggctacagtgagctctgatcacaccactgcactcctccagcctgggtgacagcgagattccatcttaaaaaaaaaaaatcctcattaaaagcagacattgtgagattggataaaaaagcaagacctatttatatttatatgctgtctacagttatcccactttgaatataaaaatacaaatacgttaaaagcaaaagagtggaaaaagatgttaatatgttaacattaatgaaaagaaaaccttagtggcatattaaacaaactatattttaaaatgaatgtcaccaaggataaaggagaattatttcataataataaagagatacattcatcaagacataattctaaatgtttatgcatgtattaacagagattcaaaatacaaacttttcaaggagaaataaatctgtaattatagttgaaggtttaacaactctctcacaaaaactgatagaacaagtagacaaaaatcagtgaggatatagaagatttggacaatataatcaactgacttgacttaattgatgttcagtagaacattcgacccctaaacagcagaa

SEQ ID NO: 184872 - DNA, 331 bp, Homo sapiens
ctgccaactgagccagggcttgggcagtcttgaattgctccaagaactgggagcctgtagtactgccgcctttagcttcaccgacatcaccaaatcctttccctaacatgctcaccatactgtgatgagaaaatgtgttccttgaggcagcctgtgatatgccagcctgcttcgaataactgaccaccaaagcctgacccaaagaggaggcttggaccggacccgaattggaggatcattcttcaatggagaggggggcttccccagcagaacagccaggtcaattctttgaccagcagtgattgtcaaattctcagcaggtgcaacaggg

SEQ ID NO: 184873 - DNA, 249 bp, Homo sapiens
taatacacttgaaacgtaagacacatacttaatagggattgttgtctggaaagaaatgcatgtgatcaagccactgaaaactcccccaaaacagtacagtctctgacatctctgtttaccttactcatttgtataatctttttttgggggggcagggtggagtcttgctctgtcgcctaggctggagtgcaatggcatgattttggctcactgtaaactccgtctcacgtttcaagcgattctcctgcc

SEQ ID NO: 184874 - DNA, 538 bp, Homo sapiens
tgaggatccctatttatttgttttgtgtgttcgaatgtcattttatttttatgttattggtggatgggaacatagtcagtgaggaggagtaggctagtcgtatgtagaaatagaggtttagcagtgctgttattgctatgggtgttggcatgatgatgctttcattttttgttatttcttgaatgattattcattttggtataaatcctgatagtggaggcaggcctcctattgagagtagggttactattattaggcttgtgatgatgggtatcttgtttcatgtatgggatagggagaaagttgcgctgtggcttatcgagtgcttgtagctgtggaggcttgtccatggggtgtttgtggggccctaggagacaggacttccggaggcagaggaatgtttcaggggctaaggagagactcagcagacctggagcccgcttaagctcatctctggtggccttgtgggtctttctcttccctgtcccttttccagtcctgtctggccaccccaactggcgaaggcctcaggcatgtg

SEQ ID NO: 184875 - DNA, 235 bp, Homo sapiens
aagccataaatatacatgcagcattggatggcactttctaatcgggttccatgttcttcctatactgcacattgttagagaaattaaacttcagaaatgatgtgccaatttagtattacttgttagtaaaagacagtttttatacaagttaaagagatcaatgggtccaattaattccactgtttttcttcattctactaaaatttaacgcatacatatcaatcaaaaatacaaa

SEQ ID NO: 184876 - DNA, 224 bp, Homo sapiens
acaaccaatcccccacagatactgaggaacaactgtaatttagaaaactgggagaagctacctgagtagactatttacacaatgatactgcactaacaacctaatgattttagtggtttgcaacaatagcatttatttttggctcttaaatctgtggatgaactaagattcagctgatacaggttaatgcataatgggattgctccaagatgcagattgggtct

SEQ ID NO: 184877 - DNA, 739 bp, Homo sapiens
gtaaaaggtaattacacattttatttccagaaagtcaggggtctataaattgacagtgattagagtaatactttttcacatttccaaagtttgcatgttaactttaaatgcttacaatcttagagtggtaggcaatgttttacactattgaccttatatagggaagggagggggtgcctgtggggttttaaagaattttcctttgcagaggcatttcatccttcatgaagccattcaggattttgaattgcatatgagtgcttggctcttccttctgttctagtgagtgtatgagaccttgcagtgagtttatcagcatactcaaaatttttttcctggaatttggagggatgggaggagggggtggggcttacttgttgtagctttttttttttttacagacttcacagagaatgcagttgtcttgacttcaggtctgtctgttctgttggcaagtaaatgcagtactgttctgatcccgctgctattagaatgcattgtgaaacgactggagtatgattaaaagttgtgttccccaatgcttggagtagtgattgttgaaggaaaaaatccagctgagtgataaaggctgagtgttgaggaaatttctgcagttttaagcagtcgtatttgtgattgaagctgagtacattttgctggtgtatttttaggtaaaatgctttgtgtccatttctggtggtgggaggggactgaagcctttagtcttttccagatgcac

SEQ ID NO: 184878 - DNA, 587 bp, Homo sapiens
cagaggatccctctactcgcgactgctgtggggttttaaagaattttcctttgcagaggcatttcatccttcatgaagccattcaggattttgaattgcatatgagtgcttggctcttccttctgttctagtgagtgtatgagaccttgcagtgagtttatcagcatactcaaaatttttttcctggaatttggagggatgggaggagggggtggggcttacttgttgtagctttttttttttttacagacttcacagagaatgcagttgtcttgacttcaggtctgtctgttctgttggcaagtaaatgcagtactgttctgatcccgctgctattagaatgcattgtgaaacgactggagtatgattaaaagttgtgttccccaatgcttggagtagtgattgttgaaggaaaaaatccagctgagtgataaaggctgagtgttgaggaaatttctgcagttttaagcagtcgtatttgtgattgaagctgagtacattttgctggtgtatttttaggtaaaatgctttgtgtccatttctggtggtgggaggggactgaagcctttagtcttttccagatgcac

SEQ ID NO: 184879 - DNA, 449 bp, Homo sapiens
ataagtattttttaattcaatggtctaagaaaggtgttggtactctgtttccctgaaaggtgttctctagaactggagatgaacttgttgtagctttttttttttttacagacttcacagagaatgcagttgtcttgacttcaggtctgtctgttctgttggcaagtaaatgcagtactgttctgatcccgctgctattagaatgcattgtgaaacgactggagtatgattaaaagttgtgttccccaatgcttggagtagtgattgttgaaggaaaaaatccagctgagtgataaaggctgagtgttgaggaaatttctgcagttttaagcagtcgtatttgtgattgaagctgagtacattttgctggtgtatttttaggtaaaatgctttgtgtccatttctggtggtgggaggggactgaagcctttagtcttttccagatgcac

SEQ ID NO: 184880 - DNA, 368 bp, Homo sapiens
atcgtcaccatgggtcggagcacacgaagtacaagaggaccatcctaccagtggggccacgtctcaacggtttatccatcacccatttttctgcacgtcatcctgaggtaaaccaatttttaataaggatcccctaggttgaaatgggcacagaaattacagtgaaaaagaaaagaaaaagaaatggaaaagactgaagaaagaaaagagactcaagaattcctatttctaaaaatgttcaaaatattgaagtacattcaccgtcttctcttctgctcccttaacacttaaacagatccattactggaatttctttctagaggagggtaacccaaatttctgtgcccatttcaaggccgatctcgatt

SEQ ID NO: 184881 - DNA, 248 bp, Homo sapiens
tacatcgagctcggcaccttgtaatgggcacagaaattacagtgaaaaagaaaagaaaaagaaatggaaaagactgaagaaagaaaagagactcaagaattcctatttctaaaaatgttcaaaatattgaagtacattcaccgtcttctcttctgctcccttaacacttaaacagatccattactggaatttctttctagaggagggtaacccaaatttctgtgcccatttcaaggccgatctcgatt

SEQ ID NO: 184882 - DNA, 615 bp, Homo sapiens
tttcttgaacagaaactttacaccactgtcattatgttacctatagagacaaaactactaacacaagtaatatgggcttacaattataacacaaacctgtgagagggcatgataaaattaaattttgattgccttcttttattattatcactactactgtctgctcacaatttctgtgcccatttcaatgggcacagaaattacagtgaaaaagaaaagaaaaagaaatggaaaagactgaagaaagaaaagagactcaagaattcctatttctaaaaatgttcaaaatattgaagtacattcaccgtcttctcttctgctcccttaacacttaaacagatccattactggaatttctttctagaggagggtaacccaaatttctgtgtgcccatttcattgaaatgggcacagaaattaaaacaggcaagtaaagtatttcttcggaaaacattttatcaacaccaaatgttaaaaagactttccttttgtaaaactggattagagaagacttttcagtgggttatctctaggatgatcagtagttcagcacttaataactgcagaggaaactgaaagttatgttccagatgactttccgttgtttaccatatt

SEQ ID NO: 184883 - DNA, 398 bp, Homo sapiens
tggtaggatgttcctcttgtacttcgtgtgctccgacccatggtgacgatgacacagcctggtggcatgcccgtgtatgttggttctagcgttgtctgcattgttctagagtgatacaggtgtcaggctgtcactgttcacacaaatttttaataaggatcccctaggttgaaatgggcacagaaattacagtgaaaaagaaaagaaaaagaaatggaaaagactgaagaaagaaaagagactcaagaattcctatttctaaaaatgttcaaaatattgaagtacattcaccgtcttctcttctgctcccttaacacttaaacagatccattactggaatttctttctagaggagggtaacccaaatttctgtgcccatttcaaggccgatctcgatt

SEQ ID NO: 184884 - DNA, 601 bp, Homo sapiens
tggtaggatgttcctcttgtacttcgtgtgctccgacccatggtgacgatgacacagcctggtggcatgcccgtgtatgttggttctagcgttgtctgcattgttctagagtgatacaggtgtcaggctgtcactgttcacacaaatttttaataaggatcccctaggttgaaatgggcacagaaattacagtgaaaaagaaaagaaaaagaaatggaaaagactgaagaaagaaaagagactcaagaattcctatttctaaaaatgttcaaaatattgaagtacattcaccgtcttctcttctgctcccttaacacttaaacagatccattactggaatttctttctagaggagggtaacccaaatttctgtgtgcccatttcattgaaatgggcacagaaattaaaacaggcaagtaaagtatttcttcggaaaacattttatcaacaccaaatgttaaaaagactttccttttgtaaaactggattagagaagacttttcagtgggttatctctaggatgatcagtagttcagcacttaataactgcagaggaaactgaaagttatgttccagatgactttccgttgtttaccatatt

SEQ ID NO: 184885 - DNA, 373 bp, Homo sapiens
ttgaaatgggcacagatatttcaatgattggtccaatgttccgtttcttgtttttaatgagttcagataccataaccctgaactttgtttctaacatcttgcttaatttccagaatgtgcctaaattgcttcctaatttctgtttgaaatgggcacagaaattacagtgaaaaagaaaagaaaaagaaatggaaaagactgaagaaagaaaagagactcaagaattcctatttctaaaaatgttcaaaatattgaagtacattcaccgtcttctcttctgctcccttaacacttaaacagatccattactggaatttctttctagaggagggtaacccaaatttctgtgcccatttcaaggccgatctcgatt

SEQ ID NO: 184886 - DNA, 294 bp, Homo sapiens
aggatgacaattaacaccttaatttataacaatctagttcagattaacaccaacttaattttagtagtacatgaaatgtcgcacctatatagctccatctctctcccccacccatgatgctattgtcacaaaatatgacaccaaaagcataaacaacaaaacaatagatagattagacttcatcaaaatttaaaacttttctgcatcaaaggtagaagtctagcctctctgtgtggtctccgttgacaccatggggaggaggacaccttgccactggctccctgcttagccttc

SEQ ID NO: 184887 - DNA, 502 bp, Homo sapiens
tgccttgatgtgctgcacacatttatacacatggaaacaaagatcagactgattcacagacaacactaatgcctatcaaaactcatacaataatgtctgtaataaagtgaaatgccaaagtactgccctagggcagcacaggcagcgtgattcagggagacataaatatgtgcctctatcatggaaactgaaatacttcccctcccagtgagaaagtcactcaagtgattcaaggatgaaacagatctgggcaaagcaattgcctgcacagcataattagctcacggctcagaatgttttctaattcaattactggccctatctatcagggctgaggagcattcggcggtggagatttaaaatctgctcttgctgacgtcaatgaatgactggctgccagtccctgatgtcaccagttcaacaagcacacatggaaatgctgggtcaattttttattttaaaaagaaaacattctagtatccaagttttcttttttttttaa

SEQ ID NO: 184888 - DNA, 139 bp, Homo sapiens
cctggtaaattttaatgaatagcatcttggattggttgattcttgattgagaagtcaaggagttgacttctagaataaaatttttaaagaagaaaccctcttttaaatatagttttatactcaaaacacccttttggat

SEQ ID NO: 184889 - DNA, 196 bp, Homo sapiens
cccttcctcagctgatatcacccctggctgcgctcttctctgtgatacaaaaggcacttttggagtgaatgatactctctccagctgaaaaggccaacctgtaatatatctacatctatatttagattatagaattagatcccaatttagctgactttcatctcatagcctgtgatgtttcccagcgctgcctgaa

SEQ ID NO: 184890 - DNA, 277 bp, Homo sapiens
gtcaggatagctaaatatctttatgtggagctcattttaattggcccagagcaatccacgttactagtgaaagagcctaaagcagtatttcccaaacaattctgagttgtaacagacctctggacttccttagagtctgagaagatgagtatgtaggaaagtgaggccctacaattattaatattgttctctacccaggtatccaagtaatctagtcacctgttcatcagcccctctgaccatccagccatccatccctcgctctctctctcataca

SEQ ID NO: 184891 - DNA, 644 bp, Homo sapiens
ggagagaagagcatccaagaatgcaacaaaggtgggaagactttcattgtagctcattatataatgtcagagagttcctgttggagagaacccctatggatgtaatgaatgttgaaaaagcatttatttggaactcacatattatttacaatgagataattcatagaggatataatggatatgagaggctttggtgtactgtgggaagtaggtggaaatgtgggttcctgctattgccagctgctcccttttgaataaactgccctagcaggtgcttgccccagggtggccatgctctgtagggaatcttgctttagactgggattgtaagatggagacaaagacagccttattcctggctgggaatgccactggaaatgctaggggaggccagtggtccatggcgtggcctgatctcaaatatgcagaaaccagaagcagagaccagacccagagagaggcagataaatgcaacccccaaagtggatgcacaggaaaatggaaaactactagagttagtgttgggtctccagagctgcctttttatcctgaacaatgatgagcaatgactccaggtcttcgtgaaaccaaacagaatagctgaggcagcttcctacacctctgcactaagttttttaaatctg

SEQ ID NO: 184892 - DNA, 687 bp, Homo sapiens
taagaagttttttgcctacatacaaagtttcagaagatatactcacatgttttagatgttttacatgtagatctgtctatgatgcatctctaactttcctgtgtggtaggagacaggggtgagcccatttcaggaaaatttgtagaccaagtactgcaactttgttcctattagctattctaggtctgatatggtttggctgtgtccccacctaaatctcatcttgaattcccacgtgttatgggagggatgcagtaagaggtgactgaatatgggggcaggtctttcctatgctgttctcatgatagtgaaggagtctcacgagatctgatggttaaagaaaaaaaaaaggggggggtttccctgcacaaaactctttttgcctgctgccatccacttaagatgtgacttgcccctcctcgtccatgattctgaggcctcctcagccatgtggaactgtaagttcaattaaacctctttcttttgtaaactgtccagtctcaggtatgtctttatcagcagggtgaaaatggactaatacaagtccctttgcatttccatagaaatttcaaaatcaatgtgccaatttcttccacatcctccctgagatacaatcccaatagaattactatcgggcctgcattgaatctgtattactgtagagagaagtgacatcttaatattttc

SEQ ID NO: 184893 - DNA, 314 bp, Homo sapiens
tctgtccttccttctgggcttctttttattcttgctttaactgccacacggtcttgctctgacacccatgctggagtgcaggggcacaatcacagctcactgcaaattgaacctcctgggctcaagcgatccacctgcgtcggcctcccaaagtgctgggattacaggtgtgagccaccgtgcctggccacaattaagcatgttaatatttcaacagtagcttttttactgaacactatgtatcagacacgttatgcagaatttttcctttgagcttctgtataccctccttttaatccagattcagagtaact

SEQ ID NO: 184894 - DNA, 400 bp, Homo sapiens
agttgtcagttccataatattcaatttattataagcgagtcattattttctgccccacactcaagggaagggaaataagttctatattttagaagggggagtgtcaaagaatatttggacgtaatttcaaaccaccacaatctgttcctctcctttgctttcatactgggacaaactgtcgtcagttcttacctacacaacataatacgattctggttggtcttccctcatcttcactgctcttccactcttgtgcatttctaatccattctccatggagaatcccaagtgatcatttgaaaacacaaatctatcatatcacctttcttctttttttgttgttttgttttgagacagggtctcgctctgtcgcccaggctggagtgcagtggcacgatct

SEQ ID NO: 184895 - DNA, 209 bp, Homo sapiens
gaagtctaaaatcaaggtgtgtgcttctgacactccctggctgaagcagtatcccgccaacctctgccctcatggtcacatggccaccttctctatgtgcctcttatgaggacacttgtcattggatttagggcccacccacttaaaaccagcatgctctcatcttgaggtcctcagttattatctgtaaagaccctttgtccacataa

SEQ ID NO: 184896 - DNA, 498 bp, Homo sapiens
tcagtaagcggagcatcagtaagggagcagcagcagcaatagcaacacaacatacccccagcaggcgtgaccgctccgcttactgatgctccgcttactgatgctccgcttactgatgctccgcttactgatgctccgcttactgatgctccgctcagtaagcagaacagagtgctgggatggatcgaagtaggagaccgtgcccacccctagattgttcttaagctcttttttgcatcttttacttgcctagactctgaaatggctcactgtttcctatcacataagagccaaactattctaatttcaaagcctgctctgactcagtcccattttacctctccagccggcttgtttctaactgttgagaaatcacaccttttgacaaggctgttttttcactggctttcgttagtgctgtgctcgcttactgagtaagcggagcatcagtaagcagctcagtaacggagcatcagtaagcggagccaacacacatac

SEQ ID NO: 184897 - DNA, 373 bp, Homo sapiens
acacgtcagttgagctgcctgtggaggtaagcagaacagagtgctgggatggatcgaagtaggagaccgtgcccacccctagattgttcttaagctcttttttgcatcttttacttgcctagactctgaaatggctcactgtttcctatcacataagagccaaactattctaatttcaaagcctgctctgactcagtcccattttacctctccagccggcttgtttctaactgttgagaaatcacaccttttgacaaggctgttttttcactggctttcgttagtgctgtgctcgtttctgtctttgagattttgcacattatcttttatgtgctcttttgcccttttccacctatttaaagtttgcctttct

SEQ ID NO: 184898 - DNA, 491 bp, Homo sapiens
caggtggctgcccaccaaataaaataaaataaaattgaataaaagaaatgggcctatacctgtgattttattgaatgctgtttctctttgctattcattcatctgtattctctctattttgtagttattcgttgctccatgcttcacgaaaaacatttagcaatgtcaaagtcagtatctctgagcagtggaccccaagtgcttttaacacgtcagttgagctgcctgtggaggtaagcagaacagagtgctgggatggatcgaagtaggagaccgtgcccacccctagattgttcttaagctcttttttgcatcttttacttgcctagactctgaaatggctcactgtttcctatcacataagagccaaactattctaatttcaaagcctgctctgactcagtcccattttacctctccagccggcttgtttctaactgttgagaaatcacaccttttgacaaggctgttttttcactggctttcgttag

SEQ ID NO: 184899 - DNA, 558 bp, Homo sapiens
tggccctttgtctcccactgttttccatcttagacgaggagttgtttttggtctctggagtgcctgtgcttcggtgggcaacattttgggagcgtgcctagcttcttctgttcttcagtatggttatgaggtaggtattgttttctagctctggtgctctctctctctctctgtgtgcacatgtgtattgctttttatgtattaaataatactgtggccatttaaaactatgtagaactgtgtctggatagggcaaggcttgtattaaaagtagacaaacttctggccgggtgtggtggctcacgcctataaccccagcactttgggaggccaaggcaggcggatcagccgaggtcgggagtttgagaccagtttggccaacatggtgaaacctcgtctctactcaaaaaatacaaaaattagctgggtgtggtggcgcatgcctataatcccagctactctggaggctgaggcaggagaatcgtttgaacccacgaggcggaggttgcagtgagccaaggtcgcaccgcttcactccagcctgggtgacagagtgag

SEQ ID NO: 184900 - DNA, 2999 bp, Homo sapiens
ctggcggcgggggaggcgggcagcggagccaagctgacccggcgagcggagccggggctggagagcggcgaccactgcggatctcggaaggaagaaatgatgtaaatcactcatccaaactttaaggtcaaaggtgagaaggaaggtcaggaagaacatggcctggccaaatgtttttcaaagagggtctctgctgtcccagttcagccatcatcatgttgtagtgttcctgctcactttcttcagttattcgttgctccatgcttcacgaaaaacatttagcaatgtcaaagtcagtatctctgagcagtggaccccaagtgcttttaacacgtcagttgagctgcctgtggagatctggagcagcaaccatttgttccccagtgcagagaaagcgactcttttcctcggcacactggataccattttcctcttctcctatgctgtgggcctattcatcagtggcatcgttggggatcggttgaatttgcgatgggttctgtcttttggcatgtgctcttctgcattagtggtgtttgtctttggtgcgctcacagaatggctgcgtttctacaacaaatggctgtactgctgcctgtggattgtgaacggcctgctgcagtccactggttggccctgtgtggttgctgttatgggcaactggtttgggaaagccggacgaggagttgtttttggtctctggagtgcctgtgcttcggtgggcaacattttgggagcgtgcctagcttcttctgttcttcagtatggttatgagtatgcctttctggtgacggcgtctgtgcagtttgctggtgggatcgttatcttctttggactcctggtgtcaccagaagaaattggtctctcgggtattgaggcagaagaaaactttgaagaagactcacacaggccattaattaatggtggtgaaaatgaagacgaatatgagccgaattattcaatccaagatgatagttctgttgcccaagtcaaggcgataagcttctaccaggcatgttgccttcctggagtcataccgtactcactggcctacgcctgcttgaagttagtgaattactccttcttcttctggctccccttttatctgagtaacaacttcggctggaaggaggcggaagccgacaagctgtccatttggtacgacgttggagggatcatagtatttagtgtctctgatccgggacaagctaggatggatgtgggttttctactttttcattctcatgacaagttgtacaattgtgtttatctcgccattaatagtgagggaaatattctctctcgtgctaaggagacaggctcacatattgagggagtgaccggtgcccgcgagacagaaagaacaatgtcagccacatcaggaccgctggggcttcgagtctgccctaatttgggtttgtctaggagctccagcctgatcttggattgtcaggcgtctctcaacactgccagccacctgagatgctgaccagcagtgaaggctgcactagttttctacactacaggaattactgttgatgatttttgctgttgtttcatgaatgtgccgagtgacttctgactctgccagcatctttgacctctgactctgcccgcgtctttgtttggcctattgaggtttagcgttttaaccttaactgttgttttggacttgaactttctctagccttgaaaatggagtgaacaggaggcaaagccacgcgtggtttgtgttggtggtatgttccacaaatggaagagatcattgcattttgctttggtaatgagtttacagagagtgggtcatctttgaagcatcaaatcctgatcaaatgctcaagctggaccgagctgcaagcctgccttggacaaagaatccctctgttcactgtggtgggaaagatcacactacatgcctgttgattggctcagtcactctgtgtctgatctaaacgtcattcagccctagaagcatgaattgcttcaaattattgtcaacttgttctcttccattttcattcaaattaactttgactcctggaagtattgagtcttcctttcaaggaccataaggtacatcagttatcttgaacattctgacgtgtaaaggaccataaggtacatcatttatcttgaacattccgacgtgtaactcacagccgaagcactccatcccagatttgttgtctgggaactttaggatcctctaggaagctaatctgcttagtctatttttagaggattgatctctggcacaaccagcttcctggagttacctcagcagaagactagaattagagaaaagggaaagaccttttcttctagtaagtgtcaagtacagatgctctttgacttatgatggggttatgtcccagtaaacccattggaagtcaaatgcatttaatacccctgactggacaccacagcttagcctcgtccaccctaaatgtactcagaacacttagaattgcccacagttgggcagaatcatctaacacaaactctattttataatcgagtgttgaatatatcatgtaatttattgaatattgtacattatgttgaaattgcaaccatttcacaccattgtaaagtccaaaaatcagaagctgaggactgtctgtacatgacattgaatcacatgaatggattactagggcctgaggggtgtccgttctttagaaaaatgtagagtatatatatcttcagggctgtgaattccatactagttatcaatattttaagatcattctgtatatacatattttaaattatgcaagcaaactaggaggagaatgtgcaattttgagggatacctaatttgcattcggttaggggatatttttcaacctcttgctttatactctgatatggggtgtgtttatgaacttgttaatgttatttaatcatgcagatttccaatcagtgtattgctcatttactgacaaaaagggaaaatacgaaacacagaaagggaaaataaactgacttttataatg

SEQ ID NO: 184901 - DNA, 355 bp, Homo sapiens
agactgacggactcatcacacacacacacacagttaatatctttaatagatgtaagacaatttatctccttcctaggtgagttctggaagtttgcaacttttagagaattagtttattttacctaaattgtcaaatttatcttagacttggtcacagtattccctcattatctgtttaaagtcagccctgtagtgatatcatctcttttagtaatttgtgtcttctgtctttatttctttgtcagtcttactaaaatttttatcaattttattgatcttttgaaagaactacctttgaacttcattaagttttctcctttctccctgtgcttttagcttattgaatgcgtcctta

SEQ ID NO: 184902 - DNA, 690 bp, Homo sapiens
ggtctctctcagacagccgggctggagtgcagcgatgcaaacacggttcactgtagcctcgacctcctgggttcaagcgatcttcccacctcagcctcctgagcagctgggaatataagcacatgccacgacactcacctaatttttgtattttttgtggagatgaggtctcattgttgttccccaggctggtgtcaaacttccatacccaagcaatcctcctgccttggcctcccaaagtgctgggattacaggtgagccaccatgcctggccactttcttcatatctattttaccttattctaaacagaagttaaggcaattgcaaaaacatgttaagtacagatttctgtttaactaatgagaaaacctttacattttaaatcttcataactttttgtttacagaaagtgaaaatacagtaggagaaataagatgaagcctctgcagagcactagaaagcatgctctgaggccctgtacatttgcaacgggtattatcctgattttctgagtgacgaatttgaggttcaaagagttaaaagtaactaacccaaggttaccctggcaccaaccctaaattcagggaggcacttgactccgaaattattgatacttctattgtattatactgccttaggaaatagaaggattataggattctgagatatgcctcatactcttacatctt

SEQ ID NO: 184903 - DNA, 431 bp, Homo sapiens
catgtttgccaatgtggatgccttttctttctcttgtctgattgctctgtctaggactttcagtactatgttagataggaggagagaaagtggacatccttgccttgttccagttcttagagaaaaggctttcaactttttcaacatttttcaaatgtattttgtattctatgaattcttcagttccagaatttctgtttggttcttacaaaaaatctatctctttgatgagtttttttttttttttggattttccagaattatcttgtagcttactgagcttcttaaaatcaatattttgaattatttgggattttgaagacttcttttgattaagatctattgctggagaataattgcatttttctggagatgtcatatttctttgctttttcatgtttcctgtgtccatatgttgatatcagttcaac

SEQ ID NO: 184904 - DNA, 185 bp, Homo sapiens
aagcactctcgcataatgacaggaacaatacataacaaaggatataaataggcaattcatagaaaagcaaattcaaaacgccaatcaacataaaaagatgctcaaacttacgatagtacttgtcagggaaatgcaagttaaattaacactaagatttctttttatgcttatcagatgatgggcgg

SEQ ID NO: 184905 - DNA, 464 bp, Homo sapiens
tggctactataacagagttccataaacctggtagcctataaacaacagaaatttatttttcatagttctggaggctgggagcccaaggtaagagtaacaacatggttgggttctggtgagggccctcttcaggtttcagacagccaacttctcattgcatccttacatggcagaaacaggactagggaactccttggggtctcttttataagggcagtaatcccatttatgagggctccaccctcatgacctaatgaccttccaaaagctccacctcctaataccatgacatggtgggttaggatttcaacatatgaattttgaggagacagaaacattccatctataacagcatacaatgcccattcatgaattccacatctgtgaatctctgggctaaatataggataaatccagacaatggataaagtggttaaaatgatgaactccatcttctatgtttt

SEQ ID NO: 184906 - DNA, 356 bp, Homo sapiens
gtgctgggattacagaaactttgtgagccaccacacctggctggatatttttaaaggatacaaatagcccagtcaaggaatacataaggtgaggcctggatgggccctgagtgcaggagctttcatttcactggagttggggtgcactagcctcctgacacgtgggtgagttctttctcactttcctgcaagtcccatgagttcagctgtccagaaagtcctccgaccccatccacttgggcctcatgtggaaaattgattggataggcatgactgaagcatggacaaccttatagaactgtgattggacaaaaagggcatgctctactactaatagactgggcacagaaacccag

SEQ ID NO: 184907 - DNA, 157 bp, Homo sapiens
tgacattttggagatcaaacggatgttagtaatgatgtatatagtctagacagtgaccaggagagttggcaactggggtgaggtgaaggaaaagcttgtgcaaagtgagatcaaagaactgaaaaatcagatgttggtgtacatggacttgaaatat

SEQ ID NO: 184908 - DNA, 278 bp, Homo sapiens
gcataagacaacgaacaaatcactaaattgccacataatccagcaacaaattttgcaacaaggaaatctcaagcaaataacccaactgtgagttccctttgggcatcaaggtcaaactacaaaagtaaatttgtgacttttcaagatctatgcagttttaccaaatgtatttattttttgtgagagaataatttttttctgtccagtactagtacataaaaagtaaaggtatctgaagccatcttttaaattttttttaaagccaagaaaatgatttg

SEQ ID NO: 184909 - DNA, 442 bp, Homo sapiens
  misc_feature (411)..(411): n is a, c, g, or t
aaaacagcactatttgactaacaatgactagcttaaagtgactttccagagccctcgtccttcctgtcatcagaaccgactgactggaaggccagtaatttgatatcggaaatttacaattgataaagtcatcaatggtgactcctcccaaatgcacagaagatctagaaatgctgacctcagagtttctggactgttcagggcttgaccaggattctctggctgaaaaaggaaatacaccagtcagcactcagcatgccagagagcagcccaggccacaatattcatatttgtcaagccccgacctaacgagagctcagctctggacaaaacaaagccgtgcgcaacgtttagacttgactgacacctactgtgtgctccgtgctactgcccctcacttggtcatagctntttcctgggggatcctactatgagtcaacct

SEQ ID NO: 184910 - DNA, 238 bp, Homo sapiens
tggtatggagggaactgcgacccagagtgggagatgaggaatgctggtgactatagttgcaatcttatgtaacggaaggtgcagtctgggaagatagcactggagccagtactttttcagaggtggtctggggtggcaagaaaactttatacttgggctgtgtccagttgaatcgctattagctggaggttttccatataaatggactgaaatacgtatcttttttgttttgttttgt

SEQ ID NO: 184911 - DNA, 235 bp, Homo sapiens
ccaagcagttcctctttagaatttactttatggttaaacttgcatgagtgcatgaagacctgagaacaaagatgcttgttgtagtcctgttcgcagttgcaaaagtttggtgacctaaatgtttattgatgattagggcctggttaaacaaattatgggccatatagtatatgaggcatgtgctgctgtgggagagctctgagttagtagtagttttgagaaaaagaaaggtaca

SEQ ID NO: 184912 - DNA, 299 bp, Homo sapiens
ccagcttctcctcttcctcagtaccaggggcaacgtgcttttctgcaaggcagaaggaagtgatactaaaccagtagaatgtttcccaatcttcactttgttcttaagctcaaaccattcatttgtttgcgatctgcggcactgaaataacacagaccattatgagcatcaggagaattagaaaataccaccttgcaaaagtcagaggggagaggtctgatctttctctcctgggtattttcattggcttggtgagaaatggagcacaaattaggcatttattgctttagcaggtattc

SEQ ID NO: 184913 - DNA, 400 bp, Homo sapiens
atcctgaaacacttatttgctacacaatgacgtcacatcatgagtgggggttaggttttaatgtcagagtctagtacaaaaacatcagtcagaatcatgcttgaaacttccataggtcattcataacatgggaagataacgacattgtgaggggcatgaggaaattgggacaaagacactatcagataagcatctcatgctcattctggaccacatgctttttgagtagaacttctggcagaatcaccagcactattgaattgttatccctcctagggatatgggaagtgagcacaatagttgacatttttttttttttttttttttttttttgagacagagactagctctgttgcccaggctgaagtgcagtggcatgatcttggctcactgcaacctc

SEQ ID NO: 184914 - DNA, 736 bp, Homo sapiens
atatttctgtttgcaattactatgacaaacttgcaatctgtaaggctttaaagtgaagcagttctcactacctttccttggtgatagttgtcctgagagtgattgctgagctgctggtgtgactgtcactggcaggaggtgatgctcgctctgcagggctgtgagcatctccaccctctgtgtcttcagtggttggagataccatgtggaacaatgaacattgtaaatgacattcttctcaaaggttcaggacattcttcaatgtacctgttttcattcttttctcacattgtgtgatccatttgctctcaaaagaatgacatttcttactttgcacatggctggtcacttgtcctggcctgtctctacccttcacttctgcaggctgaccaggccctcagacccccttttttcagttgttcctctctcctgggcttagcctgcttgtgttgcaggctctgtctagtcccaaatcctgtgacatcctgggtgttgcagctcctttgtcctcagtttcagcgcactgcagtggcttcatggtagaaggtattcttttttatttgcttgtgtgttctaaaaacagagttacctttacatagcaaactccttcaggcatttccaatgatcacctcaggttgaataggaacaggctttgtggcttctgtgctgtcccgtggagtcagatgtgacagtcccctacccctccagtgttgggccattcggcatcattggtgtg

SEQ ID NO: 184915 - DNA, 526 bp, Homo sapiens
ccaatctagtatgtgaaaagaaattagaattatttttataccacacattatcagttaagattttctatataattaattaggaacaagcaattttaacaaaaatgagtagaagagaacggtatttgttatagcacagttattccctatacgcttatctgctggactcttaagaattggtacatttgcattgtggggtagaccagcaccatgatgcacaaatttggctgaactctacaggggagcagcagtgtatccatagtccatattttcctgtgtgttcattcatccattcagcaaatgttcattgagtgcctactgttgtcaggcactgttctaggtgcaatgaaggacttctgtaggcgtgaggagtgggaccagtgagtgtctttatcttgtgggtcttttacatttgcatttcaaaacatcctccacctttgcctctgtcaggaatcttcttttgatggcaagatatgatgggaattgggaagatgaggatgttttacttttagagtttttattcatttat

SEQ ID NO: 184916 - DNA, 883 bp, Homo sapiens
tacactatggcaggtggcagtccagcagccaagagggtagtggtgtaccggaatggggacccattcttcccaggctcccagctggtggtgactcaacgccgcttccccaccatggaggccttcctctgcgaggtgacatcagctgtgcaggccccactggctgtgcgtgccctctacacaccttgtcatggccaccctgtcaccaacctggcagacttgaagaacagagggcagtatgtggccgctggatttgaacgattccacaagctccactatttaccccatagagggaaggacccaggtgggaagagctgcagactacaaggtcctcccgtgactcgccacttgtgtgatggggccattggacggcagctgcctgcaggtgctcccagctatatccagtgagtgccagtgtgagggagcaggggtgttgatgtttgttttagtaaggccaagaaaatggtgttgggtttgttctaggagcctctggttactgttgggaatgtagaagtccagcatgcttgatgggtgaagagagaccagtgttatggttattgctggccctgtgccacccttcccctcacatgtagggactcctggggacactcccccttaccaggctttttgtctcagtgtgttcaggaatggggacctggtaagtcccccatttagtctgaagctgtcccaggctgccagccaggactgggaaactgtgttgaagctcctgactgagaaggtcaagttgcagagtggggctgtgtgcaagtgagtatggggactgcgagggcccaaaagtccccaaagagagcctcgccactggcttcagctgtggctgaggatgaagaggcaaaaggaaagcatgttcccccacatgggacttccc

SEQ ID NO: 184917 - DNA, 316 bp, Homo sapiens
  misc_feature (314)..(314): n is a, c, g, or t
tacactatggcaggtggcagtccagcagccaagagggtagtggtgtaccggaatggggacccattcttcccaggctcccagctggtggtgactcaacgccgcttccccaccatggaggccttcctctgcgaggtgacatcagctgtgcaggccccactggctgtgcgtgccctctacacaccttgtcatggccaccctgtcaccaacctggcagagggagactgtggcaggagcattaatctgcattcagggttttatccacatctgccctggggagatcacacttaaacataggtgttaccctattccagatnct

SEQ ID NO: 184918 - DNA, 157 bp, Homo sapiens
aatggaatatgattccggcataaaatgaatgaagtactgatacatactataacatgggtgaaccctgaaaatacgctaagtgaaacaagccagtcccaaaagaccacctactgtatgattctatttatatgacttatctgaaataggcaaatctaat

SEQ ID NO: 184919 - DNA, 473 bp, Homo sapiens
tattattgtacctgtcccctaagatcaagagcatggcaagaatatctactctggccacttctgttcaacattatgctgagttccagccagagctaaaaaaaaaaaaaaaaagaaagaaagaaaaaaagccatccagagtgaaacaactatttataaatggtagaatattttatatagaaaatccttaagaacccacaaacatatacccagaaaactcttagaactaataaacaagttcagcaaggttacaagaaatgagatcaacatataaaaatcagctttatttctgtacactagcaataacctaaaaattacattgagaataaatttccatttgtaataatatcaaaaggcaaaaaatacttaggagtaaatttaaccaaaagagtgtaagacttgaacacagaaaaccacaaaatattgttgaaagaaattaaagatctaaataattagatagccattatttgtgaatt

SEQ ID NO: 184920 - DNA, 528 bp, Homo sapiens
tgccctggctcatcttcctgtgcttctttttcctgtttgacctgacttctccagattgaacatttgaagcatctttattctcatatgttcctatatgctgcagaataagataaacccccaaggcaatgtcaggcagtccttgttccagcatgaaacagaatacttttctacttttcataagatatgctcatgcataaaaagtcagaaataagacactcagggagaaatacagagtttctttaaacagaataaatttttagatatttataaaaagttaagagctattccctctaaagaactgcatagatatataaatagcatatgatagaaaagtgtctctataatggtattttagtatacattaaatgagagttaatataagaaatactgtaatttagtgtatgcagtgacagaagaccaaatttggaatcaagaagcctgagtgtgagccccagttctgctctttgcttcctgggtgacccaagacaaatcagctaatcttcctaaacctttgtttacctatctata

SEQ ID NO: 184921 - DNA, 295 bp, Homo sapiens
tcttttacttaaattgcctctccttatttaaaaatttatttgacatcttccattttagaaaatcctctcttgacccggcaacgctcctcaatgacagtctgacctctcttccttcatcaaagacaaacctcctgagcaagttttctatgttaactgtctctacctgctctcctccctctcattttaaatctcacctgcaggtatcctgtctcctaaatagaaacatctcttgctgagatcaaaaataacctccatgtttgcacctgcagtgaaaacattccacagcctgttactt

SEQ ID NO: 184922 - DNA, 546 bp, Homo sapiens
ctggacagtggatggggtgtctccagccttcatccaataccaggaagaggatgcacaggccacagcattggaggcattaggcagcacactctgacacaccaccctcatgcttgatccacacagcacacctccagtttcctgaagggagcgtggtctcttgggtctacacatgctgttccctttgcttgtaattcctttcacccactcactcctaactcttccttcagggtccagctcaggagtgactcctccaagaggccttcttttgtcccccacctgccccagagctgcattaggccttcctcatcatagcagcctccacactgtactgtaactctagctctgggactctctctcccactagactgtgagctactttggttgggaatagtgcttaattcctctttgtattcccaggggccagtgtagagcctgcaaagagaatacctcatggacagctgataagtgagtgagtgtgttggggaagactgcagaggcacctctgagaagacctgcaccggagctggaggctgcacccccatgtcc

SEQ ID NO: 184923 - DNA, 650 bp, Homo sapiens
tgcactccagcctgggtgacagagcgagactccatctcaaaacaaacaaacaaagagttctaaataaagaaaagttgagaatgaggagtgggtagtttttcttaaaaagatgagacagtaagtattttaggctgctatctggtctttattggtactcagttctgctcttatagtacagaaacagctgtagatgacatgtaaatgaatgaacatagttctgttccaataaaatgttatttgcaaaatcagatgttgggcgattcttggccagtgggccatagtttgccaaccactggtttagactaagctaacctaatcttggcagtggcatgtgaaatatggcatttagacattccgacaacacacttggacttggaaattgaggatgttttctttgtttgtgggtactgctgactttgcagtctttttttattttttccccatcctctgactctcatgcaaccctctttgcttacactttgtaggagccagaataatttagatgtttaagaagcagttagctggacacggtatctcacgcctgtaatcccagcaatttgggaggctgaggcgggtggatcgcttgagctcaggagtttgagaccagcctcagcaacatggtgaaacaccatctttaccaaaaatacaaa

SEQ ID NO: 184924 - DNA, 655 bp, Homo sapiens
cttttcaaccaacacaagtagggtggtttcaaagtcaatccacagcaacattggcagcgtcggcagggatcaccattttattgggacacagctgcacagtccttgtagttcaaagaacgttaaagacagtattttctgaaatgtttgaaggaggggatttagcaagcagggatgaagaaaaggcatttaggatcttgtctatggtctggaaaaagcttataggtacaaaaaatattagatattgggagagttaaaaaattatttgggggataggcaaggagaggaaagaacaggctcagatgtgaagaccatatacgacagattgggtaataagactttcatctgctcagtcttgactttaaattccatccattcatccatccacacatgtagtgactgtcaatacatgttgacattacacgtaaaggtataagcttatgtgccagacacttggataaaaagatgactgagacatgatctctgtctctaggagctgtctaggagttaaataagtgtgtgggctgtgtgtgtgtgtgatctatctatgactttacaactcaatgccatagatcctttaagttttaagagagtgccatgtgagggtgcgggattaacaaatagcctgggaaaactgtaaaaaatgtgaaacgatata

SEQ ID NO: 184925 - DNA, 664 bp, Homo sapiens
agtattggtaaagtcagtgtcttaaatggaaaagcaagtgggcagttgtatgttttcacacaagtggtgttaagtaataagaaatggaggtgggggtacatttttggaaagtgaagtctttataaaaagtaaagacagtattttctgaaatgtttgaaggaggggatttagcaagcagggatgaagaaaaggcatttaggatcttgtctatggtctggaaaaagcttataggtacaaaaaatattagatattgggagagttaaaaaattatttgggggataggcaaggagaggaaagaacaggctcagatgtgaagaccatatacgacagattgggtaataagactttcatctgctcagtcttgactttaaattccatccattcatccatccacacatgtagtgactgtcaatacatgttgacattacacgtaaaggtataagcttatgtgccagacacttggataaaaagatgactgagacatgatctctgtctctaggagctgtctaggagttaaataagtgtgtgggctgtgtgtgtgtgtgatctatctatgactttacaactcaatgccatagatcctttaagttttaagagagtgccatgtgagggtgcgggattaacaaatagcctgggaaaactgtaaaaaatgtgaaacgatata

SEQ ID NO: 184926 - DNA, 579 bp, Homo sapiens
atatgaattattatacctaaaaaggcttgagttatttaagtcccttattaagactgatgatacaacaatattcatgaggaacaaaaatgttatctatagataatatgagatatttggtaaatagaagtaagaaattaaatatttatatcgagagaggatattgtgtcctgctttattcttaacaggatttgggatggtattataagttggttttgatgcagaataaaaatatgtgaggaaaaaaattaaaacagataaaataatgctagggataaaattagtacctactagaaattaggtaagactatggctaagggaatctaggatgattggacttcttcctcagcccacagtactgctttttttgttacttctaggggagctatctgcaaggaacaatgacaaacagtctttgagacctaaatgctaatatagagagctgtgataaatggggctggaaccacagtctaggttagaagcctgagagacctctactactcactcgcaatttaagcccacatagtagattttacgttgatcagattggatgccttcaagggaaaaatagtcagagagaga

SEQ ID NO: 184927 - DNA, 406 bp, Homo sapiens
atccctttttgccaaagggatgatgtccattagctgctcaatccctttgggttaaaaggcttttaaagccagttttcctctcaccataacaggcagttattacaaggactggctccctgaaaggtccccagaggaaatcaaggagactgtgtttccctctgagtaattgaaaaaaaaaaaaaaaaaaaggcctcaaagccacaggtggtttggggttttgaattattcacacctgacattcatagctgcctccttggctccttctggggacgtaggacaacatcgtgctcagaaagacctaggttccaagttcagcttggaggcagaaagcaattcctttttcttctctctgtgtttggaaaataatagattattgacacaaatattaaaactgatactgtaatgc

SEQ ID NO: 184928 - DNA, 262 bp, Homo sapiens
ccggatccttaacatgaaaatcagtggaggcaagtttagtttttaaaactgctttctacgggataaaatccaaatttctgggccaggcatagttgctcacacctataatcacagctggatcttatctcagcactttgggagggcaaggtgggaaaatcacttgaggtcaggagttcgggagcaggctaggcaaaaaagcaagatcctatctctaaaaaataaaaataggctgggcgcggtggctcacgtctgtaaggcaggt

SEQ ID NO: 184929 - DNA, 282 bp, Homo sapiens
aaaaagcatcacacactaggaggaagctctctgtggcagggcccagatctgtgactcaatataagcccagtgctaatttatccagacccagtaggaggagagaagcctcaaaggaggcaaacattttgacatttagagggaattttttatggctttttacactgactcagcatcaagtacaaagttatttttgctctttgttgccaatcgtgggagaaggggctgttagctaggagcttggagcagggagcctgcaggaaacagcttcacttaggaaggctc

SEQ ID NO: 184930 - DNA, 175 bp, Homo sapiens
tctttgtgctaccagtgatgtgactttgggaaaatccccagccccttctctgtggcctggtttcttcagatgtgtaatgaggctggtgatacccacctcgcagggtgattgagaattgcacctggagcctgatgcaaagtggaccctcagaacatgttgcctgacaccaagaggg

SEQ ID NO: 184931 - DNA, 688 bp, Homo sapiens
tccacctctttaagtatttgctgcagaaatatctctcttttggtattaaaatttctactagattccaaggtccaccataaaaattacaataaaccaggtgacttaaaacaatagaaattaattctctcatagttatacaggctagacatctggaatcaagttgtcagcaaggccatgctcccattaaagtctctagggaagaaccctttcttgcctcttctagtttctggtgaccccaagcattccctggcttagaacaaaataacttatttctctggtctctatcttcacaagaacatttctccatgcgtttttctgtgtctctgcatccaattttttctttcataaataaggacacacagaaaaacgtcttaaagtgctaattagacaattacaaaagttcatacacacaatgaattagactatgtaaaatattcatgaaagctatgactgaaaagaaactcaccaaatcagcaaccatagatagtgataatctttggttaatgaaatgtgatgtttttaaattgcttattgaaaaatttatttccaaaactttcacgataaatataattttataaatacagaaaacatttttgacattatatagaagagttaacatataaaaggtcatctaacatgtcaatccagtaagctggatttagagcttaccctaatccagtattacctc

SEQ ID NO: 184932 - DNA, 204 bp, Homo sapiens
agcctgggtgacaagagcaaaaccccatctcaaaaataaacaaataaataaaattctactggaacagacacacccatttatttatatgctacctacctatggttgcttttgcactgtaaaggcaccattaaatagatgcagtagataccagatgtccacaaagcctaaactatttacgctctggcctgttatggataccaagtt

SEQ ID NO: 184933 - DNA, 294 bp, Homo sapiens
ccttcctgtcctggatttgcctgttagaaaggtgtcactgctggatgggttgaatccattcctccaaaaaatgtgccctggagtgttgttggtgtaatgcaggcaactgttgccaggcgtcacctccacccaaagatgggtgttttgttctgcactgtgggtggcaattgcttcctgccgtgaccgatttttcggaagctcctcatccttcagggaccccctaagtacttctctgtgtctctcccctcttgctccctctgggtctctctctgtctctttcctttcttctatctg

SEQ ID NO: 184934 - DNA, 965 bp, Homo sapiens
agcgggcggccgggcgcagcgcgtgggagacgaaggcgtggctgactcggcggggcggatccctttaggacccgaggcaggctctgggcccgccgggtccgttaatctcaccgcgccgcaaggggccacgttttaccacttgatttagcaaccctaagcggtttggaatctgctttgctctcacaggacctcagcccgtcgtgatcagattctcccactttcttttttctttcctggaatggagtgggcagtctttttccatctctaccgaagttgatgttcatttttaatcttttcgcccctcacgcttttgtaataatggtactaagactgagtgttatttagattttattgttgttgtttgtgtttaacgcgaactatttaggcagcccagggataatgctggccatatagagatgcgcctgattaggtctcaggagtcaattcggactgggcagagcactagaatgctgcagggttggcctttggcctaaaccatttctagctatggacttgccagatgagagccagtgggacgaaaccacctgtggcttggctgtttgtcagcacccacaatgctgggcaactatccgccgcattgagaggggccatcctcgaatcctcggctcatcctgcaaaactcccctggatgctgaagataaactcccagtgctcaccgtggtagacatcttagattccggctttgcagctcatcatttaccagaatgtacctttactaaggcccattctttattgtctcagagttcaaagttttactccaaatttcatggcaggcctccgaagggtttacctgacaaaagtttgatcaactgtactaacagacttcccaaatttccagtgttgaatttgaatgagacgcaacttccctgccctgaagatgttagaaatatggttgtatgtggatcccagaagaacagagatacatgtgaggtgagtatcatatc

SEQ ID NO: 184935 - DNA, 828 bp, Homo sapiens
agcgggcggccgggcgcagcgcgtgggagacgaaggcgtggctgactcggcggggcggatccctttaggacccgaggcaggctctgggcccgccgggtccgttaatctcaccgcgccgcaaggggccacgttttaccacttgatttagcaaccctaagcggtttggaatctgctttgctctcacaggacctcagcccgtcgtgatcagattctcccactttcttttttctttcctggaatggagtgggcagtctttttccatctctaccgaagttgatgttcatttttaatcttttcgcccctcacgcttttgtaataatgagcactagaatgctgcagggttggcctttggcctaaaccatttctagctatggacttgccagatgagagccagtgggacgaaaccacctgtggcttggctgtttgtcagcacccacaatgctgggcaactatccgccgcattgagaggggccatcctcgaatcctcggctcatcctgcaaaactcccctggatgctgaagataaactcccagtgctcaccgtggtagacatcttagattccggctttgcagctcatcatttaccagaatgtacctttactaaggcccattctttattgtctcagagttcaaagttttactccaaatttcatggcaggcctccgaagggtttacctgacaaaagtttgatcaactgtactaacagacttcccaaatttccagtgttgaatttgaatgagacgcaacttccctgccctgaagatgttagaaatatggttgtatgtggatcccagaagaacagagatacatgtgaggtgagtatcatatc

SEQ ID NO: 184936 - DNA, 559 bp, Homo sapiens
ctaatttttttgtatttttagtagagacggggtttcaccgttttagccgggatggtctcgatctcctgacctcgtgatccgcccgcctcggcctcccaaagtgctgggattacaggcgtgagccccgcgcccggccgaaggccttggattctagcaagctggtggctgagggaaaagatcagcaatactggttatggctaagtgagactgctgggctcacagtggcctttattcacttttattatttcttctgttttctccatgatcaacggtgtgactgttgggtggttgaattgaaacttaggagtgtatgatgttcatatgttcccacttgatctttctcaggagtgtttgtacatacagcctccctgtctccccttcctccatcccttcccagtcatttctagtaaccactgaacactgtatgaggtggaaagtccatcacgtagtagagaaaaagattcaggcatctcacctaaagttgtctatgaagttttcaaaagcaaatataatgatctccttgtgccagtggacttctttggtttatttggggggtaaa

SEQ ID NO: 184937 - DNA, 433 bp, Homo sapiens
tgagcaatattttaggcatgtgcaaatatatctatgtgattctagcttccttttcatataaatagaagcatgttatgtaaactcttctgcactgtggacttcttcacttcatgtatttaagagatgaacttagacacatctgcattccttttactggctgctcagtattccattgtgtgagtgaaccattcattatgtaaccatcccttgctgatggacatgtaagttgttccttcatttttgtttgttcccttcattttgttcttacaagacagcggtgcactgtttttttttttttttttacatatgtctttcccacatgtgtatatttttagaagtaaaattgctgggtgaaagagcatgtatagttctaattttaatagatattgccaaattccatttgatagatactgccaaactccatttggcaata

SEQ ID NO: 184938 - DNA, 367 bp, Homo sapiens
tgagtctcaacttcaggctggtctcaacttcaaggcctcaagcgatcgtcccacctcagcctctctaattgttggatttacaggcatgagccactgcacccaccagacaccagttttcttaatctataccttgtgaacaaacttcctgaaactagaatgaacttgtacactttctggtatactcattaacatttttgttttttctactttatattatagcatgtatttcattctgactctttttaccactcattgcaaaatacaaattctgcctttgtgatcaaatattaagcaagttaacaaaaagtattccgtctgccatcaggtggaggcacgaggattccaaatagagaagcacattcctgga

SEQ ID NO: 184939 - DNA, 296 bp, Homo sapiens
cataaaagcagacttagaacaattaccatcatcttgattaatcttatgattgaaatgtttaatcattcatttcacttgtaatcattatcttttatcactgaccaaacatgcagttttaatgcccccttctattatttatattggacattttagggttacactctacagttacattatacatttcattggaattttaaataagtccttaaattttaaaaagctaatcactatattcacatctgccctatttgcataaagaaacactagaaggattcatacaaaattaatacaagcag

SEQ ID NO: 184940 - DNA, 221 bp, Homo sapiens
ctaaagcaggaaaagtccatggtgagccaagatatcgtgtacccaaaagtaaggaatcattcaaagactaatgggttcaggaaaaaataattcaggaacctgtttgaagaagctcccactgtccttatttgagacaatttgagcatcaaaaaaaaatgaaaccacatgttgtgtgcgatctaattttgcacacacagatccgttcagtaatgaccgataaa

SEQ ID NO: 184941 - DNA, 310 bp, Homo sapiens
ctgagattatgctttttctgtgacatcatgctgctacagaccatataaatttcctgaacccaacatgtttaaaactccagcatggtagtatagaagttcactggtatacaagttcaagttataccctaacctctcttactcatgctgaatcagaacatcaaaaatggcctctcaagagaatccaagtaaggataaggctttgattttatccgacaacttactacctttagatggtatggatagtaagttttgctatcttctccttttgggaagacagacaagtattatggacactgcagatgaatacagt

SEQ ID NO: 184942 - DNA, 359 bp, Homo sapiens
tcattcaatgtctacatatttcttagagatattttttaaataccatgaagctgaatgtccttttgtgtttattttccccatgttttcttttcactatgaatctgcagaacttaatcatcacttttgttttgcttaacaaatgtattttgctcattttaatatttgtgtactgatctggttttcatatcaagagaaacttaaagtataagctttatttcttagtgttttacaacacaaattttcctgtaatgacttgattgcttaggaagggagtttaatctttttactttgagagtcttcatcatccagttaacatttactaataatttaatcttcattcttttatagtagactaagta

SEQ ID NO: 184943 - DNA, 333 bp, Homo sapiens
atctgccatcaatgttagagaacacagacctgttaactagattataaatttgacaacagcagctgtgatgtgtctatgctctagtattgtgtttggtacatactatgtattcattaagtgtttattgaatgaataaagaatgtcacttatgatctcaaaaacatcatacctatgttcaacaaaataaaatttcaaatcccctaatatacaacattcataatagtctgatcaatttacctttccagccacatttgcattgttccctttttcccaccttaacacacacaagcctccttgaagtttcttgaaaatactgtaataggatgttaatgg

SEQ ID NO: 184944 - DNA, 146 bp, Homo sapiens
  misc_feature (5)..(5): n is a, c, g, or t
atcgncgcccagcccccattgcttttaatagaggagcaaggagcagtgtggagaaggtagatacgcagacaggaagatcactctggctagaaccaagagtggctgatagtggggagtaagattgcaggtggatatatagcagtgag

SEQ ID NO: 184945 - DNA, 1149 bp, Homo sapiens
aaaaagagttatcagtcttatctgtaactgtaacagagcttagtgaaacacattagtaagaccagcttggtgctttcactcttagtgagaaaaagacctaactaattgttatttgttaaatctaccttttttcagactattcccagaattgtgtgtgtgatttgatacatccctagggatttatctggcataagtatcaaatccttcatggcttaaaaattaataaacagttttttaatatttctggaaagaccctacctccaccccagctgccaagtcctcaaagattataaattatctatatgagtgtatgtatctgtatacacacatgcaccattacacatacaacataaatatgtatatgtatattcatttgtaaaggcaaaggtgccctggctttttcagataactgaatagaaaaacatttcatacatttaggattatttttctcctctatgtatttactagatattatatttggtttgggttgctttctgctgctgttctccttcacacacagcaaaatatacatttgtttctgtagattgacacaacttataataattactcccaaaaagttgtctgttcttttagaaaaggattaaataaggctcaggggacccacttcactctactgaatctaatgtacgagacagtactactgcttctttgtgtgcttgaatttgcatgaaagcttaatagcaaaatcttctatctcagtaattatagcaaatagggacctactggtagggagcaggtgttggctcagaaacctgaaaaagacaacccactttcatacagttctattaaaatcccctaagttttctaataaaatgatatagtccaaatatggcaatcgactggcatttatgggagcctctaaacctggaattatggggtttatttttctcccaaatgagctgcaaaagataattattgctgcccagtaaacaaaatgtatgtcaaatcagtaaagaatttgtttagcataatattgccttatctttcagaagctttcttctatattcttgtgtcttcagtacaatccacttttgtttgaaatccatttgcatattatcttactgtgcatttagtgaattctcaataatgttgtatttgctgacaagaataataaattggaccacaatt

SEQ ID NO: 184946 - DNA, 271 bp, Homo sapiens
cctaggcccacagttcctctttctcttgcccactggcttcgttaccttaccctcagtgattccccaggtgactccccaatagtgtgaagtgtactccctctcttggaaactgtgagtataataaactgtcttttgaatgacagtcatttcctgctctgtcagcctttaccatacctaagtaataataaagcctattaaaacacaaatattctatatctgaattgtgttgatggtaacatggacatacacaaactgcacacttaaagaagat

SEQ ID NO: 184947 - DNA, 324 bp, Homo sapiens
atgcatttagatctagaatggtttatatcgggatcgcgatttttctttcttggtggggctgtttgtgaagtagcttgtctaaatgcaatcatgattgtatttggggtctttttgggctcttcattctgtttgattgatctgtctgtctgtccctctgccacagtcctgattactataactataaattcagctttaatattggttagagtgatttgttccactttattctgctttgtcaagttcttttaaggttcttctagggcctgtgccttttcatataattttagattaagtttgtctttgcctagtctagaaaaaaactta

SEQ ID NO: 184948 - DNA, 139 bp, Homo sapiens
taagtcgagcagatggatggcagacgccggcttgctgtgaaatgaaaatccatgaaaaattaatgaaatagaaagattgtgctgaggatgagggcagagcggccgtgggctccgcagcccctgcaatgctacagtcgtc

SEQ ID NO: 184949 - DNA, 250 bp, Homo sapiens
gtgagtaccacactcttcattaggcattgggagcacagatgggaaaagaaaacagtctctttcctcaaaggctcaaagactggtggggaagatgagaatgtaaagagaatggggcacatgggaaacatgagccagggctacaaggaggtcaatacagaggttgctatcaaagggggaaggtttacaagggaggcatctggaaatagaaaaaattaaacaagaccatgtttcaagtttgtttagaaaacac

SEQ ID NO: 184950 - DNA, 357 bp, Homo sapiens
acctccaccccaggtgacattcactgtcccctcacaggatcccaagtgtccttggtgcctacaatggtagggtctgacaacagtgagagtggtagagaaattcccagcaacagcaagggaggaaacaaggattctgtgtctgccagagaaggagggaggggacagcctatttgtgtgaaaagaacacagtaataattaatatggttaattattgcccaaatcccttagtagaccaagagcctctcaaaaactagactatatcttattaatctatgtattcagagaatcaatcatggcacctggcacatagtaggccgggtgttggagtaagcagagcagtttttgtattatatgaca

SEQ ID NO: 184951 - DNA, 342 bp, Homo sapiens
tctagaggttccccgctgatccgcttaaggacagggttgcaaactcagatgcctccagtgaccagaaagatcatgtaagcatatgaaatggctggctggggatggggtgaagtgtacatgcctcacctccagcaatgacccctggagaatgtaggctcaaggttttcctgtcttccaatttttgaaataaagccagaagtctgagtttttatgtaaaacctctggttggcaaccagctcaatatttggcatggaccaaacaaaatctgcccatagggcaaatgtggcctgccagtttgtgacctctgttttcttaaaagggacagagaacacactgtggagc

SEQ ID NO: 184952 - DNA, 192 bp, Homo sapiens
agcattccattccatggatgtatcacactttgttagccatttaccaaataatgggcatctgggtcaccactgttaggcaattacaaataaaaaacattcacaagcaggtttttctgtgtacttaatttttaaaatcagctatgtatatacctagaggtataactgctggaactttgagtaagactatgttta

SEQ ID NO: 184953 - DNA, 199 bp, Homo sapiens
actgggtagcagagctaggcctggcatccaaagagactgactccatgtggctgctcttaatcacactgatgtattacagtctgagcagccctcaaccaaaatagttgggaccagaagtgtttcagaatttggaatatttgcatataagtaatgaggtatcttgaggatgcggttgggtgtggttgctcacgcctgtaat

SEQ ID NO: 184954 - DNA, 179 bp, Homo sapiens
aaaccaaaacaagaatagcagtgtaggcaagttaatttagatacaacgaagcaacagaggaaataaggcaaagactgcaagtggttgcctctgcattgtggaattcatgtgttagaagcagtagaaaagaatactactgttttctgtaacctttgcagcataccatttcactttttttc

SEQ ID NO: 184955 - DNA, 222 bp, Homo sapiens
gtttgagtttaataaataacctattttttctatgtcttgcttctgtcaccatctcatctagtagcatgcaagacacacatacagcgaacagagttcacacttcaatgtgttgttaactctgaaagtcaaccaggaataaatcacctattttctgggccctttccaggtccaagataactaacagctccctctccagcactctgacggaagaaagcatgctgg

SEQ ID NO: 184956 - DNA, 341 bp, Homo sapiens
gctgtgtgtgtattcccagtccactttttcaaatatcaagagattccatgaagaaggctggcatttgacatgggctttgaagtgtaagtaaaattttgatgagcaaaagtaggacacagtacagtagttaaacaagagggaatgacataagcagaaactggatatttcttggggaaatagtgaccagttgggttgggaacattttaaaaagtacagtagagggattgtgaaacattaagtaaggtcaaatgagttcaggtcgcaggaaggtctacaagtctgaataaggaatttggacttaatggttttgttcaagtcccaacaggagagtgacctccctg

SEQ ID NO: 184957 - DNA, 462 bp, Homo sapiens
agaatacttaccatttttttaagaaatagtgcaggttgctctattttaagaatttatgtcctttaggtttgcaaaaggaaagggatcacatagggaggaaaggatggctaaatattctctcaggtacagaacactttgattgcgtatgaccatgttttggaaatctctcaacaactgatgtcatcttacattggccaaattaaatttacacatgcttggattaattttttgttcagaacctccctgcccttcttgcatttcaatatgaatcatacatttcaatattgttttcctattcttcattcagattattttttaaatcaggttatatttaagggctgttggagatatgctgcaaacatgatttctgccatctatgagctatgtttttatgagctccattttagccaggaggctggaaaagtcacatcccactggcagatttgagcagggaggggaggt

SEQ ID NO: 184958 - DNA, 476 bp, Homo sapiens
aaaggaagtaaaagtgaaggctatttaaaaacttgcctaagatgttaaaatatagggactgaaatttgaacacaagcaatctggttctagagtccctgtatcatctttgttatccttcaccaaggtaaggatggtctctttcagtcttagttttctgacactttgttgttatttttaagttttagatgaacagttgttgaatgttatcagatgcttttcaaacatctgttggaatgaccctgtcattttcctttggtctgttaatatagtaattagcagtatcttttctcattttgaactgtgcttattttaggctaaatacttgttagcattcacactttggttttgttttcaaatctatttagacttttctctaaccatactacaaaaaaatgttaaaggcagtttttcaggcccaaggaaaatgataccagatggaaatacggatctatacaaaggaattaaaagctctagaa

SEQ ID NO: 184959 - DNA, 524 bp, Homo sapiens
gaatttcctggacctgaatttccctttcacatttgggaaagaaaaattaattctactggatgtttcagtgcactacgtaggccatgaggtcttctctaaaagtttgttttggtagctactgaagggctcatttcttccctgcagcacaacaaactttttatctgtaaagactcatattatgtggccatctcattgagtgttttagcagaagttgattgtatatatctgctggatcctatgctgcctccagaacatacaaggatgaaaggacacattgccctaagggggaccacagcccagtagggaggacagacgcaatgtgaagagttttctaatacctgagaaaaatttaggtccttttttcacagcaataatgattttatgatttcaagaaattttaaagagtgctctctggtaattgctacttaagaggatatgtgaagtcacacaaaacagtaatctctccataaaaggagttcagcaaatgtttatactaaaaatattactgctgattgagtttgggc

SEQ ID NO: 184960 - DNA, 604 bp, Homo sapiens
  misc_feature (475)..(475): n is a, c, g, or t
tgttatcattttatacaataaccccatctttcagttgttttatttcttgagaaaacaaaaatcactggtggaaaatacactaccattctttggagtaggggaggggtggtgttaaaccagcttcacaagatgaaagagaggattcaacattgtgcttcttaaactttttttttccccccaagatggagtttccctttgtcacccaggctggagtacagtggcatgatctcggctcactgcaacctctgcctcccaggttcaagcaattctccagcctcagcctcccatgtagctgggactacaggtatgcaacactgcatctagctaatgttcatatttttagtagagacggggtttcaccttgttggccaggctgatctcgaactcctaacctcagatgatctgcccagtttagcctcccaaagttctgggattataggtgtgagccactgcacctggccattggaagcctctntaatctgcctcctgagtccttgctatctgcctgacaagaggttccaggcttatctgctacttgtgctgtgtgagacatggaatgagccatttcttcatgaagccctgtttttactttttgtttttagtg

SEQ ID NO: 184961 - DNA, 314 bp, Homo sapiens
tagtgggctccccagctactgagctcaggtaaaaacgctgagtcctgcaaggtcaccacaaggtgaccacaagcaaaaggagtgtacagggaagaggaggggctgtcatggaaagaccctaaactccagacaccttgcctttcgagattctgaactccgtaaatcagagctgggacaataaaatctgagaatcccaaatggcaccaagccaagcaaccaacccaggggcactgtttaagcaataatctctctctctctctaaacacacacacacacacacacacgctaatttctttcttcctgcaggtttgatg

SEQ ID NO: 184962 - DNA, 600 bp, Homo sapiens
caaatcacatatcccatacgcaggcctttccttgcccatttgaacagtattttagatcaacccctagctaatgagctgtcacactagatcatgcctgcctgcatctgttccaaggttgctgattaaacagctctagggaaaagaaaccattatcctgttcggtgcaaacctcaagtgactatctcggtgcagcatgacttgccttggataaatagcacacatgggaagcaagctgtctgctccagaaaatcaccccccatgggcggtgcaccctggtgttctgattcactagaaaggtacccttgtggtctgaaggctctttcaaagggcccaatgtcctgaagtacgtccctcagaatggaagaacgcagctccacctctgggataagaacaataacccaaaaagcaagctgacaggcccacgtctagtcacacagggataacaggctcttttgtccgtcacgcacactgcagtgttggtactaaagaattctgcagtggtggaaagcatcagatatgggcaataggatttcagccagaagactttgggatgtgaagaaaaataagaacattaaaaaggaagtatatgtatgttcatat

SEQ ID NO: 184963 - DNA, 593 bp, Homo sapiens
  misc_feature (50)..(50): n is a, c, g, or t
gatgaaaaattatccccccgcataatatagcaaggactaacccctatacnttctgcataatgaatcaactagaaataactttgcaaggagagccaaccgtggactagtctggctggctcactcaaccccctctctgcttaacataaaacgcagtttattacttcccgcaagttgccatctgcaaagatatgccacaacgcaatgcacattctcacacccagggacaagggagagaacccagggaaaactccttcagtccatttttagctattggtttcatccttttgatttatctgggcattaacaaggttgtattaagctctggctgtgagcactgagtacgcctagatgggactagagataggaccagaaaagcaagcaggttacagtgggcaatagaaagggcagcatagagaattacaaaggagcagccagcagccaaagacctttctagggatgctaattaggcaaaaaaaaatagctactggagccgggcatggtggctaacacctgtaatcccagcactttgggaggctgaggccggtggatcacctgaggtcaggagtttgagaccagcctgaccaacaaggtga

SEQ ID NO: 184964 - DNA, 688 bp, Homo sapiens
  misc_feature (50)..(50): n is a, c, g, or t
gatgaaaaattatccccccgcataatatagcaaggactaacccctatacnttctgcataatgaatcaactagaaataactttgcaaggagagccaaccgtggactagtctggctggctcactcaaccccctctctgcttaacataaaacgcagtttattacttcccgcaagttgccatctgcaaagatatgccacaacgcaatgcacattctcacacccagggacaagggagagaacccagggaaaactccttcagtccatttttagctattggtttcatccttttgatttatctgggcattaacaaggttgtattaagctctggctgtgagcactgagtacgcctagatgggactagagataggaccagaaaagcaagcaggttacagtgggcaatagaaagggcagcatagagaattacaaaggagcagccagcagccaaagacctttctagggatgctaattaggcaaaaaaaaatagctactggagccgggcatggtggctaacacctgtaatcccagcactttggaagactattttataggcaaataattttgacagcaccatggaagatagactggtgtgagaagagactgctgaccacattttattcattctacatgcaccacggcatcataaagcacctattaaggcccagcactgtcctaaatgctacaaacacagtag

SEQ ID NO: 184965 - DNA, 500 bp, Homo sapiens
ttggcacatagtgatatggattggctgtgtccccacccaaatctcatcttgcattgtagctcccataattcccatataatgtgggagggacctggtgggagatgattgaatcatgggggcagttttccctcatactgttctcctggtagtgaataagtctcacaagatctgatggtcttataaggggtttccttttttcacttggctctcattccctcttgcctgccaccaggtaaggcgtgtcttttgccttccgccatgattctgaggcctccccagccacgtggaactgagagtccattaaacctctttttctttataaattactcagtctctgttatgtcgttatcagcagcatgaagacagactaatacacatagtaaactttcagtaagtatctataataataagtattattcataaaggaggaaggaaggaaggaagagggggaaggaggattttgttgccaaatgtaatacttgctattggttgtttttttt

SEQ ID NO: 184966 - DNA, 292 bp, Homo sapiens
catcagactagtgcagccatctccaataggacagatggtatagaacaggggacagatctgcttcaaggggcaggttattgcatcccctgaaagttatacaaacattctgccaaatgtattttggtatctttccttgtttatagaaagattaggtgatataaatcaattttgaaatttttttgctacttactatgcatcttcattgttgtatagctgagcctctacttcttcatttattaaaaaaaaaaagtaataaaatctcttacagaattggtataagggggccaggcac

SEQ ID NO: 184967 - DNA, 130 bp, Homo sapiens
cctagcatggccatcctggggctcctaggcaaggacatgctgccagctagcccagcacccatctacaaagtgaaatggattagcggctcactttcaatcaggctgagttacgagctcagcgatttgtggg

SEQ ID NO: 184968 - DNA, 261 bp, Homo sapiens
ctttttttgtcatattctcacaagctcctcagtctttctgtttttaattctattttctatgttgttgtatacgctgagtaatatgtattattctatcttctagtgcatagattatttcctctgtcccattcattctgctgttaagtctatctctgaatgtatttttttttctggttcaatttctctcataaaagctctgaactttttatttcaattactgagtcagttataaaaattctaatttaaaaaaattattggcca

SEQ ID NO: 184969 - DNA, 356 bp, Homo sapiens
agggattcggcaatgacaaagtgcagagtttctggtctcattagcagtccccgccccaccgcactgccatgacactcgctcactttctccccaggctctcctcgccttcatccccatgctcatctctgcctaagcttcttccgaggccactcataacgcttcacctctgctcccaggaattctcacatcctcttcgcgttggccccacttgctgtcacggcaagtttcagtccgggtggtgccctgcccctgtctatagactctggcctgtaaaacctcactgcacccctctggcctcttcgcccagtctctcagctgccacctcctctccagcagtcttggatctgagcttcacc

SEQ ID NO: 184970 - DNA, 208 bp, Homo sapiens
tctcgagctgtctctagagtatcctcctcaatgcgcgacgccatcttaattggcataacatgattttagtgcacaaataagaaccaaagcatagtgttttggttaaagagattgacttactctgaaattggaaaaggcatctgctgtacaggatttttgatttaatagaatttgttataaccagatcagcagagcattattactgtgg

SEQ ID NO: 184971 - DNA, 432 bp, Homo sapiens
taggcagtgaatgaatgtagaaggggaaaatagcaagaaaacctttactctgattcctgtgcagaaagaaatttagaggtcattaagccagagtcctgtcatcttctgtcctcactcccagtgctccagcacctacctatacctccctaccgatccttaccctttttcgtagagaaaaggtatctctaaagtcctgcagtgctttaaacctttgatacatcctgacaaacacagaaaatgataatatttgttcaatacagtggggtaaaaagagtgcctgtttgaggtgactggcccaaggctttcagttccctgaagctcagctaaactgccctaagggactgagtattaacatttccacacccataaagcactcacagatcagcgcagataccacattcccagcccatgttgagaagccctggccctaac

SEQ ID NO: 184972 - DNA, 366 bp, Homo sapiens
ctcaatcctccacctctagatgcagtttcctgggctcggggagcatggagatctagaggggaaataagttacctgtttaacttccacagagttgaaagctgagtcatggggccacacgatacaaaggtgatacacacaaaagcatctgcaaattgcttttattgggaagccattttcctcccctttttcaagccacatggccaacccactccctgagattctgcaggcctcccattccggtgagtgtagctcagttggtgaaatctgccccagctcaagttcttccccaccttttactatttccttattctgaagatagatgaagaagtgcattttccttaccccctgccagccatctgaggacaa

SEQ ID NO: 184973 - DNA, 240 bp, Homo sapiens
gtcttgctaccacctaggctaggctgttctctcctttctggcttagggaaaaatactcatgtgttaaggatgaatttagtagtatatcaggaagcaaagtaacatgaaaggcagagaactgtgccagagaagtgtggtttcagtgtgccagcattttcctgcgtatctgtttatttggttaattagcacctgcaaagatggttatagcctccttttttttttttttttgagacggggtct

SEQ ID NO: 184974 - DNA, 171 bp, Homo sapiens
ggatgtgtctgtttctccttggagttctatgagttcctcatgtattttgaggctctgttattaagttcataaacctttaagaaggattgtttttggatgggctaagatattattcgctattttaaatgttggaccatctcttgccttattcactggttacagcaaccattg

SEQ ID NO: 184975 - DNA, 236 bp, Homo sapiens
agacaaatatccaagcaagaattagagaggaaaaaggataagagaaattccacacagattaatatatgcatttctgaaatactttttaacttccataaatagaatatacacacagacctcaaaagaggcactatgaacatagtgaaattgagcaagaagccattatttctagtaaatcatataaactgcacctactgaatgttgccatttggtatgaatcacatggccaagccgtt

SEQ ID NO: 184976 - DNA, 883 bp, Homo sapiens
ctaaggtctgttcccaatacaagaagactctttgacatcataataaaatactgcagatacgatgctgagtgaaaaagagtagaaatgggaagacttggttgtgcagaaactgagttcttaaagagaggagatactttatgagggctggagtgcactggagcaatcctggctggccaatactgagttcttgaaaacaggagatgcttgatgaggatgggatcatctagttgcaggaaaacaaggctcagggtgcctactgattctacattatgcttggtccggagagctgccttggactctccaatgcagctgcctctgttaccttgactcgtctcagatttcattgacccaagatgggtcctggcactaggaatgtaagactgtctccattcttttggcttgttccagagaagcccatgcaaggttcctactgaccatatgtttctttcttttcttttgttttttgagacggagtttcgctgttgttgcccaggctggagtgcaatggcgcgatctccgctcactgcaacatccgcctcccggactcaagcgattctcctgcctcagcctcccgagtagctgggattacaggcatgcgccaccacgcccggctaattttgtatttctagtagagttagagtttctccatattggtcaggctggtttcgaactcctggcctcaggtgatctgccctccttggcctcccaaagcgctgggattataggcgtgagccaccgcccccggccttgaccatatgttttatttctagctttgatgtctgggcatcgatttccctcggttaaactatttgctcaatgttaaggccactctgtagaaatttgtctgtgtaactgaggtgctatgcaggcctgcctgtgtgac

SEQ ID NO: 184977 - DNA, 352 bp, Homo sapiens
aggataatcttgttttaaggtcagctgatgagcaacattaattttatctgcactcttaattcccccttcctatgtaattgtgctgtgtaacataggacatgagcaattggtggcggtgggggttattactttggccaccacagtaactattttatgccaggtactcagctaagcactggtgaattaagcatgaataacacacactccctaatctccatccattcatgggaggagcacttcacctgccatgctcctgagaatctcgggagtcatagaagtcttctatgaggaggtgatgccaaagcggacaagtgacagaggagtcaaagctagctaggaagagagtagaggt

SEQ ID NO: 184978 - DNA, 466 bp, Homo sapiens
ctaatccatagaatttctaacgtggtctttgttttgccttattctgtaaactctccaggatgtgactctgtatgcctacaacctctgctaccacctgtacgctaataaatccttatttccagcctagtccactctccctacttctacacatatgtatgcaaatattcaccggacatttccatttgattgtctccacaagcatctcaaactcgacaagtttagaaccaaattattttgctcccttgccctggccccaaatagctctccttttgtattcccagaaccaatccctacctgagttgggtactcagatacccaacccagaaatctgggagaaaactcagactcttcctcctccctcacttttaaaatgcagatacagcagggagcagtggctcacgcctgtaattctaccactttgggaggccaacgggggtggatcacctgagttcaggactttgagact

SEQ ID NO: 184979 - DNA, 870 bp, Homo sapiens
tcctccaggcctgtaagatgaggagacctactgcactggcgtgttaggaggttgaaatgaaatgaggtggctgggtgtggtggttcatgcctacaatcccagcactttgggagtctgaggcaggaggattgcttgagcccaagagtttgagatcagcttgggcaacagagtaagatctcatctctacaaaaaaactaaaaattagccagttgtggtgatatgcacctgtaatcccagctgttctggaggctaaggtgggaggatcacttgaacccaggaggtggaggttgcagtgagccaaggtggtgttactgcactgcagcctgggtgacagagcaagacccttcctcaaaaaagaaaaagaaaaagaaatgagataaggtacatagataagtcagcttagtgcctgataatgtaacagaagcttagcaagtagtagctattgtttttgatgttacagttactgatactattattgcaaaaacttcatgtttgatggtcgcctgatgtcacttttcctagttcagcagaaagaggaagctcaggcatagaaggcattaattcactgaccatcaaacccctgctgcatttcagtcagtggttcttctagaaactacctttaagtctttgtatcagcgtccgtccctccaccttctccctggatccccagtgaggagacccatttgtgtgcagtccctgtcatccgatctccacctgcggtgttggcagcctggcctccatgcagagggctttctgttgaaagggcttgaacttaacattttaaacactgaacactgaaatcaaatataacaagattttgaagcaaagctataaagtatgttttttcagagaaatttctggatgatggct

SEQ ID NO: 184980 - DNA, 500 bp, Homo sapiens
tcaatttaaagatgaaggaaaatgagatttaaaaagtagaagagccactattggaactcaagaagatcggctccagtgtctatattcttaactactatatggtactacattccttttgagaaggaatgagtggaaagatggctgggtacatgtatgacactattttgtgagctattttaaggttcgtgtttgtgaatgtatagtcctacctcctactaatggaggaaaatgagctctctcctgatctctgtgggttcttctacttgtaataacaggtaaccttgataacactgaccgtcccctcagttgcacaggtgcacctacccaaagcataaagagagagccctgcgtaattgagtggctttacctttattggtactgtcaaaatagtgacattaaaaaaatacaggtaccaagtagacaaatgaatagtgcctaataaagaggagaggcttcaaggaagaaagaataaatgaagtatatgaagcatgcatacttat

SEQ ID NO: 184981 - DNA, 173 bp, Homo sapiens
tatttgcttttttgagatttataaggtgatctgattataaaagcagcatatttttgcttaacttttccttaccactacttttgtggtgaccttacttactgaccatttgtatgaaatccttctgagaattgaaaggtcccgtttcaatttttttctttattgctttgtgttta

SEQ ID NO: 184982 - DNA, 261 bp, Homo sapiens
ctctatctctttaaaaaaagaaagaaaaaaaaatttttttgacacattcccatcagcagataaggaaactgaggctcaaagatgttaactgacttgatgccatttgtaaggagcagagttgagatttgaacccgcaatttccaactctagggtagggagtttctcagtggatactttgatttttaaagcaagaaaatggtgagctggatattgctgattcgtgaatgtgggttttgcatttgaacatgatattgctacaac

SEQ ID NO: 184983 - DNA, 479 bp, Homo sapiens
atgtcaaccccttattcaagtgcctactgtgaactcttgactgaggagaccacaagtctacttttctaaagagccttcagggtactgcacagtctgtccttttttttctctctcttctcacttctgactgtccaacaataaacactagtagcaatggcaataaacataactcttagtatgtgccaggtaatgtttaagcactgttttaagtgtttttcatatattaaattatttaatcctcagattaaacaataataaatgtgtatattgtaatactagtaatgtagacattaaatcacttgcatgtctaataaaagtaggatttgagcccaggtcgtctagttcccagagtctgtacttttaactaatctgccattctgcctttcagtaacactcttctttaagtcaagtcactatgttttttgttttgttttgttttaaatgtgtcttttaagataccatttgccctgttgtagctc

SEQ ID NO: 184984 - DNA, 318 bp, Homo sapiens
cttgttgggaaattagttattattaaaagaaaacatgtgaaaagtatagcaaataataatcaaacattggataaataaacatagaattattttaaagttagctatattcagcaattgttcagaaaagatcaagtgaaaggaaaaaaaaaatgggttgggggtttagtttctctctttctccagaaaagacattagctccatctgttacaaaggtaggaagaccaacagcctccaccaacaaaaacaggtatttcttcacattccatccaattcttgtgggtctatttagtctatttctgagaatgagttactaagttc

SEQ ID NO: 184985 - DNA, 397 bp, Homo sapiens
taacacaaattttcaatacacttatgtacaattttatgaacagagaaaaccacacccacatgtactccttgaatatctaccagctaccttggttcactgtgtgttaggaaacacacccatctggtctgacaactttccatccttccaccatgcagcagtaacacacaagctataacccttctgagacctacttccccacaagcaaacttcaggttttcttcaaggtaaagtgccatatttatgtaatatttatgtatttaaccattttaacatgtgtaaaactgcgttactgtttttattagtttcccatctttttttcatgtgtcactgacaacgattttaagtgctgtgcttctaaccttcctttttctcgtaagtattgtggggattttttgtt

SEQ ID NO: 184986 - DNA, 540 bp, Homo sapiens
aattggaatcaggctacatgatatttcacttatcgccgggagtttcaagaacctatcaacattaaaatgaggacttctgtataatatagtaaatactaggcgatgggaattttccaactccattataatcttacaggatgaccctcatatatggtttgtcattgaccataacatcatgatgcagcacataaccgtattcaaacaaacatgccatataaagaatattgaggccaggcctggtagctcatgcctgtaatcccagcactttggaaggctgatgcgggcagatcacctgaggtcatgagttcgagaccagcctggccaacatggtgaaactccacctctactaaaagtacaaaaattatccgggcatgggccaggcgcagtgactcacacctgtaatcccagcacttggaaggccaaggcaggtggatcaccagaggtcgggagtttgagaccagcctgaccaacatggagaaacccatcgctactaaaaatacaaaattgtccaggtgtggtggtgcaagcgtgtaatcccag

SEQ ID NO: 184987 - DNA, 427 bp, Homo sapiens
aagcagctattccaagtgctatagattcctcaaagaccctagaataccccttgaaacacacctccagattcccctcactcagatgagacctgtgggccctgggggtgacaacagggttagaaaacagcctgtgtgtggccctgtaatcacttaagaaaccatcactctgttcatccttgtgtctcctgtgtacactgtctattttataaaggattttcgtatccatgacatcatataatcctcccatagcctgtgaggcaggttataggaaatctcattcacagaagaagggagattcagagaggctgcacacttgcccaatgacacacagcagcagagtaccaaaactaggatccatatggttgtcttctggtctcaagagtggacttcttttcactgcataaagcagcttccacatcagaatgac

SEQ ID NO: 184988 - DNA, 578 bp, Homo sapiens
aactgctgtactttgtgggatattcagatgtcaactaatgcaaaaatagaggaaaacacccagaagaagtgaaggttatctggcagtctattgatatcacagagtaagggtttggaggggaggaaaagagtaggggattgggctacaacagatttccagaacagccaggagattagagtctgggtggtaaaaaatgacttgagggtggaagaggtaaaaaggaattcaaagtaggtgggaatcaatactggtcatctctgagtgggcattagttctagctccaaagtctctaaagctctgctctgtggtatgacaatttctagaggaccttctttgggaagcctttccaattctccactgccagagagttagacacccttatccttaatgcccatatatatcatttaacccatattcaataaatattagttgaataaattaatgactcaccataacctgagtagactatgagaaaattaaattgaaaatcaacttcacaaaaggaatgacatagcagaatttccagtgatgcctacatgctattgggcatcactgctcgacgagcttcggatccgtgc

SEQ ID NO: 184989 - DNA, 128 bp, Homo sapiens
tggaaaagaatgtgaaactaaaagaaaatttgaatgtaatttaattttagagggcactgtggtgaaaaaattatttaaagaatacaactattggctgggtgcagtggcttacacctgtaatcccagca

SEQ ID NO: 184990 - DNA, 456 bp, Homo sapiens
atgtttgtgtgcatgacaatgtatattcttcaacatcgtagactcgatgttggatgctcccatcgggactgtgtgtccctgtactggaactcgagtgaacacttggctctaagttcattgctgttttctagaaatccagcccaattctcttggttaaatataaggtgcacgtagtaggcattgctttttctttctggagacaaaactcaggaggattgccccttgatgaacaaagctaacctgctgagactttgaagcaaggaactggagatggtccttttaagggtttatattctggattccagaaaatgtgcaaacagggccaataaatgcatctttatttttgtgtccattttaacctagtcaaagaaaattacaacaaaaaatccacagtgctggagcaagaagatctcatgatgtgaccatctggaggtaagaagcactttgtgttttgtg

SEQ ID NO: 184991 - DNA, 248 bp, Homo sapiens
cccacaacgtatattcttaaatatcatcttagattccattttggttgctcccatcgggactgtgtgtccctgtgctggaactcaagtgaacacatggctcaaaatccattgctgttctctagaaatccagcccaattctcttggttaaatataagtcaaagaaaattacaacaaaaaatccacagtgctggagcaagaagatctcatgatgtgaccatctggaggtaagaagcactttgtgttttgtg

SEQ ID NO: 184992 - DNA, 627 bp, Homo sapiens
tcgcgtctcagtccatcggggggggagggggtggtgcgcgcgccatttctagtcgttttcaaagcgcctcgcgcatgattctcacgggcccggcgtgccggcccccgctctgtcctgataataaaatggctagtcaggtgaagtggtaatgcggtacagttaacaagaagaggaagaaccaagtggatacttccagtgtaactcacacagaacacttacaagacactgatagaggcaggcctcccacagaaggtggcagaaagactttgatgaaatatttcagacaggattggtagcttatgtcgatcttgatgaaagagcaattgatgctctcagggaatttaatgaagaaggagctctgtctgtactacagcagttcacggaaagtgacttatcacatgttcagaacaaaagtgcattttatgtggagttatgaagacctacaggcagagagagaaacaggggagcaggtgcaagagtccacaaagggacctgatgaagcgaagatcaagccttgcttgagagaactggttatactctggatgtaaccacaggacagaggaagtatggtggtcctccaccagacagtgtgtactctggcgtgcaacctggaattggaacggaggt

SEQ ID NO: 184993 - DNA, 386 bp, Homo sapiens
tccccactaacctgccccaaggcagggcctgtgtgtcggtcggaatatctctgtctgtggatgccagggaaatgaatgaaggtgctgatactctgcactcaggcacttccagtaacattactgcatctaaagctgtttgtttcactttcagaaggtgatcttctgtacgataggtgatattctgcacgatgaggtgagcttctgcacgatgaggtgatcttctgcacgataggtgatcttctgcacgataggtgatcttctgcacgatgaggtgatcttctgcacgatacggtgatcttctgcacgataggtgatcttctgcacgatgaggtgatcttctgcacgataaggtgatcttctgcacgataggtgatcttctgcacgat

SEQ ID NO: 184994 - DNA, 619 bp, Homo sapiens
taaatcggacagcacgcgctaacaaaaacagacatcaccagagccaagaagttgggcttttatgcatgacctggttgtcgaacaatcttattactcaatatcataattaataaactgtttagcagccagtatggagggctttgcaaagaactcataaaggacacattcacaaaagcagtatgatgaacagttctgcttctaaatcaaggttttgtataacaaagtcacagaagagccttgattccagacacctgggtgacaaatccctcttaggatcagggaagtgagaggaaataagtatgggacattgaaggccacccaaggagcattacagcagtctcatctctagaatgacaggagttccacagttgttagcgcgtgctgtccggacagcacgcgctaacaacccccccccccaaaaaaaaaaaagtggaactggggattctgaaaaggtggatttgaataagtaaacctactgtaaagaaaagtgatattcaagtggctcttggtcacctgtgtatgccttgtttttttccaatttagactcttctttaaaggatgtaaggaaaaatcccatgcctttccagttcttttttcctcccgggcacttcttttttga

SEQ ID NO: 184995 - DNA, 328 bp, Homo sapiens
atttgtattcctgaagatgatatttgaattttaaaagaatgtttaagtggagcagttgacattcctctctctccccccctccttttttttgagtcccttctcctttagttaatttctctttgtttttattattgttttttattttagccttgtgaatctgtccaaatatttataagcccacatacatttctttgtagccactgtctcctgtggtgacccacaggtgagtaaatgactgttctttacttgggcagcaacacacattcacagcattttctagaccattggctctttctctaattgcattaaccatctcagatacagctga

SEQ ID NO: 184996 - DNA, 179 bp, Homo sapiens
aattatttcaatctagacacttatcgcacaggtatttatgctatctgtccacatgtaagcagtgagagtgtatacactagtacttagagattttgattatccttttgaaggagttgtttgcagcaaaaggtctggagtcaaagggcctaggttagatttcttgctccattatttttgga

SEQ ID NO: 184997 - DNA, 305 bp, Homo sapiens
ccctcacactcctctaccctccacctcaaatcagctcaaggcttcagggagcttttttaacaagggccactacactagcatgttctagttacacacagtcagtggatacagaaattctcttagccaatttgagataaaggtaacaggttcattttcactactgcttgtcacctctaccactataccccatcacctgaaccagctgatctggtgacggcaaagagagagtttaaaacaagcatctgatgagaattctatagttaattttatactttgcggggaagctaccaatttattttatcaat

SEQ ID NO: 184998 - DNA, 379 bp, Homo sapiens
ccagctgacggctatcagcgtgggtcagtgctggccgcagctcccagctcattgaccctggtgtcttgctcacacagaggcgggcaccatctgccgcaagaagtcccagagccgtgccacgttgtgctgccgagcggtgatgcgcttgatgtcgtggtagcgcatcggcggccagttctgcagccacagtgtccacatgcctgcacccggccgctgtaggccacgatgtccgtctcaatggcttcgtgcttccgtacggctgtcagcccaatggcaagccgcggtaattccagctccaatagcgtatattaaagttgctgcagttaaaaagctcgtagttggatcttgggagcgggcgggcggtccgccgcgaggcgag

SEQ ID NO: 184999 - DNA, 607 bp, Homo sapiens
gggcttcaattcactccagtaaaggaaggcagtgtggctagcaggcaatggctctgggtttgaatcccagattctgtcttcatccttctgaatcccatttttcttaagagaaaattggaaatcacagctatctaatatggttgctatgaggcttaaatgagactcatggaaacacttagcacagggcctggcaatgtgagctccagcctggcacttggtacatattatctcttttaatatgtgcaagtactttgcaaggaagctacttttgtcttcatttttcaatcaaggacagggagactcaggagtgaaggaactcgctcagggccacatctgtcatgctgcccgcagacactgctttcgtacctctcacgaaaggctgtgcgccgcacgcctaagtctaaagaaagagcacttcccagttagattaagcaatctgggagttagttcaccagcagctgtaggaaatcagctcaagaaatagttggccttttgtcctgctgtgtcccatcaggacaacactgcaatttgttctcagttagttataaagctgaaaatatatgcatattacttattctaaacacttagctggccgggagcggtggct

SEQ ID NO: 185000 - DNA, 369 bp, Homo sapiens
tgatagctagtggagctgattgacatcctagatattttaattcaggaaatattagtgcttaattatacaaacaggttggtaggctattctgaatgaaatgctgcttgctggtgaaatactctgttttcaagaccgcaaaactaaaaccttgttttaggaattctatacaagaataactttggggaaaattttttcccttagggcatttccactttccaaatttttcctcgttgttcccttttcctccaatgattctcttaattctgactgataccagtcagggcatgaaagaatgaaatgtccaaacccttactgacaaattatacctgacagcagaataaacccacatctactaagaggcttccatgg

SEQ ID NO: 185001 - DNA, 405 bp, Homo sapiens
gcttggtcactatcctcttccaaggagaagctgaccctcttttcaggctggctagagaccttgttcagtgaactgactcttatttctttttgtacagccacctcggcttcagaagcaaaatcttcactggtactgaaacccagcaaggtgattctgaggtcctttccatggtcttgggggctggtgcttgctgagatcctgtcctctgtccccagaggaatgctctctggtacaccagattgactatgagatcccatggccatggatcgcacagacccacaccaggcagtgtgtgcctcagaggaacgccctctaacatttccttcggggctgtggcttctggtctccgtactctggtcctgatgctctactccagttaccaagggactgttatgaattttcaac

SEQ ID NO: 185002 - DNA, 428 bp, Homo sapiens
taataactgagcagtcattgtcagcataggtgtcccatagcacatcttgtgtcatatccctccgtgggcccacctactgtttctgcctgtcaatcttgcctccccaccatatatctagccacactgctggcaaagcacagaggtggaggtgcaggaaagcgctagatgccactagaatccctggcaaaaaaaatacccccaaatgtaatataaataacatgattccggaagaagaaaatgaggatcattttcttcttccgggtgagaaaggcccctcttggctgtggtatgaggggctggtctggaagtttctctccaggtgggaaaggcccctcctggctgtggtgtgtgaagggctggtctggaagtttctctccagatgggaaaggcctcttctgggtgtggtgagagggctggtctggaagttt

SEQ ID NO: 185003 - DNA, 564 bp, Homo sapiens
ttcccttctccctttataacattattgggtttttgttaggtttgggattcctgtgatctgagcagcccctgccatcggccgctctgtttgcctttcccaaatagactccatgggcagccccagtgaaatagtctgttcgaggatgtcacgttgtgggatggtctgatccttaaagacaggctgggtctgtgggctggagtattcttgctctgaatttttttctgtacgggggaatcgtgcatgggtagggggatagttctgcattccatgtgaggcagtcgatgaaccaagaacacctacgttgaagggaacccaagactgggatattgaggctaacgctggaaagatggtcctgttgtataccagtctctgtgtgaaaccagagattatcttgtgggatttatttttttaaaaaactagtttccaatggaatacctgatcctggcttggatttgcacctgaccctcttcttagaggtgtcattagtattcagattattttaaaatttcttttgtttacttctcaaagctcttgcttctctcttcaatgtgttctgtttactat

SEQ ID NO: 185004 - DNA, 197 bp, Homo sapiens
agtaactgagattacaggcgtgagccaccacatctggcagcacttcaaattttctgtgacatctcagtaaggccagaattgaagatcacagaggaaatgagacgtctggcttgtttcctcactgacctcatttgtgtgcctggattcctctatggatctggccagcagagctctggggcctctgatagtcagctggg

SEQ ID NO: 185005 - DNA, 204 bp, Homo sapiens
tcaactacataaatgttatttgttttgcttcaacatatgattttagtggaaaaatagagttctccttctttaaaaacattttttttaaaaaaccactggactagctaattcctactcctaaacctttgtaattcaatataaggtctacccatcaaattgtttagactcctggatgatactcatgtttttaggaagggttcctac

SEQ ID NO: 185006 - DNA, 517 bp, Homo sapiens
atatttgatgaatgaaccaattatctgggcacagacccaatcgtggcaaagaaacagaggccaactttgtgctgggtaagctggtcagataggataattatgggatggatgggtggatagactgggtaaagtgacatcagaggaagtgagatgagattttgttttggacaaataagatggggataactgataatgggcaaataaaactcaaggttcactctcaagaaagagctcacaggctttggggatttgtgcatgaggagatacagtgctgcattcctaactgtcgagtgactctgctttaattaggtttgggcagtaagtaggaagaacagtaagagactccttaacatcagacagtgtggcccagcaaacggcctgctggatgtgtctattctgttctgttgctgactgtagaaaacgcacccctcttcctacacacctcttcttttatctctctttctggagccatcacatttacttagaggagaaatggggaggaggggaagcagccagg

SEQ ID NO: 185007 - DNA, 490 bp, Homo sapiens
cagctagtaggtgtcagcgtaggtctatattaataaactggctttttcaattggggcctcctctcttttctgattagcttgcctgaaaaagtctttaaatttaatgcccaggggatatatgactcattgccagcgttctgggagccaagtaagacgaggtcctgagcttatcctccccatttcagtatgacctcatttctactctcagttgtgcctagtggtagagtctagatcctctcggttcaccttataatctcctggtcctccacaaagtatgacaggagatctagcatctaattgtttcaagactcccaaccaatcttcagtctcagcttcatactccatttttttttccaaccaatcctccagtctcagcttcatgctttttttctttttctttctttttttgagacagagtttcgctatagttgccattgcactccagcttgggggacaagagcaaaactccatctcaaaacaaacaaacaaa

SEQ ID NO: 185008 - DNA, 617 bp, Homo sapiens
tatttttcctaaagacagtggtaggagacttacagattttaaagagcagacctttaatctcattgaagtcattttcggctagtaagatacacgattacagatcatcccagacaacagataaaattaaaacatcatcctataaaattctgtctaaaactactattacaatctgagtcatttgattaggattttaaaaattacactctttaactgattttaaagcaaaaagattagatcattgtgttggggatgggaagaagtctcaataaatgtgtaatttttttctttccagttaagggggagaaaaataattctagtagtagaattaggtaaacattaaagcaaaaaaaccccaaccacccattctcactaccccacttcctttaaagttcaagtacactctgagaatcaaggtgaagtcaattttcagctgagctaaattccaaatccattcttacaaaaaaaaagtattagtttatatagcacctacttatatataaaatataaatttgaaaaatgcttttaaatggtaactccaactttttgtttacccattatgttccaatgctgggtaggtgaacagttttaacccaacttcttcccccaatttttttttt

SEQ ID NO: 185009 - DNA, 167 bp, Homo sapiens
ataaattcttagttgtaatttgcttctcttaattatattcccattggtgaaggtagaaatcctttcattttctgattctcaaaaccacagtctacttgcaaactccatctctttgattccctactaccatgttcaattttctaatccaacagaaactcccacagtat

SEQ ID NO: 185010 - DNA, 312 bp, Homo sapiens
tttgaggtcaggatggatgaaaaccaggcagaatcaggatgaatgaagaacaaagaaaacccagtgcaaacgcagcactctgctcactgatgtcaccaaccatgactagactggccttaccctatttccttcctcaccaggtccagaaagaggaatctctttcacggatggatccatgcaccatggacccattccttccccacccttcctctcctgtgggaatttaggaaaatttgaccttttctaagtctttttcttaaaatgatcagagcctgaagccatgaaattcgacaaaggggcttatggttgttg

SEQ ID NO: 185011 - DNA, 207 bp, Homo sapiens
aagctcccaaggaattagaatagcttccaggcaccaagatgtcactactcaaagatgacccgatacagcagggataggcgagacacattaacttcagaggatgtggcaggagtgaagaccacctgcccagtcacctgccacacgcaacagcccaggccccggcagggtgaccctctgcagagctgccccaccaagacccctggatac

SEQ ID NO: 185012 - DNA, 450 bp, Homo sapiens
tccgtctcaaaaaaaaaaaaaaaaaatatgaaggagtggccagaatgaaagaagaaaaactaggagagaataatatactgcaaaccaagagaagaggacttcaaagagggaaaattaccaacaggtcaggtgttagagagaagaccaaagaggatggttattagaagttattagaggatggttattgaagtggtaggataaaaagccagactgtaggggttgtgaatgaatgggaagtaagaaagtagagattgagagttgattgtgaagggaggaaggaagtagacaatatgttgaggggatgaaggcagttgggcagaggagaacttcgtataggtcaaagagaagaaaattaaggatatgaaatgcctatggaggtgggaagatagacattgagaaagttttaacatcttatttctctgtaaagtaggaaacagcatatttttttgc

SEQ ID NO: 185013 - DNA, 258 bp, Homo sapiens
gacacaaatgctttatacccttttataaaatctggggacactaaaacctaatcgaatgtggacaggaaagcccatcatccaaaatcaacaatcccgggccgggcgtggtggctcacacctgtaatcccagccctctgggaccacaggcacacaccaacacacctggccaatttttaaattttttttgtagaggcagggtctcaccatattgcctaaactgatcttgatctcctggactcaagcgatcctcccaccttg

SEQ ID NO: 185014 - DNA, 429 bp, Homo sapiens
cactgtgttgcaagactcctgagcagaggctgtccctggagctttggaggtcagaggccatgcagagcccttgtgctcacagacgacttctgaggactctgcctcttcagagctctgtgtgttgtgttgatgctgaggagtaagctccagggtctgcatggtccagctgcggcgctcagggacacactcgtgtacctcttggcctgggctgcacggtgccatgagctcggagtccttggccataggtccttagtttttttggttttttgtttttttgttttttttgagacagagtctcactctgtcgccgaggctggggtgcagtggcgtgatctcggctcactgcaacctccgcctcccaggttcaagcgattctcgtgcctcagcctcctgagtagctgggattacaggcatgcaccaccatgcctg

SEQ ID NO: 185015 - DNA, 288 bp, Homo sapiens
acctcgtgggttcacgccattctcctgcctcagcctcccgagtagctgggactacaggcgcccgccaccacgcctggctaattttttttatttttagtagagacggcatttcactgtgttagccaggatgatctggatctcctgacctcgtgatccaccagcctcggcctcccaaagtgctgggattacaggcgtgagccaccacgcccggccaagcctatgtcgcttttaagatgaatccaaaaagactgtgtgctactaggctacagaaagcagcattaagtctga

SEQ ID NO: 185016 - DNA, 174 bp, Homo sapiens
agtggtagagagagtgctgggctaacaatgggttacaatagacctactgagcatgcctgaccaagttttgaaaaagaaaacttccataatcaagtaagatacatccatctaccaaaaaacataatttagggtggaagaaagaagggctcttttaaaatgccaaccggttagttt

SEQ ID NO: 185017 - DNA, 307 bp, Homo sapiens
gaggttaagcggctctcctgcggtgcagagctagtgggcatagactcccaaatggacagtctttcctcttagccaaggtgtgatgttaaggaaggtgacataggagaacggggatctcagcccaagtgagtagaaacaggaaaagttagccgggcatggtggctcacgcctataatcctagcactttgggaggctgaggcgggcagatcacgaggtcaagagatcgagaccatcctggccaaaatggtgaaaccccgtctctactaaaaatacaaaaattagctgggtatgttggcacgtgcctgta

SEQ ID NO: 185018 - DNA, 545 bp, Homo sapiens
tagatcaaaacaattaaaaaatgctcctggaaggaaaaaaaaaacaatgctgttaacacaattaaaccaaacaagtaaaattattatagccccgaagagatacaacactgcatctgtaagacaggggcaggacaccatggacaaatgagcaggcagagaatgaaaactgaaccttgaaactcaatagaagttctactaaataaaaattcaatagaagggttagtctatgaaattgaggacatttctctgaaagcacaaatagaataggaaaaaatatatgatcattagagattcaatttaggaaacaaaatatgattgactagatttctagaaggagattaacaaaaaaacagaaggaagaagttattttttaaaaaaggaaagaaagaagaaaatattctggaagagaaggacacatattccccgagagtgtggaaaaactcaagctgtatttttcctctgccctcacatcaccacaacaatcaacagaagtcacagaagacttctgtgactacatattggcggggggtggtttcttcccacca

SEQ ID NO: 185019 - DNA, 291 bp, Homo sapiens
tttttggtaagttgtaagagttccttatacattctggacactagatccttatcaaactatgatttgcaaacattttctctcattctgtaagtcagtttccactttttggattatgcattttgatgaccaaatgtttttagttagaaattagaaatctaggccaggcacagtggctcacgcctgtaatcccagcactttgggaggccaaggtgggcagatcatgaggtcaggagatcgagaccattcctggctaacacagtgaaacccgtctctgttaaaatacaaaaaaat

SEQ ID NO: 185020 - DNA, 309 bp, Homo sapiens
gaaattcaggtataaaaaagcctaactgtggagttgttaggaagattaaattaaattcattaaaagctcctagttggtacctggctcagaacaagtctcagtgtatgttaatgcccactctttccacagagagcccatggtagcagcagagcccttgtgtaaggcagccccagattttgggacaatggctctgctgagaagccaagttgaaaggaataggggcagcaatctcaccaaactcagcagccaggcttccctgaatccccttgaggttaggcacaagaatagatgggtctagcgtccagttcc

SEQ ID NO: 185021 - DNA, 288 bp, Homo sapiens
tttccaaagtttatatagtactcgagtgagtaatttcttacataattgtactaataaaaatgttcacttcgtttgcaagtggtgagattttagactcttttaaacaggaaaacatgatgaagattacaaaattaagttagtctgactcaaaatgagatgtttgataaaatatggacttttgtgcaatagttgtgtagtgttaattgtatgggaatcgtcataaatttctgatatctcttatctgcccagttgtaaaggtattgactacctgtggtgatacattttata

SEQ ID NO: 185022 - DNA, 193 bp, Homo sapiens
aataaaataaaataaaataaaataaaataaaataaatctttcaggagtgtaacgaaggctgaccatagtccagaacaccatgcctcagcacataggccatttaacctgggcggtctggtcacactgagctgtcactccacgccttggagaagcagggtggtcagtgcgacaggctgtcactgccagtgccacg

SEQ ID NO: 185023 - DNA, 276 bp, Homo sapiens
tgagtgcatggggggacgagatgagatcagagcggcagaaagatgaatgtgcacaaaatgttaaactgataaagaccaaatagctgaaaagtgatgggaggagaacgtatccgtgatacatgacagattggagggctaagatctcaaacacagcagccccagttaagaggcattgctgcagttagattttagactgattagaatggagacaaaggaatgggtatgaaggaaaagctccttcaaagcagacggactaatgttgcttagaggaaaaaa

SEQ ID NO: 185024 - DNA, 118 bp, Homo sapiens
agaggtacactggttggaaagagttgagagttctattccttgtgcttgaaacaggctgagtaggaagagaacaggtgacaagaaagcagtccctgtcagccccagggtgggagatgag

SEQ ID NO: 185025 - DNA, 495 bp, Homo sapiens
aaaaatgtggaacgaactggattttactagaaaaacaatgtacttaggaactcctggtaggaactaaaacatgtttttaaaaatcctgcaaattttttaccaccacagtataaaaatactaacggcttatagattaataagttaaatctctgaatctttgacctttgacaaacgtcagtgttatgctttcactacagatagatgttttcctttggattgcctgataaagtatgcacagtatattgaaatcacttgagataaaattttgcaaggagtcagaaggttatgaatgcttgacatacttaaatttaggatcactactgtatcataaaggagattatatttcacagctatctgttgtctggaagctgtctaaatagatgtgttatttgtggacttacggaactggcaaggatcagagctcacatgcttcagcctccaactcaattctgcaatcggggccacatcatcactgccaaatgaccgggtaccgcc

SEQ ID NO: 185026 - DNA, 424 bp, Homo sapiens
cctgcccttagatcctgtgtgctcccactttacacatagctttaatctgattggttactggggaagggcaaaagacatggatggcagctaaaggcaggggaagaaacaaaccagcaggttgttaacatatgcatgtgtaagtgtgtgtgtttaaatgggtcatgaagaagccctacagtcaaccagcactggaacaagcatggggccatttgtggagaggcacatgtttctccgcagcaatccctgaggtctgcatgagagaccctggaataatgaacactctagcagggatcttgagataccatggcactgtgaagtgtgttcagtttgtgctttcaggaagcaattaaaatagttttaaaaataaaaacttctagaatagtacactcaactttcacaatcctaagacttccagactgtttgc

SEQ ID NO: 185027 - DNA, 180 bp, Homo sapiens
tgagtaatgaattcttaaggttcagctgataatgtggacttagtttaattgcattagatgtttgcctctcacttaggggtagttatatttttaggctaaatttttattatataacgcagaattgagttgcttcaaagaaaaataggttatcattcttgcacatgttcttgattaggatgt

SEQ ID NO: 185028 - DNA, 341 bp, Homo sapiens
tttcttccaggtagagaaatattagaaacaaaaatttccatttctaaagagactttcaaagtgatttctccattaaagggacaatgtgaaaagcgtactttttccttgaactccaaggagttgcctttttgagccattaaaggactacatgttgagacagtaaatagtaataaaaaacggtatcttcagttttatttatttttatgaattagaaaacaaaatctgaataaaatggaaaaagcagctataaaaaaggataattttcctatcaatctgactcaagagtagtacaattatcatacgtggtaatatttatacttaagtgtggatgtgtcttacat

SEQ ID NO: 185029 - DNA, 129 bp, Homo sapiens
cccaggtccccaaacttgagagtatacagtgtccctgggaatgagggagttcctgagtgagcggaaagcatcttatctctgctcctctctatatcaaagacccatccaggtcttgaggcctttcctgtc

SEQ ID NO: 185030 - DNA, 537 bp, Homo sapiens
cattcacgatggacacagtgagccgaccctgctttgctgctgctaccgtggcatgcagaaccggaaacctccccaacacatattcacataaagcaaccatttattctgatgtctccctgctttgcaggtttactggactcatgcgggtggtagacacgcatgtgtgtgggagtcacgttttctgaaggacctacaggctgggatcccagaggattcttcacttatgtttgactcaacactaagggtgagtgaacacctgggggctggctggttgtctccttccctacctcccctacacattagtgtcttgaattttctgaaatcatgaaggcctcatagttgttggacttaatcaatgattactgtcttccaccaaagaaggactttcaagaaaccaaagaagaagctgccaggcatcatagaacttagctttgaaaattggagagtgtcacttttctatgacattatattgattaaggtgagtacagacagcccaaatcatggggaggggcctccacaggttgtggttgttttgat

SEQ ID NO: 185031 - DNA, 358 bp, Homo sapiens
cattcacgatggacacagtgagccgaccctgctttgctgctgctaccgtggcatgcagaaccggaaacctccccaacacatattcacataaagcaaccatttattctgatgtctccctgctttgcaggtttactggactcatgcgggtggtagacacgcatgtgtgtgggagtcacgttttctgaaggacctacaggctgggatcccagaggattcttcacttatgtttgactcaacactaaggcaatgacccagagctgcgggtggaattctacactggggcaaatgaggactcagacatcgccttccatttctgagtgcactttggccattgtctggccattgacagccatgtgtg

SEQ ID NO: 185032 - DNA, 319 bp, Homo sapiens
aggagacaggaaggaggcaggaagagatggtgaagcagcttaagaagcccaggtatccagtaacaggtagtgagattgaatcagtaataaagtctcccaacaaagaaaagtcccaaactggatggctcccctactaaattctaccaaatgtataaagaactaacactaattttcttcaaactatttaaacaaattaaagggaagggaattctccctaactcattctatgaggccagcattatccttattccgaaaacagacaaggatgcaacaacaaaaaaacaaattacagacccaaatctctgatgaacatagaccc

SEQ ID NO: 185033 - DNA, 434 bp, Homo sapiens
gcctccataatcacatgagccaatttccctagtgaattccctctcatccatccgtatctctctctatctgatctatatcctatttgttatgtgtctctggagaaccctgactaatatgtactgtagaaaagcctcctgagacttagacgctatgtttcctttgtttaaatgttgttgaattgatcataggtataatgcattagatttttcagaagaaagaaaaggtttattccacattacatctcttcagaagcctacccaaaggggatatctgttttggctatttattgcagtgtaataaactactctaaagcttagtagcttcaattagtgatttattatgtctcatgattcagtgggctgaccaagctgttcttctggttcatgtggtgttggctaggtgctggaatggctgtgttcctctgagacttgga

SEQ ID NO: 185034 - DNA, 614 bp, Homo sapiens
tcagccttctgagtagctgggattacaggcgcccgccaccatgcccagctcgtttttgtctttttagtagagatgggtttcaccttgttggttaggctggtcttgaactcctgacctcaagcagtccacctgccttggcctcccaaagtgctgggattacaggcatgagacaccgtgcccagccaagaagaaaaaacattcaagcattccctataaatatttgccatgaggaactacttgtagttcccataatatgacacattctctcttgagacttcccatggatattctttttcctagaaagttctacccttattcattctctgacttaattctattgctttccattctcagctcactcttcactattccagggtgttgtcctggaccttccctggctagactgagtgtccctcttctctactctcaatgtttatcatagcagtcttcaccttttgttgtaattatctgttcactcataatctgtatcatttgactataatgtttttaagggcagggattatatatttatatttccgtctttggtgccttacttactgcctgaaagtttgacacataaggcgtccaccagtgtttgttcagcaaataatagt

SEQ ID NO: 185035 - DNA, 509 bp, Homo sapiens
taacaatatgctaagcctgaccccaacagctcaggtggagcactaggccaaagttctaagttcaacaaatgacaaataaacagtcttgagatggttaattttatgtgttaatttgactgagctaagagatgtccagataggtggtaagacattatttctgggtatgtctgcacggatgtttccgaaagagattatcctttgaattggtagactcaagaaagaagatctgctctcaccaacatgggcagcatcagccaatctcactgagagtccaaatagatccaaaaggcagaggaagggcaaattccccctcactcttattgagctgggacacccatcttctcctgccctcaggtatcaggcttcctggttcttgggcctttgtgctttgatacttacttatactgcagccctttcccttccaccccataatcttggctctcaggccttcagactcagactgagttatgccaccagctttcctggttctccacgttgcagatggcaga

SEQ ID NO: 185036 - DNA, 528 bp, Homo sapiens
gtaaacttgatcattgaatgcctctgggttaaaaaaaattacatactttggaaaatgacttgacaaaagtttaattagagaaaggctgattagatagttatgctattgaatctctttatgttatcgaatctcttatacttggaggaggaggggaagtgtataattcaattcaacgagcttgtgttgagtgctagacgactatgttgtgtgctgggaaagacatggttagttacttccaggagactgagatatataactagttgctcattttttccagaaacttaattaatgcattttgaatttaaggcaccttattttggtataattctcaggatgcttatgaggttttagtgggttctctttactcttgctgtgtgtttttgtttatttaatcatcagatattactgcacttcaaataagggccaggtaatgtgttaggtattgggcattcactgttgaactgtgtcactcagttcttcatctcacagaatttatcctttaatggggtaattagataggtaagcagg

SEQ ID NO: 185037 - DNA, 203 bp, Homo sapiens
ctgaggataagagagaacaccacctggcaatcacactgtgccagaacagtgtctgttcctacactggcaaacacttcgttttaaatgcgcattgggtagagtattaggaagggtcttgattcactagtgaggaataattagtcttagaataaatggtatgctggtcctgcctaacaaattttcaaatgtttaaagatacaaaa

SEQ ID NO: 185038 - DNA, 603 bp, Homo sapiens
tcgtaatagtgccctagttttattttacttttgtcactgtgttatgtttttaaatacttggaactatgttcttactggtacataactgacagctatacacaaagcagcttaaaccaacacccatttatttgctccactgttctgtacattagagctgtagttagggctcaagtggcttctctgcttaaaatcttaaaaggctgagaggaaaatgtcaggaaggctgggctcttacctggaggctctgcagaagaatccacctccacgctcattcaagttattggctgaatttagttccttgtgattgttggactgacatccagtttccttattggctgtcagcaggaggctgttagggggtctttctgctcttagaggctggttgtgatttttcttttttggccccctctagcttagagccagcaataacacattgagtcccctttgcattttgaatctctctgacttcctcttctgcaatcagccagaggaaactgctttaaaaggggctcatatgattagactaggaccatccagataatcttttatatgctcagctgtaccatatatcataatcatgggcatgatatcttatggaattca

SEQ ID NO: 185039 - DNA, 155 bp, Homo sapiens
gttttctaattgcttgagctcagaacctgactcatgcttgactctttttctctcatcccatgtgcaatcattggcattctgtcagttctaacttcacaatatattccaaattcaaccagttcaaactgcgttcgcctgtatcactctagtctgaa

SEQ ID NO: 185040 - DNA, 396 bp, Homo sapiens
cctgatattcaaggaaaagtcagccaaaaacgtgagtcactcattagcctctttaaaaggtggaacatgctaaggcggggaaggtaaacagactcttgctatgttggattaagatgtacccttagatataactcttctctggaaatgaaaaaaattctctaaaaaatatagcacacatatccttgacccaattaaaatatagcatttcaaaaaggaagcagatagcacatggtttgtcaaataaatgactcaatagaaacgcatgaaatatatttgaatagagattgccaaatgttgttttttaaataaggaactcattaaagtctatgaaacagacttcagaaattgatttcctggagtgaataccacaaatgattctccagagcccacgaagag

SEQ ID NO: 185041 - DNA, 735 bp, Homo sapiens
tgtagagtacacccgctcaactgatccaatgcaaccaatacagtattggaagctttctacgaacaaggcacccagagagggctcggaggaagatgacagtgccaacgggcacagggagaatcgtgagcttactgcaccttcccagcaggcagagtgagcccgtaggacaagagccccctttctccgtttcccatctgccctgcagccccgaggaacggtccattctacagacaagaggcctgaggctcagaagcaaagcaacttgccacaatcgcatcaccggagaaagtaccttcaagacagtcctggacgcggtggcttcacgcctgtaataccagcactttgggaggccaaggcaagaggatcactggatcacttgagcccagaagtttgagactagcctggacaacatagtgaaacccctgtctttacaaaaattgattaattaattaattgtttaaaagagactattcctcattcttttgacatcattttaaatgagaatgcagaatatgacattgtacatactgatatttgattccttttatataacctttcatgtattaaaaaactgcactgaaaatctagaattaagttaaaattggtgtgggttatttgtgaatggtgggattttttaaatgtattccaacacccatatattccaacttttccacacttccaaagtctggaatactttgaggatggggaggaaagatatgtttacggtccttggga

SEQ ID NO: 185042 - DNA, 278 bp, Homo sapiens
cctgctttggcctcccaaagtgctggggttacaggcgtgagccaccatgcccagccaaagattttagtacacttttaaagaaagcatcaaggattggtggtggggtggtggttgctgctgctgctatttcaacactatttcttctaagaggataataaaacactttgagaaagttgtggcttctttttttctttctttagcaggggaaagggatagggatactgaattgtagaatccctttgctcatgaagaatacaatgtatttctcaaaatgcaag

SEQ ID NO: 185043 - DNA, 441 bp, Homo sapiens
atcttcctctgtcatatccaaggtaggaatgtatgccagagagcaccttgccctctagcaatttcgactaagatgtccaagtagaatgtttccttttacaatcaaattactgtatttattaatttgctagaatccagtaaatcattttggtagctctggctgtgctatcaataaaaagatgaaagcaacaagttgattttttttaggtctactattgattgaaccggatagcttgccggttcaatcatctccttttatgaggattgtctggatggtaaagaatgagtcctaggtagaggtattcattttagtcagggggaaacaactttttcctgtaagattgaaggaaaggctacaaagatagatgtgggcctattgatgaatagaaataaaaataagattttatagataatttacacttaatgatagtatcttcagaaa

SEQ ID NO: 185044 - DNA, 540 bp, Homo sapiens
ctgttccagtacggatgtgtgtattataattccattttcgttaaacaaaacatactatatatattcactggaaatgtatttcaaagaaatctagaagtgtatatattctacagtgttaagagtagttatctgagggaaggtggaacatagagttttactttagactatatatttctagactagttggattttttcatactgagcacacattagtttttttaggcctggtaatattacagaagtcaaattacagaagtcaccctagctccccactcgccttctaaacctaattctttagcatggtgtgctgtgcccttcatggtctagctcagtttacctgcagccccatctcatcactcacctggatgcatccactctcaggatattctcaggattaaacttggggattacattttctgaccttcactttccctcccttatcttagatggaattagggagtttttctgtatgttcccatagctcccaatgcctaccttgcttttagcattttgacctaccctaccctgtagattgttgtt

SEQ ID NO: 185045 - DNA, 199 bp, Homo sapiens
atggagtagatggatggtgttgccaccaaataaggagaaagcaggtttgggggttaggtgatgagttcagctttggtcatgttgagttggaagctccagtgagacatctagatgaagcagtcccacaagaaactgggaatctgaatcaaagttcgtgatagaaacatagcctagaaaaagatttcggaaccatcagcct

SEQ ID NO: 185046 - DNA, 521 bp, Homo sapiens
ggtgaagagccagaccagtagatgatgaaggaacagggtagaagggcctgttgcccaataccctcatgaagcagagttgctgtactagttgagaccatggcatgacctagaaataaacttctatcttgttttaagtacctgttatttggggtcttcactacatgtacttaaacccattgtccaacaaatacaaagcaaatgagacaattttcagtcaagtggcaacaaataattgctgctacttggtgtctccaccagaaccataaaccatggtactaaaacttttaaaagctaatttaactcttatgtagaagatacaaatcccttataaacttttcattgttaatcctcttgataattttttttttattattttttttgagacggagtgttgctctgtcagacaggctagagtgcaatggcacaatctcggctcactgcaacctctgcctccatgattctcctgcttcagcttcctgaggagctggaattacaggcacccatcagcacacctggctaat

SEQ ID NO: 185047 - DNA, 335 bp, Homo sapiens
tataacttctgctactcccaattgcccagcaggaatcatggaaagccttcagaggataacttggcaaccagtgtgccagttttaacatctgagtttcagaaacctggtttaaaaaaatggcaaaatggcctttttctcagagtcccttgatctctcttcagataatttatgtatttaaaatgcctaccatacctatgtattacctaaatgacatccattccacattctggatagaaatttttcagcaacatggttgtcaatcaggttataaaagaaataatataactactgatattattactcaaaacagagatgttttaaatctaaaataaacc

SEQ ID NO: 185048 - DNA, 406 bp, Homo sapiens
aactcatggcggcggcggcggcggcagctgcttgggcgcggtgcggtgttgactgagctacgagcctggcggagggtgcgcgccgagccccggtccggccaggcccctgcgtgcgtcccaggctccgcacccctgatgctgcgcgggtgctgagcctgctccggccgggacgatggtgaagtatttcctgggccagagcatgctccggagttcctgggaccaagtgttcgccgccttctggcagcggtacccgaatccctatagcaaacatgtcttgacggaagacatagtacaccgggaggtgacccctgaccagaaactgctgtcccggcgactcctgaccaagaccaacaggatgccccgctgagccgagcgactgtttcctgccaatgttgctcactcggtg

SEQ ID NO: 185049 - DNA, 319 bp, Homo sapiens
actgtatagatgtgtgacggtgtggactgtatagatgtgtgcatgtaacaggtgtggactgtatagatgtgtgtgtgtgtgacggtgtagaccatatagatgtgtgtgcatgtgatggtgtggactgtatagatgtgtgtgtgtatgacagtgtggactgtatggatgtgtgacggtgtggactgtatagatgtgtgtgtgtttgtatgacggtgtggactgtacggatgtgtgacggtgtggactgtatagatgtgtgtgtgtttgtatgacggtgtggactgtacggatgtgtgacagtgtggactgtatagatgtg

SEQ ID NO: 185050 - DNA, 581 bp, Homo sapiens
ttgggactggttcatgcagagagttatgggaaccactggaggggaacttgacttggctcaaggaaacacagaagggttcctgaggaggtctaagctgagactgaagataaacaggtactagccaagtgagggagagaggggagaaaactgttccaggcagtgggaacagaatgtgcaaagactcagaggcaagaggatacttgtctgttagattttccaacatattcaactctatagtacctagagccatactgggctaatttcagggccgagatttccatttttctcatgaggagactggggctcagagagttttagtgctctgatttatatgacttgtctaactcagcttatatgaggaggagctgagatccatccagaatttaaggctcagatcagggctgctccttgaggggagccctgttctggggctagagctatgcctggatgcttgtcattggctctgctgttttgtgctgaacatgccatggtctttttcacaccaagggcaggatttggtgatatgactgggaaggtagagccctgcagtgtgggagtcagggagcaggcaggtgagaagg

SEQ ID NO: 185051 - DNA, 1662 bp, Homo sapiens
cccacgcgtccggattctcgccctgagcaacggcctgacgtcggtggagggaagcaggcgcaggctccgtgaggaggcaaggttctgaggagacaggccccggagcagcactagctcctgcccacactcctacctgctgccctgaccagagtcatcatgccacttgagcagaggagtcagcactgcaagcctgaggaaggccttgaggcccaaggagaggccctgggcttggtgggtgcgcaggctcctgctactgaggagcaggagactgcctcctcctcctctactctagtggaagtcaccctgcgggaggtgcctgctgccgagtcaccaagtcctccccacagtcctcagggagcctccaccctccccactaccatcaactatactctctggagtcaatccgatgagggctccagcaacgaagaacaggaagggccaagcacctttcctgacctggagacgagcttccaagtagcactcagtaggaagatggctgagttggttcattttctgctcctcaagtatcgagccagggagccattcacaaaggcagaaatgctggggagtgtcatcagaaatttccaggacttctttcctgtgatcttcagcaaagcctccgagtacttgcagctggtctttggcatcgaggtggtggaagtggtccgcatcggccacttgtacatccttgtcacctgcctgggcctctcctacgatggcctgctgggcgacaatcagatcgtgcccaagacaggcctcctgataatcgtcctggccataatcgcaaaagagggcgactgtgcccctgaggagaaaatctgggaggagctgagtgtgttggaggcatctgatgggagggaggacagtgtctttgcgcatcccaggaagctgctcacccaagatttggtgcaggaaaactacctggagtaccggcaggtccccggcagtgatcctgcatgctacgagttcctgtggggtccaagggccctcgttgaaaccagctatgtgaaagtcctgcaccatttgctaaagatcagtggagggcctcacatttcctacccacccctgcatgaatgggcttttagagagggggaagagtgagtctgagcacgagttgcagccagggccagtgggagggggtctgggccagtgcaccttccaaggccccatccattagtttccactgcctcgtgtgacatgaggcccattcttcactctttgaagagagcagtcagtattgttagtagtgagtttctgttctattggatgactttgagatttatctttgtttcctgttggaattgttcaaatgttccttttaacggatggttgaatgaacttcagcatccaagtttatgaatgacagtagtcacacatagtgctgtttatatagtttaggagtaagagtgttgttttttattcagattgggaaatccattccattttgtgaattgtgacaaataacagcagtggaaaaagtatgtgcttagaattgtgaaagaattagcagtaaaatacatgagataaagacctcaagaagttaaaagatacttaattcttgccttatacctcactctattctgtaaatttgaaaaaaaagcatggatacctggatatccttggcttctttgagaatttaagagaaattaaatctgaataaat

SEQ ID NO: 185052 - DNA, 1943 bp, Homo sapiens
cccacgcgtccggattctcgccctgagcaacggcctgacgtcggtggagggaagcaggcgcaggctccgtgaggaggcaaggtaagatgccgagggaggactgaggcgggcctcaccccagacagagggcccccaataatccagcgctgcctctgctgccaggcctggaccaccctgcaggggaagacttctcaggctcagtcgccaccacctcaccccgccaccccccgccgctttaaccgcagggaactctggtatctcagggagttgaggaccttttcttcagagggtgactcaggtcaacacaggggcccccatgtagtcgacagacacagtggtcctaagatctaccaagcatccaggttctgaggagacaggccccggagcagcactagctcctgcccacactcctacctgctgccctgaccagagtcatcatgccacttgagcagaggagtcagcactgcaagcctgaggaaggccttgaggcccaaggagaggccctgggcttggtgggtgcgcaggctcctgctactgaggagcaggagactgcctcctcctcctctactctagtggaagtcaccctgcgggaggtgcctgctgccgagtcaccaagtcctccccacagtcctcagggagcctccaccctccccactaccatcaactatactctctggagtcaatccgatgagggctccagcaacgaagaacaggaagggccaagcacctttcctgacctggagacgagcttccaagtagcactcagtaggaagatggctgagttggttcattttctgctcctcaagtatcgagccagggagccattcacaaaggcagaaatgctggggagtgtcatcagaaatttccaggacttctttcctgtgatcttcagcaaagcctccgagtacttgcagctggtctttggcatcgaggtggtggaagtggtccgcatcggccacttgtacatccttgtcacctgcctgggcctctcctacgatggcctgctgggcgacaatcagatcgtgcccaagacaggcctcctgataatcgtcctggccataatcgcaaaagagggcgactgtgcccctgaggagaaaatctgggaggagctgagtgtgttggaggcatctgatgggagggaggacagtgtctttgcgcatcccaggaagctgctcacccaagatttggtgcaggaaaactacctggagtaccggcaggtccccggcagtgatcctgcatgctacgagttcctgtggggtccaagggccctcgttgaaaccagctatgtgaaagtcctgcaccatttgctaaagatcagtggagggcctcacatttcctacccacccctgcatgaatgggcttttagagagggggaagagtgagtctgagcacgagttgcagccagggccagtgggagggggtctgggccagtgcaccttccaaggccccatccattagtttccactgcctcgtgtgacatgaggcccattcttcactctttgaagagagcagtcagtattgttagtagtgagtttctgttctattggatgactttgagatttatctttgtttcctgttggaattgttcaaatgttccttttaacggatggttgaatgaacttcagcatccaagtttatgaatgacagtagtcacacatagtgctgtttatatagtttaggagtaagagtgttgttttttattcagattgggaaatccattccattttgtgaattgtgacaaataacagcagtggaaaaagtatgtgcttagaattgtgaaagaattagcagtaaaatacatgagataaagacctcaagaagttaaaagatacttaattcttgccttatacctcactctattctgtaaatttgaaaaaaaagcatggatacctggatatccttggcttctttgagaatttaagagaaattaaatctgaataaat

SEQ ID NO: 185053 - DNA, 112 bp, Homo sapiens
ccatgtgcagtgtgatgttttgtgatgaaggaaatgttccatatatccagtgtccgataggtaactactagccaaatagagctactgaggacctgaaaagctagtgcaatta

SEQ ID NO: 185054 - DNA, 576 bp, Homo sapiens
ttgggaccacaaggggcctcaccctacaaccatcctatccttgagcttctggtaaaactgcaggggccagcagtgtagcctcaggtctcactccgcaacctgcagccctcccactcacacctgcagaaaggggaggtatggccttcaccaagaatattacattatatgcatcaaaaggaaacaaacaaacaaacacagaggacaaaacacacacacacacacacacacacacacacacacacacacacacaatttatttaacagaaagttggacaagacatttcattatgaaaatatattccaaaatatgtagacctgtttgtaagtaaacttctttatatagttttttacataatttcaggtgtgtatcactcatgatctagctagatcactgacttgcttacagcacctggaaccttatacagtactgttaagattttttttttttttctggagtacatacatcatggatcaggtagtggcatctgctggcaatgagtgatattgctttctaattctataggtggccaggcatttcatcacagtacatccctggaaagtggatcatggtgttgc

SEQ ID NO: 185055 - DNA, 341 bp, Homo sapiens
taaataaacgcaatactacatcagactgaggtgtttcttttgaaaaaatacaggattggcttaacattcaataatcaaaataattctccattttaaagaattccaccaaggaagaattccataattcaccatattaacaactaaaaaagaaaaaccatatgatacagaaaaaagcatttgagaaaatccaacattcattcctgattttaaaatctcaggaaactagggaagggaaatccctcaacttgataaaggtaatctaccagtaacttacagcaaacatcgtacttactgaaagaaggcaagaagttctctctgcctctactcttgtgtaaactgtt

SEQ ID NO: 185056 - DNA, 461 bp, Homo sapiens
gagaaataaaaaatcttggacaatgagcccaagtaatttaagacattcacagttgggctgtgggttgctcttgccaatgtgcagatgcaggctgcatatgttgcagggtcctcctcattcattcctcaaacatttatcaagcatcagtgatatgcccaaacgcttagaatatagtgctaagccagatgggttctatgggaaaggaaactcaatagtaatgataattatgtgccaggcattttctacatgctttccctgtgttatctcatatcatcccaacacagctataaagaaagtgctatttttaataaacttcatttttagagcaaagtctaaacctctgttttaagttcacagcaacattgagcagaaggtacagagatttcccatatatcctctgcccccacacaggcattgcctctctcattatcaacaaccctcactagagtggtacattcatt

SEQ ID NO: 185057 - DNA, 125 bp, Homo sapiens
caatttaatatctttttatttcaactgattttccttacaagtacaacagaaccatcaagtgcaaaaggagtaaaaggtgttctgcaaacaaaagcaaaggggacaaacccaaaccaccacagctc

SEQ ID NO: 185058 - DNA, 507 bp, Homo sapiens
cagtggatttgggttgttcttttaaagcctgacaggtaattctgatatacagccagggttgagaatcactgatatagactaaatggcatgactcaatttggaggtggacttattaataaggttggatgaaaggttgttccatttgtcgtatttgggtcaattttggcaagttcaacagataaagtacctctcgtttttaaaagatatactaggtcgggcgcagtggctcaggtctgtaatcccagcactttgggaggctgaggcaggcagatcatgaggtcaagagatggacaccatcctggctaacacagtgaaaccctgtctctactaaaaatacaaaaagttagctgggcgtggtggcgggcacctgtcgtcccagctacttaggaggctgaggcaggagaatggcgtgaacctgggagacggagcttgcagtgagctgagatggcaccactgcactccagcctgggcgacagagcaagactctctctcaaaaaaaaaaaaaaa

SEQ ID NO: 185059 - DNA, 589 bp, Homo sapiens
cagtggatttgggttgttcttttaaagcctgacaggtaattctgatatacagccagggttgagaatcactgatatagactaaatggcatgactcaatttggaggtggacttattaataaggttggatgaaaggttgttccatttgtcgtatttgggtcaattttggcaagttcaacagataaagtacctctcgctttccaactgacacttacattattaatcacctgtatttctgtgaattgctatagtagtgacagttggggaagagaagttgctttttaaaagatatactaggtcgggcgcagtggctcaggtctgtaatcccagcactttgggaggctgaggcaggcagatcatgaggtcaagagatggacaccatcctggctaacacagtgaaaccctgtctctactaaaaatacaaaaagttagctgggcgtggtggcgggcacctgtcgtcccagctacttaggaggctgaggcaggagaatggcgtgaacctgggagacggagcttgcagtgagctgagatggcaccactgcactccagcctgggcgacagagcaagactctctctcaaaaaaaaaaaaaaa

SEQ ID NO: 185060 - DNA, 136 bp, Homo sapiens
tcacatatttttaattagctccttttgggttctctacccctcctctcaatgttcctaccccttcctattcctcttattctccagcagactatccccttacctcacccagaaaacagacaagtcactggagaataag

SEQ ID NO: 185061 - DNA, 708 bp, Homo sapiens
tttctaacagatcaataagcttatcacagtatgacagcaaaaagaaatgagactcttggattctatttctctttcctatcttaaaaaacatttcctcttcccgcgaacatgtgttctctatctcttaaatttaaaaaggagtagtttctaaaagagaaccagtaggaaagaatcaggaataccagcaaaagtcaacatcaaagaagtcagtatctgatcctctcttaaacctagcaggagtggagctctctggccaaggggtaaggcaaaagcaatgtgcaggttataaatgtcccttcaagctcagttactccggtttacctctctggggtgagcctctaacagctctggctcgccggaatctttcctccctcggctccagcacacactttccatagcggccgcgttgcaatttcaaagagttctcctttccacgtaggtcacccaccgatggtaacctacatgcacaaacacactcgcacaatcacaacagagaaaatgggacatacaggaaatggcccgggtggaggcgaggacgggggtggggataggactttgtctttactctggtgttgctcccattgaaacaagcacatggactttcatggaactcatgaccatcctgaaataacagaaaagtcgaacgggattgaagaaaatcctttgcttttctaagttcgaagaacactgggccgctgaatggaaggg

SEQ ID NO: 185062 - DNA, 555 bp, Homo sapiens
ggggcccattggttgtgagaggagggtctggtgaaattccataccgattgtccgtgtgtgagctgctgtaccatagcctccctgcagaaccactaacctgtcaaatgcagaaatagttcagggacagagctgttaaaggattggcgggttaaagaaaacagtgaatcccaagttttgttaattggatttttttgtttgttagttatttgttttgcttcattgtcttcatcacaccaggggcctccttaaatctggtggaaaaatttccttggaaaacaattcagtgtttgtccatagacttgggagggagagatgctagatgctggaaagtcttgcttattactttggggacactgagatgttcccttcaccatgtactttgagacacacatcctggttgagttcaggcaaggatgcctaacagttgataagaaaactgggaaagatagaagggatttgtaaggtaagtcagggtgagtgaaaacacatccggtatgctggagacctagatgcttgactgccactcgctcctgtcacctcagtcaatctgggtct

SEQ ID NO: 185063 - DNA, 176 bp, Homo sapiens
acgtaggtgggatcttttaagaagcagccttatctagattgggaataagctattatagttttaggctgtgtggatctggtcaacttttgtgctgcctacttctctttgcttctacaactgggcattgctgcagaaaggaagaaatatggaagtgacttcagctttgattttcttcc

SEQ ID NO: 185064 - DNA, 448 bp, Homo sapiens
ccattcatccactcatccactgattcatctacccactcactcaccttccatctatccacctaacaatccacccatccttctactcactcaccattccatccttcccttcatctgccgaattatccatctgtttatctatccatccacccaatcacccatccgtccattttatccttctatccatttatctacccatctatctatttacctactccctatctacctttccgtctgtccacccaatcatccatccagtcatccatccacccacccactcatctacccattcagccttccacctatctacctaaccatccatccatccatccatccatccatccatccatccatccatccatccatccatgtatccaccaacccaccaggttggagacaaggtggtgacccaaatagataaggccattgcccttgtagaacttacacctaa

SEQ ID NO: 185065 - DNA, 467 bp, Homo sapiens
gtgctaggaattcggcttagactgtcgaccaggttgcccacggagggtgaaccggcccaggttgcgaatagagcagatgaaacatctctcctatgctgatcagtagtgggattgcacctgtaaaaagccactgaactccaacctggacaacgcagtgaaacccgtctcttgaaaatcaaaaattcaaagaatatttttaggctgggcacagtggctcatgcctgtaatcccagcactttgggagaccaaggcaggaggatcacttgaggttaggagtttgagaccagcctggccaaaatggtgaaaccccatctctactaaaaatacaaaaataagtcgggcgtggtggcatgcacctgcagtcccagctactcaggaggctgagggaaaagaatcacttgaaccctggaggcagaggttgcggtgagcccagatcaagccactgcactccagcctgggagacagaa

SEQ ID NO: 185066 - DNA, 577 bp, Homo sapiens
ctgccttcttaaacacaggagttcagccctcggttctgtgtagacggttgtatgcaggaagtgcacaggcagaatccatgggctcaaggaacagctggattttttaaagctaattaacaatgttccatttcagggctctgggtagaaagctctgacaaagccactgttcactaacgtgctgtgtgcttagtgatgtcattctgtttgtggtgtaagtacctggttaaaattaagcttttctaaatgcctcccttatagcattgtttcagtacccaggactaagaactttgagctttttagattatccccagaggagaaggagggagtatagtatgtaaacacacacacacaacactcacaaacacacaggcacacaagcaagcacacacacaccacttattttgagactctaacaatgaaaactgacaaccatgtttcctagacaaaaactatagactctaatttttttttaagttacaagaatcaaaagactaagcttatttttgctgatctacagatgagaattaagaatttatctcggggctgggcgcggtggctcacgcctgtaatcccagca

SEQ ID NO: 185067 - DNA, 418 bp, Homo sapiens
ctgccttcttaaacacaggagttcagccctcggttctgtgtagacggttgtatgcaggaagtgcacaggcagaatccatgggctcaaggaacagctggattttttaaagctaattaacaatgttccatttcagggctctgggtagaaagctctgacaaagccactgttcactaacgtgctgtgtgcttagtgatgtcattctgtttgtggtgtaagtacctggttaaaattaagcttttctaaatgcctcccttatagcattgtttcagtacccaggactaagaactttgagctttttagattatccccagaggagaaggagggagtatagtatgtaaacacacacgtgcacacacatgccccctcacccacacacatgcacacacacgccctcacccacacacctgcgaacctatga

SEQ ID NO: 185068 - DNA, 686 bp, Homo sapiens
ggtggcatgtgactgtaatcccagctacctgaaaggctgaggcaggagaactgcttgaaccagggaggtggaggttgcagtgagccgagatcacaccactgtattcccgcctgggtgacagagggagactccatctcaaaaaacaaacaaacaaacaaaaaacaaacaagcaaacaaaacacataagcacagactagggaaggtttaaaaacaaacagatgctgagagtataatctggttcagtcttttaaatagcacacactgtaacccaacaatccaatcccactcctaggaacctaccctacagaaacaccagcttaagtgactaaagatacatctctagcatatttaagacagcactgtctgtaaaagcaaaaagggcctgaattctaggcaaataaatattatcagcaaatgcagttatgtgttaataaagaagggggcacttcatgcctttaccttacagagggtcctgaccttctgcgcatgtaaatttgtgacccttgccataaacaatttccactgttaggtttcttccgagacagagaagattcacaactcatgccattaaggcagttaaggacaaccaatatacctggaagacggtaatcttccaagttacagaggatcagaaatccaatgcatttcacctggataattcagactcaaaagttcaaatatttatc

SEQ ID NO: 185069 - DNA, 502 bp, Homo sapiens
ttatatgttcttgcccacactatttgatccactgccacactctatgtcttatacatatatgactccaaatctctctcctgagctccagatctaaaaatctacatgcttagaagacatggaaaactcaaataatgtgatactcttgttatttcccaatgatataattattcaactgcttatccaaaccagaaacttgggagtcaaatcatgttttttattcatgtctcacatccaactgatagtcagctctgtctgtcctgcctctcaaatgtcattcctctatgattctctatcacagagatgcccatttgggttcaggcttccattgctcatcccctgcactattgaaattaccctcaaattagccctctaacatccaggtttgttctttttaatgtatacataaaacacattttagaatttctgtccaaaaatcctcttctttcatagttttctcctgtttattaaaaagtctaaattctgaatttaccacataggcctt

SEQ ID NO: 185070 - DNA, 320 bp, Homo sapiens
cttagctatcacatttctccaaagtgtggtttgtatcaatacttctgtttttgacctaccacttacttttcaaagcaatttattatgttttaagcatacagaaacatgtagagaacaatatgatttttttaaatgttaatgtttttctctcatttactcatttatagagaaatataacatagaattttccattttaatcattttgaaatgtatggttccattaatgattcccactcacttttaaatgtttggaattgagagaactcttactggacagggatgagggtaaaagccaaagtctgccagtgtccatcctcaac

SEQ ID NO: 185071 - DNA, 523 bp, Homo sapiens
tgaagctcccacctaatggctaaatggaaacttaatgagaaggggaagtgggctagttgtgctctgaaaagagtaacaactcatttatggatagcagtctctctaaattccttccaaaacctaaaattataagactggggtataaaatttaaacaacatttgtctcatagtattattcaaaaggatattatagatctatttaaggtatcagtgttttacaagatcctgtttgttgtctttagggaataagcctctctcaaattttccctatttttcctttatgttctacaagtcctaaaatgtttggactatttatacagtatttccaaacaatccatttgaaaataccaatgtaggtaatgatgtaagaatcaccactgaacactagctgctctacaggtcacaaaactggctctgatcaggaatgcagtatgatggagtaggaaagtcaaaggctttgaagccaaagagaagttggattcctgatttggtcactcattctgtgtgtgtgtgtgtgtgtgtg

SEQ ID NO: 185072 - DNA, 367 bp, Homo sapiens
gaaaaacagcagtcatgcttactgctctgtaagcaataaaagtagattgaagtaggggccccctgatctgggtggtcagggaagacctccctggggaagcctgccttgagaatagctagagccacacgtgcaaaggccccagggcaagcatgaaattggaaggtcaaggcagccagtgtggcgggagcatttgggtgatgggggaagatgatgaggcccaagatatgttgaagaactttaagctggaaagcagctggaggtgatccctgtttgatgtaatccttctggctgtgggtggagaatagaatgtaggaaggcaaaggtggcctggggaggccagagagggatctcatgaagttgttaggat

SEQ ID NO: 185073 - DNA, 392 bp, Homo sapiens
catgagctggtgtggtggcacacacctgtagtctcagctattcgggaggccgaggtgggaggatggcttgagcctggaaggtagaggttgcagtgagcccagatcgcaccatggtactccagcctgggcaacaaagccagaccttgtccccgtccacttacccccaaaaaactgtggttctgaaccacagcaactgagccgagcacaatccttctgtctctctaagacccagtctacactgagtagttctgttgatggcactgcttgatgggcctgtaactgccacaagctctggaaaaaccaggtccacagcttctcagagccttttagcttcactgtgaaaggagcaagagcacaccagtgaccaggtgttcataatttctctgcaaatg

SEQ ID NO: 185074 - DNA, 577 bp, Homo sapiens
ccaagtgatagaaagataggtgcccccatgcttcttgcccaggaggaggtcatatctagtggccagagggatgagtaaaaagccattaaaataaaaagtagtgcatgttataataaaggtatgagtaatcagccatgagaaccagaggagggagtaattaaaaataataataataatatgcctggaagtgtcagtgtttagcagagaaagtaatattccagccagccttgaagaatgagtaagaataataagagttaataattattgaacatttccagtgaccaggcattgtatacattcattatcacatgatcttagtagctactattattttctcaattttgctgatgaagagcagaggttcatagagcttaaacaactaggatttccctacctaggatatggtagaggtaaagagtattccagcgggcagcagtagctcatgcctgtaatcccagcactttgggaggccgaggcgggcggatcacctgaggccaggagttcgagagcagcctgaccaacatggagacaccccatctctactgaaaatacaaaattagccggaagtggtggtata

SEQ ID NO: 185075 - DNA, 533 bp, Homo sapiens
caaacaccagctgatgttagcaggaacccagggtgactgctgaattcttcagccagggtcacattggtgctttggtcatcaaggccaatatttcattgcattcacaccaaagacaaacagggtctgtcctgcatccctcttgagtgtggggtgtttctgtcctggcagctcagtggcttctcaccgtgtcgtcaggatccattgaccaagggtaatagcattgggggcctttactctctaaggctaatagcactggggatcttcagtctctgaggccaacagcattggggtctgctctctgaggcttaatgcactgtggtctttcttctcccagacagaggccactgctctgtggggagccctggatggcggggaggttggatcccttttctgcatgtggccttctgggcctggggaggtcgttctctttgtcctccatattgactgggaacaggtggttcgggctgaggagtggcccaggaatcttgctgagaaggtggatgcgggcagctcggcaactgcaaatctgaagt

SEQ ID NO: 185076 - DNA, 304 bp, Homo sapiens
gaaggaggaaaggtattctaggagagtggcaggttggatcaggacggagagatatgagagtgtagggtattcacttatgattcaaaaatgttttgcatcatcttccatatgtgaacctccaattttggtttgaacagtgagcaagacagaaatgatctgttcctttactgagcttgtgttcaagagggaggaaggaagggaggaaggaagggaaggaggaaggaagggaaggaggaaggaagggaaggaggaaggaagggaaggaggaaggaaggaaaggaggaaggaaggaaaggaggaagga

SEQ ID NO: 185077 - DNA, 176 bp, Homo sapiens
gtgtcaggtgatatctcacagtggtttaaatttacataattagagatgatgagcattttttatatactttttaatatacttcttggccatctgtatatcttcttttgagaaatatctattcaggtccttggcctatttttttttcatttctttaagccacacatatttattgagag

SEQ ID NO: 185078 - DNA, 267 bp, Homo sapiens
ttgagccttgattttctcatctgtgaaatggtgccagacctacctaagagggtggctatagagttgatcttctctatggcagtccctagtacacagcgtggctcaagctaattgttccgcaaagatcacgtcctcccttcctttctgtactccgcttcccttgtctggaacatggaagggttcaggagctgatctctgctggccttcctctcaggccagctttccatttctgctttctgggcgggtattcctggcaaagctatcagg

SEQ ID NO: 185079 - DNA, 242 bp, Homo sapiens
tgaattcaaatttaatctttattctgtggccagtagaaatccaatgaaatgtttctagcaggaggggacaccaataaaagctgctctctggagatgaatttgacagtgtctgcaggatggggtgaaggaaaaagaactcagagcatgagtccaggagtcactggggtcaaatgatccctcgtgttcaaggcacatctctgcccaggtagaacagagcctttcccagcataacgcatcttttt

SEQ ID NO: 185080 - DNA, 155 bp, Homo sapiens
tcctcctgcatgttcatttgaaaatgttctcttttggtgtggaggcaaatgagctgattatattgagctccgtccaccaatttatttatttatctaataaacattttaatgaaggggtatcaggcacgtttatgttttacccaagagacttattt

SEQ ID NO: 185081 - DNA, 327 bp, Homo sapiens
ccaccaaaacctcctctcccactctaggtgctgactgtcccattatgagaagtcagtttggctttctctttccacatgtgaggaaacagcctccgaggccaggtgggggcaggtcagacagcccaccgagcatgccccgctccatggtcctgcaccacgctggcagctgccacacctggccgctgacctgagaacacgctgtggctttccactagactgtaagctcctgaagtctgttttacatttatcctcaaagaagggggccgggctgggcccaggccagtgatcaaagcattacccatgatcactgcccaattcttgtctgtc

SEQ ID NO: 185082 - DNA, 263 bp, Homo sapiens
ttccaggattcactataccaccatgaaaatgtagactattattagttggaagtctcccacgacaagttatcttgagaggacttctacagtaaaacaagcttatgtggttttacagattaagttagatatcatgaaataacaaaaacctaaggagtgttcttcagaggtagaatttattttgtggtagctcgcattgtgcttaaatatgcttgaattaatggaaggcaggtttaaaaataagatggggagggagtagtttaaat

SEQ ID NO: 185083 - DNA, 217 bp, Homo sapiens
caccagatctctgagatatggaaggggtgagaaagtgcccaaccatgtgagtgccagcacggctgtgctgtgggttcccggagtcacatggaatatgctgctgccgctcccaactaccatctaggctccctggaggaggcgtcacacatcgctgcccactgccacgtaacttgtggtgtaacagcaacttccccctgggtgctttccctcctcagtg

SEQ ID NO: 185084 - DNA, 307 bp, Homo sapiens
atatatactgacatagagacggatccatatgttgcccaagtggtcttgaatccttgggctcagcgatcctgcccactcagcctcccaaagtgctgggattacaggtgtgagactccacgcccagtcttttcttttttcttttttagcgacagagcaagactctcgtctcaaaacaaaacaaaacacctggtgttttgaaaaatctttacattttttcttagaattcctaggatagaaagagtcttctttgccttcagaactgcactataagatcctggaagaataccaccctgccttttaaaagaca

SEQ ID NO: 185085 - DNA, 327 bp, Homo sapiens
ggcagcccagggctccctgcctggctttggaggtgtaaggtgtttgaaataacattctccaacatgctcaaagtgaaaccagcttcctttgggaacatatggagaccacaggcacttcacaggggctgatgaggacccaccaactctgctgtgggctctgtccctgccctcggagctcatagcctggtgaccttggcattcattattttcattccagttctcagcacagcgcttggcacatagtaggaactcaggaagtgtttatgggatggaatggggtgatgatgttgaggcaagatgaagggtatgaacggagatgacatctgc

SEQ ID NO: 185086 - DNA, 531 bp, Homo sapiens
caggaactaccacttatgcggcaattttgtcccttgcttgagcctcattttccatgtctataaaaatgggaattaataccattttcttttccctgccccacaaaattcttatggggatcaaaagtgataatgcatatgaaaatggtttgcataattctacactgtctgcaaatatgagccatcagcactattaaaagtgaggcaatagaggattggcagtgcactgacagtctgggaaagtggcgcacctgccttcaggcaggaactctgttattcattcatcaataaagaacaaaggcttgacaaaataatcatgagataagaaataagatcgtttcagccacccactggctggagctgaaggagaactgtgataaattgtgccttttgttatgcaggtgccatcccacctgtgtctgtgtgccttaaatgaaggaaagtaataaaagtaataacaagagcaggtactgttgattggatgcttatctatgccatgtaccagcaccttaatttaccatctcttcctttaaa

SEQ ID NO: 185087 - DNA, 179 bp, Homo sapiens
ttcttcagctctgtaagctggaccctgtggctggagtctggccaactgcagggacaagtttctattattatgtaaatggagtcccagtgcggccttggaagagtttttggcacagggtaaccctttgtctgccaaaaggtagcctctccctttgcttcaagcccagagcgtgcattgtg

SEQ ID NO: 185088 - DNA, 255 bp, Homo sapiens
acgcgcatctggggactgggatgctgttgcatgttatggttagctcctcattacatgctggtggagcagtgcatgctggggatatgttgcccgaaagggccttacttaggcatgatgcatctcggtgttaggaagcctctgcagaggggtagtttggtagaggtgacgtgtgtatgcatggcagtgagagagtaaatctctgcaggatgcaaagtgtacatctgaatttggaggtttggagggcatgtgtgtgta

SEQ ID NO: 185089 - DNA, 486 bp, Homo sapiens
ggctcacacgctgcctccttatccaagtcatggccatctctcctttgaactgatatcagggctcctatctggtctcccagcttccacccttgtcactttgcagtctgtccccatacagcaaccagagcagtcctcctcaagtcagatcatgtcactcactcgtagctcacatcgtttcatgtctgcctgtggcactcagaagtcagaatcacaggatgtggctaggccttaggaccctatatgatctcaacctacagtttcccttttgtcctcagctcccaccaccccctcctctcacactccagctgtactagcttcactgagcccacacatgggcttttcactcgctttgtcttctgtctagaacactcttcctctaaaaatatatatattgctattttctaatacacaaaaaaaaaaaaagaaatctattgcggaaaatacacgggcctagttttatttttcttcatattcaactctagtttt

SEQ ID NO: 185090 - DNA, 259 bp, Homo sapiens
aaagacgccaaaaatccagcgctgccctcagagaagggcaaccacgcagtccctatcttggcaaggaaacacaatttccgagggagtggttttggcctccattctaagtgctggacatggggtggccataatctggagctgatggctcttaaagacctgcatcctcttccctaggtgtccctcgggcacatttagcacaaagataagcacaaaaggtgcatccagcactttgttactattggtggcaggtttatggatg

SEQ ID NO: 185091 - DNA, 533 bp, Homo sapiens
ttctggtctaccatggtgagaattgactcgttcctctccatgcactaggtattccgctttcacagttctgccgccttctctactgcttcctgttcttccagatacttggtgctatctctcacccactgtggcttctcctctgtttactttgttcctgtgaatttatacaattttatttttctagtcttatcttactctttctgaaaggaacagagataaactcaacaatgcaccatttttaagcagaaatccacaaatggctttaaacaaactgaaaacaacctacctggcttcatggtggtcttcttttccatggatgaatttagcggatctgagaatgtcatttatttgaaaattcagcttgtcgtattttcagtttgcatcaaaccctgcttctcctaggaatcagctgatgttagaaggaaggagaactccattctccctttatgtctgctgtaataagcacttgcataacagaataaaggcctcttagaggaaatggcttcctacctgaccaaactcaaaagatttgc

SEQ ID NO: 185092 - DNA, 725 bp, Homo sapiens
catactcccaccatagtgtacttcatttttgttccacatccttgccttcactacatcctgtcactataagtctggttctttccaaagtatattcttaatcatggaagcaaagaacaacatttattcagtaaatttttcagtaaatattcagtaatattcagtaaatattctcaatgcaactccaaacacttcccactccaggacatagttctttcttcaggcttgctaacattttgcaagtattttgcagatactctacctagatcaccaactacagaactgaccagatctgactcatagaatctttttgccttctacttgggtagctattacaattgctccctcctttgctaacccagttacccatgactggttgaatagcatggactccgatgcttgctatttgaatttgatcgcccagctgctatgttggctagaagaaattattttattctctctcatctttttttccccatggactcaatagattagatgcctttttcttcaataactttccatattcaaagggtcctcctgtaagtttcaatggtagccattagaagcattagttgattagaagagcagaatgagaacattaggaatttttattttctaattttacttcgttgtaattaaggtagaaggtttgggtagttagattaatatctttcatatacacaacaaatgtttctagtgtatatacttataccagctactgtgctagg

SEQ ID NO: 185093 - DNA, 923 bp, Homo sapiens
gtcaggggtaaagtgggggtgtaagtggaggtggggaggtgccacagggaagtaagggattctggggatttctttaagagagatagaactttagagagtccttggttagcatttctaagttgtttgttggcttattgtaaggacatgaggtgatcttccccccatttgctactctctaggtaccattgaaagtagctctcccattctggttgtttagttttgtgcctgcgttttgcatcctagttcacaggtacactaatttgggcatctcagaagatccccatctaggcctctgtaggttagaatctgccttgattatagtggtccacttgattaaatatttgcatgacaattcaccataagtgtttttgcatatacctggccagagtttctaagggtggaactttgtgttccacagctgtgggggtttcagccaacttaaagggctccttccacataatttagagttttccttcagatttgaccaagtcggagggtttgttggatccaaagtgtgctgcttggggacctagcttttcagggccgttactcgctgaactggtatcgtggctacctggcacagtgtgtcaggggctcaaggcatgggagatcagctccttatttgcacctgctagctgagattacaccctaagtacgttcttctgaggggaaatcctactcagagccgttgcacatcttagggagtgtttcttccagacaccctcatgtaattctcagttgcctaagaaaggctgagaagggcgagctcttatttctttggagaggaaaattccatactataagctagaggttttagagttggccatatccaataagagaaggactgaagcatacttttatacacctgatctagacagaaacaaatatataagacatctcagctcttcgtctagctagtcacg

SEQ ID NO: 185094 - DNA, 569 bp, Homo sapiens
atatacccctggcataagaagaagacacattatattgaagttacctgtgtgagtgtctacatcaccagactgaaaatctggtcaaggagggggaatttcttattcaactttgtatctcaaacaataacaaattaaatgaacaaagttctactaaacatatactacatataatgtacagcctaagtaatcatgctaggaaccaaatctaatctaggttctcatctaaaaggctaaaatagtgatactgtcaaaacaacaaataaaagtaatatgaataatgactatatggcctaacagaaaaaaaaagtgtggtctatattttataaaagttatattctcttgtttcccaaccacgttttcagaaggggtctttaaagacaaaaaacaacgtatagtcatttttggaataagcaacttcattaaatacacctctgaatgcagtaagcccttggtacccaaaatgtattgctgtaaattttctattgatcgacagatttcagtattataggaaattcaatgttggcatttaaaacacgtatgctgtcagcaaacatctataggcaaaatga

SEQ ID NO: 185095 - DNA, 288 bp, Homo sapiens
ctccgaggagtcccggagaggcgttaggcttctctatggcttctgtagcgccatcatcctatgtcttactccattttgtgctgccatggcagaatacttgagactaggtaatttataaagaacagaagtttattttctgtggctgggcaaggtagccatgcctgtaatctcagcactttgaagggccaaggtgggtggatcccttgagggcaggagtttgagaccagtcttgccaacatgtactaaacccatctgtactaaaccccatctgtactaatcccatctgta

SEQ ID NO: 185096 - DNA, 1120 bp, Homo sapiens
  misc_feature (88)..(88): n is a, c, g, or t
  misc_feature (99)..(99): n is a, c, g, or t
tagaggattacgcatgccattgtcttccgaggtagctttaattacaggcatgtgccaccacacccagctaatttttgtatttttagtngagatggggtnttgccatgttagtcaggctggtctcaaactcctgaccgtgggtgatctgcccacctcggcctcccaaagtgctagaattacagatgtgagccactgtgcctggcctctttttactctttttttggagacagggtctggttctgtcgggcaggatggagtgcagtggcatgatattggcttactgcaacctctgcctcctgggcttaaagccaacctcccacctcagcctcccaagtagctgggagtgtaggctcatgccatcacgcctagctaacttttctactttttaaaatgtgacgttttactgtgtcacatttatgatttacattatatttccattgaacagcactgccgtagagctgtagagagaaagactgatttagaaataaaggatgaggtgtagttggtgctttgggcttgtgtaagatcatcctaggacagattgtagagtgactgtagcagacgtcttgggagagaaactgagccagtgctgacgttaaggagcaaatggagatagaggagtaaactaagcccaccaagaaagaacagccagcgtggtcagaagtgggcaagtgagagggtgtgattgatgtcagaggaggaggggttggcagtgtagtttgcgtaaacaggtgagaagatcgaaatctcaagaacattgtagttataaagtggcatgctaagttttaaaactttagaggtggaatagttgagaggaagaaggaagtctgtggaaagtaataagaatgcgattctgcaagtattaagaaaatctgcccctggggtaggggtgtgaggatggaagagaaagtctttggagttgagaaggtaaggatgaacagctcgtcatctgtgcagttatcagtgttatcacaatggcgatagaacttggggtggaaagcaaggctctgagtcaggtaggaagtggagcaaaaccaaaaagaatagtcataatcacttttcctggtttcccggttccctggttcccacctctaaagctggaagtgagagaatgagaagc

SEQ ID NO: 185097 - DNA, 264 bp, Homo sapiens
ttccttgacactcttaaaagttattaccctaaagagcttttgcttatatgggttacatctatcactatttataatactagaaaatacaatcgagaatattctgaaatattttaaattcatttaaaagcaatagattattgcatattagctttttgaggaaaaaataaatagtgaaaagagtggcattgttctacatttttgaagatctttttaatgtctggcatagcagaagacagctggattttcacatctgcttcacatatt

SEQ ID NO: 185098 - DNA, 198 bp, Homo sapiens
gccagtggtgctgggacgctgatacccacacgcagaagaatgaagttggcccctcacattacattgtgtacaaagttaacccaaaatgagtcaaagacctaaaactataaaacttttagaagaaaacatgggccagaaccttcacaacattggatttggcgatgatttctcagacgcagcaccaaaggcacaggcagc

SEQ ID NO: 185099 - DNA, 400 bp, Homo sapiens
tgttacagagcaggtttttaaaacttttttggtatttcatttaagtgattaaaaataagtaacttgtggaagtttactaatctgtgttatctaattttagttttcattatccacaaatatataatacatagttattcatttattcagtcaatatacagttatatgcttacttttgtgcagatacaactataaatccatttttattgtaattgacaagtaattcaaaaatattttaaagttattccagctttcttttttcactattatttgaattattgcttttattatgttcaacactataaaattccaacttgagaagtctgtttctctgtgatctcaagattattgcattgggactgaaattgctagtgatggttggccattaaaataagtgatgatg

SEQ ID NO: 185100 - DNA, 184 bp, Homo sapiens
ccagatctgctgggggatgactgaggtcaacacagaaggccctcaggccgggcacggtggctcacgcctgcaatcccaacactttaggaggctgaggtggatggatcgcttgagcccaggagtttgagaccagcctgggcaacatggtgaaaccctgtttttatagagataaaaaaatacaaaa

SEQ ID NO: 185101 - DNA, 437 bp, Homo sapiens
accttcaactcagggaaatttttttgccttagtttttaaataattatcactcctaatttttttctgttgcatcattcttaaactctcattaatagtgttgaagttcctagattaacatcatgttttcatgttttccctcatattttatatttctttgtatatttactatgttctgggtgatatccttctaaactttctaatacactgttttattttagtaagatattcttaatttctaagaatatttcttattctatcattgctcctttttcatagcagcatgttcttgttttatggaggcagaattctctcaacactaagaagcgtactaacttgaattttcaaacttttttctgtatctgataggatctcttttcttcagaataaatgttctgccttttacaaatcttaatatttcctgttaatccatgttcttg

SEQ ID NO: 185102 - DNA, 297 bp, Homo sapiens
aacgttgtcataaagcatagtgtgagagtcagaggtgcatctttttagagtgacattcttttcaaaaacagaaaggaaaatattcaatataaaatatttgtcttacatttatttatgaacctgtttaaaggtgtaaattcatctttttagtaacttatggttcttgagaacttgggaaagggaaggaagatttgattttaaactttaagggagaaaatggataggagggatcagtagtttcaactgtagttagtctcatcagaaggggagaaagtacctagtttatgacacctatct

SEQ ID NO: 185103 - DNA, 398 bp, Homo sapiens
gttttagatatgaagtccttgcccatgcctatgtcctgaatggtaatgcctaggttttcttctagggtttttatggttttaggtctaacgtttaagtctttaattcattgaaagaaatacaaaatacattgaaatcgttaataatagaataatcagaaaaacaaatctcagaaattgaagacaggtcttttgaaattatccagtcagacaaaaaaaaaaaaaaagaataagaatgaacaacatcttcaagatgtctgggactacacagagtgatggaacttatgaattatcagtattcctgagatcaccatctattagtccatttttggactgctataaagaaatacctgagactggataatttataaagagaagaggtttaatcggctcacagttct

SEQ ID NO: 185104 - DNA, 355 bp, Homo sapiens
gttaatatctaaccatgaatctcattccctttattatgtattaaactcaagagtaaacttggctctcactcttctacctttgtagtaggaagaactttcaacatcctgttgtttcccaccaccccccattttgttttatggtggtgataacatcctaaagactggttctgaggtataactggtaaactccttgagacagttgttctgttacccgggctagagagcagtggagcggtcatggctcacagcagcctcgacctcctgggctcaaacaactcttctacttcagcctccccagtagctgggactacaggcatgcaccaccatgcccaactaatttttttttctttgagat

SEQ ID NO: 185105 - DNA, 269 bp, Homo sapiens
ctggagcttgttggctcaagcagttcgcagcctcagcctcccgaagtgctggaattacaggtgtgagcctggctcattcgagaatatgttaacaactcccaaagaaaccctgtaatcattagcagtcactcccaagtgcccccttacccagcccctggcaacaactaatttactttctatttgaaaggatttgtccatttgggacagttcatatgaatgtagtcatacaatatctggtcttttctgtttggcatttttcacttagcatg

SEQ ID NO: 185106 - DNA, 547 bp, Homo sapiens
gacagagatcatatggcccacaagtctaaaatatttactacctggctctttaaagaaaacgtttgctgaccgacctctaggttagatacttagtccctttcctttctaaaggcccctaggccccttattcaaactagctcatcactctctcctgaaagttctgcaaacctagggaagatagagattttgataggcatgaacatcacagaagtaggagtgttacactctttgcccaagacagacataccaatccacctcacatttgcagaacaaagagagtcagtagtagggactatagaagtgtttcaagggtgcttacagtctgcttacctaaagaagcagacagcagcttccttgaaaaaaaaaatgttttaagtgttcccttgtattagatccctgccacttctcatatccaaacatgaaatatgaattacatgtagactaacgatactagaaagtgccctgagcccacccatagagaaaagctgggctagccagcaggaagaccctcaaagatcctttagtttaatataatcctaagttaaaa

SEQ ID NO: 185107 - DNA, 918 bp, Homo sapiens
gagactggaacctcttcgtctttgtgtccccatgtctagcatggttcctgcagtcaacgttgattgtcttgatgtgacaagtctcggtacgggaatcaaacacatatctctaatgagcggtggacatccggtcttggccagtgtcagagtccttgaaactggttttgctgcgggatgctttgcctgatgggagcctgagggctgcacttgagcaagaagggagcattttgctcacttctcagagacccctgccctttctgggcattccagcagagttcacaagagtggcttggtggtgtgagtcattcgtttcatgcctgagggcagtgcagctctcatccctggaggtgattaatgagtgggagtttccctagagagttctgaggccagttgagtagcagatcctggctggcctgaaattgattgcctgctgaccacttgctgggttgcttataacctggccccaggacagcttcctggtagcctccagatacgcacggggacaaatttgttagtttcatgggcaaagagaagaaaaaatacaataccttactgttaaccacagtcacccttctgtgcaatagaacaccagatctcactcctcctgtctaattggaactttgtacctgttgaccaccctctccccatcttccccatccgcatccctgcatcccctccctgcccagtctcctgtaaccactgttctcctctctacttctatgagatcaactttgtttagattccacaagtgagatcatgctggaagacagagttttgaatgttctcaccacaaagaaatgataaatacatgaggcgatggatatgctaagtaccctgatgtgatcattacatgacgtacacatatattaaaacatcaaattgtaccccataaccatgtacaattataatgcatccatt

SEQ ID NO: 185108 - DNA, 499 bp, Homo sapiens
cacattcatactcttggttcttccttcacactgttattattaaccattcatacgtttctatgtacatatgaattaaagtcatccctctgtatacacaggggattggttctaggaccaccctcagctatgaaaatccacacatgctcaagtcctgcagagccctgcagaacccatgtatgtatatgaaaagttgactttccatatacacaggtttctcatgccaggtttctctctttatatttaattataagcaaaaaatgtacttaaatataaaaatatgattataaaaaaatagaagatatattttctatttgcctttggttgaaaaaaactggtgtataggtggacctatgcagtccaaacccattttctttaagggtcagctatatatatttgtgatttctaaatatatgtatacattttacatttgtggatacatattgtatatattacatcacattgtccttacatttttacttctgatggtcttatagtagcc

SEQ ID NO: 185109 - DNA, 427 bp, Homo sapiens
ggaaaaaagccagggttttgtaagcattgagacccccaccatttttcccgaacaccttcaaaattgatgcatgctttctagatgcaaaaaaagaaagaagaaaatccaaacagatataatcagacgcactgcagtgcaaaaaaaaaaaaaaaaaatcatacctgtcaaaggaaccgtatgtaatccgtgcacacacacacatttcacatttacgttcagaatgcaatacatatcattaggatctgtctataaatagactcgagcgtgtgtgcatcgggacttagtcccaaactgggttttcaaacgtgggtgatgagttctttgctctgatcagttactcagaaggtgcctgaatgtgtgggggtgggagcgtgggagggggctgcctcctctttctcctccttccctttggctctccccctccttt

SEQ ID NO: 185110 - DNA, 830 bp, Homo sapiens
gcccactcctgatttgagatggcattaatcaatgagaaacctctaaatagagggcaaccaatattgtgaaacatgctgtctgagtagaaatagcctcagaaatcatggcgaagcaacacttttcttttttcactctctagccatggtcctcttctaactgggcaccgactctttcctcctctcccagctttatccttcccctacccgccctggcgcagagttgtcatcttatgactctggaacccccttgcaatgtgctgtttctgtacctcacctcttggaggtagatgttgcagtggcagcctcaaacagggatgcttttttaggcaccatcggaagccacagcacagtgctaggcaagaatcagaggaataaaacacaatctcctggagctgatggtccagttgtcccaactggaaaacgaagttagaccacagtggtatgcaaagtgtcttctgactgtagaattctcagacaaatgaatgcacaccagtgccaaatataacacattaattttaattgtagccctctagagaggatgacctagccactgagtgaagatttcaggcaggtgggcctttctgtttccaccgaaattatattatattggcagccacctagtcttaaaattgcctttaggaaggcgtaggagactgaattggaaaatgcagccaggcaatttatgggaaaattgaacggagcgtccctctgagtaaggagacagggcgtggtaatgtcagtcctccttctaaagaccagagaaaatttctgttccacctgataaactctgtatccttttggactttgtaaatattgcacttggaattgac

SEQ ID NO: 185111 - DNA, 594 bp, Homo sapiens
aggccaaggcgggcagatcacttgaggttaggagttcgagaccagcctggccaacgtggtgaaaccccgtctctactaaaaatacaaaaatttagctgggcgtggtggtgggcgcctgtagtcccagctactcaggaggctgaggcaggagaatcacttgagccggggaggcagaggttgcagtgagctaagatcgcgccactgcactctagcctgggtgacagagcgacagagcaagacttcatctaagaaagaaagaaagagagaaagagagaaagaaggaaggaaaggaaggaaaagaaaacgagggttctagatgttacgtaatttgcccaaaggcccacagagtcagaccttgaacccagatcagcatgccctatccagagcatacagccaggtaggggggcagctcagatgaaatagatcatctcaggggtgtgcaggagaagctcgagaagggctgtttctggaagggcatcaaggcaagggagccccagaggagcgatggtgagagcctcctcgctttctgcaaagacaggtcaggggttgagacagggtccaaaagaagtgaggaggtcaggggcctgtgaggac

SEQ ID NO: 185112 - DNA, 563 bp, Homo sapiens
tcgggctgctcttgaggatccccctcggctctaccttgtttttactaaaaatacaaaaatttagctgggcgtggtggtgggcgcctgtagtcccagctactcaggaggctgaggcaggagaatcacttgagccggggaggcagaggttgcagtgagctaagatcgcgccactgcactctagcctgggtgacagagcgacagagcaagacttcatctaagaaagaaagaaagagagaaagagagaaagaaggaaggaaaggaaggaaaagaaaacgagggttctagatgttacgtaatttgcccaaaggcccacagagtcagaccttgaacccagatcagcatgccctatccagagcatacagccaggtaggggggcagctcagatgaaatagatcatctcaggggtgtgcaggagaagctcgagaagggctgtttctggaagggcatcaaggcaagggagccccagaggagcgatggtgagagcctcctcgctttctgcaaagacaggtcaggggttgagacagggtccaaaagaagtgaggaggtcaggggcctgtgaggac

SEQ ID NO: 185113 - DNA, 963 bp, Homo sapiens
ctgctatgatctgaatatttgtgttccctcaaaaaccttttgttgagacctgattccaatgaaatagtattaagaggtgtgtccctttggcaatattagtcatggggtagagctctcatgaatggcattaatgcccttataaaagaggcccaaagaaatttacttgccccttctaccatgtgaaaatgcagcaagaaggtgccatctgtaaggaacataactatgagaaagaaatttatgtcatttataagctaccttgtttatggcatttttgttaaagcagcctgaaaggactaagacactttacatgttaattttgttatataaaagataaaaaagaccagtaattctgagacctgtagatactggcttgaattctggagtgtgagaagaagatgatgtggctttattatcaaagaataggcagtattttaaatggatgctcatttggtttttgtataagaaaacattacttttgttacaattattagtacatgagattattaaaaatccaaaatagattttaatccacctgacaataaacctaatagtggaagacttctctggtcttatggtgaatttctaaatgtattccaggtctgttgctaagataactgactctaatttagaatatacctgttaagtacctcctctaagttctgaccacaagaacagatcaaagaataagacagtctttgtcccttgaaggatatcttagtggttgtatttatcaattgtattaataaagcaatctttattattattattgctattctattttgaattgtataggaagatgctaacattttaattaacaatatatcatcttatgtggcagatgttttaaaattatataaaagtaattctcattttagctgtaattttagaaatttgttcaaaggaataattgtatttgatacatttttaataaaaatcactatacttggaaaaattttaaaaaaa

SEQ ID NO: 185114 - DNA, 224 bp, Homo sapiens
aaatggaatactccaggttatcgtcaatttatggtagatgatattaaataccatacatttaatgaagatttattaggtattaaatttgaaaatttttttcatttatactgatcaaacctagagaggctagtgatttgctgagactgaaattcaggtctcccatctcataatggcttttttgtttttatttattttattttattttattttttttgagagggagt

SEQ ID NO: 185115 - DNA, 175 bp, Homo sapiens
gattaaagtccaagtaaatatattaaaaaacgaaatgctaaaaaaggcacctttaaaacatttttgttagtttttcttatacattgttttcttaaaaaaacagatgtctatgtgcaaaatttcattaatgagaggtgtattttttttttaaactactacagggtcttcactaata

SEQ ID NO: 185116 - DNA, 600 bp, Homo sapiens
actcaccccttccatctatgacagacagtcatctggagtgaagtctaagagtcacaaagatgttatctcaaccgtggctcagcattcaaacaaggattctaatctttcagggctccagatgggaaacagattgctgagaattatcagttttatttgaagagtgcagagaggcgatttgtacaaatgggtatgactgggttttccttgggcggagaagagccggctggcctgctgagaagctggcttcctactccggtggacgccatgctggaaagggtcagcttcctgtagtaagagaagctaagaggtcaggggccagagggaccttcaggggtcccctgcggctgtggcctctgcagaggggggctcagggaggcctggagtgagggctagagaaagcccatggcccggggtcttccagcccagcccagggagcactccaggtaaggcaaggcctcaccaccctccaagtcctcagcactaggagcccaccaagagccaactctgccctggaggccccggacactggagcgaggtgcccccagccctacagcttcagatcccagatctcagtcccctacaaagcatgcagtccctcac

SEQ ID NO: 185117 - DNA, 613 bp, Homo sapiens
catgtgttgaaatgacagtatggtttttgctattcactgtgttaatatgataaatcacatttattgatttgcatatattgaaccattcttgtatcgcaagaataaaccccaactgatcatggtaaatgatcctttcaatgtcgtattgaatatggtgtagtagcattttgatgaagatatctgcactatttacaacagcaaagactactgtgaatagtgctgcaatgaatgtacaggtgcatgtgtttttggtagaacaatttattttcctttgagcatgcacccagtcatggcactgctgggttgaatgggagttcaactcttagttctttgtgaaatctccaaacttctccgtagtagctgaactaattttcttgtagtactttcgtatggctttgctatcagggtaatgctggccttataaaatgagtttgaggtattctctccagttcaattttttgaaagagtttgaataggactggtattcatttttatttaaatgtttggtagtgttgcatcatgaaactatctggtcctgggctaatcttttatgaaagaatttctattgctggccaggcatggtggctcaatgcctgtaatgtcctgaagaatg

SEQ ID NO: 185118 - DNA, 458 bp, Homo sapiens
atccctcccttcgctgcttgtatgttgctctacttaaatacctcccaatgcttggtcttaccagcaacctcagaaaggcagtctttttacatttaaactattttcagtaatagaaaaagccaaagggaaacaggctaaaagaattaatttagcatcaaatgctaccttttatcattttctggaactaatggctgtttagtaggggcacaatggatttctcctgcagactaaaatctgaataaatgataatggggaatgaagtaaaatccagcttgagaaacaagattcttcaactaaatacttttgtcagatgggtgaaggaaaaatgggggccttggtggcagacataagattttgaatcagggtttacataatgaaagcactgactggacaaaactcatttatctgtcttttcatccacacgaggcaggaattgagattattacttccctttccta

SEQ ID NO: 185119 - DNA, 357 bp, Homo sapiens
gatccctttcacatctactcccatctatggaggctcactttgtcagtaatagcattcctgctattcctggtctaaatagatgccactcaccagaactcaactggcctttgtaatatgaaatggatgcaatgaaatagcaattatattcctgtcaggccctgcaccagctccatcaccttatgtatggagaggactttaccagaagagtgatcctgagaaccaggagctacctttagaatgccccacaatgcatcacaaatattgactgggagagcacaagggtgtctcaaacccaccttatggagcagaaaactgccttaaaagcaaaagcacctatctgtaggtgggacaagcacg

SEQ ID NO: 185120 - DNA, 231 bp, Homo sapiens
gtgggttgacgtggcttgtgggttgaccgtggcttgtgggttgaccgtggcttgtgggttgaccgtggcttgggggtggaacactctaactagtgcctttacaggagggctcactcctctccttccatattgtgaggacacaactggattgggccctcatgaggaacagaattggttggcaccttgatctggacttcccagcctccggactgaggaataaatttgttgttt

SEQ ID NO: 185121 - DNA, 299 bp, Homo sapiens
atatagtagcttggttccctccgaagtttccctcaggatagctggcgctgttgcagaccagagcaagccaggccgggcttgctcaggtctcctgtgctcagttatcaaggcaccttggcgatagtggggtgctagttacattgggtgggagcagaggggctgtcatttcttgggagaactgacacttaaggccttaaaaaagcagatagatttaggtgtgtggaaatagaaaaaaaatgtcattgcaagaaagagaaataaccagagaacttagcttcacagagaccatagcaacagcg

SEQ ID NO: 185122 - DNA, 296 bp, Homo sapiens
tggaactgtgagtccattaaacctctttttctttataaattacccagtctccagtatgtctttatcagcagcgtgaaaatggactaatacagtgggggtgccctgtcgtgtagaggagggagacctatttttgtcagaagggtgggagcagaggggctgtcatttcttgggagaactgacacttaaggccttaaaaaagcagatagatttaggtgtgtggaaatagaaaaaaaatgtcattgcaagaaagagaaataaccagagaacttagcttcacagagaccatagcaacagcg

SEQ ID NO: 185123 - DNA, 460 bp, Homo sapiens
gacaggttttctatattccccctcaggcataggatctgtttctcttaagtaattaatttttatcacttaccaataatttaacatctatatgtctaagttctctttatattgtttttcttatccttacctacaaaatctcatttaccattgatttaaatttcagtatattgaaacaatggattgtaacattaaaaataaatgaaattgccaaatgatactaacagctgccttcaaagcatttaaacatacaaacaggcactattgaagactggagagttatcaaaattggcaattttttggcagtcttgctgtgaagtaaacatttttaaaaggaaggacattgagaatattgtaatcatattacttacatcttgttgggtttggatttgaccttacatagcctggtattcagttaagagtcaaagttgctgctattaatttagttgagaaggataaatag

SEQ ID NO: 185124 - DNA, 688 bp, Homo sapiens
atgggtgggggtggaagttccaacacactaatcttctcatcacttggtctttctggtgactagcaccatcctgaggctatctaggggcccaaacctatgagtataacctcattagcatatactcaagggttaccaaagaggcttattattaataataaaagacactcctatcactgaaaattcaaaggattttaggaacttctgacaggaactggggacaaagaccaaatgtgtttcatattataccacacttacctaggccattcattaactcttcacctggctgcaaactaaaattacatgtagagtttgtaagaacaaaacaaacacacacacagacacacacacacacacacacacacacacacacacacacaaaacaacaaggcaggcacggtggctcacgcctgtaagcccaacactttggaaagtcaaggtgagcagattacgaggagttcaagaccagcctggctaacatggtgaaaccctgtctctactaagaatacaaaaattagccaggcatggtggcacgtgcctataatcccagctactcaggaggctgaggcaagagaatcgcttgaacctcggaggcagaggttgcagtgagccgagatcatgccattgcactccagcctgagtgacagagtgagactccatctcaaaaacagcaacaacaacaacaacaaca

SEQ ID NO: 185125 - DNA, 312 bp, Homo sapiens
ccttcaaagtccatggagaagtaaaacagattattgaattcctgctctttgaaaaaactgtcttagcctattttgtgctgctataacagaaatctgagactgcacaattcataaagaacagaaatttattattcacagttatggaggctgagaagtccaacagcaaagcatctggtgtctggtaagggccctcttgctgagttttcaaagggcagaaggcagaagggcaagctagctgaacctgtgtgaagtctcttttataagggccttaatcccactcccaagagagaagccctcatggtccattcacct

SEQ ID NO: 185126 - DNA, 651 bp, Homo sapiens
gcctccagtccaacaaggaccctcgctatgaaaatatgcttgggtcattactggaagccaatttaggagaatttcctcctagtagtaagattctcatgatgcttccataatcttcagaaagaatcatgattttctccagtattcaactcaaatgtatcttggttataacctcagtagcaagcaatactctcctgaaatgtctggtcctagcaagacttttaatcacccaactttatttacagtgagtgaatcttcacatcctaaaatgcatattttttcttatttattatgtttcctgaaactctagcatccaaagtattcctagcatggacatagtcatatgaaatccccttttcaggccctctatagtaggccctatcctacagaaaagcattaagtccttttctccccactcatgtctcctaggctacaatggaaagtcccaaagatgcttgttgaacaatgcacctatcaaaagagatgcccccaaatttttacaaaatcattttagtcaatttggtataaaagaaaacttggagccgggcgcagtggctcacacctacaatcccagcactttatctcctctatgagatttcaccttttaaaaaaaatcccttaccatattatcacatacaacaggcaattcaaaat

SEQ ID NO: 185127 - DNA, 461 bp, Homo sapiens
ctgagtgacaaagcgagaccctgtccctaaacaaacaaacaacaacacaaccaactattgctttattcagatggtagatggtggtagcttgaattaagatttgttaataatgagaggtggtaagattggatatatattttgggggtagagctggaaggacttaatgataatttggatgtgtggcataagggaaagaagactatcaaagatggctcgtaaggcttagacctgatctaccagatatttgatggtgtcactatgcttgaggtcctataaaagaactaaaacaaaatagtttagcataaattgaggttcttagaattttgaggaataaaaaaattgattcaaaagttttataaatctttaaaataccataatttcatagttgattatataaaagtagtatatattcattgtagaacattaagaaaaatttagctgtaatgacagttccaaccaaa

SEQ ID NO: 185128 - DNA, 200 bp, Homo sapiens
ccatgccatgcaaatgtgttgcttgataacagaaagacggatgctctcggggcagagagttcccaaggtgaaggccaatgcctcagatccaattccatggattcatccaatacaacgcaaccagagatggtttccctcattcagaagttactggcatattgccatgataacagcattttgcccaatttattaggcagaga

SEQ ID NO: 185129 - DNA, 229 bp, Homo sapiens
taaaattaaaaatcaacacaaagaggaacttaggaaactatacaaatacataaaaattaaataacatagccaggcacagtggctcacgcctgtaatcccagcactttgggcagctgaggtgggcggatcacaaggtcaagagattgagatcatcctggccaacatggtgaaatcccgtctctactaaaaatacaaaaattagctgggcatggtggtgggcgcctgtagt

SEQ ID NO: 185130 - DNA, 466 bp, Homo sapiens
aacccaggcaagattggctgggagccagaggggcttcccaacgtggagacagaataagtgagcaatccccaacagtccacgttctcaccacctcctgtaatcctagccacgagagagtgctttgacccttgtgggccctgatactggcagagggagatccctggagcctgtgtgatggcattgctccagaaagggaatgcacactgagtcccacgcatcccccaggtccctagtgggacacaggaccattttgagagtccagctctcaccaaactgtatcctgccctggggcccaatagcccctgcctctctacatccctggagcccccctgacattccctcgtatctgcctagagggctctagcagcaagacactggttgggcccagaggaaccacagggtccacacaatgtcctgtataccagggaaagggcagtgtagtgtatcagggaggctgctcccagga

SEQ ID NO: 185131 - DNA, 215 bp, Homo sapiens
tgtttctggagcaatgtgcgtggtcatgcccgcaggcaagacgccaggcattcttcattcagaaaacatgaaatccatcttcagatacgggagtgagcacaggaaaaataagtgagagtgcagtggggggactttctcctctaaagtctcccgcgtctttcctcaaggaggcacaacaccctctctgccagggcctatggagccttggtcagcgt

SEQ ID NO: 185132 - DNA, 450 bp, Homo sapiens
ataaacaatttgaataaattagaagacagacgagagaagatatttgaaagagcaactaaaaatgcttaagggactgatggaatacacaacagaatgagatcacttaggaagtagaaaagaatgacaaaaatacaaagagaattcttaagagtaggaaaaggacagagaaagatgaaagtgacctataaaaaagcaatgaccttagaaccaaactaaataggacaccagtgaaggcacaaagtacactactaaaattctcccaaaggcttactcttctggtctgctctactcaaccactactggctatctatagaactcttcaccactctctggccatgtgcttttacctaacaattcttgcacttctacctgaaaccaaaggtcagtgatcaaaggcagatcattcatagttcttgtgaatattttccccttcttacagtaatcctttat

SEQ ID NO: 185133 - DNA, 703 bp, Homo sapiens
agttatatatgttatatgagggcaaggaacttatcttaaatactgctgctttctcagttcttaatatcatactcataggatgtgctccataagtttgttgagtgaatgaatggatggatccttaggcattctaaacaagaaagataactaagagactaatgtcatgcactcctctctagccttataccatacaagaaatgtctgctcatctctaccctttgtgttcagtctccacaggtggtacaatagctctgctcccacttcacgactctcaaagtcttccaagggactaaacagctgatgcacaccaatgtggcttcttccacatgcatagttgtccgacaaataaaatggtaacagatgtgcctctggtttctgaaagctgggtgaatgtccttgggtgagtgttgtatgcttaagagtttacggcccacggtaggaatggaaactcagtaacctggtgttgagccttcctcaacttatttcctcaagaaagtttctcaaacccgaatgttgtaaatgttgacagctgtagtcaggaaaaggcatagtaatgagctgctgtgccaatttccttgagctgtcataactaattaccataaacatggtggctttgaacaacaggaatatttttgctcacagttccagaggccaggagtttgaaatcaagctgtgccatgccagcggtgtgtgactccgatct

SEQ ID NO: 185134 - DNA, 207 bp, Homo sapiens
tgctgggattacagccatgagtcaccgtgcccggcctcaaaatttcttagactgaggtcatcagttactttttccaggttttagtctaattaggttgaaccatatgagcttgccggcaagctatccggttcaatcaatagtagacctaaaaaaaatcaggttgttgctttcatccttttatttgatagcacaggcagagctaccaaa

SEQ ID NO: 185135 - DNA, 417 bp, Homo sapiens
ctttaaatataaaaacacaaataggtacaataagaatatggaagaagatattccatgttaacaataaaagaaagctgaggtggctatattactcaaagtagactgcagtgcaaagaatattataaagaataaaggtcattataatgataaaaggtcgattttatcattatgttctctgactacaatgtaattaaattagaaatcaataacatgagattatctgaaaaatacttggggaaaaattacacacgtctaagtaacccatgggtcaaataagcaatcaaaaggaagattaggaaatattctgaactgaatgaaaataaaaacaaggcatatcaaaatttatttcaataaatttaacaatttaaacaaaaatggacaaattcttataaagacacaacctaccaaaactcacat

SEQ ID NO: 185136 - DNA, 323 bp, Homo sapiens
attaaaatttaaataaccacacatggctggagactattgttggacatcacagggctccactcaatactatagcactgcactctctcatcccatgctgtctacatagccattccccccacataaatgtaacctcccacctatactcttaactctcaaatctttaggtcaacactgatcagtaatcctagactcctatttttggctgcctacagacagatatccttccctggatatctcacaaggccttcaaagtcaacatgttctgagccaaacaattccttacctgacattcagcctacttttccagtatcccaaatctttcc

SEQ ID NO: 185137 - DNA, 186 bp, Homo sapiens
agttaatccactctgagaaccgaccctaacacttagtgtttttctacatcgtaaatgcagacccacatctgaaaagagcatcccaaaccccagctaacccccagggtcccagagagtgaaggatgtgtgccgagagcctccgtgccgtgcagcggcactttaaacgctgtttgttgaatgctttgg

SEQ ID NO: 185138 - DNA, 1298 bp, Homo sapiens
cgccgcttcctgcggccggggccagtctaatgcatggggcccggcgggggactaaggggaaactgagtcacgtcggtgtgggagcagttctgtgtgggaggcaccaccccccactgggctcggggaagatccccctccaagctatgcttgagggtcccagcccccatctgtctccacaggggccgcaccccactcccgccttccccttcttcagcacccagggtcccgccctggctcccagcagcctcgactggtcccggaatggctaggaggatccgctgcagccgccttcgctcccctcgcgcctccgctctccccctcgcgcctcggctgccgtccctcgccgccgcgtgtcgctctgctccgcgccgtgtcctcgctcccgtgcctctgcccccccagtccaccgcggacatagtaaaaacctccctgcaacgcttcagccccactgaaaacagagcatgtggactcctggcccacacacgcccacttcaatcgaagatacacaccaatcacgctaaacacaaccaacgagctacatagccaaactagcacgccaccaagagtgatcgctgactggaccagccttaccctccggcatttatctcccacgcgactcacgccgcacgcaccgaccgtccctcctccacatctcacccaccaattcgcgccatccacctcccgcggcaccctcgaccacaccgccacgttcggccactccatccacatctccagctccaatcaccccacgccacaacaactctccaacacccccttcccaacactctctcatctaccacaccccctccctccccacatcctaccacacacccccaccccctcccccccacaccacacttcccatcctacccccctctacaccccacccacaactccgaccacaccccccccactccacacacaaccacgcaccccactcctcacacatcatcactatgaacacttcactcgccccaatccccacatgacatacatccacccactagacgctctactgcgtaccacaccacactaccacaaccctacaagacgtctaacctgctctaccttacccaccactctacaccacactgcacctcccactcaaacctacgccctactcacctcatcctacaactctaactaaccccaaaccccctatatacatgctatcacacttgactaacgccacctaaactaacaccattacacctcctccactccctcacttcatctcctacaccatcaccactagatcaaccactctcactaccaacacgccccctaatcaccacctg

SEQ ID NO: 185139 - DNA, 536 bp, Homo sapiens
gagtctcagcgttctgaagaatttggtctattgtgttaatactagagctggttttagtactaccaatggtaaaaacatcagcagagatttgggagaaattactggtacagcagttaagagacaaagttttagccttgactcctcctctgactatgaactttgtgaaaaagtcacttcagtcccagtcactttggacatggggttgccctaactcagggctttgcaaatgttttatgttgatcctaggaaatgttaaataaatgtggtgtgttggaactacaatttttcaaaaattatgaaatacaaaaatttcgagtgcaatgtatacactaagggtaaatatcatttcataaggtttttgttacagaggggtgtgtgtgtatgactgctgtgagatgttatgtaaagtaagcttttttctttttataaattgaggtatttttgataattaaggattaggtatacctaaggcatacaatttgatgatgtatgatacatatccattattaaataattaccatagtcaaactaattac

SEQ ID NO: 185140 - DNA, 501 bp, Homo sapiens
aatcagcatgttgaagagatgtctgcactcctatgttcattccagcattatatagccaagatatccaaacaactgaagtgcccatcaacagacaaatggatttttaaaacatggtatataaacacagtgcaatactattcagccttaaagatgtaggaaattctgccatttgcaacatggatgaacctagaggaccttatgctaaatgaaataaaccagacacagaaagacaaatagctaatgatctcacttatgtgtggaatcttaaaaagacaaattcattgacgtagaagagaatgctgattaccagaggcttgaactggggagggggaggatgggtaaatgggaaagaggaagttgttggtcacaggttaaaaagttttagttagacaggaggaataagttctgttgatctattacacagcatggtgactatagttaatagcaatgtattgtatatttcaaaatagctaaaagaaaggttgttaaatcccactgcga

SEQ ID NO: 185141 - DNA, 289 bp, Homo sapiens
agatttgcaaatattttctcccattctgtggatgttaatttttttagtaaattctcaagatacctatgttccattttattgaactctactacagagttttacaatattattttatgttttgtattatttttgcttttacttgataatgtaaaaagcctatatatggttatttatataatatataagtatataaaatttatatgtattttatgtaaaatatgcatacacatatatttcagaatttcataaattattctgttctttattaataatttggagaatggctaat

SEQ ID NO: 185142 - DNA, 370 bp, Homo sapiens
ccagagacaaaggaaagtttattacagcattagcagtagccaaagtatcagcattttttagtcaattctatgaacctcagttctctcacggaccacgttataaacatgcattgggttgcttggggaggaagtctgaggttagagatccaaatatttttataatgggcagtgagcatgcttgctttttgctccaaatgaagacagtatctccatcttataaggcagtaagcaaactggcttcttgctccaaaggaagacattatccctgtcttccaagaatattttctacacaaacatatttgaaaagatagccaagaacaaaaacagccagtacctttaatcagcaggtggaggcaattgtcctaagcaa

SEQ ID NO: 185143 - DNA, 299 bp, Homo sapiens
ctgaacacacactctgcacacctcggggcccacccctgcctgtcccccacctcaccaagcctgtgactccagggtggagtcctctgtgcctgtcctgaggggactgtatggactgctgtttccttccgggctgtcacagatgctgtgacaggcctccttctctctccaggaatacggctgcagtcggtgagcccccaagaaacacagtgaagaaatcccccgagaacatggagtgcgcccacctccagccttggctccactgctcagaggcaaggaggaagccctgctcctgtggccct

SEQ ID NO: 185144 - DNA, 402 bp, Homo sapiens
agaggatcccccgcttgcggcttggctcaaatgatccacccgcgtcagccctcccaaagtgctgggattacaggtgtgagccactgtgcctggctcattcttttttttactggtaatttccttgatgggtaagctcagtggtttgtcctagaatctggattcttctaattacatcctcatggttttaattaacatattctgttgtccctcaattttctttaaatttatttggttttgggttttttccccacatgctagcatgacatgtaagtaggtaatgaggtttattctgtgagaaattacattcatgtctcattcttcggttgtctctttttttgtgatgttggcaattcctggacctgtgggttcagtaggcatatgccgtggtaagactaattctag

SEQ ID NO: 185145 - DNA, 382 bp, Homo sapiens
accacctgggctcaagcgatcctcccacctgagcctcctgagtacctgggaccacaggtacacaccaccacacctagctacttactaagttttttgtagagacagggtcttgctatgttacctaggctggtcttgaactcctaggctcaagcgatcctcccaccttgacctcccaaattgttgggattataggtgtgagccactgtgcccggccaacaaaatatagttgttaatgcaagcactagttcctgatagaagggggctgaaacaatgtggatttattatcatcagaacctagaggcagggccaggccagagtttattcagagccagactctttccatctcattgttgaggtgacatgttctccatggccataagtt

SEQ ID NO: 185146 - DNA, 171 bp, Homo sapiens
gatatttcatagaaacatgaactgaagaatatggaaaaagcattaatcatttttaaaattgctacatagcagtaatcttttcaaattatttcttaacacttccacttgtttttataccaagaaaaatggaattatttatatggaattctacatgttctggatggctgggaa

SEQ ID NO: 185147 - DNA, 445 bp, Homo sapiens
agcaaagagtccccacccactggggacagtgggaaggtggaccctgtctacgagaccctgcgctatggcacctccctggcactgatgaaccgctccagtttcagcagcacctctgagtccccgacaaggagcctgagtgagcgggatgagctgaccgaggatggggaaggcagcatccgcagctctgaggaggggcctggtgacagtgcatctccagtattcacagccccagcagagagtgaagggccaggaccagaggagaagagtcctggacagcagctccccaaagccaccctgcggaaggatgtggggcccatgtactcctacgttgcactctacaagtttctgccccaggagaacaaggatctggctctgcagcctggagatcggatcatgctggtggatgactctaacgaggactggtggaaggtgacttggcagggtg

SEQ ID NO: 185148 - DNA, 586 bp, Homo sapiens
taatttttgtattctttttagtagagatggggtttcaccatgttggccaggctggtctcgaactgcggacctcaagcagtctgcccacgtcggcctcccaaagtgctgggcttacaggcatgagccaccgttcccagcttacttaggttttttaacctccttctaacctttctccctgagtggagagtttttaaacatttttaaaaactgcctctcctgtgaattttattaccaccaatatattgtgtctctctttatgtactgtatgtttatctgagctttatatctaaaaagaggagggctttttcacgtcccactaactagttttagatctctttgagggtgacatcactcctgatgagaatgctgagctaggtccattcagtttatgaaatgaacttaagtttgtagttggtaacttttttccccattccaaaatctgtactttgaaaatattggtaagtctgggtctctatatattttctatcggtactgtgttgttttgagccttctctgtagcacaactttatgttgccttatgatacttattccttatacaatgcttttatttttctgtatttttcgt

SEQ ID NO: 185149 - DNA, 336 bp, Homo sapiens
tgccagcaccatgtgattgagctggaaagtcgattttctgaggactgccaacagccacccaagtgagctgggaaacagatccccctgcagttgacccttgaggtgactgtagcctgacagacaccttgattacagctttgtgagagatctgcaccctaatcacccaactaagctgcacctgtacctgaatttctgactcagagaaactgtgagataataaatattgtgattttcaaatgctaagttttggggtaatttgttatgcagcaatagatgactgatacaagtacctactgttttcaggtagtatgcgaggccattaaaatgtgaaaaatg

SEQ ID NO: 185150 - DNA, 367 bp, Homo sapiens
aaggaagtatacaggaatagatatgaccaggacacagatactgatcgtgaagcagcctccctccctcacttgttctctgttctccaaaccatttcttctttcaggtatgttaaatcagatatatccctccaaaataccaggctttcttaggatatcgggtgactgactgcacttctgctctcttagcctggaatgtgttccccatggctaattccaattactctctcaaagacaagtatagaatgaataaacaaaatctagtatatctacatatggaaatactactcagccataaaaaggaataaagttctgatttatattacacggataaactttgtaaagattactctacttgaaagtggccaca

SEQ ID NO: 185151 - DNA, 428 bp, Homo sapiens
ggctcctgacagcggcgggtgtgggagcccaagggatttaatctccaagtccctcgtgggaggagccctgatggggggacatgctgcctggccccttccagccaaagggtctgtagccccaggagctgcaggctgatactgcccctgtgggggtgtctcctcttgcggctgaacatccaacccagggctgcctggggtcccaaggtgctgtaggggctgcaggtctggacgggatgccatgactccatggccagggcccatggggaccactcacagacactggggcctcactctctcctggttggtcaggagccctgcccaaagaagggctgaggaggttgagcagcccctcacaggaccgaggcaaggcaggcctagagcccgtggctccatcctcaccccgcagcgggcggcaaactcccccactg

SEQ ID NO: 185152 - DNA, 399 bp, Homo sapiens
caaagatgtccatgcagcttaaattatctaccctctgtgccacatgctagatagagactctcaaattctaaacagtcaacccaaacttttttctttaagaacaaggtctcactatgtttcttaaagaaaaaaggaaagaaagaaactaacaaagaaagacagtacctcatccaggcgaggaggaaggaggctccctagggtgagaagctctggagagagggggaagctggctcctccaatactccaacgcataggactaaggacacaagatggacacagaagcttcagtgggccgagagaggataccactgcccattcttccagtgtttatcgaagatgtccacgcagcttaaatcatctaccttctgtgccatatgctagagactctcaaattctaaa

SEQ ID NO: 185153 - DNA, 165 bp, Homo sapiens
tgatacctcctggagaatgtgcacagggaccctggtagagatcactgtctgtttagccagttgctgttggaactggagagtgtgaagggaaaactagaaagaaccacaattggccgggtgtggtggctcacgcctgtaatcccagcactttgggaggccaaggcg

SEQ ID NO: 185154 - DNA, 411 bp, Homo sapiens
ccaggcagaagctatttcagtatccagcataacgggataatttaggatagggtggtggcaatggaaatgaagactaaaaaaaaaaagttgaagttttagaagtagaattgtcaggacagataactttccaaagaaaaccagctcaaagagtcatctgtatttcaaaaaagaagactaaaacaaaataattagctaatgcatttaagaagtatcatacaagcaaagcccatttagcaccactgcatcaaaaaagacagcatcattcagaagaaattatacatatttttgctccctactcctctcatgatgtacaaattaattaagctattcctccagatccttgagcatgcttctcaaacatttgagaactgactcatttagctgaagcttcaaagttcctaacctgtcctc

SEQ ID NO: 185155 - DNA, 673 bp, Homo sapiens
ttgtcctctgggtccattacatttatcttgggtgtcttcaccctgaactcactggtcgcctgccacttgggtgcttttcaggaagagcagatcaactaaaggaatcagctgccagacaatgggacgtgagactgtcaaggtagaggatgacatcaagtttggaaaatcattccccttcctcagaaaagccttctggttctcaggacagcctgactgctaccctttgtcatctgttcatcaaatacttattcagcatctattatgggccaggtatctttttgatggtcaggaatggaaaaggaaactcaaaacaccatgcacaattattttaattctacttgatagccatgaagacaactcagcgcacttaagcatacggcagcatgcatatggcctaaaagaatggcaagtggggaatctccttacccttgctattgaatcacagagttagcaagtcagagcctctggattcgaggtctggaagacagactcacaggatacaaactaatggacagtggagaattacctgatgttctgatgtgagtagtggtctatgcaggtaaccacctaaggtcacttcctttcctttctcaaagtagactatggtcacagacacttccagcatatattccaagttattgagggctttggtcattgagcttatcagggaagg

SEQ ID NO: 185156 - DNA, 425 bp, Homo sapiens
aaaaatgttgtattttatctatttatccaccatttaatattattatcagataaaagggttagtctaaccaatctattcagtgactagattcaaaaccgtgagtagactttgtgtgaaactcagtgaaaaaccattgaagtatcactttcaatagtgatgccatgttatttcagaccaatatcagctttgctaagataggaaaacaagtccttaacttaaaaaaacttatgtttgaatagattttttaaataatattcaatcattaacaacaggtctttaaacctcaaaatagcaaaatactattttgcaaaaataaaacaatattcgcatgccgtcagttttatttaattatttaagttacaaatatatatcaattaaaatgtgttatcttatcaaactgaaataaagtggacatctcacttctt

SEQ ID NO: 185157 - DNA, 147 bp, Homo sapiens
gtcccaaaggtagacggaggcttcacagaaatgtcacagagctctaggtccaggtgggccatgtcctgggcagaaaagacccaaataaagtggcaccaaggaaagacagacacaatcagagttggggggcgggcacgggcaaggcct

SEQ ID NO: 185158 - DNA, 319 bp, Homo sapiens
aaaaccctttctttcctccttccccaggtgtctcttcaaaggaataaacttccttcctggccaaagccttgtggcaaagtaattgaccacagctttgacagcaacaaagatgacctcttcacatccacttccttagccctttccttccactttctgtttcaggagaagaaggaccattttgttgttattaaaatgactatgctgttctaagaatttctgactgattactccactcctgccatcagcttcttctttacggcccaactctcctaaaatatggtgctggatttgttgtgttgtagagtaaaaataatattgt

SEQ ID NO: 185159 - DNA, 311 bp, Homo sapiens
ttcattacctggtttctttcaatctctctgacctcatctcctcctgcttttcctcttatggccttcactctagtcacccttggctttcttgcaattcctcaaacacactcctacctcagggcctttgcacacgcaggtcatctatctctctgaaatgctacatagcccctgcctctctctctctccttcacttcctccacatccctggttacatgtcacccaagatgcagttttcccaaagaccaatctaaaacagcatccaccatcctaacttcctcaaaacatcctgtcacccttattttacatcctcc

SEQ ID NO: 185160 - DNA, 379 bp, Homo sapiens
cacagttagcaggataaaatacttaacacaaaaactgaggggcctacaaaataagaaaacctcagttgagattcttagtcaatctaataaaaaatgtaatagtcgatctctagatgacatggcacctactttggtttgctcaatgatcaaaactctttcacgaggaaaacaaatccaaccagaaaatttaagattttatctttgtcaataaacttctggatttaacactgatatctgaatcaaactcaaacttctagaaaattatatgaatcaactgtcaatagactacttgtgtattattattaatgacttctgattctacaatcagtccctgaatatttcaaatacggcacttaactctaaatattctcaaacagaa

SEQ ID NO: 185161 - DNA, 674 bp, Homo sapiens
ttggaggtggtggtaaggaagactgtgcagctaattttttcaaagcctcagtgaataaagacttcttttctggtatctgtggttaggtgagaagatgggggtaaatccagaaagcagagtgagtcaagcttggggacaaatctggggactggaatttcatgactttcactcaactccttaataatgaattgctgatagaaaagcagcattgtttggaagggacaggaacagacacaggaatagaactaagaggagactgaacttacaatggacttctatcatatatgcccaacacccatccatctgcatcagtttgttgaggaggaccatcccccatcactccaaccgtgtagttctgagggaggctgccaatcagtatgacctgcccctggcccaggctggccaatcatggcagcccttccctttctactgccagctgtccagagatggcatgtgacccaggcctggccaatcacagtccttatctgggattttctttttggagccactaggaaagatttcttaatgtaagaatgagattttggaactgcccgagtccatgtttcttgctatatggggaagaaaagaacttgttggtagtgagagagaataaagccaacaaagaacagagctgatgaacactaagatggtcttgacactaaatgcccccatct

SEQ ID NO: 185162 - DNA, 633 bp, Homo sapiens
catcttcccctacccaacactccctaaatctttctggagggttctgatgtatagcctggcttgtgaactgctgatagatatctcaaaaaggtttatcttgtgggtagaatactttttcttcacagcctgtgacttctgtaagcataaaatcactcccttaggggttctgtatcagggatgtccatcatcatccactgtggagtttttagattccatttaggtaaagtgtctttcaagtaatagctcagtaactttgtttcctctgttatgtcaaattaacaaaatctttaaatttatcattaagcaatcaattataatcgttttcattacccttgatggcatataggagtgtgtttccttagccactgctcattcatttcattcattttatagtcagacatatgttaccacaacatataaatttgtaagtctggtatatcaggagaaggtttgaggcatcaggagtatagccagaaccttgaggttctttctttggagtttgttgcctgtaaatattcatttacatatttctcatgctgttcttctagagtgaaaattggtttggactttgtcgaggcaccattctaagagtctgacctctagtttctgtggcaaatatttacagccatcaca

SEQ ID NO: 185163 - DNA, 517 bp, Homo sapiens
ctacaagagaacacagacaatcaaatgaaatgaggaaaactgcatgaacaaagtgagaatatcaataaagagatagaaactaattttaaaaaacccagaaattaaggagctgaagaacaaaataactgaattgaaaaattcaccagagggatttaacagaagacttgatcaaacagaggaatcagtgaacttgaagacagatcatttggaattatcaagttagaggaacaacagcaacaataaaataatgaagaaaagtgaaggaagcctaaggaactcatgggacatcatcaagtggaccaatatattcactatgaaagctcagaaggagaagagggaaacaaaggaaaatgggtaaaaagcttatttgaagaaacaatggcaaaaaagtccccaaatctgagggaaaaaatagacatccatattcatgatacttaaaggactatacataggataaatccaaagaaatctacatgagaacacattaaaatccaactgtatatgtcaaagataaaga

SEQ ID NO: 185164 - DNA, 350 bp, Homo sapiens
agtggcttctgatctggtgctggagggatgaggagcaactagtttgcccaccaagtcctaggcatctgaggccagccagggtcatggctcctgcctcctccttctgtgcccctccccagatgcccagttgtgagggagtgatcagaacatgtcgggggtattgcaagaatctcaaacagctgtgacttgagtgtacaagccatttttatccaagaccctgtgaaatccatggcaccacccactgggggctggtccctcaggatccacatagggcctatagcccacccccgtgcccccgcgccctgtgccccgtgtggcggcctgtgagatgcatcagaacacccagggga

SEQ ID NO: 185165 - DNA, 351 bp, Homo sapiens
gctctgttgcccaggctggagtgcagtggtgtgatcatagttcactgcagcctggaagttgggattacaggtgtgagccacagcaccctgcaaattttgacaggcattgtttgtcaatatgtaacaagttttataatttttatagctgacaacataattccactttggagaacacatccaaggaagtcagtgcctcctttgcccctttcccaacgaaagtaatctgtacaaagtgattcacagcagtgttgctaataaaacagtgagaaatggagctaatataagtgtccatcaatcactggatgattgagcaaataacagtttctcaacctgaggaaaacccatctgacc

SEQ ID NO: 185166 - DNA, 334 bp, Homo sapiens
atctttcccactggagaaggaatccaaattgtccgcggctaccagatctagcgcggtgtttcggaagctgtgaaggctttattagtctttgaaaaagacacttggctaagtcacaagtgtggcaaatggaaaaagatttctggccgggcgcggtggctcacgcctgtaatcccagcactttgggaggcctaggcgggcggatcacgaggtcaggagatcgagactatcctggctaacacggtgaaacccgtctctactgaaaatacaaaaaattagccaggcgtggtggcgggcgcctgtagtcccagctactcgggaggctgaggcaggagaa

SEQ ID NO: 185167 - DNA, 759 bp, Homo sapiens
cgactgtgaataggtaggtccccccccatcccccatactccttacactattcctcatcacccaactaaaaatattaaacacaaactaccacctacctacgatgtgaaataggaggttgataagactttacaaaccaagatggataatcttgatatttaaaaaaccgaaaataaaaaaatttgaaaattttgtacataaaatgattaaacaagctatataaacctgtatttgtaagtgaatactagacaaggagctaatttctgtaatatacaaattcttacaaattgacaagaaaaggaggtgatagctataaagaggtaattcacagaaaagcatctctctgctcttgaactgctagaaatgcaaactgtaaaaataaaagtacccaaaccttatcctaaaatgcacagatgtttactgcaagtgttgtttatagcttcccagaactggaaacaaaacacattcccattatgagaaaaatggctgagcattttgcatgtatagccacccaatggaatttccacagctattgtaaagaacaactttaatttagagccatataagatgtcttgaaggtatatcaacaaggagttaagtgataaaatcaagatgtagaaaaatgttagttatgggtctgtcaatcctggtgatctctttaaggagctaacttttatctttgttaatcttatctattgcctttcatgtactatttcgtttacttctgctcttccctttacctacctatttcatagatacgta

SEQ ID NO: 185168 - DNA, 480 bp, Homo sapiens
tttgttgcgaggcgtagggccaccctgcgcgcccagcagaagcgctagagggcacggttgcccggggtgaaccgcatgtccaaatgtaactgtgtgctccgagttaaaattgtttttctgcagactttgcttgagccaacgattccggaattggggaaagggttaccttaggtagaaatcggaaatttataggagacacagaggtaaggaccaactgttaggactgagtgaaaaatggttccctccaactgtaaaagtggaaaaaaaaatacctatcttataggtggggcagtgaggagtaaatgagtttaatatatttcaagcttttaaaacaacctcgcccatcataagcactgtttaaacattagctcttatcttttaaaaatattagtggatgtttaaaatgaatgaatacaatttgtccaagaaatatggcgtaagagcccagaagaaataaagtttaatcttacaaagggcttc

SEQ ID NO: 185169 - DNA, 363 bp, Homo sapiens
attagaaaggtggcagtgggagcagaatggagtaaacaggtgcaagaaatattttgagaaaaattcaacaggatttagtgaataattggatgtggaagacgaaggagacaaggaaattgaggccagctctgaggctgtgaatcaggatggctggaagaatagtggtgcctttaatgaaaaaaggggaacattggaaagaggatataattggatggaaagaaaacaagtttggctgcaggcgtttcaagcttgaaacattcacagaacattctagtggacacgagttgcattggaaattcaggactagaattcaggagagattccttaaatagtctagcctctccaacagtaggtgaattaatg

SEQ ID NO: 185170 - DNA, 235 bp, Homo sapiens
aatagagaatggagactcagagaggtaggggtgggagaaaggtggatgatgaaagcttgcttgatgggtaaaatgcgtgttgctctaatgatccatgtactgaacctcctgacttcaccacatgcaatatatcaatgtagcaaaattgcacttgtatcctataatcccagatactcaggacgctgaggcaggagaactgcttgaacctgggaggtggaggttgcagtgagccgag

SEQ ID NO: 185171 - DNA, 349 bp, Homo sapiens
ctccaagcccagtccaggccaggagaggttcctgaaggccagctttatccggaaagatgaccgttgcgggggctgatagtaaactgaagtgttttcggggggccagttgaacaaaatggaggtgatggtgctggtgatggagtagacagctgagtcagaggcctggccttctcccacacaaccctccagggcacccctgcgtggttctgggtccctggcctgttgctgccagtgtggaggacagccccaccctaccgtaagccatcagtgctgtcctggaaggggcagacctggccatacagcagggctgtacagaccctcgtgcgccctggcgtcccacagacattct

SEQ ID NO: 185172 - DNA, 224 bp, Homo sapiens
caggcagatcacctgaggtcagggattttctatatactagtagtctttggtgtctccacaaaacaaaggattctttggtcctttgggagggtgctacacatgctatctgtcctcttttctagtcataatacatgtatgcacactaaagtctgaaaaacagaggtaaataagatagtttacctagcatttcccaaacttattaatacacaaggaaaggattattt

SEQ ID NO: 185173 - DNA, 695 bp, Homo sapiens
tgcgacgtcccgagagagggaacggggctcgttgaaaccggtgggatgcggctgtggcgagcctcaggccttccttcagtcagctccacaatccgtgcccgggttctccttgcccagctcggcctcagtccccttcagcgataagatggcggctgcgttgacaggcgggctccgggcgtcctgtctcttccctgcccagtgactgtgtcctggcctggagccctctctgggcagctctgctcccgcagcgccgcgtctctcccagattgtgcagggatcacgggagggtcgtcaggggagaatcctgactggaggtgctggctcatgaataggaagcactttagtccgtggggttcccagggcctctttttttctattaaaaatttatgggcgtcaccgcgaaaagattaaataatttaatcaaagagtgattcaaacattgtagagcacccagctatggtttgtaatttgtggtctatgaaaggccttgaaggagatatttttataaggttcatggtaaagaaaaccaaattcagtaatttgctaggtacagttatgtaggttttgttttgttttgttttttgaaaaggagttttgctctctcgcgcgggctggagtgcagtggcgtgatctcggctcaccgcaacctctgccttccgggttcaagcgattctcctgcctcagccctagtagct

SEQ ID NO: 185174 - DNA, 333 bp, Homo sapiens
aattatttaatatggtaagatgctccacatatcagttgagaacttgacagtttcaagatttatctatccatttggtttatttgaactgtggtataactttctgatgaatgactgtaccttgatttacttagcttttcttcttgtgatggacactgttacaagcggtgctataataaacttgtgcaagtaactcttcatacctgtcttggtcatgtaatgtgctggctcacaggacacatacatagtcttcagcttaactagatgttgccagtttgttctccaaaatggcttctctgcaaatctcactaccattccatattttcagattctaaa

SEQ ID NO: 185175 - DNA, 164 bp, Homo sapiens
tccagtcacattggtgtactcatccactgtttttgtgggcatcttcccacctcaaaaaatagacatccacatcatctctttcatgaccctgataaaatgccatttcattcaatggaactattggtgatagaaaaagagagattccatttcatgtctagatgcat

SEQ ID NO: 185176 - DNA, 839 bp, Homo sapiens
ggtgaagccagcctgaaacctcatcttctaaaatgcaaagtaaatgtgaaaactttgggagcctgggagagaaaaactccctggtttggaaactcagcggaacaggaactcgatcttacaaatgaaagaggctttggagtgtgaagctttggaaggtaccagggatgcaaagtacaggaacagataaaggagtggatttcagtgattacacttaaacaacagtggtagtagaaagaacagcatataggccagagaaaaaaccccacacttgatttgcaggtcgctctccagggcagaatccgctgacctcaatactcatttgatctcttatgtccagatttggccaaactccactgatttgggttgagactagctctgggcatccctggcaggatccacaagccttccagagactggcaaccatcctgaggatgtcccagactaagcagggcaattctgggtcctcctgcaaagggtctgcctcagggagcgcccccttacaggaaacagggtaagagccagacccaggggttacatgaaatgcatgggctagagggccacttaacttgctctcttctgtctccagcccttctaaataattagatggagaaatgataatgaattcagcctgccgacacaatggagtgagtttcaaaaacctccaggagcctgttttgctaaagaaacaattttactacaaactctctggccaacggatacaaaacgcacagatcatttttttattttcttactgttccagagaatatggtcacattacagaataaggacaaggccagttaagaggacatcttttttttttttttttttttttttttttt

SEQ ID NO: 185177 - DNA, 376 bp, Homo sapiens
ctgggtgtggtggcacatgcctgtggtcccagctactcaggaggctgaagctggaggattgcttaagcccaggaggttgagcctgcagtgaaccacgattgcaccactgcactcgaaccagtgcaacagagtgagaccctatctcaacaacccaaaattatactgccacattgcacataatgcaatattattcagcagtaagaaaagaagcaactactgatacacacaagaacatggatgaatctcaagagcagtgtactgatgaaagtagccagacacaaagactcaagaccatctgattctatttatatcgtattatggagagacaaaaccatagatcagtggctacttggggtaggtatgaggggttgactgc

SEQ ID NO: 185178 - DNA, 461 bp, Homo sapiens
aagaacgggggtgggggaaggaaggaaagcacgcttcgccaggatccagctgttttctaacaaacctaagcctacggaagctaggaagatatcggaagcaaggaagatatcggaagcgacggcatccctcaaattcgagagggcggatgcctctagggctagagaggctccctagccctcagttacagagcgactgggaggggacaaaatggagttgaggtttaggggcaccctaaaggtcgtttggaggtctagcaagcacttcatggtctcctccggaaagggccgtggcaaagcctagtaccccgatcaggaagatgacttctggccctcgggatgcggtgagcggcaggaagaggcaggctggggttccgaggaccccagagtccatcacaggagcagatacagtgacctcgggaatcttcccggccccagcggaggcgagcggatagatagccctg

SEQ ID NO: 185179 - DNA, 252 bp, Homo sapiens
gtggatggggcaggagctggtgggtggtatatagaatcaaacatctggaaagaagaaagctgaggcagaagtttcttgggaattaatggttttgaagggctactgcgtatactggagaacccagagtgcaatatgcatgcatgaggctgggaacatgctcataaaaaaagaatgatagaaccctaggcttgcacctttggctgatttttggactctgtgcaagtaggaggtaaagactaagtcacagtcata

SEQ ID NO: 185180 - DNA, 250 bp, Homo sapiens
ttcttatctgaccccaaccaattaaacgccagtgtttttcaactcttcggctaagggcaattttttctcctacctctgtgcacactggattggtcaaaacaattttgcccaaatcggccttgacagcactaactctccctcctgtcgacagggatcctatgttcaccatgagcacttcattcttagacagcttttgaacctttgctgctttcttgtctccttcagtgcgtacacctagaagccgtctaag

SEQ ID NO: 185181 - DNA, 295 bp, Homo sapiens
gaagccctctctgagcctcagatgcctcttctgtgaaatagaccagagctagggcttaccaagtgtgaattacacaccaaacacttggcttatacatttcatttctggctttataagatgggttgtgttcctggctctatttaacggatagttcctggattgttaaaaagaaaccaagccctgcccaaagtcctccctcagctgggggtggtttggaagctccacagcgactgtggtttgcacaaagtgactcatccatgtcactttcctctacaccgacaggcacctcaagcgg

SEQ ID NO: 185182 - DNA, 331 bp, Homo sapiens
catcctttctccccttatgtatgtatattttcaaacgaagctatggtgtgtctataccattttgagccctgtttttgctcagtctgctatgggaagcgttcctcccgtcgcacagagacggagatggggaaccccgggagcggtagcaatggtgccccacggtcatcctgcaggaggggctggaaggggcttggtacaccaagacttcatttatcaaggatctgggggccagaggagatggtctgtgcacctctgaggagggtataagtcattaatttttagagaaatacagttcagggaaaaaacacccaggtaagcaccaacatgtatg

SEQ ID NO: 185183 - DNA, 737 bp, Homo sapiens
agcatgaacttcagaggaaagagagttttgcacaaagatagagaaaaaatggctaacctgaccgtgtatgatctatcacctaaactagaaaatgtgtgaaaggatattaaggaactgcataaaggaacaacagcaagctaggcagaagggccaccctaataaaggaatagaatgagcctgtgaatggagaaggatgaagaccctgattctgcatcctgacataccatagtgcaagaaaacctactgctaacctcagagggctaaaggaaaggtaagattaccagggcagatgggcttaagttaccacaagaaagccaaaaaacatcttatgaacacgagggagaggtttaacacaaaaataacatttcagagaattcaagaggaaagccttaggaattaaacaagagatttggtcaagggaagaagaaactctgagtggtatgaagatcagatggactttcattctggacaatgacagatgacaggaatgcatggcatagtggaattggcaggtctcaggaattctgagagaacttgtcctcacatctctgaaagacaggggcactcaaacctttgaggaaggagtcagaaaaagacagtgcctctgaaggaatgtgggcaaaatattgttagttctgagaccaccctattagcatatctttctcatgctgaaagcaactctgacagagaagatgatcgggttcttccctccctcctctggccttttctctctttgg

SEQ ID NO: 185184 - DNA, 501 bp, Homo sapiens
tcacaaggttctgtgattctcagcttaagcatggggcacctaggccaggaatgaagtcctcccctcatgattcccatacgtgtgtaacctatccagagagaaatcacatccttttgcatccacattggaaccaagacacagagcaggagacctcagaattggagtctctgtatcaggccagtcttcaggcttctcaagctggctgttctggatgggggcagcaggataccgcctggcacccacttagccaaacaggtaagaatgcaaccaggggttggggggaggggggaggatcatataaaagctgaaagcagggaaagatcagaagggagtgttctatacagatactatccccagcttagtaggaggtaatagaacttttgactttactcagaaagccttcaggacaagacctagacatttttctggctagagtggaggaaggggcagaattaccactcataggcaacttccctccttctaaagtaagagattactaag

SEQ ID NO: 185185 - DNA, 562 bp, Homo sapiens
tgctgaatggaaaagatcactccaggactgagtgtgaggaacctgaaggcccttgcttctttctggtagtgtggcagtgtaggttagttgaggattgcacctaggccaggaatgaagtcctcccctcatgattcccatacgtgtgtaacctatccagagagaaatcacatccttttgcatccacattggaaccaagacacagagcaggagacctcagaattggagtctctgtatcaggccagtcttcaggcttctcaagctggctgttctggatgggggcagcaggataccgcctggcacccacttagccaaacaggtaagaatgcaaccaggggttggggggaggggggaggatcatataaaagctgaaagcagggaaagatcagaagggagtgttctatacagatactatccccagcttagtaggaggtaatagaacttttgactttactcagaaagccttcaggacaagacctagacatttttctggctagagtggaggaaggggcagaattaccactcataggcaacttccctccttctaaagtaagagattactaag

SEQ ID NO: 185186 - DNA, 247 bp, Homo sapiens
gtacccggccaatggtctttgttttctggatgatctgttgtcattgggagaataatacctatgaaattgatgatcacctaagtgttattgacttctagaactacatgtgatttattgcaaggccatcagaagcaaactagggtggccaaagagctgaagcacacagttaagttctttcacttctgtttctttgtatggttgtttagtttttccggggagatattgaactatactgctttagactgtt

SEQ ID NO: 185187 - DNA, 311 bp, Homo sapiens
ccgactctagagtatcctctccccgtacgcccaaaaaatatgtgaacatacacataataaaagaagatacatgtttggccaaatgcatgtgaaatggtggtcaacatcattagtcatcagagaaatgcaaattaaagtacaattgtatgcctcctagtagaatggtgaaaattagaaagactgatgattccagttgttcgggaagatgtggagtactggaactctgatgccttgttgctgtctttgtttagtgttggtataacagaatacctgaggctggatattttactttaaaaaagaggtttattggg

SEQ ID NO: 185188 - DNA, 628 bp, Homo sapiens
tcaggcatggccggggagctacagtccctcagtccccgcggtcccgctgagcttcgcagggaggcagctgcggcgtgggggcagcaatcataagccaaggtgccagggcagtcacagggaatgggttccacaggcctggttctgctccacaagaggccacatccagcacaaccacagagcaagcgaccccagaggacccacaggaagatcttcagtgcctaagccaagaggcaagctcagccatccctgcactcactcaagccgacgtgcacatcaaaccagcttccagggccaagcgaagttcccggtgcagcatcgtgcactgaagagcacctgccatccgctcaaggtcaaggctaacacgtgagcccaaccacagtgcagagcagaactaggtcaggctggggccggccaaggagcaaaccaaagccactgtcacatccctgcaggacttctccttccccagagcagtcggcgacctggcagggcctaacctggccactcaaatgcttggaaagatgccaccatgacactgcgaggttgccagagcaccaggaagggaaacaagtgtcacctacgagcatcagagtcacaaagtttaaggacagaattagctctctgtggaaat

SEQ ID NO: 185189 - DNA, 464 bp, Homo sapiens
atatccttcatgaatataaatgcaaaaatcctcactaaaatattaggaaaccaagtccaatgacacataaaaaagattatatgccctgaccaagtgaggtttgtcccaggaattgaaagttgttctaacatcaaaaagtcagttaagatattaatagaataaagagcaaaaacaaaaaaatatatgataaatgccgaaaaatcattaaaaattcagcacttattcatgataaaaactctttaacaaacttggaataaaagagaattctttctcaacctgatagagggcatttatgcattctatgaggctagtattatcttatagcaaagacctactgctaacatcttccttaatggtcaaagatgaatgctttttcccaaagttcagaaacaagacaaggatgtccatttgtacctcttattcatcatggcactggatgttctaacaagtacgatcaggcaagg

SEQ ID NO: 185190 - DNA, 487 bp, Homo sapiens
caccatggaacactttaagcaataaaaagaaacaggactactgatacatgaaacaatttgtataagccttaaggaaactgtgctaagtggaaggaaaaaaaatagtctcaaaaagatgcatactacatgattacatttatataacactctgaagtaacaattatacaaatggagataaattagtggttgccaggggtcaggcatggagagggacggggtagatgtggctataaaagaataactcgatgaagctttatggtgatagttcagatatgtatcttgattaatgatggttacacaaagctagacatgataatagtgcatatagctcttccccacttcccccaataacagtgctagtataacgtgaaatgtgaataagctctgtggattgtaccaatgtcaattccctgattttcacagttattagagatgtctgctagtcacgcaaggtgttaacaatgaagcaggctcagtgaaagttgca

SEQ ID NO: 185191 - DNA, 441 bp, Homo sapiens
tcaggctccaggaagggtggcagaatgcaactctgcaggaccttagctggaagcgccatctgggagaaggaagacttataaacatgttcttccagaagcctgtgtcctccatcccctcacaaagacagcagaaataaatcacaacgatgtggttctgcatcagcacacctgatgctatggcccaatcaactatttttgggaatcaatagctctcttaaagctttttagtagagtatctttttatgaaacttctgcaatttcctaaatcagttctacttaacgttatatgaaatgattgatagattaaaaatacatgtacccatgtatcctgggaccctaatatgcaaagtaaagtaagtggtgcttcatcaaaaggatgccataaagaggaagcagccgaactacttgtttccttgattgaggccacttaagacaaactgg

SEQ ID NO: 185192 - DNA, 791 bp, Homo sapiens
aagtcagagatagagctgagactgatttaaggggaaagttgcgggaatatgaaccctgatcctcttacaatggcattctttggacttctaaatcagaaatcacttctgacctgccctctctattggtgtgtcctctattgtgtccaattaagccttgtcatataccaacctggatatactactgcattaaaaaaaaacccattatttttcataatgtctgtgttgggggcagagggagaacagggttcttagattatgaggcaccagataagagattccaggtctatataattttttttcttcatgcatgcttaatgatggctttttggtaataaagatattaacaacaatctggtagtcgtaaaggcctcttctaggtattgaatacaataaatcataagacataaggatgcagcaaaacacgcctcagagcagaaagctggctaagtggaaaatattctcacaaatgtgaagggggtaaaagattgctcaaatcttatctagaaaataaaagcacaccagagaatagaaaggaagctattgtgtcttcaaggggacaacactcagcaaatgagaagcaaaattacatttattgccatattttgaccctgtctgagctcagtaagaagagaactaaaaataaattccatttttatatattaaggaatcaaagcagggttgaaaagtctataccaaaaactcatcagaacatcctagggcatgttttagagtctcattaaacatacaaatatgttacatcttctctatagtgaaagcccacggtaccggct

SEQ ID NO: 185193 - DNA, 748 bp, Homo sapiens
gagaaaagcaatgccaacttaaatgtctgtggccccacaattcacaagcactgtagcactcatcctcagtggctttatacgtcctctgagaagcacacaggcaggcatcattcttgccatcattccgatggtgaaatccctgcatgcagaactcattgacttctcaaagatgttacctgttccattccactaatacatgtcttctctaaagcagtgtctttatgacctagctgcatatacttacatttctgaattcagagtaatttcagtacattgctgctgctgctgctgctgctgctgctgctgctgctgctgctgctgctgctactgctacattacaattgtccactaagcaatcagagaaaattgctaaaagcttctttactgcttccattccatcagcagaacctttttttttctttctttcttttaaagaccagaatgaatgtttagagtactaaatcttattagtggtcaattgaagtattggagagccacattttgaaggttctctcccccacccaactccattccccacagcaagaaagggagtgtttttatatgttgaattctttgttaaaaagatgaaatgtcctgattttccagtcacaagacagtaattactttgcacatacagcatatcccattttaatgctaaaaagggaaatgtcactcaatttaattcatctggaagtttcccagtgtcaagataacattgtagcctttttaaatgcaattaaatgtatct

SEQ ID NO: 185194 - DNA, 124 bp, Homo sapiens
ctctcgaggaaggacccggaagttggcccgcaaagctggccccaacccactctgatctgtggtcccctccatggttgcaggaagagtggtctcttttgtcttggcttacgatcgtccagtcggg

SEQ ID NO: 185195 - DNA, 1244 bp, Homo sapiens
cacacagtagtcactaagccatgatttgtacttatgatttgcacactttggtggttgtaaattgtacagcaatctaaaaacaaatgaggtcagtgtgcctcactacagagcttcaaaagtggtagatagcacatctcttttttcttttaagccatctaatacagagttgcttggaataaatcctaatagatacagtgtttctagaaacaagtaaatgaataaaccttagctgttaccccgtaggagccaacagaggtcaatctgttctcaagcttttacaaagttacaagaacaagtaatcagtgcatattttgttgaaactcctactgcaatactgaaaacttcaaatggagagcagctcctttttggtaattcacaacagacttagttttcaaattaccaagaatataaggaattagattagaagcctaattcaatttagaattatgagacattatttgtaacccacaagtattatttttcccatgatactgaacaattcacctggcatgaacttaaaagaagaaaatgcttattgcagccttcttgctttaagagcgaaaaaaacaattttgctagctgtggagggactagaatacaatgtcactttaagatttacactctcaaaagttttgacctatcagattgagagccagagagagagacagacagaaggagaaggataaatcaaatgtggtaaaatgttaacctttgggggatctgggtagaggggatctgggaattatttgtactattgcaacttttctgtaagtctgaaattgtgttgtcaaaagtcaaaagaaaaaatttataaatactttatcatccatttgctttataattaggtacagagtatgatgacagagagagcctactgtatgccagatacttaacagaaggaaagtagtttatatgtaaactctgggaaaagtggagccaaatgattacactgtgtgtaccctttagcactgtttggggtggggacatggggggtcagggtgcagagagggactgttctggtctccttggaaggtatgtgcctatagtaaaaagcatgagtaagatatcacatctcctaactccgtaacaaccaagcaaacttataatagcattttaacttatatcaccttttttataggagcggatatatattccagcagcatgagtattttagccctctttgcaattgcagtcttcattcattatcatcaataaactggcctctggttgattgatctagtcta

SEQ ID NO: 185196 - DNA, 263 bp, Homo sapiens
gtggggaggagcagggatggggccagcaggagatgttgacagaagggcatgaagtttcagttagactggaggaatacgttttagtgacctattgtacttcatggtaaccatggtttgttctccttgggaagagtggggacgggtccctgaagcaccaagtcactgaaacttcaatttattgtaaggacaaattcaaaagttggaaatcagagatgaaccaatgtggatcttccagtgttgactcaatatggggcaaacatttt

SEQ ID NO: 185197 - DNA, 298 bp, Homo sapiens
aagttgtggtaaaatacacacaacataaaatgtactatcttagccatttttaagtgtacagttgtgttaagtacattcacattgttgtacaactatcactactatctctagaactttttcatctttctgaactgaaactctgcataaaacttccctgttccccgatagcatatgtgatactaacataggcatgaaaagcacttgtacatggggtgggggctgccctctcttgctgccaggatcacctgtgctaccactgaacctggctgggttagtaactctgcagatccgagaccat

SEQ ID NO: 185198 - DNA, 338 bp, Homo sapiens
ggggcaagtgcctatgagatatggtgtgggtgtgcccagttggcaggtaggcacatggatgtggaaccttagtttccttaaaacatctaacaaagttaggcccgtttttgagcagcatgtcccatgtttaagatgcattcctcaggcataataaaagcaattctctgtgacttagtctcacctctatataaatctgaccaaagagaaattcatgtaacatcccacatactcgttttggtttgcacaacaattattattttttttttaaattttaagcaaaaagtttatttaaacaagatatgtgaagagaaaagtatctaggattctttttttttttt

SEQ ID NO: 185199 - DNA, 263 bp, Homo sapiens
agacaccatctctacatacaaaaccaaaaatcagccaggcgtggtgttgcacacctatattcccagctactcgggaggccgaggtaggaggattgcttgagcccaggaggtcgagactgcagtgagccaagattgtgccactgtgcttcagctcaggtgacagagtgagacctcatctcaaataaataaagaaatgaaattatatgatatctagggtatgagtaggggcatagatgaaatagatgggcattgtgatgaagctt

SEQ ID NO: 185200 - DNA, 454 bp, Homo sapiens
ctactacaaatacgaaattagctgggagtggtggggtgcacctagtagtagtagtcccagctactcaggaggctgaggcaggagaatcgcttgaacctgggagcggaggttgcagtgagctgagatcgtgccactgcactccatcctggagacagagcgagagtccgtcttaaaaaaaaaaaaaaagtgttttttttttaaccagttaaaatctggaaagaaagataataatacagactttataatttgattagaagttatcttgtaatatgtatttataaaataatcatgaatgtaacaagctacaacatagtccattactgagttaaaatccacaacaaatacatataaatatatgtaaaataatgaatatatactgaaaaattcagtaaatattgttcccaacacaattatcgattttagttacaaagaatttcagaaactcctatttaag

SEQ ID NO: 185201 - DNA, 427 bp, Homo sapiens
gattatgggagtgagccactgcgcccggcccaactgttttcttgtccaacctctactcttctggcactgcttcctccccaccacctctgtttacatgtcatagggaggcagccattatgtacacaaatgatctgtccacccttggccacagctggccagaaccaaggccagccactcagggtcctccctcaggaatatggcattacaactaaaagatgacagcttagcctggctggaatcaggcatggaggtacaagaacaggtggtgtgggctaccaggtcccaatgtaaaaactggccctcaaagccagtgtagctgaggagaatgaagcaagcagggaggtgagtgagactcaatggccttttgcattagagacctcttgactctatcgtttaagttgggctcagtgaatttctttctttcctt

SEQ ID NO: 185202 - DNA, 445 bp, Homo sapiens
aacccatggcagagtctgaagatttgttttctggagagggcagatgaaaggtctctgaaatgagggatgctaggtagagttacaagtgtgggcactgtcaccaaaaccacaggattatgtgatgatatgtaaaccacatgctgaatgctgcagccccctccccctgctggcctcccagcaccctggtagctagacctttaccctctaggtaggagataggataacttttctcctagaacctaactggcctagaggaaagaactaaagatactgatattagtggttccccaacaaatgactattcactgaagctcaaagttgacaagtgccatacacacactcaacgttcctttcaacttttaatcctccacacttaaacataagcgggcagcaaggggtaccaacatctgaaaaaagaaaacttctaatataaaacattgaaaca

SEQ ID NO: 185203 - DNA, 182 bp, Homo sapiens
ttattccctgctgcagagcctgtggacccacagtctggcttacctttattttctccatctccagaatatgtctctcctccatacccccataaattaaaagtgacttaaatatataaaatggaagagagaggcaggataaaactgtttgataacttaatagtacaactggccagtctctcgta

SEQ ID NO: 185204 - DNA, 221 bp, Homo sapiens
agagggagatcgacgatgcagcactgatgaagggaggtctgaggtgaggcagagtgcataggtgtagggattagctttaacaaggtaaggaaggaactgtagctgggagaggcagaacaattttgattggacaagaatagtggatgattgagtttataagcaataaaatcattatttttcattgaagtcatatgctgtggcagataagggaagaacacagc

SEQ ID NO: 185205 - DNA, 274 bp, Homo sapiens
cgagtgcagcttgatgctgtaagtcgatctagatgatcccccaataaaacgccaggaatgagtccatctgctctgtgacctcccaacctgctgacttcccaacccacagaaagctcccggggtcctgggacaacacaggaccctctctctcacatttctaagtttgcttcctctgcagctagctacagtgtgtccaacaaaggcaaactcagagcgagtccatcctgcctgagcagatggccacaggcctggtcattcttagtctccagtctgt

SEQ ID NO: 185206 - DNA, 919 bp, Homo sapiens
gctgcagcagagcagagacaggagcggagacccttgagtcatccaacccctgttctgtgctacactctttttccaactctaaattttatgtgcaaccagcaagcaatcaagacaggaaaaacaagcaaagttttacatacaccgacaaaatgctgatctgtctattctattaataatacaaaatctcagcaaatgcaaatggcattgcatgcataattccataaaaagttaaatccacactaaatgtttccacctgaagtgacatttccagcgacttctccattaatatagttaacgctgtttttttaaagagattattctgtatctcctaaaaaaaatgtagatgctaaaaaaaaaacaagaataatatccaaaaagtgaattctatataccaccttttattctgaaatactgcacgtcgtagcacaagactaacccacaatcatatagttagaaatatttctgcccacagtctaatgcgaatggtttttcgctttcttttttctttttttccaggtctcagtgtaatactagcgctaaaggaataataatcaacctcagattcagaacatatgccaaactgctcaaactgaggctgaaggatcacttgagcccaggaggtcgaggctccaatgggctgtgatgcgccaccgcactctagcctggacaacagagcgagaccttgtctcagaaaaaaagaaaaaaaaaagccatctcattatcaaccatgtctatctttttttaaaagaagacaaaaaaaaaaaaacgtaattttaatccacttccgtagggaagtgacttcttagcactgactttagaataatgacacaaaatatcttgaagtaggaccttgaaaaatagtcatgaacatgtaacatggaagaaacaagtttcagaaaatataaatacagggggccag

SEQ ID NO: 185207 - DNA, 301 bp, Homo sapiens
tcaggatacaaaattaatgcacacaaatcagtagctctgctatatactaacagtgaccaagctgagaatgaaatcaagaactcaaccccttttacaacagctgcaaaaaaaaggaaaaggaaagaaaaaaaagaaaatacttaggaatatatctaacaaaggaggtgaaagacctccacaaggaaaactacaaaataccactgaaagaaataatagacaacacaaataaatggaaacacatcccatgctcatggatgggtagaatcaatatagtggaaatggccatactgtcaaaagcaat

SEQ ID NO: 185208 - DNA, 528 bp, Homo sapiens
atctctcagttctgctccacagatctgaggaccccacaaggtgctcccgggcatggtaaacagtgaaatacattgtatcaaacagtgaagggagaaacagcctgaagaatccactcatcacttttacctgctttatatactgggattccaaaagtgcatttggagaaacaaaatgagttctgaagctcaaataagtttgaaatctaaaagtggaaatattttattgtcttcaaattacagactgattggcttattgaacatctctaccctggtttctgttcgacaagttggaggcctaaatttcccaaaataatacagtacacaaggagcaagctagacttagggacagttaatctggtgctgatcactgttggcatgctgcaactcatcgagatatttgtcagcctattatcagcttttgatttaataaacttaagctatctctaggccaaattgtagatcctcggtaggaatgcaggctgttaatgcctccccatagccttcgtctaaagagcactgctaaaatca

SEQ ID NO: 185209 - DNA, 297 bp, Homo sapiens
aacaaataggcagaaaatcagtaagaatacacaagaaattaaaaacaccatcaactgccttgacctgtttgatgtttacagaacactattcccacttggagaatgtgttctattcccacctggagaatatgtgttctttaaaacatatttaaaacatacaggaatagagtcctgtatgtatgttctactttatttattaaagtagaccctaatctggttcatcaaatgagtttcaaacattttcaaaagattgagatactacaaaatatgcttcttgtttataattaattaaattag

SEQ ID NO: 185210 - DNA, 465 bp, Homo sapiens
atgtttgacagctccttccccaaatttcttttggaaatcttcaaaattcatcagggtttagattgttgacctgttttgaaaaccctaatttttaagttttcaatcttttaagccttggaaaggataggcatttaataaaagagaaaatagatgattttatatgtatgagaaaatacatcgctttaaatttactcgtgagattcaccaatgatttctgaacaccaaacattggggtggcccagtgacttaatcggagaaacacagacactttgaaaagaaatgtgggatttaaaaacctgcaaaactgagtctgtcattctttaaaatgccatctcaagtcacaaaataatgatgttaaaatctgaaaccatatgtgttttgaatggtttaggttctaaagaaaggtacaataatgccagtcttttgggtttgtacatgatttgtttctttctcacacatctgtca

SEQ ID NO: 185211 - DNA, 598 bp, Homo sapiens
aaggagagggccactgttgtggaagttttacccactccatacttttgtttggaaatgtcactggtttgttagaatatccatggaaaccacattgaattgacagataatggtcctttggtctgtattttcatccttatgtttattcttgtagaaaacaatgaattcaattcactctgtctctcatcctacatttattcctctgctgttttcactgaatctcaaaatctttatatacaacatggggcctaagaaggatctgaagagttgttatgatttggccatatcctttcttgactctcatacaaaaggtgaggaaaaaagaatgtcatttagagtggctgtgtttttcctggaccatcttgtacaagaatccagttcctgctgaaattctgacaacccttgaaaaagctaaagcctttaacccaagttaattttcttgctttgctaagaatgataatcttgtcataaatgctatttaaaattttaacatttgagctaaagtagcacataggaggtagatttttaaaaaaatgaaatgttattatctaacattttttataacttgaaagtgaatgagcatattttgttctaaatctta

SEQ ID NO: 185212 - DNA, 446 bp, Homo sapiens
attactgaaaacaaagtattatgaaatggataagtagtgcagttaagctaatagtgataatctctcagttatttcagctgccaatgaatttctttgtgaaatcatattcaaagttttagaaaaaatgtcgaaggtcctgttcaagcttaaaactatacttgggcgggcacagtgtggctcacgcctgtaattccagcactttgggaagccaagccgggtggatctcctgaggtcaggagttcaagaccagcctggccaaaatagtgaaacccggtctctactaaaagtacaaaaaattagctgggcgtggtggcaggtgcctgtaatcccagctattcaggaggctgaggcaggaaaattgcttgaacttgggaagcggaggttgcagtgagccgagatcgtgccattgcactccagcctgggcaacaagagcgaaactctgtctc

SEQ ID NO: 185213 - DNA, 154 bp, Homo sapiens
caccgcgccgggcctgatttcagtttcttccagcccttcctattgttaacatgggggttgtgttgaagaatataaagttacaaagtcaaggaagtaggaaacatttttacaagtattatgtagccatcttgtggagcgtgtggtgaggtaggct

SEQ ID NO: 185214 - DNA, 391 bp, Homo sapiens
ggcggccagaggatccccctctctccacactggtcgggtgtgagggttatatgcaaagtcgtggtatgaacaaggttcatttcctgaagaatcaattttcctcaatgacaaataaattaaatctcttttatactgcaatatctattatgccctgaatataaaatatttgcatgtaaaaaaacaaaagtactagaaataacacatgaatgaatttttatataatatagaggaataatatggcatttataaaatttggtaagcatgataagaaaccatgcaaaagttggctagatcacactattaaaacaaacattcatctgtatggcaaacacatataagtgaggttaaaataataaactgggccgggtggagtggctcatgcctgtaatcc

SEQ ID NO: 185215 - DNA, 216 bp, Homo sapiens
tcctctaggctttccaatcctcactattcttctctatcaaagctttttctatccaactgccagtgacataactttagcccttccaaagaattcttcctttcctcactaatacttcatgtgtaatctgatccactttatcaaagtaaacaactggcactgcctaacaatcctagcacaaacaatcctaacaatcccaaggcaaaatcgagtagcaat

SEQ ID NO: 185216 - DNA, 528 bp, Homo sapiens
tgcatgttctagctaggtcaattaggcaagaaaataaaataaaaggcatccagttggaaaatgaagaagtaaaactacctctatttgaagatgacataatcttgtatttagaaaatcctacggattccactaaaaaattattagaactaataataagtgagttcagctaggttgtaggacacagatcaacatacaaaaatcaattggatttatagatagtaacaataaacaaacaaaataaaattaaacaattccatttaaaatagcatcagaagaacaaaatatttaagattaaaatacttgtacattaatagaagtataaaatttatactctgatattacaaaaccttctgggttttttggtggaaaggtggccaagatcttgctctgtcacccaggctagagtgcagtggtgtgatcacggattactgcagcctcgacttgctgggctcaaacgatcctcccacctcagcacctccaagtagctgggactacaggcacgtgccactgtgctgatttgttaaaaaa

SEQ ID NO: 185217 - DNA, 527 bp, Homo sapiens
cttcagagatgggctcagtggggaggaacagcagatattatgagcaaaatacagtttgctacaagagggtagcttaggttgaatctgagaaataagtgttcgtagggctgataggtcaaggaggaacatgaattatctagacttaatagttattaacacattaccagcttgcattatcattcacttctccctttctggccaaattatttcaaagttaattctaaatatcacgacacccttaaatataccacatttctctaaaaagtgaaaatggattcttacataaccacaataccattactacgttcaacaaagttaatggtatctaatacgaaatctgtgttcaaatttctttgatttaaaaaaaatttatatatattttgagacagggtctcacgtctgtcatccaggctggagtgcagtggcatgatcatagctcactgcagcctcgacttcctgggctcaggtgattctcccacctcaaccttcctagtagctgggactacaggtgcatgccaccatgccag

SEQ ID NO: 185218 - DNA, 402 bp, Homo sapiens
cccttggacaggcaaatgccatcatctttcattgtttcctggactttcagcagtcacctgagcccccctccatgcccgcttcaaggaggcaaaggcagaacctgcagatggggcaggctctggggcccgggcactaagttcctctctggttttcttatctgctaagcatcaacacaggcttgggttggaatactgctaatggaaacaagttccagcttcttctgtaagcaaacaacattcctgaggtggaaagggaaggggggcccacccgcagtcttcagctcctacctcctgggcactggcagctgggaggagccccccactccttgttagcctggggagagtgagggcctaggtcgaggctgctgtaggttattagccctgggtgacagaggagccact

SEQ ID NO: 185219 - DNA, 298 bp, Homo sapiens
gtgctctctcacccaccccatgtgccatcttctggagtaagagggagtgctttcactgtgtgcaggtgtggctaaagagtattcactgtgtgcaggtgtgggtgaagagtattcaccgtgtgcaggtgtggctgaagagtattcaccgtgtgcaggtgtggctgaagagtattcaccgtgtgcaggtgtggctgaagagtattcaccgtgtgcaggtgtgggtgaagagtattcaccgtgtgcaggtgtggctgaagagtattcactgtgtgcaggtgtggctgaagagtattcactg

SEQ ID NO: 185220 - DNA, 292 bp, Homo sapiens
tatcataaattatggtgcaaccggtctgtactgttgtgtgattttctctagcaatgcatatctgtttaggtacaggcacagtaatgagagtaataactaggtttattcaatgttatagcaaaggagtttgttatacagacaagtgtgttattgaagtgaaagtggtaatggggctgatgaaaaggagataaattgaagactaaggaaggttgtaggggagtagttaatattagtaagattttgtaataacagctacttagaagagggagagaatgggagcagacagtaggag

SEQ ID NO: 185221 - DNA, 521 bp, Homo sapiens
gtcccttaggaaatgtgttctttacaggcatttgaaaactatagggaatagtgattggggtcagaaatggcatcactggggctaagaaaccaaagataaagtcactttggagctaacctttgtattcagagagctttgtcctaatcctgcttagaatttccacggcgtcttttcttcccttaagagaaatcaaaaggctttcacttttcccctctctgccctgtgaagacaggcattcaaaacctcgttttgcaggttaaggaaattgagttcatggtctaagatcacagtgaattgaacagactcaaaagcaagcatttaatctctctcactctctctcttaaatgtagttcttagaatgagaattctcagtggttttaagaaaatggtaatgtttgtactatatttaacccccagaaacagaacatcaaaaccaagacactttggcaatcgtcttatccaatgttctcattttaaagatgtggactctgggccgggcgcagtggctcacacctgtaatc

SEQ ID NO: 185222 - DNA, 702 bp, Homo sapiens
tcccttagctgtatttataaccatcttccacatcacctgctgttgctaaccatatactgtacaccactttcacactaccttctcatttagtactctcagtatttgtatagtgtattatggcacataaaggagattacatggagtgattaccatttgagtgaggcaactacataacaaaaaagcaacttggatataaacttgtaagatagagaacactcggctgggtgcggtggctcacgtctgtaatcccagcactttgggaggccgagacgggcggatcacgaagtcaggagatcgagaccatcctggctaaaacggtgaaaccccgtctctcctaaaaataaaaataaaaaaaaatcagccgggcgtgatggcgggtgcctgtagtcccagctacttgggaggctgaggcaggagagtggcgtgaacccgggagcttgcagtgagctgagattgtgccactgcactccagcctgggcaacagagcaagactccgtttcaaaaaaaaaaaaaaagataacactgttcttataaatggctaggaatgtcaagtcaagcaggcataccatcagtgtgggatacaactagtcactttggcggacatgggttttagaggaattaactaggaaggggtgtttcaagaaagtggacccacaggagcaaagacaggtactaccaaggctcatataggagatgataagc

SEQ ID NO: 185223 - DNA, 253 bp, Homo sapiens
catgaccagcctgatcttttctattatctatttagtctctatttcgtttatttctgctctaatacttattttctttcttctaactttgggctcagtttgctctttttctagttccttaaagtgtaaagttagtttgtctaattaagatatttctttttgcttaatgtaggcatttctggctgtcaactttcatcttagaactgcttttgctgtatcccgtaagttttggtatgttgtgtttccttttcgactt

SEQ ID NO: 185224 - DNA, 465 bp, Homo sapiens
ctgggtccttagctctactatccaatactattgaatttaaaattggtgctggatattggattttattatttgggcaataatatttaatgccactgaatttctagaattatcattaatctagagtgaaggatacagattacctcaaaaaaaaggggatggttcctgttaagataaaacatcttgaagattttcttttctatttcaataaaccgtcaagttttccttaaaagggttgatctaaaaataatttatgtggagcaaaaactcccaaaatccttctacaaagggagaaaatagaagccttagggtatattaggaaatctggtgaaaatttattctgagagaccaggtttctgttgttctctaacattacatctctatacaaatttcactgagcaggattcagacattcccactcctcctgagaaaattctatggccacagccttgaaagttaacatttcct

SEQ ID NO: 185225 - DNA, 173 bp, Homo sapiens
gacagatggatgttcatatctgcttctgcattcacactgtcaccatcttagggaaccccagggatccctagactatactttgagaacctctaggctaaatgattagttctgttgatccagaatgacactctttagcagtagttcccacacctattgtggcgtcagaatctctc

SEQ ID NO: 185226 - DNA, 137 bp, Homo sapiens
tcatcagatcctgtctactgcatcactccaacgggcacctgtcatcactccatcttaaacacgccattccgcaccccatgcctctgtctcgctgctctcctttacagcaaactcagggacagaatgcaaatactcat

SEQ ID NO: 185227 - DNA, 471 bp, Homo sapiens
ctgcatttgtgctacagtgtgtccaggagtggatatatttttaattatggtacttggagatagttgtgctcctgagtctgataatttgtttattgatattgtgcctgctgttttctgtttttcctgtgcaccccacttaagggtacagtggaccctctcagtctatctcccacattcccacgctgcagtctctgctgtgtcctaggttctttcttcacatctttattccaaatgattaattctcaccagttatttctaatctgctgttaaattgccaacagagacttctatttcaacagtcatgatttttacttctagatgctttattattttttttaagaagattcctggtaaattgtgatagtcttttgttgcctgctcataatccagcttttatttcttcgaacattgcgattatagtatctgaagtcattggaatgctctgttctcttggcctgccctcattcaggc

SEQ ID NO: 185228 - DNA, 265 bp, Homo sapiens
ctgatgtgcagcctcacattcaagtcaccttttgctggtgtctgatactgtagttgggaacagcctgaagcattgtggcacactgtgtaattaaaatacccactgggctgaagtggaaatagaaaggaaagagacatttcaaagaataattactaagactttgatcaaatactgtatattagggatatcctagcaggtcttatctcctctattagaatgcaaataccttcctgacagggcctatttcgttttctactgctccttg

SEQ ID NO: 185229 - DNA, 242 bp, Homo sapiens
ggcggacctctcctacggttcttatggcccctgtgcacaagccctacctacccactcagcctgtcccatcagctctttttgaagaaactttaaaatatatcatgaatattggtagagaaatagagatgataatctgttggggaaatgagtagaataccataaacaggagtattcagaggatagggctcttggaaattaagagtgtaatggcagaagtgaaaactaggcagattggaggatga

SEQ ID NO: 185230 - DNA, 107 bp, Homo sapiens
ctttctttttttggatgataatttccacagctctttggaaagacaagacagtcagcactagacaatactgtgcattgtaaaagacccacgatgtttcttcaataatg

SEQ ID NO: 185231 - DNA, 704 bp, Homo sapiens
ttcttcagaaaactgccagcccctaacataatatcccatgaatggtggatgattaataggtgattctagaaacatgaagctagaagaagcctctgagatccattcattcaatagtttaacaagtttttactgagtgtccacaatgcaccagacacttttctaggatctgagattaaggaggcgaccaagaaaaaagctgacccctgccgtctgatgctcagtttctagtgggtgagagagtcaatctataaatcagtaaagaaatcataaataaatgaagcactgggtaatgctaagggttgtaaagcaaactgcagcagagtcaagagctgagagttggggaacgcaggttggtttagccagtaatgtctctgggaaggggaacattggagcacaatctgagtgggctgaggactgggtcacactgtgacttagggttaaaacagtccaggtagaaggaagagaagtgccatgccctaagacagaagtgagcttggtgcattacagtgacagtacagaacccagggcagaggtgagatgcccaagacaggcaggaaggctggcagccaagataagatgctagagtttactcccagagtgaagggatgcagccatctgagggtgttgaggcaggaggtgaacaaatgtgacgcacttttaacattactctaactgccatggggaacaagagtggaagcagaaaa

SEQ ID NO: 185232 - DNA, 1248 bp, Homo sapiens
ggatttggttattttggaaggtctttttatttggcaggacagttttgctgctggtattattctcacttgacagctgttttcttcaggactttgattatgtcacacagttttcttctggcctgcaaaactttcatgaaaaattaactggttatctcataagattatgcttataaatgacacattattttcatcttgcagctcccaagattctcttgtctgtgactttttaaattgtgcttatatatgtgcttgttatataaatatctttgtgtgtattctagtttgttgagccttttcatttttacatcattttatcttacagtatttcagttattttttgtattttttccctccacaatttgttttttaatatctttcattgtttttgttgttattcccatttttctgatttttaatagttgtctgtgttcctgttacactagtggagtattattcaatttattttaaatttttaaaatatatttgtgcatctttttttgttttgttttgtttttgtttttgaggcagaatcttgctctgcattggccaggctggtcttgaactcctgacatcaggtcatctccccacctcatcctcccaaagtgctggaattacagacatgagccaccatgcccagcctgtatcttcattttttaatgcttgctttctgaaaattttataataattgatagggctatgttgccctaatattttgtatacattgtaatcttcaattgaaatttgaacattaaaaaaagctacctgtcagtgtttataatgcaactttgtcctggcaaagtctgagaccatttgtctggctaaagattctgagagtctttcagacatgttcttaggatgtgtcatgtctgaaattttttagggtttttttagttcattcttgtttcttcttaatagtcagtagtcacttgctacaactgttccctgtctctttgcagctgtagcatttacctatgatctcagtggactcaacattttgtcattccaaagtatcctgccatttgtttcagcactttatgtcatgggaaacagaaaccagtgtctgcaaaagcacctagaagccagaaataaagatgtatgtgttattatttctcttgccttttgaaaaagaaaccaagagttggcagtttacttctagaggcactatgttatatcggggaacagaaagagctgtgttgggtaaatgtaacagacttttctctctcttctgtgtggctctttgcattgtgc

SEQ ID NO: 185233 - DNA, 289 bp, Homo sapiens
attattatttttctaggtattttggcagcggggctagtaatcttacttcaagaaggctgtgatctgcacaagtcccagagacaagctggctttgtaggaggagagagaacatgcgagtttacatttgtttgctgagagaaccacatactttaggctcagcctgaggagcgactcactgtattcagggatggtcaggatccagatatgccagagtcagtgggaagcctccagatccctagtcacacagatagaacttaggcacctcggaagcaagctgctggattatgtg

SEQ ID NO: 185234 - DNA, 350 bp, Homo sapiens
aggaggcgctgcactccctggacttggatgatcttgagtgtgaacccctcctgaggggtggcaccttggccacctctctgaccttatccccatcctggctctggatgtgggtgcctcttgatcctgaatgtgctcttttagactggccttggcacgccctcccctcctgctcactcattcacctggaactttgcactcacaggttctctcctggccattatgtagtctcctaaagatgtatggaaaggccacaaaaaggctaaatcggagaaccaggttcttcacctggtttctgcctcagcaccctcaaggaatacagggcaccccatgaataacaatgttcactggat

SEQ ID NO: 185235 - DNA, 326 bp, Homo sapiens
gctaaatgttctttccagaaataaacatttgcctttatttttgccagtttacctgcttccaaattgcccttcccaaaggcagtttaaaatttatacagtttgaacgtggtttctacatgatctaaatgatagtaatctttgtatttcagaccacaaagcaagtactcagaaaatacttgttccaagaaccactgacttaatgatttagtaaactaccaagttaagagaaacaaacctccacagtataccatttggaagatatatatggaatattaatatttagtttgtgaactttttcttttggctgtgagtaagtctgaacttgg

SEQ ID NO: 185236 - DNA, 231 bp, Homo sapiens
  misc_feature (189)..(189): n is a, c, g, or t
gctaaatgttctttccagaaataaacatttgcctttatttttgccagtttacctgcttccaaattgcccttcccaaaggcagtttaaaatttatacagtttgaacgtggtttctacatgatctaaatgatagtaatctttgtatttcagaccacaaagcaagttaaactcagaatactgtccagaccanctgctatgattagtactccagtaggactgatcgggtcctcta

SEQ ID NO: 185237 - DNA, 308 bp, Homo sapiens
ttttcttatggctttcttggcataagacaaagaataggtcactctctggggaggaaacagctcttctcagcatgaataaaaccagagaatctcctcctcaattatggtgttagttggagtgctagaaatattgttgtgggtgtgactgacgttctaagtggatttgttcctagaaagttggagacattcgaattgtgcactctcctcttcctcagacacacactgtaatgctctcctttcttcctaaatcccagctcactgacggggcacttcagttagggaggtgttcggatggagggtggccctgg

SEQ ID NO: 185238 - DNA, 220 bp, Homo sapiens
acagcagtcacacacactaaaaaacaaggaaaagaaacaatagaagaataatcaacagtagtgcatttttgttttatttatttatttagagatggattctcacactgttgactggctggagtgtaacggcatgatctcaactcactgcaacatccgcctcctgggttcaagagattctcctgccttggcctaccgagtagctgttattacaggcacctgc

SEQ ID NO: 185239 - DNA, 351 bp, Homo sapiens
accttgtaatccgccgtctcggcctcccataaagtgctgggattacaggtgtaagccatggtgcccagcaacctctcactgtatttcaagttcaaatgtgatcaacaaaatacttattctatttgggaaaataagtattttggaaacagttaatgcctcccacaataaaacattcccacagctgaatcaacatttaaacttactattatctccacagagggaaaaataaacagatacaaacatcactgtgagcctaattggaactgatcatctaaaggcagacaaatagcaacagaagggacatgattgtggaaaatgtaaaaagaaagccctattggtttaaccctattc

SEQ ID NO: 185240 - DNA, 635 bp, Homo sapiens
aattcgtagacacagaatacagattagtggttgccagggcctggagggagaggaagatggggataaactgcttaatgggtaagaagttttactttggagtgatgggaatgttttaaaaatagaggtggtggttgcataacattatagatgtactaaatgccgctgttcgttttagaatgattttatgttatgttaatttcacctcagtaaatgtttaaatcaaatgaaaacaacttgctgtaggagatgaagaagtaaggagcaccccatctgagtgtgagatgcctctggggtttgtccaacacacagcccagccgaggctctgagggaggtcgtggtgcagccactgatgcatcacagccacacgtggcattcacacaagcatggtttatgacttgggtaattatccaagctgttccacaaacctggaggtcactcatcgtaaaagtctttaatcataaagatgtgtttcctcttcacagaaggtgtgttttgttctggaagggctcagagtccttgtccttttttccaattgggtgtcagagtacagtgcaagcaactgtatttgctttcaaatctttttcttcaccttttagcccaattttactgctttttaaaaagatgttctttggccg

SEQ ID NO: 185241 - DNA, 546 bp, Homo sapiens
tttttgagatgcagtcttgctctgtcacccaggctggagtgcagtggtgtgatcttggctcactgtagcctctacctcccgagttcaagcgaattttcctgacctcaggtgatccacccacctctgcctcccaaagtgctgggattacaggcgtgagccaccacacccggcctcctcttggttttaaaagccatgcatccaccaagcagatgcttctgtccctggaatcccagctttgcttggtgatcagaaactccaggggtatcagtcagtcttgaccctttggaggaggtcaccaccacatccaggcagggacagcgatttatgcttttccactgatacctgttctagaaccagagggggtcagccagcatggtgcactgagtccccagagcagggtcccaggtgcagcctgaaggatggaaaagacatgggccctgccctcagggagcggatgctctggcaggaacttaccatggtcatgcagacgtcagggtggaacaaaggaaggcgcattaataaaccgcaaatgtgaagtgagtagaa

SEQ ID NO: 185242 - DNA, 389 bp, Homo sapiens
atctcatgctcctctttttcaaacatttggccatttcactcacccccacacatcccactttaaaacagtgacaacaaccacttcctagtcactacactgccttcacaggggccaacccctctgatatgacgttcacctcccacctgctcctccctccctcacaccctcttcttcctgttccctgcatgtgccctattctctctcctcactatctcaactgcgttgtcctgtcctgtgcctgaaacaccctcccctgccctcatccccttgtcaatccgggaactcccactcctgctgtaagactgttcccaaatgtcacctcctctgtggaatcttcaccggtccgaggaggagtagggatgccatccaaagtgtttttacattcttgg

SEQ ID NO: 185243 - DNA, 122 bp, Homo sapiens
tacgcaaaggcatacagagtggcataacggacttcagagattcagaaagaggagggtagggaggtggggataaaaaactacacattggggccaggagtggtgggtcatgcctgtaatcccgg

SEQ ID NO: 185244 - DNA, 429 bp, Homo sapiens
gcccaatgacagcttactgcagcctccacttctgggctcaagtaatcctctcatcttagcctcccgagtagctgggactacaggtgtgtgccaacacacccagctagtttttaaatttttagtagagaggagttcttgctatgttgcccaggctggtctcaaattcctgagtttaagtgatactcctgcctcagcctctcgaagtgttaggattacaggtgtgaaccaccacacgtggccttatattctgttttttgacaattgccattctaatgagtatgaaatggtgtctcattgtattattgatttacatttctctagtgactagtgatattgggcacttcttcatgtcttttttctttttgagacagagtttcacgcgtgttgcccaggctggagtgcaatggcatgatctcggctcaccgcaac

SEQ ID NO: 185245 - DNA, 407 bp, Homo sapiens
atggagacaaagcgcgacctaattaattaaaattattttctagcaacagtgttgaactgtgttgtagattttactgtaaacaaataatgttaaatttcaagcctatcaagtctatatcatagacaatctcttgaagattccccaaaatttattatatgaaacttgttgctgatgagattcattgaaggctataaaccatgattcagaattggaatccaaagtgtgttactattcctgttactgttcaccctgaaaatagaataattgaagtttgcttttactcttgttatcaaagcaggctctggcatttccagaaacctgtaaaagccttgttgatatagctaacgtttggaaataaatcttaggtctgaatttacatttaatgattcctttctttctatccacct

SEQ ID NO: 185246 - DNA, 476 bp, Homo sapiens
tccatcctgccaggtttttttttttccctcctgagctactgctcctccgatttctattgtgaagaaaacccggctcctcttgtgagacaacggagcaagcgcgccaggtgtcccgccctttctgagaggggaggatgaaaaccaaatcgctgagactgagggtcccccaaagcaggaaggtccatggagaaccatgtcactgatgggtcaacattaaaggcactgacttaaaacgtggcctctgggcaccagtcctggggtggggggtgggcgcaggctactcccatctcatttctgctcacccccacgcgctcgctctcactgtggcagtttctggacctgatcattttgcccaagcaacttcagggaggtgactgccctctagctcctaagccaactgtcccttcgattttcttatggcagagactataatagttaatggaaaatgagtataaagatttaaaaatgtaaaaatc

SEQ ID NO: 185247 - DNA, 284 bp, Homo sapiens
tttctttgtagagatggggggctgggattacaggtgtgacccaccgtgccaggctctaatactttttaataaactctgcactccagcctgggtgacagagcaagactccatttcaaaacaaaaaacaaaacaaaacaaaaataccaatttttttgagatctattggtataattctcataccatagaactaattcttttaaagtacaattctatggttttaaaaagattcaaaatcttataaccatcactgctttctgattccagggcattttatcaccccaaga

SEQ ID NO: 185248 - DNA, 517 bp, Homo sapiens
ataccccttcgaagaaaaaggaggaaaactcccaattctcttggttctcacagtgtaaaatgattcttaccaaatgtagaacaaataaaaagggaaaacactaaaaccactaccgcctgagaacatctcactgggcttaaaagatttcaactcacatctgtaggtacaaatgaaaagtgtgaataaatattcctccccattcacattcagaacaaacatcagacactccggccttcattcagctgacagcacttgatgtggaagtctggggacagaaagtggaaagctgagccctgcactgtctccatatcccacacacaccaggccagctgccagcctgacgtcagagcaaattccacatttgcttgggggaaggggagtgtggttctctggcaaaagaattcagcccctccctacttcaccctattactaagaaggcagaaagaaactaaaggaaagccctgccctacccctccctccctgggggacgcctcctttccatcagcacctgcccctg

SEQ ID NO: 185249 - DNA, 354 bp, Homo sapiens
tgtgtgtgtgtgtgtgttgctattgaaaaatagtgctgtatagtctacgtctatctttttcttatttcttgtcaatgtatttttgggatagatgcctagaaaggaggattgctaagtcaaaagggtaatgtgcatgtagtttcgctaaaggttgccaaattcccatccataataagtgtgccaccagcaatatacgtgagtgcctctttcccaacagggtgctgtcaaactattggatgtttgccagagaggcacagcttggtttttgaatacatcggatgtaatcaggatgtgcagtctttttggttcctagaggctgactgggctctgagaagcatagaacatttcctcaag

SEQ ID NO: 185250 - DNA, 310 bp, Homo sapiens
agatatactagagttactcaataataattagcagttgccctggtaagctcagacttactgcttaaatcacccatatttgtcaccatcccctgcctgtaggacaataagatcacctgctttgtgctaatgaaaattgggacattttagtaattttataatccttttcagcttctgttgtaagggtagaagtgatattgtttgtgattatgctaaaaagaggctttttgttttgttttgtagttaccaaagcagtgagatagaaatcattctgggtttcgagcaaattggaaagccctgttcagtctatttt

SEQ ID NO: 185251 - DNA, 272 bp, Homo sapiens
cgtgaacccgggaggcggagcttgcagtgagccgagatcccgccactgcactccagcctgggcgacagagcgagactccgcctcaaaaaaaaaaaaaaaaaaaactaactttaaaaaatctagagcaaaatttgctagtacattaagaactttagtgtggaatttctttggtatagaaactgtatgagggacaggaaactgacctccaactctgtgatcattactctctgataatttggaaatatggaataaaattgatatgcctcagaaag

SEQ ID NO: 185252 - DNA, 347 bp, Homo sapiens
cccccaatgtgaaggtattttggaggtagggcctttgggaggtaatcaggtttagatgaggtcatgaccatgggatctccatgatgagatcagtgtcattataagaaacagaagaaagacgaaagtgctctctttctctccaccatgcgaggacagaaggagaatgtagcagtctgcaagccagggagagagccctcaccaaggaggtgaatccgctggcagtttgatcttggacttctcagcctctcaaactgtgagaaagaaattcctcgtgtttaagccacccagtctgtggtattttgttatggaagcctgagttaagacagctggttcactggggaatccac

SEQ ID NO: 185253 - DNA, 333 bp, Homo sapiens
gctcgctcttctggagctgagacactcatcttctcctgccctggcacatcaaaactccaggttctctgatctttgaacactgggacttaatccagcatccccttactgcctgaagttctcaggactttggacttggactgaacgatgctaccagcttccctggctttccagcttgtagatggcgtatcatggaatttctcagtctccaaagtaatgtgagccaattcctataataactctcttctctatctaatctattaatatttacatttcttattgtttttcatttacctggagaaccctaataaaacttcctgttgcatacctttaatg

SEQ ID NO: 185254 - DNA, 249 bp, Homo sapiens
gaggcatcaggagtggcccactggtgcaccagggtatggtttgcctgtgtgtttcaaggtgagcatttggtggttctgggtggattctcccagaaggtgctagaagaggacaagccagcttgagtctgtgggcccgagctggcagtctctgcaggaggcaggcaagagtgtgtgtgagggactgagctctgcactcggcatcgtgacccttgactgtgctttcagctggttgccgtggctgtgattgtg

SEQ ID NO: 185255 - DNA, 391 bp, Homo sapiens
ggtggtttaagcagtggcagttttgcacacaatagcttgagtgaagaaaaactgagaatgaagcaatcagtcatttgggcattatggaaaatgggagactaaaagggctttgtatgtcagtgggtgtgtgtacatctttgcatggatagacttgataacagtatatttaaattgtgttgctcttttgtatatctattgcaattaatagacatgtatatttatttctagctagaattgaaaggaaaatgggtgggatatcagaaagattacagaattcaggtttaaattcaaacagtgctgtttatcacctgtgcagtaatagacaacatattctctcaaatttggtgtcctctcttgtaaaatggagaatatgccactttgcagtattgag

SEQ ID NO: 185256 - DNA, 520 bp, Homo sapiens
actgccctttcactcttggatttcttggttgaccctccgtattttttagaggtgagatctcactatgttacccaggctggagtgcagtggctagtcacaggcgcaatcataacgtactaaagccttgagcgcctgtcatccagcgacgctcctgcctcagcctcccaagtagctgggaccacaggcatgaaccaccacgctcagctcttcactctccctaattttgagaaaacatacttttttccttctagtaatgacctaataagttttttctaattacgaaaaaatgcacttttttcctcctcatcattgcttattggcaactctcagccttttaaaggatattaaatagcagacaaagaggtataaacttgtttgtttgtttgtttgtttgtttgttttttagatggagtcttgccctgtcaaggctggagtgcagtgacgcaatctcggctcactgctacctccgcctcccgatctcaagggatcctcccacctcagcctccctggtagctgggat

SEQ ID NO: 185257 - DNA, 265 bp, Homo sapiens
gaggggatgctgagggtcttgcatctagctaagagctgagctggctcttaaacttgttttcaagccaggacttacctgactttcttaggaaagtaatcactccatagacaaggataggtttttttcacagagcaatgatgttccctgtggtccctatgtagggtggtaaggaatagggctttgggatcctacagaccagggttcaaatcctggccccaccacttgtaagttatgggacttcagacaaggacttaaacattctaag

SEQ ID NO: 185258 - DNA, 589 bp, Homo sapiens
tggacatgggttctcctgtgtttttatgataaagtttaatgataggatactgtgaattctatttgtattcaacctggagttaatccataacagtacaaagatctttggggggtaggcttttcctcaagaatgattcttaaacaaatactgcttaaaggcttagagagtgactgagtacttcactctgaagtacttgaccactctacactcatatttacagctgaaagttctgtgttttaaccactatcaaattaacacaggtaacaatatttctttggagtccaaaaccactgctttggagaactgaggtgggaaaataatccagatggctaaagttcttcaaaaatttatatatttttcttttttgagacagggtctctctctgtcacctaggctcgagtgcagtggcacaatcacagctgactgcaaccttgacctctcgggcttaagtgatcctcccgcctcagtctcccaagtagctaggacagaggtgcgtagcaccgtgccccactaatttttatatttattgtagagatggggttttgccatgttgtccaggctggtctcaaactcctggactcaagtgatc

SEQ ID NO: 185259 - DNA, 287 bp, Homo sapiens
gcctggctgctgcccctgttttatgagccgcatgacaccacgctagggttggcacctggaggcagaaccgcattggaaacggcctttcctcttactggtgtttggcttctgctaatcactccatctcgtggagcttcaatttcttcacttctcagatggggataaaaatctccaccatacaaggatttgctgaaaacaagagccagcaggcaggtagcacttgctctgggccaggtgctgttccgacatgccctaatttatttatacctcccagcactcctgcaaga

SEQ ID NO: 185260 - DNA, 481 bp, Homo sapiens
tattccaattacagcaggaaatttttccagcccattataacctcagctacagttgtaattaatgcctctagcctactagtgatctgggcttcaggggcttttcagtttatatttgggtgcaggtaggggaaaactagggagaggatggggtcagggttacgtgtgaaacgtaacttggcaaatatgtttaaaaaaaaaaaacaagggctagcttgaatccttgtctctccaccgtatggcacactgcatctcaggacctggtgtgttattgacaaaagtgttatctggcagtttgtttagggcttttaattatttttgaaaatgacttatatgtatcttaatgattactccttgaaacagatcaaaattcttccttggcaactcttcttccttgcttcctcccactagttggatgacttctcatagcacgcagtgggtctgatggccatttttggggattttattgagaccaaaaaggaaa

SEQ ID NO: 185261 - DNA, 581 bp, Homo sapiens
tggaagatgagaaatgtacaggaaacttcatttttatataaaactgtgtgacatctgaaactccaaatacacacaaataaaacccttcaaaaatggtgaattatcaagcagcgattggtgagtggagaggggcacggctgtggatctcagaaggaaccagaaatacacttttcgaagatgacgggcacagcctgagttgcagaaccaatccttcagatcaccagtgtggttttttgactggagcttctgtgcctattatggttctgggaagcaggggatgtcatgtttaagtaggaatttgccaggatctgtttttgtttaacatggggaataagagattttctgcttggaaaacctccagacacatttaaccattctcagggaggagtgaaaggttaacatataggcaaaatcctgtccacaagctgcttccatgcttaggagacagaaaaatggccatctcctatacctaccagttgctgacccaggaaaaactggctatcttcaaagaagaataaagaaaaaatagcagctattaaaacagccactattgttatatgaataaataaaaaaaaagagag

SEQ ID NO: 185262 - DNA, 367 bp, Homo sapiens
cacacacagacgcatgtatacactcccacgtatgcatatacacaaatatacatggacacacacacacacacacacacacacacacacacaccccccaccaagctctgggggagtcatcatcttggatacgaatctgattcctggcttctgactgctctgctgttgtttattggcttgttgttggcataagaacatccaacaaggatgccacagaaattcgagactttccaagagccaagaacaaccatggccctgaaattgcaacagaaatacagctgctggacccaacattggatgtctaccagttcgttcatgtcagagttttgtttctcgggactttcgcttagtcctaaagacagagcacaaa

SEQ ID NO: 185263 - DNA, 438 bp, Homo sapiens
ttccatggtgtatacggcgccacattttcttaatccagtctatcattgttggacatttgagcaggttattttctattttgccatcttggctacaccacccagaaaaagctctttaaaagtttataatcctggaggatatcactgtagtcattatattataatacagtaattgctcttcttagtaatgatcctgagtcatcaaattattttctgtctggcctaaggactttttttttcctcccatggcagtttattggactttcctcgttatcatgtgttaacttcaggaggaaaacatcttaccatcaatgttttttaaaataagaaaaccatggaaaaccacaaaaaaaaaaagtattaaagattctgtggtatttttgccatcatgttgtcaatcccatctctagggaatgtttgcaccttcagagtaaccgatga

SEQ ID NO: 185264 - DNA, 291 bp, Homo sapiens
ctcttagtgtggcgcatggagttctagatccattgagacaagctctagacagtagcatgcagtcccacggctctttgcgccgttgagggtttgtcctggagaaggcagcccatttttctcctctgccccggcacggggccatgacccactgcagggtgagaggagtggagagtggtgcacatcagtagtccagccaccagtggacagagtagtacttggagccagttctccatgtctcacacatagtgagaaaaatcactgtgacatgatgtttaaccttgacccaagctg

SEQ ID NO: 185265 - DNA, 1024 bp, Homo sapiens
ctcccagcctcgtttatcttcaccacagtacagaagggggcccctctccaggcctcaccacttaacttttcttgtacatggaaagacaagcctctgctagaggcctggcaagggttccccttcagagccagccagtgctctgctgctgtaatctccagggaccctgccggccacggcccccatgcagctccctccctcaatccaaccctctttgggcttatcaccctcaaggtctagagtgcaccagggttggctgctctgccaagtcctgttgagactccaaaagcatagtctgtctttattagggtgaccttcatatcagactcccaggtaactcaagatgatagctttgcaatatagtgcctccttttattcctattgtgagtttctccgctttcctcactagactgagagggtcttgagggtaggagctttgtttagttatctctctatccctggcccctaagacactacctggctcagcaaaccaacctttgagacaaagcaacattataacactacattcatatagcagatcatttcatgacccacattctccttcctttttacgaagaaatgggctcaggatgtctgtccagcattatggagtgaacgtcagctccaggaagcagagacttctggccctttgttcaccatttccccagaacctagggtggtgactcacctataagtgctcaaaaaacatgtggcgaatggaggaccagagctaggctctgaatgaggcctcctggatctcacgcagggatggagagtaaggaccagcccctctacctcatgctttcttcctgctatctcgtaagagcccaacatccttctgtcctgagcaagccacaagctgcagccctgccttgacaaaatggcaaatgccagcccctctggcagcatgacaccttggtcctgtgtgctgcagagtgcctcatgtgttgaactgtgtgccctcagaagcatgccatgcccccgctctgctggagcagtggcagatgtcacccttcctagataaatc

SEQ ID NO: 185266 - DNA, 252 bp, Homo sapiens
aggtgcctagaaggacatggctagtaatggaggagcggagatgagctgagagaggcattgagacagcaggtggggcttgctgaagaatttcctctcactgagatgggactcctgaagggttttaagcgcagcattgacctggtcttacctaggttttaacagagtcgctaggctgctgtgttgagaatagccttttgggagtggggctgaagtagggagccagttaagaggcagtgggggtggtctgaggga

SEQ ID NO: 185267 - DNA, 145 bp, Homo sapiens
atttagaaatatttaggaagtggatttgacaggcctcagtgattcatttgatgtggtgcagggatgtccaatcttttggcttctccgggccacagtggaagaagaattgtcttggaccccacataaaatacactaacgctaacgg

SEQ ID NO: 185268 - DNA, 207 bp, Homo sapiens
caggagaatcacttgaacccagaaagcagaggttgcagtgagccaagatagcaccactgcactccagcctgggttacagagcaagactctgtctctaaaaataaaataataataataataatagttgatatctacttaatcacaaatggtttataagtttaaagcatgcttaaaaacagagactcacaaaaccagaattttagatat

SEQ ID NO: 185269 - DNA, 599 bp, Homo sapiens
gcaaagctgccatacatatggtgtgtctgccagtaaagtaacctcccagcagcactcaaaaacccactgctcagacactacctatcaattagaagccaagcaggaaaaaaggttatttgaaggcactggtttcaaggcaccagtttcaatttgatgatttctcattcactctgctggctagaatcaaagtagcatattgaaaatccaggtatttgaaatagcagtatttaaattttttgttccaagtaactcttctatagataagagttgtattattcagcctgagaaggagaggttacattttatgctttaaaatcagactactatctgcaatcatcatgatgaaatggtattcaccatgcttgcacatgtgtgggcttctttctggatctatgcaaagcaaagcccacattgtcttttccaatgggttggaagccaagcactcacactgaccacatgcatgccactgtgacaacagagaccatcatcagctccacctttggagctgatgtgagagtgaatgagactgactcactttgacatcaccctgaaagtgtctggcactgactggtgctctttctccatccagaaaaacctca

SEQ ID NO: 185270 - DNA, 643 bp, Homo sapiens
atttaaaatatatttattaattcatttaaaataatccttagtaaatttattacattaatgtaaataacaattttatgaaaagtaactatatttttccccaaaatgtgataaatggcattgttttacattcttgtaaatctttaatgtctagcttatagaagccagctagattcttatatctgcttttacgttcagtctgttgtgacatgttgttttggttgaagtgtatgaaaacaattttgcctcacacaggtagctggaaaagggaggagtattttaatagtattttaaaaataattgttgatattctcatttgatactatgccaaaatttgacaaatgatactgttttcttaaagataatatggaattcaaaaccatataaatgaacttttagtacttgcattacaaccattggtctgtcgtgcagtttaaatagataatttccccatgcatgattttgtgataaaatgcatcagtcatttggaaaatactggttcactggatgatacagatcctccaaaatattgacatatttcattatatatatatttttaattatattcattaatatcaccaccaatcccatgagaatatttctcaggtattgagaagccgtcaggctcagaatagcacatacaagt

SEQ ID NO: 185271 - DNA, 309 bp, Homo sapiens
ctcactgcaagctccgcctccagggttcacaccgttctcctgcctcaacctccggagtagctgggactacaggcgcccgccaccgcgccccgctaatttttttgtatttttagtacagacggggtttcaccgtggtctcgatctcctgacctcgtgattcgcccggccctgtgtgtgcgttttcatgtgtgtgattgggaaccttgagagatgtatctgaagtaatgtaaaaataagagtctcataattcctggttaatgctggcgtattgttgtcacctgccaagtgactgttaggcaataagactag

SEQ ID NO: 185272 - DNA, 366 bp, Homo sapiens
tgaattatctttgcatcttaccatctacagccaattctgcaatggactccatcccctctggcttcccccaagggctttgctccttcagcggtctctctctaatggtctctctctctagtggcttattcctatcagcagaaaacatgctgtaataacttccttcagccagaatcccatttcagctacccttccatttctctgttctccttcagagcaaacttgttgaaacagttgtctgtcctcataatgttcccatcttcagtttcttgaactcactccaattggacatttattcacactgctctactgctgttcctctgtcattcaggttactgataatctccacttactaaatccaagttcgta

SEQ ID NO: 185273 - DNA, 415 bp, Homo sapiens
agttaacgtggaatggttactttccttcaagattcctttagctgccattttcttcaaacagacttttttagccagaaataagccaaagcagcaagtcccctcattacttgtctctcttttgtgagactgaatttccaacaaggcaattcaataatttttccgatgttttgcctttagtggagtgggatttccatctgaagtttgcaaaggctttcatcactcctctgtcttgcctgtccctattaaccatctggttacaaggtctctgaggcagtcccagggtaacattttgtttttctttcatttcactctcctgcagctgcttcctccatactccaccctgaggtttgtggatttccatgcatgtgtataatttttttgatagatactgcttctcccctagcccttccatcag

SEQ ID NO: 185274 - DNA, 485 bp, Homo sapiens
gggtgtgtcaaggcaaagaagttggagattgaagatgtatgtgcttgagcgaaactctagtagtaatgtctttgtgttccaaagttattggtaaatataacagtagcaaagaaccattttgttgcactaattaaattagtagtcttgaggattagttattggagaaggatagaggtgatctaatgtctctgattttgctaatcatcttgatgtagtagaattcctttatatagcatttggtgtggtggcattgtcgaaacagataagaacagctttttactaggtaataattgttttgtcatagagcatttgatttaccatgtactgaataattagcagttttatagttggggtcctattcccttttttcttttattttttgtttttaagagacggggtctctcttgaccatactagactcaatcacctgagctcaagcgatccacccacctcagcctccgcagtagtgggacaagaagcgtgtg

SEQ ID NO: 185275 - DNA, 712 bp, Homo sapiens
agaggagagagcaagatagaaacaggtcctgagatgaggtggcggcatacaagctatctcacacttctgcacccttccaggtgcgtttctgaaatgcatcaatgctgtgagatctacactgacttcagggatgtggcaaaccccctatttcttgtaaccagccagcgacagtcattgtggagccctgcctgtgccccaggcagccctgtgcactaagaaagccaggcctgggagacactgacttgtcgtttgcctccaggcgtttttagttgtaacagactagttcttgtttcccatcacctagaatctgttgatctgtctggatcttagttcctgagtctcctgctctgcaagacgcaccctgcacatgcacgctcacgtggggcacacacacccaggtgcccatcatgccagcaggtgcacagttggagaaatcgactccccagaccagactccccagagcgcggggagcggccaagtgtcctcgcacaaactggggtggaattgatacaggggccagggaggtccctaaacactagtgggaccctgaccctagccagcatccaggctcttgacactgttgtgagaaggatttcaaggatgagtcagaaaacagtgaaagtacaaagatttattgcagagtgaagagtacactcttgcaaaaagaaagtgtgggggcagactcaagagagccacagaatggggtttgggg

SEQ ID NO: 185276 - DNA, 269 bp, Homo sapiens
atcaacatccaggaggccttaagtaaatttcagaaaccacaattctttttatattatgttttggcaagttcttcatggaaaatttcttgagaatcatcttatttttttccagataaaatcttttcctcttttcctcttaggttaataataaggtaaaatacagaaataatttcaaaagttaaaaataattgagtgtaattcaggcaaatatcagaaaataatcaacagctaatgtgttaagcagcagttatgtatttagcactgcactg

SEQ ID NO: 185277 - DNA, 668 bp, Homo sapiens
cagcctgggcaacaggacaagattctgtctcaaaagaaaataaaaaaagaaaaagaatggtagcataacagtttccatttctaattttattgcgaaagtaattgtggtttctgccataacttttagtaagcataattaattaatgccattaaaagtaatggaaggccgggcgtggtggctcatggctgtaatcgcagtactttgggaggccgagatggacggatcatgaggtcaggagttcgagaccagcctgggtaacatggtgaaaccccgtctctactaaaaatacaaaaattagctgggcgtggtggcgggtacctgtaatcccagctactcaggagactgaggcagcaggattgcttgaacccaggaggcggaggtcagaggttgcagtgagacgagatcgtgccaatgcaccccagcctgagagacagaccgagactccatctcaaagaaaaaaacaaaaaaaggctgggtgcggtggctcaagcctgtaaccccagcaatttgggaggccgaggcgggcagatcacctgaggtcgggagtttgagaccagcctggccaacatggagaaacctaaacctctctactaaaaatacaaaattagccgggcatggtggcgcatgcctgtaatcccagctactagggaggctgaggcaggagaatt

SEQ ID NO: 185278 - DNA, 585 bp, Homo sapiens
ttgattctcaaccccaatgccatgttagaatcacctgaaggacttttacagctcactcccagagattcagatttagttggcctggggaggggcccagacactggtgtttttcttttttgttttttctgagatggagtctcgctctgtcgcccaggctggagtgcagtggtgccatctcggctcactgcaagctctgcctcccaggttcacgccattctcctgcctcagcctcccaagtagctgggactataggcgcccgccaccacaaccagctaattgtttgttatttttagtagagatggggtttcaccgtgttagccaggatggtctcgatctcctgacctcgtgatccacctgcctcagcctcccaaagtgctgagattacaggcgtgagccaccagtcatggcaaagaatggacaggattttgtgcttgattggatgtgggaggtgactgagaggaagattcctagatggcaaccaggttcttgccttgggtgaatggtgagatgatgacagagatggagaatagaagtgatggaatagctttgaggagagttcaaaaatactaggatctgattgagaca

SEQ ID NO: 185279 - DNA, 548 bp, Homo sapiens
ccgggggacccacgtcaaactatgtccccaacttcatcacatggaggtgagtggcaggggaaggtcttcatgtgtttcctagttcatcaacatcatttttactataagcacaaggcatctttttatactctccatccatcttgttattggacaaataggaccagtggatgaagctcttgtgggagctttcactctgagatgcacaaagctgatgtgcatctcaagaaagaaatgacaaaataaacattgaattctacatgtatctcataaagaataaaaataattcaccgacattctgcacatttttcaaagcaaagggctaccctgaggacacacatgacctgcactgtcgggttgctcctgtgtgcactgagtggctttccgcagagaaaagcagagggcccttgtgtgtgggcttctagtggcatgtgagaaactgtccagaattcacagagaagaaagagaatgggcagcgggatacatcaataatataatagctgagaattgttcagtactgaacaaaaataagtaaagtgattgagaaaaag

SEQ ID NO: 185280 - DNA, 344 bp, Homo sapiens
gactgtgccactgcactccagcctggacaacaagaatgaaactccatctccaaaaaaaaaaaaaaaaactcctcattttccatcccagaatgaggggcacagtaagaactgaacccccaggtaagaggtacaggattttgaaataggatatgcatataggggtgctgttttcagggttgagtccaggagctgaggtgacatctctatttttggcagtggctttggaaactttaggcgacagcctccagagccactactctgctcatcacagccttacactccaaggccagatgagccctctctgggatgctgcaggggagtcatgtttatctcatttcaagtca

SEQ ID NO: 185281 - DNA, 531 bp, Homo sapiens
atcgctccaaacagaatctctggtacccactcagtggtaactccatattctcccctattccctggaagcccctaatctacgttctgtctctatgaatttgcctgttctacttaggtcatgtaagtggaatcatacaatatttgccctttcgagtctggcttatttcactcagtatacatttttcaaggttcatctatgttttaacatgtatcagaacctcactcttttcatgaccaaatattccactgtgtagagactacattttgttacccactcatctgttgatgaacacttgcattgtttccatcttttggttattatgaataacactgccatgagcactggcatacaagtatctgtttgagttcctacattcgattcccttggatatacacctaggactgaaacagctgggtcatatggttttatgtttagctttttgaggaaccaacaaattgttttccatagtggctgcatcatttttacattcacaccaggaatatatatgcatattctaatttctctacatcc

SEQ ID NO: 185282 - DNA, 244 bp, Homo sapiens
gaagatagagaagtgaggttgttggataaatacataactccttcctcaactctggggaaatgaataggtaggaacagaggacaaacactagtctataatattgtccctgttgctatgtcttggtaatgatatataccgtgtctggtccaacagtctatatggagtacttactgtctggggcaatagtatctataggaggtattgagatgtagctcaataattgatacttgtgtaagtaatgatg

SEQ ID NO: 185283 - DNA, 166 bp, Homo sapiens
atgtcacagatcacaccactttcaacaaccaagtcacataactcagagcacaccacctccaacaaccaaatcagaaatcttacagatcacaccacctccaacaaccaaatcagaaatctcacagatcacaccacctccaacaacaaatcacaaatgtcacagatca

SEQ ID NO: 185284 - DNA, 359 bp, Homo sapiens
tttccaggacaggatgaggcaccacgagaacatcaaaaatcccacccaaaatctcccaatacctgggagaatttggcttcctgaacgtggtgtccaaggtacccaatggaaacataaagagacagccagtttctgtgctatcctgagcactctgaactcctttccatcacaaggaacaaggggctgacatggttcctttagagctgctcagttgtaaattctagaattgaaaacccctgagacctcttcattcctccctcaccacaatcaggtcccactggataaaacctgaaaaccaacaaacaaaagtggcatctgggtagggttgtcaaatcaagcaaataaaaatataggacacc

SEQ ID NO: 185285 - DNA, 447 bp, Homo sapiens
cagcctcccatgtagctggaactacaggcatgtggcattgcatgtggctgaaaacatttgttaatgctgacctttgcaaaatactgccaacaaacatgtaaataaaatttacaaatgagtttcaaacttctgaaccaaattaattcaatctttaataccaacattatttatgaagtacacagaaaaaaactcattttgttttcaattttatttttttttttgagacagagtcactcttgtcacccaggctggagtacaatggcatgatctcagctcactgcaacctctgcctcccagatttaagcaattctcctgcctcagcctcccaagtagctgggatcacaggtgcctaccatcacacctggctaattttttgtatttttagtaaagggttttaccaagttggccaggctggtctcgaactcctgacctcacgtgatctgccta

SEQ ID NO: 185286 - DNA, 270 bp, Homo sapiens
ttaatttatttctaagcttaagaaagactcattgcaaagaacattattttaagcacatatatatatatatacttttactaactgcattctatttcattatatgaatataccataatttattaaccagtctcctgatgatgggcactgtggtaacttctagttgttttctaatacaaacaatgagttattgagattatcaagtcaaaattaatgtcgtttaagtgctcgactgttattaccaaatagctttccaggaatatctcagtagtt

SEQ ID NO: 185287 - DNA, 507 bp, Homo sapiens
ggaatcaaccttctgccccttaggtcaggaaatagtcttgccaatgctaagaaggagagcaaagtttttcaaaagttaaggctccctctagggcaacatatatgacgtgttcagataaggctttgagcattagttctgaccctatcccagctactccagcctgtacctactcctcagagaaggctgcattagaaagcttcatggggttctcatggaaagagggtggctagggagagaaactcccacagtcttccatgacaccatgtcttccaataataacggctaacatttattgagcttttactatgtgctagacactattctaagtgtactccctaatctaatccttatttaaaactctctgaaggtggtactatcattatctccactttacaggtggagaaacggagacacaaagagatcaagcaacttacctagagacatacaaggaataagtaacagtgccaggattctagcaaaggaagtcaggctgcagggttcatctct

SEQ ID NO: 185288 - DNA, 496 bp, Homo sapiens
cctccagtcatggtcagtcctgagcttgcctggccaagcacattttgtacaaacccactgaggctgccccatctcaccagcagggtctgtcaggagaaaagcagcatagaacagctccccatgcttgagcaggacagtgaggcctatgtgaccaaacccctgggagcctctccgtgtccctaagaaagccctccatctccccactaacttgtcttcccccgtgtacctgggaagtctttggagataaatattttgtgaaatcacctccccaaaagcttagatttgttgttttggtaatcagctgactaatatttcactgttttcctgcaattactctgggtcaggtgcccaagctatggaatgaaagcaggaactcacaccccactaattgacccagaagatgctctattggccagggcacatgtcgtgccacaaggcaagtatggtcctgcccatcctcactgggcagacaaacaccagagctggaggacacagt

SEQ ID NO: 185289 - DNA, 156 bp, Homo sapiens
ctggactcaaactcctggacccaagtgatcctcctgcttcagcctccattgtagttggaattataggcacataccaccgcacctggtttattatgaagtttcttactctaaggaaaatgtcagtgaaagttttatttcatttatgttttaacccac

SEQ ID NO: 185290 - DNA, 157 bp, Homo sapiens
aacccaggagacggaggttgcagtgagccgagatcgcaccattgcactccagcctgggcaacaagagcgagactttgtttcaaacaaaagaatgtatttaggttactagctgtgtcagctagaagtccaaatgaaccaaagaattatgaaatagctt

SEQ ID NO: 185291 - DNA, 900 bp, Homo sapiens
ccgggtggatcacgaggtcaagagatcaagaccatcttggccaacatggtaaaaccccatttctactaaaaatacaaaaattagctgggcatggtggcatgcgcctgtagtcttagctactcggaggctgaggcaggaggactgcttgaacccgagaggggaaggtttcagtgagccaagtcatgccactgcactacagcctggcgacaaagcaagactccatctaaaaaaaaaagaaaaaagaaaagtcctatttttaaagacagcatgtgttatgaaagaaagaaaagggctttggtgtcaaacagacctgggtttgaattctagagaaagacattccacaggaccagagcaagaaaagattctggaggttaaaaacctgacatggtccagaaacatatatgggtagtctacttggctagatggtaaggtataagttgattagtttaagaagtataataaaagcttgttgttggggggcaggcagtcagggcatcagagaaattattttgtccaccgataataagatggactgaacatgacggcccggcaacgagacccccagtttaacaagctattattagtgggcaagataagaagtactgaggggcttgtcttgggcttgatggcacacggattcaccacggctcccctgagatcgtgtcaaggtgcatcaatgttacctcaatacggcgttacaacgctgctagcacgccagtcttagttctgggcccaagaaatcagtgcacccactgcacctggcgtggcgcgacatttcgatattaatccagccgctgtttgagtcgcggccactccttggctattaatcagccgacagcgcggttctgcgggaacacacacctgtttctccacacgccaagcggtgggtcgcacaccaag

SEQ ID NO: 185292 - DNA, 668 bp, Homo sapiens
ccgggtggatcacgaggtcaagagatcaagaccatcttggccaacatggtaaaaccccatttctactaaaaatacaaaaattagctgggcatggtggcatgcgcctgtagtcttagctactcggaggctgaggcaggaggactgcttgaacccgagaggggaaggtttcagtgagccaagtcatgccactgcactacagcctggcgacaaagcaagactccatctaaaaaaaaaagaaaaaagaaaagtcctatttttaaagacagcatgtgttatgaaagaaagaaaagggctttggtgtcaaacagacctgggtttgaattctacctctaccacctgcttttgagtttttcttttgtaaaatgggataatattaccaccctgcaggaatttagaggattaaaaataatgtatgctaagagcctgtttgtacatagtagccatttatattatttttctagtttcccatctctataccagactacatttcctagaaaatcctggacctctttaccactcagcaatgattctccaaacatcgtatataatataggacacagtcccaagtctatgaaatctgcttaccctttctggcgttttaaagaattcagagagctccgttaatatcttctttcaagtattcatgttctacgaactgcagtaagaca

SEQ ID NO: 185293 - DNA, 590 bp, Homo sapiens
tgcctggccccctcctggtcttaaagtttgaagcctgcatttgtcttatctgagttcttgccacaggaaatcaacgaattgaaactcaccagatcactgcatccagacaatgagatgccagacccctcatccctcctgatttccttatccctccctaattcctttgaccaactcctcttccttacctctccctaactctggttttcccacatgtagttacatttcttccctgctgtataaccccctgattttagttgactagggagatggatttgagactgatccccattttccttggctaaagcactcaattaaagccttcttcccaggcagtactcattgtcttggtgattggctttctgtgcagtgagcaacgggacctagactggagccctggcatttcagtaacagattttggttccctacctgggaacacattgcttgtggctcagctgctgcagactgggactttcagaagccccctgtacagctgtctgacctttttttggctggaggtgggtttccatctttttctctttggctctgctgctgccagccccaaatgtattgctgattgcctaggaagaaca

SEQ ID NO: 185294 - DNA, 245 bp, Homo sapiens
  misc_feature (9)..(9): n is a, c, g, or t
  misc_feature (42)..(43): n is a, c, g, or t
  misc_feature (79)..(79): n is a, c, g, or t
acattctcncttctttgggccactccactctccagacccttnncagagagaccccacagaatgcacctcctacttcccnaagctcctccagcaggctgctaggagacggtatgagagcagaacagtcaatgcagaaagagaagttggagccaaagccctgagttggggagaacccgggagctgattgggcagcagtgagtggacttttgtggtcagaacacaggctcaggccagtgtggagagag

SEQ ID NO: 185295 - DNA, 991 bp, Homo sapiens
tacaggtcaaaaaacattttacatcagaacagattatccataaacataaatgattgaaacaaaatcttcataaaatgttatttacctttacaaatatgatctaccctcatattttctacttgttcaccttttatatgctggccccaattcactaaattgattttacaacccactaatggattataatctactctttgaaaaacactcttcatagccagtattccagtgactaaccaccgccttcgctggataaaaatccagacatttaatgacacaaaggtcatctatgacctggtcccggccacttctcagcctcctttcctaccactatttgcagccacccttcatgagaaactccttgttattctctgactatattactacttggtgtatgatgttccctctactataatgcttgccgtctttcaagtccactcctacttgtcattcaaatatttgctcagaagtcacttttctgaggccccaaactccacatcaccgtccaaatgggctcaggcctctcttgtgtactgttatttataatcctgtgggcatacacctaactagttgcctgtctacttaactgatcccttcattcagccaaactgctgaagccagagattgggactcattcttgataactctatcataaggcctgatacaaaataggtgctcaatatatgttcattaaataaggaggagtaagctacatccatgccatattcaactctctggctgagctttacaaacaataaacatggtaccacatgtagagatagggttaagctacactactgagtataccaagcaaaagaaatggtctccttcctcttccagaacttaaatgcttataatgattgtcaagaatgtgagcatatttctaattcatttcccacacattttatattccaattttctggaatatttctaaccaatccacagatagaaacacctataaatttccaagcggcgagcgggggtcctctaggta

SEQ ID NO: 185296 - DNA, 648 bp, Homo sapiens
tgcctttccgcagtaacatttccatgattcagtgtgtccactttgggcagcaagagcaagaggagtgaatccatacgtgctctgtgggtcagggtgtgccccagaaaccagcataagcttcaccatgtcctctctgcccagtttggctgcttcgtggagagctgtcctctcgttggcacaacgcagattgacatctgctccatagttgatcagcaaggcagccatgtcatagcagtcacgcagcacagctgggaaatgagaagtgtggtgggcatgttcaacgggaagttaagcccaaagtagcatatctgcaagtatccctcaggctttcttaaggagttcttcccacccactcccagacccgaacattctgtgtttaggaaacagattgtaaagtaaggcatgtgtcaaataatacttactgagaatgttttacatcaatggactatgtttttctgtaagccatgagtaattattcattgcttatgtggttgaaacacaaatgtaaacttttcacttatctttattcttcaagaaaatgggaacttaattattcagtatagtcctggaaatgtttgtagctgctttaaaataagaaaaaaaacaaacaaaagacagcccagactctgaaacatgccaaaaattaaa

SEQ ID NO: 185297 - DNA, 538 bp, Homo sapiens
ataaatgaacccaaacagatcacgttctcggagacggatgcacgccagaaattcctgtcgtgcccctgaagaactaacaggtctctctctgcaacggtggacgactggtcaaaccctggaaccagccaggaacagcagcaagtgcacgggctcgggaatgggaatctggctttatggaacctccaggctcaaggggacaccaggaagggacagcttcgtgaccaagcccggtgtgacccaccaaaaatctgcaaccacgaagaccaggaaatgccagcagtgccgagcaggagaggtcgcttgacggtaaagaagcagggagcgttatttagcaaaccaggctggttaaagagtagagaatatcagatgtcgcggcccctctgcagaggacagttctgaaggacagcgatgacctaaattggctcctatgagggactgctgggggaaatatttccccaggatcctataagatacaaagaaaaacatatgaaaacagaaaagatattcccgacacttgggggtctcaatggggcggggg

SEQ ID NO: 185298 - DNA, 507 bp, Homo sapiens
ccttaaacagtttctcattgctttaggataagtctagaattcttaaggcagcctaaaagaccatacgaggtctggccttacctgccttttccagcctcatctcacaccattttcaccttgtttcctgggcagacttcctggtcttcttttagtttctcaaaaatgctatgatcccaacaaccaaaggctctatgtacatgccattctctcctttagttatcctatctcttactcatccttcaggtctcagcttgaaagcgacatccttgggaaaaacatttctgacctcccagatacattcaagataccttgttatgtcagctctcttaccaccatataccctcccctcttatgacttaccacagcttgtaactacattttggtatgtgtaactactaggttaatgtctgttgctccccacattaggataaagaccatgtctatttgggcctgcacagtgcctggcacatagaagctacccaataaatatttcttgaatgattattg

SEQ ID NO: 185299 - DNA, 223 bp, Homo sapiens
tattaatagaaaggtgatggcagaaacattctgaagtccttctcttccatggacatgacagctatgaacacagctatcaaaggaccccacactagaggctcaaggtttgcattctgtactacactatggtttccttctgtccagactgaaacaaagatgaaaatccaaacctttatactcacgaagtgtcatttaccctaagccctgtcccacacattttggg

SEQ ID NO: 185300 - DNA, 325 bp, Homo sapiens
ctgtattcttaacgtctaaattctacaagagggattttttccccatagaggcaccattcagggtgagctggatattgttaggatttgggagccgacaggggctatcatttattctcgttctttgaccacatcataggccattgcctcttctctgtttgctggttcatgcaagaccaggagctcccccagtaagtggccggaagggtaatacccaccccccgcaagccaagtctctccccattctcttgctcagcctcagtcacgggaaccaccctgtggttgattcattctgacaattattataggtagcttaggaacggatggt

SEQ ID NO: 185301 - DNA, 389 bp, Homo sapiens
ctaccagaatctggatttccaggattaaaaaaacaaacaaaaacatacagaaacttacaccaatgtctgttacgtgtcaaaagccaaaagatagcagtattttgcaagaaaggaaatttaccagtaaattttttttattatttttgagacagggtctcactctgtcacccaggctagagtgcaggggtgtgatcttggctcactgcaacctctgcctcccgggttcaagcaattctcacacctcaccctcccaaatagctgggattacaagtgtgcgccaccacacccaattaatttttgggcttttttttttttgagacagagtctcgctatgtcacccaggctggagtacagtggcgcgatctcagctcactacagcctccgcctct

SEQ ID NO: 185302 - DNA, 789 bp, Homo sapiens
ctaacttaatgtcaaccagctgaaaacacaacaatatgttttcaagagccagtataagttggctccaatacagcatgagccagctccagcatagcactgcctgaacaatttttaagtcagtgagtaccaaataggagaggctagcagaggctttggagggacttttaaatgtcccctccaccaagggaagcatttccatgttggttagttttactgatttttagtaaaagagcatattattggatcccaaggtgttcaaatattccacgtgactcttaggaacctctcaacagactccccagtatcttgggagattaccaactgtggcttttctaatttctaagggtgaccctccaggaaaacattctttaatttaactaccagttaaaaccatgtttggctgatcttttttaaaaaatctatacctatagttcatcacttgtttccccaactttgtcattttccctatccacttgcccctcatccttctgacacaataaaaaaaatacaggtacccacaaaacagtgcctgcaaaggagcaggggaagaacaaggcacccagtaagctcacttggctctacatatctggaaaggcactgaggttccaaggtctctaccccaccaggggacacccagtaaacatcacgctgagagtttaagttgcactcaactggagttgatttgcccttagaaaagtttccaacggtgaagaaataccacttggtaggaatatctctgggcaacttcattgctgactgggcaaactttgtaggataaggtgtcatgtg

SEQ ID NO: 185303 - DNA, 443 bp, Homo sapiens
aatctgcttctccaaactgaagtagtttacacacagttttaaggctataaatgatagttatataccactgttactaatacatttgtatatagtctaaagtttgaaacaaagctctgtgagctaaggggctgtgtcttgttgttttactgctatttcccaatgcctagaatggtatttgacctgtaggtacacagtaactctttggatggatgaatgggtgggtggatgaatggatgtctaactaacttaaagcccaagttatgggttatggtgttggatgtccagaattcccagaataagatgccatctatttgtggattaaataattctaacatggttttaaaaatatttttaaaataattattctgcctaggctagtccaatcaagagtcttttaattttgaaagaaatctttggtctagaaagagctctgagagatgaaa

SEQ ID NO: 185304 - DNA, 211 bp, Homo sapiens
aggtggacatgaggagcccagttcagggctgtcacagtagctccagcagcagatgattgtggctgggcctcccaagtgtcacgttggagaaccggagaaggggacttctttgggatgtactctggacttgttgatagattaagtgtaggtggggtgaggaagagaactcaaagatgacaccaggtgttggagctgagccacggggagaagg

SEQ ID NO: 185305 - DNA, 499 bp, Homo sapiens
acgtatacacctactatgtacccataaaaataaaaaaaaaattttaagttaattgtgaagttaaatgtaacctaaaaaccatttataggttttggctcaaagttacttttaataaaatttatttaattaaaagggagaaaactattatccattcattaattcaataaatacacattgaatacttagaacatgctcggctctggacacagaaagataaaaagacttaaaaatagtccagacaattgagcaagcaatgacacaggtgataaacaccgagagagacagggaaaacttcctaacaggtaaagaggaggtcatggaaggctggggagaactgggggaggggtatacagctgcacacagaacatacatccacatccgtccgcaagtaagcctctatctcaggagagaactgaggctacgggagaggctgagatcacccagggagcaagagtttggaaaaaacttgcaggataaccaattaaaggaagggtaagcc

SEQ ID NO: 185306 - DNA, 608 bp, Homo sapiens
aacgtgacagtaccaccttggtcacaactgcgagctacagtgagacgtttgtgacctgtgaaagatggagagattttttttttggtgacgaaacagacagtctcttagctttttcccttgttgtgtaatcttgtgcagttacatggtataatcaggaaaaattaattctcttcatggtgtctaaagatgcttcagtaaaagaatacatctttaaagaactgcagaaatatcttccaagtcatgcagtcccggatgagcttgtattgatcgactctctaccatttacatcccacggcaaaattgatgtttctgagttaaacaagatatatttaaactacataaacttgaagtctgagaataagctcagtgggaaagaggacctttgggaaaaattacagtatttgtggaagtctactctgaatctcccagaagatcttttgagggttcctgatgagtcactcttcttaaatagtggtggagattccttaaagtccatccggctcctcagtgagattgaaaaacttgttggtacatcagtacctgggcttctggaaattattctcagcagttccattttagagatttataatcacatccttcaaacagtg

SEQ ID NO: 185307 - DNA, 3070 bp, Homo sapiens
acttttttcatgttctccttgagtgaaggatgaggaaattgaaagcagagtatgcaccttttattaggagattcaaactgcatcctactggattagcctcaaaagtcctaaaatacaaagacatccatctgacagatcactgaggggaggacttgtttttctgttttagaatagtttccgattaaactttttagctcaagaagaaaagaagctagttatttctcacccaggagtggatttgtggtttggcttcaccatggcttcctgccgtgcctggaaccttagggtgctggtggctgtcgtgtgtggactactgactggcatcattttgggactgggcatctggaggattgtgatcaggatccaaagaggaaaatctacttcctcatcaagcacccctacagagttctgcaggaatggtggaacctgggaaaatggcagatgtatttgtacagaagagtggaaaggactgagatgtacaattgctaatttttgtgaaaatagtacctatatgggttttacttttgccagaatcccagtgggcagatatggaccatccttgcaaacatgtggcaaggatactccaaatgcgggcaatccaatggcagtccggttgtgcagtctctctctatatggagagatagaattacaaaaagtgacaataggaaattgcaatgaaaatctggaaaccctggaaaagcaggtagaggatgtcacagcaccacttaataacatttcttctgaagtccagattttaacatctgatgccaataaattaactgctgagaacatcactagtgctacgcgagtggttggacagatattcaacacttccagaaatgcttcacctgaggcaaagaaagttgccatagtaacagtgagtcaactcctagatgccagtgaagatgcttttcaaagagttgctgctactgctaatgatgatgcccttacaacgcttattgagcaaatggagacttattccttgtctttgggtaatcaatcagtggtggaacctaacatagcaatacagtcagcaaatttctcttcagaaaatgcggtggggccttcaaatgttcgcttctctgtgcagaaaggagctagcagttctctagtttctagttcaacatttatacatacaaatgtggatggccttaacccagatgcacagactgagcttcaggtcttgcttaatatgacgaaaaattacaccaagacatgcggctttgtagtttatcaaaatgacaagcttttccaatcaaaaacttttacagctaaatcggattttagtcaaaaaattatctcaagcaaaactgatgaaaatgagcaagatcagagtgcttctgttgacatggtctttagtccaaagtacaaccaaaaagaatttcaactctattcctatgcctgtgtctattggaatttgtcagcgaaggactgggacacatatggctgtcaaaaagacaagggcactgatggattcctgcgctgccgctgcaaccatactactaattttgctgtattaatgactttcaaaaaggattatcaatatcccaaatcacttgacatattatccaacgttggatgtgcactgtctgttactggtctggctctcacagttatatttcagattgtcaccaggaaagtcagaaaaacctcagtaacctgggttttggtcaatctgtgcatatcaatgttgattttcaacctcctctttgtgtttggaattgaaaactccaataagaacttgcagacaagtgatggtgacatcaataatattgactttgacaataatgacatacccaggacagacaccattaacatcccgaatcccatgtgcactgcgattgccgccttactgcactattttctgttagtgacatttacctggaacgcactcagcgctgcacagctctattaccttctaataaggaccatgaagcctcttcctcggcatttcattcttttcatctcattaattggatggggagtcccagctatagtagtggctataacagtgggagttatttattctcagaatggaaataatccacagtgggaattagactaccggcaagagaaaatctgctggctggcaattccagaacccaatggtgttataaaaagtccgctgttgtggtcattcatcgtacctgtaaccattatcctcatcagcaatgttgttatgtttattacaatctcgatcaaagtgctgtggaagaataaccagaacctgacaagcacaaaaaaagtttcatccatgaagaagattgttagcacattatctgttgcagttgtttttggaattacctggattctagcatacctgatgctagttaatgatgatagcatcaggatcgtcttcagctacatattctgccttttcaacactacacagggattgcaaatttttatcctgtacactgttagaacaaaagtcttccagagtgaagcttccaaagtgttgatgttgctatcgtctattgggagaaggaagtcattgccttcagtgacgcggccgaggctgcgtgtaaagatgtataatttcctcaggtcattgccaaccttacatgaacgctttaggctactggaaacctctccgagtactgaggaaatcacactctctgaaagtgacaatgcaaaggaaagcatctagacagtaaaacttacctgttgtggtctttttaatcacctcgtttgagttttatctgtttctctcctttatttcccagtcctctcagaaagtcttcctcaatgtattttgctcaggattaagaattagataaaacctgttgtttattattattcggcataatggacttggtagtttttctatttttcaatagatttgtacttgaataaggtgaagaatttcacacaacatacaagagtaccattgttccttatatcgttaaatctttgtgacacactttgacaaaaatgtagaacctataacaaattcttttacaagttactataaaggacacaaagagaaaactttaccttccagaacaaaatgactcctgatgaacagtgtgtggggatttgcttgtatgtattaaacttttgacctctg

SEQ ID NO: 185308 - DNA, 265 bp, Homo sapiens
gtctgactacagatacctcatgttagtggaatcatgtggcatttattattttgtgagtgacttatgttatttagcataatgtcctaaaagttcatccatgttgtagcaatgacaggattttgaagagatatttgcacacccatgttcactgcagcattattcacaatagccaacaggtgggagcaacctaaacttccatcgccagatggctggataaggaaaatgtggtatatacagatgatgaattattattcagccttaagaa

SEQ ID NO: 185309 - DNA, 307 bp, Homo sapiens
tacagtccaagggtgagggttaggatggtattctttcacacttgatccttgtttttggtcactcttggaattttcaggggtagaaaatttcattccctttgaggtatgctggtaataataatggactccagtatggaagtgttggttggactaaatatgctaatcacctatttgtgttactaaaaattgcctctcaacagaggagactttagcttcatctaagtattagtgagttttgtggagtttagctaattgtgagatggatttcctcttagaagatgtacctcatgtgccaaattgcttggaa

SEQ ID NO: 185310 - DNA, 192 bp, Homo sapiens
ctgttattgaactaataaagcattatgaaaaagctgacattcaccttgcagtttcaacttgatcataatattttgcttccagtcccttcccttcttaggcaactgtagatgtgggtttcgttgtacacttctgcatatgcaattcataaacaatctgtttgtgttttttgaaaagcacttgtgtttaaattt

SEQ ID NO: 185311 - DNA, 439 bp, Homo sapiens
ggctggctattttccaccaacaggatgttacagcttgtcaaaagttattcaacctatagtgttaagcaggtacttcatcattactgaatttggttgatgctctatggagaaagccaaagttaggagttttgtctgtcattgaggtagagaccctcaactagggaagctttgaactgttcatccagctggtattctgtaccaccttgcctctggagttgagcttagaaccctacttccattttttctgtcacttcagggctgtttcaactattgtttcttcatttacttatatcaagtgtgttttctcaattcataagcatgggagaccccaagagacagatatcgcattagtccttttttgtttgtttagcaggaaggtttttaagtaaagctcctaaatgatatgtctcattctcatggaaattcatcaatattgttt

SEQ ID NO: 185312 - DNA, 682 bp, Homo sapiens
catttacataaatgtttgtaaagttattatttataatagccaaaattatagaaatagtttaaattttcatcaactggtaattaacaaaatgtagtctattcattttattcaccaataaaaagaaatgaactactgatacctaatagaagacagatgagcctcaaaaacattttgctaactgaaggaagtcatatgcaaaatatcactgtggtaggcagaattctaaggtagccattaaaattcctcctcctggtgcacagaccctttgtaatccccactcttgggtttagaacggaccagtgaatgtgatgggatagtcactgctgtgcttaggttatgttatatggcaaaggtaaagagattatgcaaatgtaattaggttaatcaaatgggaaatcaccctgagtgggtctgagctaattaggtgggccctagtaaagagagtccagatcttgtatgaaaagagaggttctgagtgatagagatccttttattgaccttgaaggaatctgtttcgagctgcctatggaggggaccctgtggcaaggactcaaggagatataagcagtgtcccgctgacagccaggaacaaagtgtggacttcagtcttacaaccacaaggaaccaaattctttcaaaaacctgaataaatgtggaaatggattcttccctagtcaagccg

SEQ ID NO: 185313 - DNA, 157 bp, Homo sapiens
aacttgtagtgaggaaggctcaagtttgcaggcaagttgctagatctctgagagtcaggggatataggtgtagtagatgtggaaatgcattgcccggacccccttcttccaggaaggcctttccatccagctgcaggagtgagctgggcagatggcc

SEQ ID NO: 185314 - DNA, 273 bp, Homo sapiens
aaaccccaccgaagagaagaatttatcaactgctttttttttcttttttgaaataatactggtagctcattctctctactcttatttccaccatcacagcctttcctttgggatacagtctgatgaatttagttagaatttacatttctggacactaacagtatgactcctgaaacaggggacgttctgtctctgctccctacttggttgctaaccagggcagttttcaagtttgcttgagaagccaagcttattacctgagatttaagaatg

SEQ ID NO: 185315 - DNA, 285 bp, Homo sapiens
gaatttccttatgtttcttaatatttgatccttgatagtctgtacagtggaaaccatttccctctgtgatatccttttttgccaacctatatgaatgtgtttagcgtcacttcagatatagagttcaagctcaagtatacacagcacatgaaagatcctatagttcatgttctcttaggttgaattttcttttcataattttttatgattgaattctaagggtatgttccttggtaaattgtgttaattatgtccactttataatggatttaacaattttacaaa

SEQ ID NO: 185316 - DNA, 487 bp, Homo sapiens
tccacctccacaggcttcagcttccacctccacggctccctctctctttgctcaagtccctcccctgcaaaatgaaactcacctataagatggggtcagatgcagatgttcaggtccttggcaccagcctgaccagtgagcccgccctcctcacggggagagatgtgagcactgaggtaggtaggtctctaacatggagccaaggtgcccctcctctggagtgtgggctagggcctgtgactctgacgggacaagatgtcactcctgcgcttaggttatgtggcaaagacaaggaactttgcagctgtaattagagcccctgaatcagctgactgagccaatcaagagagaaacaccctgggtgggcctgactgcatcaggtgagcccttcagggaccaaaccctttctgctttttgtgtgtgtgtgtgtgtgtgtgtgtgtgtgtgtgtgtgtgtgtgtttgagatggagtcttgctctgtcgccc

SEQ ID NO: 185317 - DNA, 474 bp, Homo sapiens
ttgggtaattctgttaaaagggtctgaatagcttgtgttttataagctgctgtttggtattacactgagggggagtattttttacattgtatttttgtatgcctttggcaaagtggtgttaactctttttgtacaagaaaaaaatactcttgggtaattctgttaaaagggtctaataacttgtgttttatcagctgctgtttggtatactgggggggagtattttttatattgtatttttgtatgccgtttgcaaagcagtgttaactctttttgttcaagaaaaaaacctcttgggaaattccgttaaaagggtctgatttattttgaaaagcacgtttacctgaaattttgtatttagttttgatttctgattgcctgattgtaaaatgttgccttttgggacatcttctaataaaagtttcatcaaacatgtttttttttaaaaaagaagtaaacatctttatgaccttg

SEQ ID NO: 185318 - DNA, 5318 bp, Homo sapiens
  misc_feature (3680)..(3680): n is a, c, g, or t
  misc_feature (3914)..(3914): n is a, c, g, or t
  misc_feature (5310)..(5310): n is a, c, g, or t
aagctgggaaccagcgccttcagtgaggtggtcactgtgaacactttagcattccctattacaactccagaacccctggtgctggtcaccccaccgaggtgcctcatagccaatcggactcagcagggtgtgctcctgtcctggcttccgcctgccaaccacagctttcccatcgaccgctacatcatggagttccgtgtcgcagagcgctgggagttgctcgacgatggcatccccggcaccgaaggagagttctttgccaaggatctgtcacaggacacgtggtatgagttccgggttctggccgtcatgcaggatctgatcagcgagcccagcaacatcgccggcgtctccagcacagacatcttcccgcagccggacctgaccgaggatgggctggcgcggcctgtgctggcgggaatcgtagctaccatctgcttcttggcagctgccatcctgttcagcaccctggctgcctgctttgtcaacaagcagcgcaagcgtaagctcaagcgcaaaaaagaccctccactctccatcacccactgcaggaagagcctggagtctcccttgtcctctggcaaggtgagccccgagagcatccgcacgctccgagcgccgtcagaatcctccgacgaccagggccagcccgcggccaagaggatgctgagccccacccgtgagaaggagctgtcgctgtacaagaagaccaagcgggccatcagcagcaagaagtacagcgtggccaaggcagaggccgaggcagaggccaccacgcccatcgagctcatcagcagaggccctgacggccgcttcgtgatggaccctgccgagatggagccctcgctgaagagcaggcgcatcgagggcttccccttcgccgaggagacggacatgtaccccgagttccgccagtcggacgaggagaacgaggacccactggtgcccacatctgtggccgccctgaagtcccagctcacccctctgtcatccagccaggagtcctacctgccaccaccagcatacagccctcggttccagccccgcgggctggagggccccggtggcctggaaggtcggcttcaggccacaggccaggcccggccccctgccccccggcccttccaccatggccagtattatgggtacctcagcagcagcagccctggggaggtggagccgcccccgttctacgtgccagaagtgggcagccccctgagctccgtcatgtcgtccccgcccctgcccaccgaggggccctttggccaccccaccatccccgaggagaatggagagaatgcatccaacagcacgctgcccttgactcagacacctacaggagggcgctcccctgagccctggggccggccagaattccccttcggggggctggagaccccagcgatgatgttcccccaccagctgccaccctgtgatgtgcccgagagtctgcagcccaaggccggcctcccccgaggactgccccccacctccctgcaggtgcccgcggcctacccgggcatcctgtctctggaggcaccgaagggttgggcaggcaagtcgcccggcaggggccctgtcccagcgccccccgccgccaagtggcaggacagacctatgcaacctctggtaagccaagggcagctgcgacatacaagccaaggcatgggcatacctgtgctgccttaccccgagccggctgagccgggggcgcacggcggccccagcacatttggcctggacacccggtggtatgagccccagccccggccccggcctagccctcggcaggccaggcgcgccgagcccagtttacatcaagtggtgctacagccctcccggctctcacctctgacccaaagccccctcagctcccgcaccggctcccctgagctcgccgcccgtgcccggcctcgcccgggcctcctgcagcaggcagagatgtcagagatcaccctgcagccgccggctgcagtcagcttttctcgaaagtctacgccgtccacaggctccccctcccagagcagccgcagtgggagtcccagctaccggcccgccatgggcttcaccactctggccaccggctacccttcccctccacccggccccgcccctgctgggcctggggacagcttggacgtgtttggacagacgccttcccctcgaaggacgggggaggaattgctccgaccggagaccccaccacccacgttacctacttcagggaagctgcggagagacagaccagctcccgcgaccagcccgcctgagagagcactctctaaactgtagcagctggtattccagctatctgggcagtgttgtcgagacaagcctctcctcagctcaataggtaagggagctcctcggctgggcgggcgggggcgggcaggcggacggggcttcggccgggccattgcttcctggacaggggatccaaaccatgtccctcaccgccccgtggggtggccgctgccgctcctcgatccccacggcttctgggttccccacatcgagccacgctcggcaccgcctagctgcagcttctgccccccaccccccgtccccatgtccggcccctctagagccccctgcggctctcctcactcctcgccagcctcgccagcctgctgccagtacacccagggcctcccacagaagccctggggccctgcatgcaccccgaaggggcccagaacacccgagatctgctttgcatctctgcacccttggggacctctctggggcccctctggtatccaggaagagcccccccgcaccctattctcccagcagccccaggcatagcatcccttctcctggggtggctggcccctcaccagcttcttgagatcttcgtggtattaggctctctcgaggagtacaaggttgggatgagccccacttcttccttgacagtggggtcctctgcagggtcaggtccctgcagtcctatggggctttgtagcgaaatgtcatcactcccctgtgctccttgccttctgcagcctgaccttggtagtcacaggactgaaatgtgacctagcccttgggtccacattgctttcaaggtccctgttgtagccttgtcgtcctccctgggtcatgctgtagggaaagggtcttaggaggacctccccgaggggagggggcaggcttcccctgggcagacaggcattgagctggcaggaagtgaaacccccagggaccagcactgtgtccctccccctgcccccgcagtcagcctctccttgagtgtccttccaggtggaagctaaaggaacttgggcattcagggagcctctgagtccctcacagagactcagggccacccgaagctcgctccctctcacagtagcctgacaaggtgctgccgctcgccacggaccctctgccctgtgcctgggcacacacaggcatcgggcacctgcatgggagacggcgagcctcccgtccaggtgcttctggctttccaggcgagaaggagacaggtgccttccccccctagagatgtcaagggaggttcactttcctaaccagggctataaatctcattcattcctaagagtggcctccataaagaggactgccctgacatttctttaccatctgtagctataaaattgtcagcagcccagaggccctggaattgtgggtgaggctgtctggcatagggtgantgtgagggctgtcaggcagcgtttatgagctcacctgctctggggccctcctgcgcccagagacccactggtcttccaccttccccagctccctccctgtcccagctgtgactcctccacagcccccggaggtgtgggagccctagactagctctcaccccagctcctggaaattcctagactctgctctcatgtgttattcctcaccccttcactcaactccattgaccctcncctttcccagtgtccccactgtgccagatccaagagaagcccgctctcctttcactgctgtggcaaacccagaaaccaggggcagcgatgagggaccatcgtttctctcccgggcctggccagcatccccagcctaggagaaggagaccctccccatcctgagtcagcccctcggtgctggcctctcctgcctgctgggagcctccccggtacggctgctgggtcctggggagatgcaggctctgttcagatgctgtctccatgctgcacctttgcatgtgtgccctcttggtcttgcttggagaagttgtgacagctcttgtccacgtgcgttctcactgtttcttttcccttcagttcctctcctgttcctttggtccatatgtagttgttgcccctgcctctcctcctttctctctccctttttttctcctcttcccaactcccttctcaacatggggagttgtattgcgtggacctgtcctttctgtggactgtggggaggccgagccaattcttagctcctgtctgagcctagtgatgccctgtcctcacctctgcttccactccctttcccattcaggctgactgtcaccgcagggaggcaggtgggtctggagcatggagtggcccctgtcctgggtcagctgtaggaaggggcccctttgtaaacaagcttctgccaggttctgaggcagagcactggtctgagtccggccccacagaagggttccatcttgtggtcagcggggtgggctcagacctgcagactcccgcagtgggcccaccctttcccttgctatggcccgtctatgagtggctttcccctgcctccatcggtgtataatcaggcaggtggtgtttgctcttaggtgattagaagaggaggaaaatgcccatcaagccactgcttcagcctgttggccagggaacacctgaacagggtcaaaatggtcagctcctgggcgctgagctaaggaaatatgcagggggttttgactttccctgtcctgaggcttgcctccactttgacctggctgcatctttcctcagctcttctgggtaagctgagagctaagcaaataagacctcctgggctacctggtcatgatttgggttttgtatggattttttgaaaagagagaaaaagagtgtgggctgggtgccgtggcccagagggcagatctcttgagtccaggagttcaaggccagcctgggcaacatagtgaagccccatctctgcaaaaaaatacaaaaaaatagctgggcatggtggcacatgcctatagtcccagctccttggggggctgaggtgggaagatcatctgagctggggaggtcgaggcagcagtgagccgagattgcgccacttcactccagcctgggtgacagagancctgtctc

SEQ ID NO: 185319 - DNA, 185 bp, Homo sapiens
tccatcacttgtgtcagttgttcagagttcctccataagaagatcagatgagcagaacagagagaacaaacagtaataatcctgctctggtcccctttcttcctggagactggaaaagcagtaactttttccttttagaaaatatgtgggatatgatcataaacataatctgatcaattaccaaa

SEQ ID NO: 185320 - DNA, 279 bp, Homo sapiens
ggagtcaaagaaaatgctagtgtttaaatagtgggaaagctaggagaaaaacagattcagggtctggtgagggggtttgggaattaatcaacgtggacccgttagagggagtgaaacagtgagatggcaggtggagagttgcactgggctacggcacagagtcggcctgtgagcactgaggcaggttgggttttttgtttttctgtttgctcgtgggcagcagcgggcggcagactttctaattctctgtggctgactgggcaaagtcttccctaccac

SEQ ID NO: 185321 - DNA, 465 bp, Homo sapiens
atggtggatttatgtggacataaaaataataatgaagattatacaacaaggaaagatacttatgataatgttaaggaaaagatacaaaattaaatatacatcctaaccacaatgatataaaaatataatatatatgggaaaaagactagtaggccatacgcataatcttccccttcctccccccactaaactatgatttctttaaccacaaggaccatatcatactcttgtgtaccacaaccatacctaggcagaatgctaggcatactggaccagtttaatattttcaactgtattaaaatatctatacttgcttgactcaaattttagatatttggcttacaagatagaaatacacaacatacaacagagacaataaatataaaaaagtactttctgacaaagacctattactgccacactatgaatggcaaagttgattacactcccagtacacacttgaaa

SEQ ID NO: 185322 - DNA, 659 bp, Homo sapiens
gctttcctagactccatttagagcaaggaattgcatgtttataagcgaactttgacacttgcctctgctgatatggctgggaatcctctctttcattcttcattattaatgggtatttattatgtcataggacttgtcattaaatctgctgaaatctggtaatccaagcctccaacccatagtttgcatcaaccaggtggcgacccccaggctctgctggtttccattcctttatcttgattccattcctttatcttgattctccctggccgagagcttttctgacccacctaaaatctgttcatttcagaccccggcctttccaggatgccttttggagcccctgctggccaccacatatcatgttctgaagttctacagccctctgagttggacactgaccatctgggggctcgagtcatcctcagattggtatgcagccattcaaacattcctgtttgtttcctgtgagtcagcattgtgctgggcttccaaggaatctgcagtcctcttcactgcctcttcctgagtactcactgtgttccaggcttctctcagcccttcctgggtacagtgctaggaagtaaagagtcatatccactccagtaaatgattgctgagtggatgaatatagctattttcaccaccaagataaagat

SEQ ID NO: 185323 - DNA, 2425 bp, Homo sapiens
atgtggtggagagttctcagcttgctggcatggttccccttgcaagaggcctctctgactaaccacacagaaaccatcaccgtggaggaaggccagacgctcactctaaagtgtgtcacttctctgaggaagaactcctccctccagtggctgaccccctcagggttcaccatttttttaaatgagtatcctgctttaaaaaattccaaataccagcttcttcatcactcggccaatcagctctccatcactgtgcctaacgtaaccctgcaagatgaaggcgtgtacaagtgcttacattacagcgactctgtaagcacaaaggaagtgaaagtgattgtgctggcaactcctttcaagccaatcctggaagcttcagttatcagaaagcaaaatggagaagaacatgttgtactcatgtgctccaccatgagaagcaagccccctccgcagataacctggctacttgggaatagcatggaagtgtccggtggaacgctccatgaatttgaaactgatgggaagaaatgtaatactaccagcactctcataatccacacttatggcaaaaattcaacggtggactgcattatccgacacagaggcctgcaagggagaaaactagtagcacccttccggtttgaagatttggttactgatgaagagacagcttcagatgctctggagagaaactctctatcctctcaagacccacagcagcccaccagtactgtctcagtaacggaagattctagtacatcggagattgacaaggaagagaaagaacaaaccactcaagatcctgacttgaccaccgaagcaaatcctcagtatttaggactggcaagaaagaaaagtggcatcctgctgctcacgctggtgtccttcctcattttcatactcttcatcatagtccagctcttcatcatgaagctgaggaaagcacatgtgatatggaagagagaaaacgaagtttcagaacacacactagaaagttacagatcaaggtcaaataatgaagaaacatcatctgaagagaaaaatggccaatcttcccaccctatgcgttgcatgaactacatcacaaagttgtactcagaagcaaaaacaaagaggaaggaaaatgtacaacattcaaaattagaagaaaagcacatccaagtaccagagagtattgtgtagtgctctctgcaatggaacatgtgatttcagggttgccgcagtgtcacctcagtggaccagcctgggggaaggagcttaattgctgagacattaataatgacctcttagtgcaatgcaagatggtgtcctcggataatgatctgccccggagctagggcagcaacatgaggaccaaaccatgcacataaagcttgtagtttaaaaaagaaaagcaaaaaaataattatgcctgacactacttcagagcaggaggattctacgaagccttggggatcagggtcagtgtgagcagctaacatcctacctcaaatggaacaggattttttgatgctttgctctaatggaactgttttaaaaatttttttttctttttaatattttcttctggtcacaaaataaagaaatttgggatgcaaagtacctaaagatctctgatcctaagaagttacttctggccaggcgcggtggctcatgcctgtaatcctagcactttgggaggctgaggtaggcagatcacttgaggtcaggagttggagaccagcctggccaacatagtgaaaccccgtctctactaaaaatgcaaaaattagccaggcgtagtggtgcgcacctgtagtctcagatacttgggaggctgagggtggagaatcgcttgaacctgggaggtggagattgcagtgagtcaagatctcaccactgaactccagcctgggcgacagagggagactctgtctcaaaaaaaaagaagttacttccaagacagacttttaacatgtaaccagcacaaagcaatgtcagggaggagtgatacatgacaataaatgagtcagatgagcaagaaggccccagaacccatgccccaaggcacaaagaggagctcagggtaggcccaaagattcgaattccttagattactaaatcacatgagcggaccttgtctgtcagataagatttttacctggaaattccatgaccaatacatgtgcaaaagaaaatgatgggttgaatttactgattattgacctaatggatggctttttaaaatgttttaataaaaagcagaatagatgtttgtttttctagtggttataccaagctatacttcctgttttcacgtgtgaaagtaacatgggacatgcctttcttttccgatcagtttatttaagctatacagcaaactttggcatttatgtggagcatttctcattgttggaatctgaataaaccaattacaaaataaaaa

SEQ ID NO: 185324 - DNA, 1909 bp, Homo sapiens
cacacagttctggggtttctgcacaacctctacaagcaggtagccgctaaatatattctccaatctcttttactgagcacaatgtgggtaaaactgctctctatagtagcagaattttgtttttcccctttcctagttactgatgaagagacagcttcagatgctctggagagaaactctctatcctctcaagacccacagcagcccaccagtactgtctcagtaacggaagattctagtacatcggagattgacaaggaagagaaagaacaaaccactcaagatcctgacttgaccaccgaagcaaatcctcagtatttaggactggcaagaaagaaaagtggcatcctgctgctcacgctggtgtccttcctcattttcatactcttcatcatagtccagctcttcatcatgaagctgaggaaagcacatgtgatatggaagagagaaaacgaagtttcagaacacacactagaaagttacagatcaaggtcaaataatgaagaaacatcatctgaagagaaaaatggccaatcttcccaccctatgcgttgcatgaactacatcacaaagttgtactcagaagcaaaaacaaagaggaaggaaaatgtacaacattcaaaattagaagaaaagcacatccaagtaccagagagtattgtgtagtgctctctgcaatggaacatgtgatttcagggttgccgcagtgtcacctcagtggaccagcctgggggaaggagcttaattgctgagacattaataatgacctcttagtgcaatgcaagatggtgtcctcggataatgatctgccccggagctagggcagcaacatgaggaccaaaccatgcacataaagcttgtagtttaaaaaagaaaagcaaaaaaataattatgcctgacactacttcagagcaggaggattctacgaagccttggggatcagggtcagtgtgagcagctaacatcctacctcaaatggaacaggattttttgatgctttgctctaatggaactgttttaaaaatttttttttctttttaatattttcttctggtcacaaaataaagaaatttgggatgcaaagtacctaaagatctctgatcctaagaagttacttctggccaggcgcggtggctcatgcctgtaatcctagcactttgggaggctgaggtaggcagatcacttgaggtcaggagttggagaccagcctggccaacatagtgaaaccccgtctctactaaaaatgcaaaaattagccaggcgtagtggtgcgcacctgtagtctcagatacttgggaggctgagggtggagaatcgcttgaacctgggaggtggagattgcagtgagtcaagatctcaccactgaactccagcctgggcgacagagggagactctgtctcaaaaaaaaagaagttacttccaagacagacttttaacatgtaaccagcacaaagcaatgtcagggaggagtgatacatgacaataaatgagtcagatgagcaagaaggccccagaacccatgccccaaggcacaaagaggagctcagggtaggcccaaagattcgaattccttagattactaaatcacatgagcggaccttgtctgtcagataagatttttacctggaaattccatgaccaatacatgtgcaaaagaaaatgatgggttgaatttactgattattgacctaatggatggctttttaaaatgttttaataaaaagcagaatagatgtttgtttttctagtggttataccaagctatacttcctgttttcacgtgtgaaagtaacatgggacatgcctttcttttccgatcagtttatttaagctatacagcaaactttggcatttatgtggagcatttctcattgttggaatctgaataaaccaattacaaaataaaaa

SEQ ID NO: 185325 - DNA, 286 bp, Homo sapiens
tcgaattcaagcttctaacgatgtacggggacatggccggggtgttgaaggtctcaaacataatctgagtcatcttctctctgttggccttggggttcaggggggcctcggtcagcagcactgggtgctcctccggggccacgcgcagctcgttgtagaaggtgtggtgccagatcttctccctttcttttccgatcagtttatttaagctatacagcaaactttggcatttatgtggagcatttctcattgttggaatctgaataaaccaattacaaaataaaaa

SEQ ID NO: 185326 - DNA, 307 bp, Homo sapiens
gtgtcatttctcttcacttttccctttttacacatatatcaatcttgtcattctcttgtttcagaacttctcaaggctcctgttattcccccaagaaaggcctaaacaccttaacctggcatctgaggccttttatgatctgtctgtccaacccacctctttaacacatctaactctttcacttcaaatgtgatcctgtagcaaaaccaaaccatctctgtgcccttggagggctttgaacactcattttctaacctcttgggatgccttcctgctgtcgcttagagtctaagtctaatctgctgca

SEQ ID NO: 185327 - DNA, 266 bp, Homo sapiens
caccgtgttagccaggatggtcttgatctcctgacctcgtgctgggattacaggcgtgagccactgcgcccggccagacagcaaaggactgaattttgttaaaacccacccttgctcagagggcatttataaagaaaacaacctccacaatgaaacaaaaattcaggggagatgcggtgtgaggtctgctccaggccgtggtgggtgctctttggcttctctcctctgctgggcctgtggccacatgtccccccgcccaccaccgc

SEQ ID NO: 185328 - DNA, 414 bp, Homo sapiens
gctcattgtcaatgtaaggaaacaaggtcaaaagttaggtcaggagagcaggaactgattcatggaaaggaatgctacatgggcaattgcctgagaagacattcacctgcaaggcccacaggaacaggagtctgctgagaggtgtgatgatgtggaaggagcattagagctagaggacctgtaccaattctgttactacacctcactggccgcatccttgaccaatgtaagggaggggcatggtttctggagtcctgcgtgcttagctgctcctactcctggtgcttccgtgggacctagggctttctggaatacagtttgaaaatcagtgtgtcctgtgatctctagggttcctttcagtcatcctgttctatgattctgaaatgttttttaattccaaggcatttcttagaa

SEQ ID NO: 185329 - DNA, 262 bp, Homo sapiens
tgaattaaccctttcatttgcccttaaacagttttgtttagatgtatcaattaatgttaaacaattaatatacttaaccatctttaccccttatttactgagtatctgccatgtgccagatgctgctaggctctggggatctgacagtgaaacatggtatgatctcttctgtcatagagtttactacattatatggaagatagaaattaacaaaaagatgtacttacaaattgtaatgtgtgttctgaaggggaataaaggg

SEQ ID NO: 185330 - DNA, 285 bp, Homo sapiens
caattcttggttttcatgattgcaagtcacaggcaagtatcaagtgagaaattcagtttcatttgcaaggcttagagaggccaggtgattctagaaaaatgagccttgtatttgttttaaaccagtaaagagctttgagtgcttattaaattgaaagctctttaaatttattttgtattttattttattttatttcttttgagatggagtttcgctctgtcacccaggctggactgcagtggtgtgagcttggctcactgcaaactccgtctcccgggttcaagt

SEQ ID NO: 185331 - DNA, 406 bp, Homo sapiens
taacagtctaaaaagacttcatagacagccttgaataagtagggtttttttgttttggttttggttttttagttttttgttgttgttattgttttctttgagacggggtctcgctctctggcccaggctaggatgcagtggtgcgatctcagctcactgtaacctccgcctcccgggtttaaggaattctcccgcttcagcctctcaagtagctgggattacaggcacgcacccaccagcacgcctaatttttgtaattttagtagagacagtgttttgccatgttggccaggccagtctcgaactcctgacctcaggtgatcctcctggcttggcctcccaaagtgctggggttagaggcgtgagccaccatccccagccaaactttttgtatttttagtagaga

SEQ ID NO: 185332 - DNA, 207 bp, Homo sapiens
tcatgtgagtgtgatggcaaagaacactcctaattttcttttgccagaaatgtatttcactttcatctttgaaggatgtttatacagaaaatagaaatatgggtttgaaagatgtttttctcttagcacttaaaatatgttccactgttttctggcctccatgctttctgataagaagacattacttattaaaattagttcccttgt

SEQ ID NO: 185333 - DNA, 523 bp, Homo sapiens
ggttgagggaacgtggggctcaagtactgtgttcttaaattatttagacttgtttttcctctttggtgtgagtatggtgttcatttaaaatatagttgggtttgtttcagattgctttcagatttagtctccccccactcctacttttcttcatccttactgattttcgcttttaaatacatagggtattaacatgcttctgcaaacccagaactgtacaaaaagatatacagatggtatataggttattaaaccatcagtggtgttatttttgccttacactgttatctgtcctttaaagaaattaaaagaagaacaaactttggtagtggtgggttgtttttacatttactgtatatttaccatttctgttgccctgtatttcttcttttatatcaaaattgtcatctggtattccttccctttatcctgcagaacttcctttagtgcttcttgttatgtaggtctgctggcaacaaattaactcattttttgcttacctggaaatttattttcctttcat

SEQ ID NO: 185334 - DNA, 519 bp, Homo sapiens
gatggtctgggatgacatttgaatgcacagaggacaatgtctaaatgacaatgtcgagaaggaaaggcaaaaagaagctgaaaactattcccgctgtcccatggatactcgtcactccttctgcgatattcttcacatgggagctttgtctgggtagaaatggggagtgggatcagggagggctagacactggggcctggggacaagagccagggtttcatgtccttaaacacattaaaattctagacagatagcaaatgtaatgaaaattgcaacctgaatgtgttctgatagacaaagttaaacactttagctaaagtattacaagtataattaacaaaaagtttgcaatactctgaattgcttctgtgaataaagcttttaagagcatcaaattggttgtgcaaatgaatggtttactgagcatcttttggaatttaggatagctgctttctctgctaaccaacgcatgcacacacacacacatacacaaacacacaccattcatacagccaaaaa

SEQ ID NO: 185335 - DNA, 279 bp, Homo sapiens
gtgggttgaccgtggcttgtgggttgaccgtggcttgggtctcccgcaacaggactgctcagttccgagagggaatgtctcaagagcaagtggtctaagagagaagaagcggaagctggcagttctcttacaaagagtaagcctggaactggtcacagcatcattctccagcattctattcactaagctgccagagggcctgcccagattcagggaaagaagaaataaattgcgaattttgatggcactcttgatgcagttatcctgaagccactacat

SEQ ID NO: 185336 - DNA, 578 bp, Homo sapiens
cacatgagcccctcaacactctgctgcctttctccaacaggagggaaagagcgctcgaccgagcacagcctgaatccagctgctggttctgccactaacttgctgtgtgactctgaagaactgcctttccctgtctgtcccttgatgttctcacctcgacacgaagagatgtaagtcccaggcagtagctgataaaggaagggggaaactttcctgtttcccgcccttcagttcctatattccaggaagtttaatgggttttcagggctagaaaagttattattattattattttgtagagccagagtctcactatgttacccaggctggtctcgaactcgtaggctcaagcaatcctcctgccttggcctcccaaagtgctgggattataggcgtgagccaccacgctcggccaggaatctctgtttttaacaagctcgggagatttttcagcagccagtccagcaccccagagtttggcaggctttgccaagtgcttgatatgaggtggtaaatgtctggcacctttaaaatatagggccctttccgtccatctggccctacaggttgatgttaaa

SEQ ID NO: 185337 - DNA, 783 bp, Homo sapiens
agaggctctttgaaagcatgaatctaaatataaggatggctggaatggcacagtcctagctcctgtactgcagacttagaacctagaaggaagaactgtctcacttgccagcaccatcttctctggaatcccgagttgctacattgtaggatatccctctgtacactgcagattggagaacacaattatgtttaaaacatcttagatggccttcaaggaacaaagagctatgccaaattttcaaaacctggttgcatattctatcccaaaagaactccaaagtcttaaatctaccattaaagaccctagataattctaaaccacttgacaacagagagagaaccagaaactctggatccaagtggttacctctgacacttatgcaagccactttaacttctggtttgagtaagagcaagcgaatagcaaaaggtctttaaaagaactaaaaagtgaaatattcccacaagtaaacatgtgtcaccgaagactcaagaaagaagaatggcattaaaagacatactctctcccagatcccaaagtcaaacaataaaggtacatttaaaacaaaaccaaaaataaaattgttttgttttttgagacggagtctcactctgttgcccaggctggaatgcaatagtgcaatctcaatgcaacctccgcctccagggttcaagccattctcctgcctcggcctcctgagtatatggaactacaagtacccaccaccacgcccggctaatttttatattttttttttagtagagatgaggttttgctatg

SEQ ID NO: 185338 - DNA, 496 bp, Homo sapiens
gagaatggcctggtggaaagaccatcatgcttgtctgtgccaaaccttagccagtctctttttatagagatattttccctaatctctttccttaacttgtgagtaaaaatttctaggaaggctgccttctttcttgtgttgttttagtcactttcctaccataggcatatgtgactggatctttgttctgtgtttgttcatgtgaatcagaagtcctagctgccaggtagattgctcatgcagtaccctgtaattttgttgtgttagatgaaggaaataaattgccataatgtcagatcacctcacttgttattttaaatatgattaagggagtgtacctgttattccttgggattaatggaaaactctgatctgccttaatcagggaacagtagcagtgatcatctgccattttaaaagccaattcaaaaggatttttttttttttgcaagggtttttttttccttctgatgtggggtgtgcatgtgcgctcgtg

SEQ ID NO: 185339 - DNA, 277 bp, Homo sapiens
cccgctcccttacccatcatacaccctacactttagttatacaaaaccactatactcaggctgccattctcaagacttttcattactgatcccactgttgggaaaacctatatctcctttctttgttgggcaactcatataagctccttctgagctggctgagatatcttttaatatctttcctgaaaatcccttcacactgctgaatttaatgcctctcctctgttcccacagaggttcctgtctaactctccctgctactggaaggcgtgggctg

SEQ ID NO: 185340 - DNA, 233 bp, Homo sapiens
tttgtgtatttgcatcctatgtctacaaaatacccatttcaacttacaatattttaaacttataacagtttataaggtaaggaatatctataaaataccaaataacaaatggccaatatcctcagtagaaagagtcagtaaaagagacgttatccatatgtcttattggatcacagtcatttctttctttctttctttttttgagacagtcttgctctgtcgcccaggctgga

SEQ ID NO: 185341 - DNA, 162 bp, Homo sapiens
aagtctaaagtcctctaggcacttgtatctggctgaaatgtgagcatggagatttgtcctaagagggttgtgagcacattattatatagtgtgcatgtgtccgggggggcaaaatcacatactggtagctaaatgggaggagtctgccctcttaactcactt

SEQ ID NO: 185342 - DNA, 265 bp, Homo sapiens
acataatttataaatggatgcagatgaagagtaagttagtgagttgaaagatcagcttgaagaactcttccagaaagaagcagggaaagataaataaataaaaaagaaaatgttggggccaggtgctgtggctcacgcctgtaatcccagcactttgggaggccgaggcaggtggatcacctgaggtcaggagttcgagaccagcctggccaacatagtgaaactccgtccctacttaaaatacaaaaactagccgggtgtggtg

SEQ ID NO: 185343 - DNA, 233 bp, Homo sapiens
cccagtcctgtctagtgccagttacacatcagtgtctgtagtagagaccctggcgctagcatgaattctaccaagcaggctagactttacaatcaatcaatagaataaaaggaaggaaaataaacagttcctcccagcccactgagtactattgtcttgtctcttagtaccactacaaggaaatgctagatcatgagctggggctaccagagagcttcatagacttgacccca

SEQ ID NO: 185344 - DNA, 421 bp, Homo sapiens
gactttcctaatgctcccttactcattttctgcattctaagcattctcctttaactatcccacatttcttgaccctgtttttctccttcaagacattcttccttaaagactgcaacaattcccttccccatctctgccaatggaaatccaaccttcaaaatacccacccttcaaagcccagctcaaaggtaaccttcacgaagacagtcctgaatctcaccccagcttccccaaagaactcttcctcttctaagcaccaaacatataatactgctttaatcccccactcattttggaacatacccctccctgtctttctactatgcttttgcttatagtcactcagcaggtatttgttaaaaagaaaagtcagttaacactattcccttcccttctctaccataaaacatatttaaggccg

SEQ ID NO: 185345 - DNA, 364 bp, Homo sapiens
ggactacaggcgtgtgccaccacgtctggctaatttttgtatttttttttttagtagagacagggttttgccatgttgcccaggctggtctcgaactcctgagctcaagcaatccacctgcctcggcctcccaaagtgctgggattacaggtgtgtaccaccgcacctggccttctaacttgaggagaggttttaatcgtgccggtgagagagaaggaggaaccccaggagctctcgatgacttctggagccgaggctgccctccctgtctggccaggccctggtaggctgtcttcccacctcatcctttctggcacccctcccttctgtgaaagggatgctggagtactgctcttgtgcctga

SEQ ID NO: 185346 - DNA, 115 bp, Homo sapiens
aagagacaattacgggttccagggagaaaggaggcacatacaaaagacagaaacatggaaaagcaggcctgtggaggagttctgtgtaatgttatatggatgaaaaatgggcagg

SEQ ID NO: 185347 - DNA, 265 bp, Homo sapiens
actgtggaagcttcagagcactgtctgggtaagaatcaaaataggaagggattaaagctctgttattggaaggtcccacaaactgcctacccaagtaggaggtataggtgatattaataggaaaagttattctaagggaacctctaatattgaagaacttcagctgtctagctgtttggtggcctgtctttctgaaagttgtatcttttgaaacatagatgaaataatgagtacaagatttagtcattaattttgaacagtaagg

SEQ ID NO: 185348 - DNA, 325 bp, Homo sapiens
ggacaaaggactcaaatagacatttctccatggatgatatacaaatgcccaataagcccacaaaaaactgctcaacgtaattagccatcaggtaaatggaaatcaaaaccacaataacactacacacccatagggtggctagaatccaaaagacagataacaacaagtgttggagaggatgtggacaaattggaaccttctacattgctggtaggatgtaaaatagtgcggctgttttgtaaaacagcttgacaatttctgaaaatgttaaaaataaatgtaccatgtgatccagcaattccatccttaggtatctatgtgggag

SEQ ID NO: 185349 - DNA, 446 bp, Homo sapiens
ggggagcaggagagaaacaaagagagtggagcagctaaaggagaacaaatacacaattgtgctgttgaacttactgttgctaagtgcagcagaatgctagatttgtgaaactcggcctccaagaagctatctctataaagtacattcaaggactctactgggggcaatatgtggacaaaaaggaaggatttatccactggttcctgtttcccactggccaaaggtttactccacaggatattaatttgtctatacttctggattatgtaggccagggtgagggcacagggcagtgaaccaaaaagagaggctttaggagcaggcaggaggcgatgacactctctgcttgggactgtgtaaagaaaagccctcattgagctgcctgccaccacaaaagctgaaaaaataaagaaagaaagaaagaaagaagaaaaaaagaaaaataa

SEQ ID NO: 185350 - DNA, 314 bp, Homo sapiens
ggctgatctagaggatccctaggataccccattatgtgagatcttgtagcaagacttggattcaggagtgagatgcaaaacaaaaaaacaaacaaacaaaaaaccagggaacgcttatgtggtgtgggtgatttcagaggcagcttcctcatcgtaatacagctggggtgcatctagtggccatgttggcagctgctcccttaccagaccggttctacagtgggattcagcccagatcctagggctgggtatcaccatcctctgctgcagtaaatgactttgaaacacatagaatggattctgtagttggcagc

SEQ ID NO: 185351 - DNA, 375 bp, Homo sapiens
ccatatcaggaacacttacagatgaaaagtgttaaacatttatcaaattgtattgcctactttatataatctaatgggtcttatgagtaattattttcataatactaatttatgtgtgcctgggacagtgctaatttatggtggtttcttgtaattattaatagaaccacttttttactctaaatgtgtcctagttcagatgataagtcacttgatgacaaaattggtaataaatgtcctacttctcttaggtctcatgagaatggttgagtttgtcagtcatactcaaaatggcatgaaattaaaatacataaaatgtgtgatttatgttacattatgattcttgatatgttgtatttaacagttaggtacagg

SEQ ID NO: 185352 - DNA, 104 bp, Homo sapiens
aagcccaacacatgcaccagttcttaggtggtaaggctaagttctgaagttcatatttcattctttaagattgtcatatgcattattggtgttgtttatagcat

SEQ ID NO: 185353 - DNA, 349 bp, Homo sapiens
agacattggggagattgtgactggttggggcatttctcttcacacatcgtaaatgtctgggagggtaggaagaactttcgaggagtgccctttgtagcaaaggcatcttctaaacagtcttatgagttaacttagtctgtactcacaagagtgatagttgtaacagaggtaatagaagctcattgaatctggagagtggttcgtgtaactcatgggtagacccaactgttagaaattatcctgtgaaaaggctaggcttgacgctgcttgagtcagaactatatgcttataaggcaatactgttcactggtaggtgtggtatgacaagactgtgagtggcatgggctca

SEQ ID NO: 185354 - DNA, 661 bp, Homo sapiens
gcctagtcaaaagaaatggtattaaagctgagacctgaagaattaaagaaataaaggagccagtcacacaattctaacatattttagtagcagaactctttttaaaaatgaaatcattagtagaataccactcaaaagcaagtaaaatagacttgctctgatggaagctatttagggcttctgctctgctcactcagcctctcttaaccaaacccaaggaggccctggatattcttggagacctttttctagtatcaggatgagctgtctcaataaataatcctcaaaaaataatccagggcttcgtggaacgtggtttgaaaaccactggcctgggtgaagccagtaggaaattgctttatgctgtcctgccctgataatcagatacaaagataagtacctttcactcagcagttgagcctgcgttcagcaccgacacagattttaatctttcccttttatgtcctgaaagtttagatacacaaagcaccattgctatgttctttgtctaaagcttcagtgatcagtaacctagctaaaatgctttggatactttaattaacatgagatcattaatgataataataaatgcctcttaattgtatctaaatatagtaagccttagttaaatactgagaggataagcacttcccttggacat

SEQ ID NO: 185355 - DNA, 409 bp, Homo sapiens
atgttcaggtgacgtcttgaaagtgctccgaccaactcttcatggttaggatgtgtgctataagagggtcagaattagtagatgctaatgagaattaaggtaactggcccacacatagtcttgtccttttcaatacagaattcactcaattagtacttaattaaaattgaaatcccctttttttggagcacttactatttgtcaggcctggggataggtgcaagatctatgtctcattgttatatgtttgagactgtttcatcactgaccaagaagtttcacaatatttttcctggctaattacaagtccagatactggtctttaaaaatgggaggttttactatatgcctttccctgtttatgaagatgtgacttagaaatgatctctgtttacgaaaatgtccctgc

SEQ ID NO: 185356 - DNA, 137 bp, Homo sapiens
agaggggcagaagcaggtcactgaagtcatgagggctccggcctgcaaaggcagaaatctcctgcattacgaaccacaaaagaaagctcaaataggttaacaccctgtgaacactcagctgcaaacactcagaaggg

SEQ ID NO: 185357 - DNA, 426 bp, Homo sapiens
aactgacaaaatttggtgaatgacttgataaggataggtatgggaatggagaaagggcaatcaagaatgttatctcggtttctagctcgggacactggatggatgtgatgcctgtaactaatctatccactcttacactcattgtggcttcaatagattttgctaggaactaagtgaaacaaatatgtttaggtaataatggatgtttaagtaattcattcatgatctgatgtattaaaccgggcaaattttcattcacacttttatctagataatatctgaattgagtcgtgcttccttttaacagttggaggaaaatgtccttagatgcttcatattaaaaggatgcattttctagtctctaattcttaggctgatttactttaaactaacagattaaaaggaagcacgactcaattcagatat

SEQ ID NO: 185358 - DNA, 409 bp, Homo sapiens
ttagccaggcgtggtggcacgagcctgtagtcccacctactcaggaggctgaggcaaaagaatcacttgaacctgggaggcggaggttgcaatgagccaatatcacgccactgcactccagcctgggtgacagagtgagactccatctcaaaaaaacaaaacaaaaaaaaggtggaagctctgaagaaattaagagccatttaaaaaacagttatcaaaaagttaccctgtaggtatataaatacaatgttttaatttataagcttttccagactctcaaagagcaggtaatattagcaccatatgatgtacttaacatattttatgaggccaccattatcttcatatcaacacttggcatagtacacacagacacacacacacacacacacacacacacacacacacg

SEQ ID NO: 185359 - DNA, 428 bp, Homo sapiens
gattctgctcagtgtccttggagccacagttgtccaagtcttgggccctagatgagactttggactgtgctgggaagagcactaggctataagtctgcaggcccttcttctcctcgcccagtccatgaccctcggaaagctatttccagtgtcttggggaaagaggaaaatatcaaactggattatcattaaaacatcctgtgagtctcttattctctagtctgtcaaactgtcaaacttatgaccaaaaaaaaaaaaaaaaaaaatgtactttcatcagactagtgaaacaagaactgaactagaggtccccattctggtcccagttctactactaaataattaagaccttgagcaaaccactagcatcttcccttcatttctccctgtcttgacccatttcatcactcaaaacctagtttgattgc

SEQ ID NO: 185360 - DNA, 423 bp, Homo sapiens
atgcacatatactgaggatgtactcaggttcctgtgtgcttagattgtgttctactgatggaatgcacagtttggagactgcagaaatagagtgctatacttgaggaacaaagtcttcaggactagctgccttatagtaagatgtagcagtattgtggttcatgtgcagacagagagcgtggggaaggccagtccaaacgaacccagtgggaagataaagaaaaatacaccattgggatgcatcttgaggaacagtgaaatgaaatacgctggaccggaatgtgtttgcgttcttaaatattcatggtacacgtctcactttaaggctccttctgtttctcctctaactcgtttcctaagttggtggggtttctacaaattgaagaaccttgcatttctgtattattttgcccccagtctcag

SEQ ID NO: 185361 - DNA, 523 bp, Homo sapiens
cctctgaggctcagttccctctctgcaaaaatgggctcgtaagcaatcccttcctggccaggcaaggtggctcacacctgtaattccagcactttgggaggccaaggcaggagaaccgcttgagcctaggagtagtttgagaccagcctgagcaacatagggagaccaccttctacaaaaaataaaaaataaaaaaattagctgggtgcagtggcgtgcacgtgtggttccaactactcaggaggctgaggtgggaggatcacttaagcccaggaggtgaggttgcagcgagcagacatcgcaccactgcacttgcactccagcctggacagcagagcaagactccatctcaaaaaaaaaaaaaaattctaagacctcagactgtgacactactacaagaagacattggggaaattctgcgggacatgggctctggcaaaaatcccttgagcaataccccaaaagcacaggcaactaaggcaaacggggacaattggaatcacatcaggctaaaaagcttctg

SEQ ID NO: 185362 - DNA, 240 bp, Homo sapiens
tcattcctcaagaaccagatcagatgttcgacttctctaaagccctttcagaagcttcagcagagtaatgactccctttcatgtgctcctctagggtacgcacaaacctttgcatatcataataaagcacttattactttgcactggaactaccgattcacatttcttttctgctccccaccccacctggctgagctcactgaggacagggatgatgccactatgctttactcaacttct

SEQ ID NO: 185363 - DNA, 154 bp, Homo sapiens
tttttttttggtcccaacacatgcaaaggcccctctcatcagtaaaatacaaccacgaagactcctcctttcagaaagcacatgaggtcaaagctattttcctaataacaacactaagatgttacttgcccttcccactgagttgaattttgca

SEQ ID NO: 185364 - DNA, 468 bp, Homo sapiens
tagtcaacatggctctagcagaggaaacttggcagcaatcctctcctttgggagccaacatacagcaccctgcacaaggttttgcccagagcaggcgctaaacaggtgtagaacgaatgaatacgttttagacttgagtgtgcagtccctattatccagtacactgctatagaaatgaaatctattggcaaatcagccaacctgagcagagcatgagtataatcaagtgagagctccttgctcatacgcagtgactccccgactcactgtttcaccaagttgacactattatgtgccctgatttgatgatggttaaggttttacctgatcaactataacaaggaatcacctatattgcctgcatggatataacaagggctttctagctcctgtgcacaaccaaaaagaaaaaaaaaagtgtccagtcaaaaaatattttatttttattgccatgaagcttgggatatg

SEQ ID NO: 185365 - DNA, 184 bp, Homo sapiens
tgctggacttacaggcatgaaccatcatgcctggacatcatgaatgtatgtatgtatgtatgtatgtatgtatttatttttttgagacagagtctcgccctgttgcccaggctggagtacagtgacacaatcttggctcactgcaacctccgtctcccgggttcaagcaattctcctgcctcag

SEQ ID NO: 185366 - DNA, 729 bp, Homo sapiens
cctccagccctaccctgacattctcaatcgctgttgtttaggccttgcagcatagccagaggcatctgggacagagagaagccttgtctagtcctttccccactccagagtactgccaggaccccagggctaagggacacagcttctctggtactgccaggggacatgacagaacagccccaagggttgggctcaatgcaggaccttgttctgctgccgagaaaggggagagtggttttggacaaatggaggctgattctggggaaatgtgtgttcatgtgtctgtgtggtggtggtggggagggcgggcctcccatgactgagaagcatcagtgagcactggaactggcccaagtaatttgtgcagcctcaggccccttggggtgagcccagctggggctgtaaataatgggtggggatggaacttctagtttcctgcccagatcagaaaaagcctggcccagagtggaggcacagcagaggcccaacgaatacctgcacaattgaacccagatggtcccctggaaggtagtggtgtactctgtctcaggtcctagcagagtatactaagtaagagcacaagttcaacaggcaaacttgctggattcaaaatctagctctgcctccatgacctaactcaatatcattgtgggccagtcctttaacctctctgatccttggtctcttctgtaaatggggactgtaaggcctctacctcacaggattgtt

SEQ ID NO: 185367 - DNA, 196 bp, Homo sapiens
ctgctgatcactctgcactcacctgttggctccctctggccacaggggtccagttgctccctgcggtatgtgcagttcctacaagaacacctgacttaggtctccctttgcctttgaagccaccaggaggaggaaaaagcttagtggtgttcattgggttcaaacagacatcgtttcctaaatcaacattaatgtg

SEQ ID NO: 185368 - DNA, 355 bp, Homo sapiens
gtgttgtgatggtagctatcacttagcaagaagagattaaagataggtacaaaggcacacaacaggtaggaaaaagaaactgccccaacagccagcacatatcaggaacaattttgaatgatatatacttatgattggtaagtgattgtggtagatttttgaaaagcttaaaaagattgacactgaatattaagtatgcttgccataaaacaggcaaaaaaggagaaaaaaagaagagaaaaagggaaaggtaaagaaattgatttaggaatagaagatacaaacttattcatactaaaaggaatccactaaaaatattcagttatctatttaactttacaattatatagaaagc

SEQ ID NO: 185369 - DNA, 531 bp, Homo sapiens
gcttgattctgttcactagaagtaggccactaagtctacccatacttgagggaaggagaattaagctccagctgttgaagagtatcaaagaacttgtggacatagatttttcaaaagtaccaccacaaccacacagtccacttcacattgagtagtggaccccccttttctttctctcttcaatcctctgctctctcagaaccagtacaaattcctcctcttgtctcataatgagcagtgtaaccatttccttttcctccaggtctctctgaaacactcctgcccttatcttctacccacatgagcttatcagtgtatttttttcatcccatagataatcttttcccttcgacgaattttggtgccagttattaacataatgaaatttctatttgttgtatgaacttttgtatagagaaaattatgttgaaagaaaattccatatcctaatcaagcaaatgtggaggcaaaaggagacatttgaagacaagcagggattctgaaactttccctcccatgcactctctgaaa

SEQ ID NO: 185370 - DNA, 525 bp, Homo sapiens
tgcctcttcatcgcatcttcattaaccctgggaattaccactttagctttgatttccaccacatctatattccagtgttattggtaaacaacaacaacaacaaaaccttaagataggaccacagtgcaaaaatctatttgcataatcaaaaatgccatttgttcctgtccaggcgtaggaaatccagaattcttgcttcttacaccaagaattctaatgtagatttttaaagatgcctttaaagtaaataatcaggccgggtgcactggctcatgtctgtaatcccagcactttgggaggctgaagggggcggatcacttgaggtcagaagttcgagaccagcctgggcaacatgatgaaaccccatctctactaaaaatataaaaattagccaggtgtggtagcatgcgcttgtaatcccagctactcgggagactgaggcaggagaatcgcttgaacctgggaggaggaggttgcagggagccaagatcacgccactgcactccagcctgggtgacagactga

SEQ ID NO: 185371 - DNA, 852 bp, Homo sapiens
catattagtggccatgtgatcaaaacattccaatgactttccatgtcactaaaaataaaaactaaagtccttaagactgtctatgagaccaatcatgatcttggtgcctgttacctctctgatctccctcttactagtttcctcttagatcattccactccaagtatgctggcctcgttgctggtcttcaagcgcattgggcacattgctgccttgggtcatctgcacttgctgttcaccaggattgtcttcccccaatataaaacgaattgtacctcactcctaatccatgaaagtcaaagcagtgattaattccttaaaataaccatttatcccccatttgcagttctgtaaattgggcatgttgggggtttaatgatgaagaactattacatagagcagttcaatgaattttaattctctacaaatggctttcatagattgagagcttaactgatatctagcttccttttcttctaattcctaataaaatcctaagattataataggctagaattgcatttacttaccaatactacacctgtattaaactggatatttcttatgcttacatccttgaatttttttaatttttaatttttgtaggcacatattaggtgtatacatttatggagtacatgaaatattttgatgcaggcactcaatacataataatcacatcagggtaaatgaggtaaccaataccttaagcatttatcatttcttcgtgttacaaaaaatccaattatactcttttagtttttttaatgtacaataaattactgttggctgctatcaaatagatcttattcattctgtatatttttgtagcctttacccatccttacttgc

SEQ ID NO: 185372 - DNA, 504 bp, Homo sapiens
ctggccctcctaccacgattcatacaaagtgctcactacaggatgctgtgtcaaaatccaggcaaggacccaactccgggcagcccctcctccctgctgacctcaacaagggctgtgctattgttttttattattattattattattattattattattattattattattattattttaaccacgagggccaggtggtggcgccaaggtcatctagctatttatcttacttctgtttctttccaactttttgctttctcccttttctcttgtcttataaactagggaaaaggggaggtgggggagaagctgggaaggacaacaggagaagtggtggtctcattccacaataggaagagtgtttcctgggtcataagcgaaaatttttggatccatagaacaatttaaagcaagagcacagaacgttatgttggaaggaaacgcgtcctttagaactctaaaacaaaacattttctagcatcaggtcacaataaacagaagctg

SEQ ID NO: 185373 - DNA, 188 bp, Homo sapiens
gaaaataggaaaggaaagttaagaaacaagaatagttggtgtagacttttggttgtatctaatagagatttagaaaggaaagacagtgacgaaagaagggactgtagtaataaaataaaagaaggggaaattccagtgtagtgaaaaaagagcagattcttaaagttggaaggatacattgagtgtca

SEQ ID NO: 185374 - DNA, 135 bp, Homo sapiens
caagcctttcttcatttccttcccagaccctacttttggagctcatttagattcatatagaatcttatccacagcaattattttataattccttttatggttaaatgtgggcatatctaacgtacaagattacaa

SEQ ID NO: 185375 - DNA, 407 bp, Homo sapiens
gaggcaggagaatcgcttgaacctgggaggtagaggttgcagtgagctgagatcacaccactgcactgcagccttggcaacagagcgagactctgtctcaaaaagaaaaacaaaaaacaaaaaacattgagcttctgtgcccagccgtgggttggggactggggttataactgatcagggttgatgtggtaataagccgagctttgcctgccagtcatcttgctgtggccatagggatcataaagaaaggggtattttcattttttcaattattttatgtttggtgctttctgtatgataacaggggaagatatttttttttgaggcattatctcaaagtaatcatattcattgtagaaaagttagaaaggatagataagcctaaattaaaaaataaaaaacaagcc

SEQ ID NO: 185376 - DNA, 458 bp, Homo sapiens
aaagagacgatactcaaaaagagaacagagacatacagagaaaggaagtccttactgtgtctcaaaagccaggcaccagtagggttgagggacatctgccaggaaggaggttttcagcagcatgaactgttttagataactagggcagaaaaaaggtgttaaaatgtgacagcaagaaggtcactggtgacctcaaggaagcagtctcatgagtgtagaggtggcagtcagtttgcaaagggttaaagaatgagtgggtgggaggaagtgaaggttttcaaggtatttggcagcagaatgaagggaaagaggaaagagaggagaggtgctctaggggcaacagtgagtggatgggatccttccgttttttcatgggacacaaatctcatcatgttactaccctgcttaaaaacttcaacttcccctaatgcattataaggcccaaaagtaataaagca

SEQ ID NO: 185377 - DNA, 335 bp, Homo sapiens
ccatcttcttcaatgatatgcatagtaaaaatacaattaaaagtttcaatctcacaatatttggaaagatgaaaagtcagtagattcctttgaggccttatagtaatcctgtgaaatggttaaagtagagctattattatctttgtttcacagctaggaaaactgggacagaaatcagaaaaaagccaggactgaaaccttgtttttcctttttaaatgcataggtgtaactttctagataagatgaatattcacctcacccctgcactcccaataagattaagattgtaagttaggttcttctaaggaccaggatgaattaggtggatgtcctt

SEQ ID NO: 185378 - DNA, 447 bp, Homo sapiens
caagctattctcctgcctcagcctcctgagtagatgggattacagacgtgcgccaccacaccagcttatttttgtatttttagtagagatggagtttcgctatgttggccaggctgatttcgaactcctgacctcaggtgatccgccgcctcagcctcccaaagtgctgggattacaggcatgagccactgcgcctggcaggagtattgttggtaagtgctccaatagtggttaagtgcctgaaccatgcccaccaaccaaattatggctttggctctgagatacccttgatcaacttagccagtgatttcccgcaacctaagcatgcaagaaaaagaaatgaagaggatagaaacacaaatacctgtagattctgaaagtcagatttcttggcccctgtaagaataaccactcactgcaaacaccgctagttgcctttaagactgc

SEQ ID NO: 185379 - DNA, 340 bp, Homo sapiens
attttccaacatttaaaatgtgggagactccacagagaatcacctgcttcacctggctccacggggctctccctgttttgcagtgttaagtgcagccaagggcttggcggttccctatcccacctgctctgctcccatacgcttcttgcctggcctccattggcctccgcattagactcctggtctaactttcaagcaactaaatcttcaagatttagttcctttggccaggcacagtgactcatgcctgtaatctcagaactttgggatactcgtgggaggatggcttgaacccagaagtgtaagaccagcctggttactgagaccccaccactacaaa

SEQ ID NO: 185380 - DNA, 534 bp, Homo sapiens
gaatatccaaaagatatgcaagacctcatcacagaacactataaaacattatgaatctaaaggagaactaaataaactgagagatatacagtagtattagcacatctgtagattcaacacaattccaataaaaatcctattggtttttactttttaagtggaaattgacaaactgaatctaaaatttatgtggaaatgcaaagagccaagaatagccaacacaatcatgaggaagattaaaactgatactagatatcaaaaaaaactgtataatttagaataggatagagaaataaaccagtagaatagaatagagagcctaggaaaagacccatacatgtatgaggcctaatgtgtgggcaaagatgagactgtagggaaaagatgatcattttagtaaatggtttggggttaattagatatccatatggagaaaagcattaatcttaactcttaacctcattccataccaagaaaatcaactctagatggattgcagatctaaaagtgaaaggcttagcttctcacatgccc

SEQ ID NO: 185381 - DNA, 347 bp, Homo sapiens
tcagcagtgaatctaatttttaagagtcatgatctcttttattattatcaaaacaacaacctgtagcacaagctaccttggaggctgaggcaggagaatcactcgagcccaggagttggaggctgcagtgagctatgatagtgccattgcactccagcctggatgacagagcaagaaactgtctctacaaaacaaacaaacacataaagtccaaaatattaatggtgagttgtctgtaaactacacttgaatagaagggctttcagttaaacttgacaatgtaaaaatccatttgctttccagggtatcagtaacaatttgcacaattatttccatctttttttatt

SEQ ID NO: 185382 - DNA, 491 bp, Homo sapiens
tttctaaatggaaacccttcaatgactacctacttaactctccaacatgatctcctcacgttgcccaggatctttcttgcttcagtattaccaagctgcttggagtgctccaagcccacttactatgagtttcattgctctacgttcatgctgtctgcctaccagatccaccttctctttctttactggaaaaaattccatgcatccttcaaaatactctttcattgtcttcctgtgaagttttctctgacctctatcctctctttagctcctttttatcttgttaactacactattttatatcaacacaaactgtactataattacatacttatctctttttccctcctcagctatgagttccttaacagcaggtttgtcaggagttcctaagactatccccaggttcagtgattcacttgaaggactcacaggactcaccattgagttgcagcacagggaaaagacacacggagagaagtttggaagaa

SEQ ID NO: 185383 - DNA, 1015 bp, Homo sapiens
ggacacacacctccaaaggttactggatctatgatggaggacgctattgtttccacatcaacacctggttctcctgagactaaaaatgttgacagagactcaacatcccctctgactcctgaactgaaagaggacagcaccgccctggtgatgaactcaactacagagtcaaacactgttttctccagtgtgtccctggatgctgctactgaggtctccagggcagaagtcacctactatgatcctacattcatgccagcttctgctcagtcaacaaagtccccagacatttcacctgaagccagcagcagtcattctaactctcctcccttgacaatatctacacacaagaccatcgccacacaaacaggtccttctggggtgacatctcttggccaactgaccctggacacatcaaccatagccacctcagcaggaactccatcagccagaactcaggattttgtagattcagaaacaaccagtgtcatgaacaatgatctcaatgatgtgttgaagacaagccctttctctgcagaagaagccaactctctctcttctcaggcacctctccttgtgacaacctcaccttctcctgtaacttccacattgcaagagcacagtacctcctctcttgtttctgtgacctcagtacccacccctacactggcgaagatcacagacatggacacaaacttagaacctgtgactcgttcacctcaaaatttaaggaacaccttggccacttcagaagccaccacagatacacacacaatgcatccttctataaacacagcagtggccaatgtggggaccaccagttcaccaaatgaattctattttactgtctcacctgactcagacccatataaagccacatccgcagtagttatcacttccacctcgggggactcaatagtttccacatcaatgcctagatcctctgcgatgaaaaagattgagtctgagacaactttctcctgatatttagactgagggagactatgcacctccc

SEQ ID NO: 185384 - DNA, 538 bp, Homo sapiens
aaataaggacgtcagtttgcaaccagacaagtttagaggcctgtggaattcccaggccaagggaagagttgttacggagactctatggccaagagggacagatcacactagacatcaagctcaatggatgccaccaagggcagccacctgctgtatcttgtacacgtttcatccatccagcttttagcctctcaatccttctcttcctaatagggtaggtataagattcccattgctgctgtaacaaattaccacccacttagtggtttaaagtaacacggaagtattccattacagttctggaggtcagaagtccaagctgggtctgcatggtttcattccttctagaggctgtgagagagtccatgcccctgtctgttccagcttctagaagctgctactcatcttggtggccttgcatcccctctgacctgtttctgtcctcacatcttctgactctgattctcctatttatatgaccctcttataaggacccttgtatattgggccacctggataatccaagatactctcccct

SEQ ID NO: 185385 - DNA, 353 bp, Homo sapiens
attttttatttgtttgttccttccaactgaacttccttctttaacttcttgatagtacatataaaaaggctgagggaagcctcctgccctgcagtatgacacttgatgaggaaactggaggactttgagagcatagatgacatttttaccatttcttctcataaattgctgggacttgaaaatagaattgactggctttatggatggtgtcagtgaaagggattttgatatctgaaccatcttggctggaagtcactgcatctcacatagtcagggagaatgtaattttctagagtccagctgagtgatagaaagctttaacctaattactgaggggaagggctaaaaaggcc

SEQ ID NO: 185386 - DNA, 599 bp, Homo sapiens
tcttcactctaggaaggcagtgctacaaaaagagacagacgagaatctgaaacttcccgacatgtcagctgggcttcctaactttttttgtccttgggctttttctttgttgttttggggattcatttgcttttgtttctaagtttttagcctagttccccttatgggaatgggatcaatcattaaagcgtttgatttcctctgagaaaccaaggctaatagtgcctgctcagaactgtttctgtgatcttaggaatggattaaacaccaagtttaggtgtagtgaacttagcaaaaattgcaaggccatctgcttcacatatgtgtttgagccacaggctaaggatctctagagatctgagtgagaaagagaactgagcccccagagcctggcgctccctccacagacctgtcttcagtatgccagccaccgggccaagcattttattctggtcacatgactttctccaaaccttgaaaaactactgtgaagtcagcttattaccatagttcatcaaattcaagaaaccattcattataatatacaccactattttatgtaccattattagactatgacacagtgccttattttcact

SEQ ID NO: 185387 - DNA, 165 bp, Homo sapiens
gtgattttagacaagtgacttcatttctccaagtattatttcctcattcatcaaatagggatgctacgacttacccatgggaattaaataagataatgcaagttaagcataattgttaataagattataagaaagtttttaaaaaatattttttccttaattttt

SEQ ID NO: 185388 - DNA, 279 bp, Homo sapiens
tggccaagatgaattcagtgacagtggggaccaagagaagggacaatgtggctttgaacacaagggtgagaggaagacaatgaacaccccttcctactcaccctcgacatgaaaccaggggaaaccagaaccaaagggaccttgaaaaaagattgattcaaaactccctccacgaagaagtggtgagtgtactgggcctgggagttcaacaccagcacaaagtacagggagtcagagacctggattccaatcccagctccataatcactagttgcatga

SEQ ID NO: 185389 - DNA, 2097 bp, Homo sapiens
tgatacggagtcttgctctgtcgcccgggctggcatgcaatggcatcatcttggctcattgcaacctctgcctcccaggttcaagcgattctcctgcctcagcctccctagtagttgggattacaggtgcccgccagcatgcccagctaattttttttatttttagtagagacagggtcttatcattcttggtcaggctggtctcaaactcctgacctcaggtgacccacccgccttagcctcgcaaagtgttgggattacaggcgtgagccaccatgtccggcctcatttaattctcataacactttaggtagcttattttattttattttttttacacggagtttcactcttgttggccaggctggagtgcaatggcacaatctcagctcactgcaacctctgcctcctgggttcaagcgattcttctgcctcaggctcccgagtagctgggattacaggtgcctgccaccacacccagctaatttttgtatttttagtagagacagggtcttgctatgttggttgatcttgaactcctgacctcgggtgatctacccgcctcagcctcccagagtgctgggattacaggcgtgagccaccgtgcccagccttggtagcttatttttaaattgcatttgctacaattctcctgcctcagcctcccgagtagctgggactacaggtgcatgtcgccaggcctggctaattttttgtattttagtagagatggggtttcactgtgttgcccaggcttgtcttgaactcctgagctcaggcagtctgcccgcctcagcctcccaaagtgctaggattgcaggtgtgagccaccgcacctggccactactttttggaactctattttgtacttgctgactttcacaaaaagtttgaggcagcttacaataggatgtaataggatgaaagaagaaacaacaatatattaatacgtggccagaattagtgtgcttcagaggttgtagaagccttattaacctttctcacgtttttcaggggaaagccttgccaggcagttactactactcaattgagaaagatgtgtgctaagtctcaaaagcaagtacttgttctcagtcacatcagtagtgagtagcacgcttaaactgagagtttctggttctggggtgtttctgttttactccaatcaagaaagattcttcgttcctccatactcaacaaaatggagggagactgggtaccaagttcagacacaacaatatatttacttttgtttgttgttttttaaaatattttttcagtatacatgtagcatatcatcttcttacagcaagactgtgcaatagatcatatacttgctttgtagatgggaaggctgggactgcgtgaggtcacgtaatgcacccaaagccatgtagccattaactggtagagcccaagctcagacactagaattaattctgtctgaaaccaaatgcaagcttggtccattgttctagactgttgcacttattctgtgctggccagctggcataggcaggacaacactgtagtgtggggacattatcttcccagtggcctagatgggaaggttaagttcagaagctagttgggtctgattccagagttcaccttgccagtccatttattggtggatttccttccagtgttttttccccatccataagcttgtggtttttcttttttcttttttttttcttttgagacggagtcttgctctgtcacccaggctttagtgcagtggcgcgatctatgctcactgcaagctccgcctcccgggttcacatcattctcctgccttagcgtccccagcagctgggacaacaggcgcatgctgccatgcccggctatttttttttgtatttttagtagagacagggtttcactgtgttagcaaggatggtctcgatcttctgacctcgtgatccgcccgcctcagcctcccaaagtgttgggattacaggcgtgagccaccacacccatctttttatttatttattttttgagacagtctcactctgtcgcctaggctggagtgcagtgagccaagatggcaccactgcactccaacctgtgcaacagagtcagactctgtct

SEQ ID NO: 185390 - DNA, 526 bp, Homo sapiens
aagactgctcctcaaaagggaaaaggaatgacaggtcaaatgtggttaactgagctaccggacagttggacaagctgagaacatacagcaaaacagagattttatttccataaaacaaaggcttccaaagtcatttgaatatatttatgacacttttatagcaatctggaacaagtattctggattacattctggcactactttagcccaggagattaaaatcacccactacataaaggccaaataaataacaatacgcttgcttattaccaaatgcctcaagccaacaggaaattcttaagcagcttatttccagcagcttagggtggctaagtactttactctcacctttacccataacttctcattaccacctaaccatgatggccttctttgttcagattagaaaacccactcacaatgataaaaaccatgtaccactacctgtctgcccttctcccctgcaagtgcattccctttgttatataaggaaattaagagaaagtcctgtggcaaaaaaagaaaa

SEQ ID NO: 185391 - DNA, 315 bp, Homo sapiens
gcgcccgccactaagcccggctaattttttctattttttagtagagacggggtttcactgtgttagccagtatggtctcgatctcctgacctcgtgattcgcccacctcggcctcccaaagtgctgggattacaggcgtgagtcaccatgcctggcccatttgtttctttatttgcaagcactttatattcattagggatataaaccatttgttacattaagttgcaaataggtttctcaattacatggctcttctcaaaatcttcagagtggctagtaaaatgaaaaatatgtcagctgggagagcactcaggg

SEQ ID NO: 185392 - DNA, 239 bp, Homo sapiens
tcccaagttttactttcgcttagatgtatttcttacaaagggtatttaaccatgaccaggaaagaatatatgatctttatttgactcatttaaatgggaattccacggatatctccctaggttctttcctactagtatttaattttgtagctctgaaaaacggcctgagtttgtctgtttctctacaaaatagaacactgaatggtatatttaccccacaaccttccttaagacaggat

SEQ ID NO: 185393 - DNA, 503 bp, Homo sapiens
tacatagcccttaaacaaatttacatagcctttttcctagctatcccaaaatgtagattcttcaaggaatatttcaggcatttaaacggaaagtgaactcccatgaattttggcaaaaataatggaaacaaggactgaaacaaaaatatccaataaaacactttctctttcctgaaagggatggaaaggaaataaaacacaccctgaaaagaagatgattttataaaacgttactaggaatagcttttaccaaattgaaagctatttttttgtaaaaaaaaaaaaaaaaaatcaaaacctgtttcccagaatgacttctctaaaatcatcagcagctcacgaatgtttttgtgtttaatgaacgtttacctcatttaagctttctttatattcaaaaaattaaggagaccaattctgccaaaaggcatttttaatcatttcgaataaaaaacaagtcagtcacaaaggactaaccagacatttcaaaagtggtaataattttt

SEQ ID NO: 185394 - DNA, 577 bp, Homo sapiens
tgctggaattacaggcgtgagccaccatgcccagccaggaaaggacttttttaaggtcacacaagtggaggagctgggacttaaatgtgtctgctgagagtgacagtgaactttgcatgtgcccaatcttaccaaattaatgttctcttagttgaattattgcccatctcaccaccaaatgtgtatcttctcaggggtgtcagtttccccagggtccagatcctggccccacacccacacatggccaaggagccatttacatttaacattccataataggatgcataccttttcggttatttagggaggatgtggttttgcctggaaggctttgagaatgctgggcagctagctcaggggacgtggggcttaaagcagaggccgatcaacttttttctaaagggccagatagagcgtaaatattgtcagctttgttggacatgtagttctcggcctgccactcagctttgctgttgcagtacaaaagcagctgtagacaaatgagtgtggctgtgttccaataaaactttattcatggtcactgaaatgtgaatttaatataattcttacatatcac

SEQ ID NO: 185395 - DNA, 1858 bp, Homo sapiens
  misc_feature (873)..(873): n is a, c, g, or t
  misc_feature (1137)..(1137): n is a, c, g, or t
acactgacttctggacgtggtcagggtggctttctctggctggcatggacttgagcagaaactcattgccggcttcctccttgcacgagcaccaagtgattcccaggtcccccatcctcccctgggacatcgaggacacacaaaaaccttgttcaccctccactgagagcggggctagagatggatgctgagtacaggaagggtgtgtgaggattcctttggctccactcttgtttccaactattgctggtcctaggcgcccagtcctgagcaaccatgacgatggagactctccccaaggttctagaggtcgatgagaagtctccagaagccaaggacctgctgcccagccagaccgccagctccctgtgcatcagctccaggagcgagtctgtctggaccaccacccccaggagtaactgggaaatctaccgtgcccctggacatgacaacatgactctaggggttagtcagctgaagaagtttagttcctaattatataatatttacatcagaggcagtggggtaggctaggggatgtcactgtttccgcttgaccttatctttctcattgaccactgtcttctctgaacttgatcattagccaaggacaaaatgcatgttgccctaatttctttcctacccctgcctctatctctgcatctagaacagctaaatggaaagatacagagggatcctgtaaggttgttttccctttcacgtccatcaagatcaaaattgagagaatcaagttccatatctgaatgatctgtaggtttctagagatggaattaggaaactgcacggccatttgtctgacctcccagatgtttttacttcatccctctctttcccggcttcccacctcttcancaagtgcctagcgcagcttctcctggaggcacattgagggcctcctggtgtctatggtagagacgggaagtgggtttccagagggcctggcaagcaaagagtccctgagaagtgcttctgtaactccctgtggcaaccaagaggcccgtaggtgaaagaacagaagcagtacctgtgagggagccagccacgctgccctaggccaaagacccctggagagcatttggtaatgaggtgtgagaggagagcatcctgcaccagaancacccttgtcttgagctaattctcttcactcctcagccttgtggccttcccagtcaccatggccctccagatatccccatcctgcatggcagttccatatgcagagccagatcactcactggaaacccacactccaggtgcctcatttcctctgcccaggagattgtagcctgggcacagctatatgaggagggcccatttggatactgctatcatggatgtcttagtggaaggaagtttagggataaccacaactctagaagtccaggttctggactcactttgcagactctagcagtacctgcctccattccctgcccactcaagctagtttctcagcaaagagaatatgaggaaatatccccaaacatcgtcatccccactgggatcctccacatgagtgtgggctggaaaggttccagggtcacactgaggcaggacattttttgccaatgcctgttaccccatggaaggctgaggtacggatgcacctgatctggaaatgcagcccaggtcagactccacatttctgcaacaaagcatcacctgcaatgactcttttcacgtcagtgggtcaaaggacagaaccagcttccgtgttttaggctcactagattgtctcatgctccccatggctattctgtttgggagaatttgatctaacccgaagcctaaaggaatcaatgtaatgttgaattgtattctatgtaacactgaatgc

SEQ ID NO: 185396 - DNA, 545 bp, Homo sapiens
gcttcctgtccctgggactcatgatgctggtgtgcgggctggtgtgggtgcccatcatcaaaaagaaacagaagcacagacagaagtcgaatttcttacgcagcctcaagtccttcttcctgactcgctgatggtggtttccgcatctccctgccaccttgactgggagaagatctgatgaccaacatccgacatccctgtctcctctgtggggtgccataaaactgatccaggaaaatgttccagggtcacactgaggcaggacattttttgccaatgcctgttaccccatggaaggctgaggtacggatgcacctgatctggaaatgcagcccaggtcagactccacatttctgcaacaaagcatcacctgcaatgactcttttcacgtcagtgggtcaaaggacagaaccagcttccgtgttttaggctcactagattgtctcatgctccccatggctattctgtttgggagaatttgatctaacccgaagcctaaaggaatcaatgtaatgttgaattgtattctatgtaacactgaatgc

SEQ ID NO: 185397 - DNA, 269 bp, Homo sapiens
atttctactagctattctgttctcattccataccagtccttccctttcctcattctttctgatcaggcctgtttataacatttgttggggatcgggcaaaagtacaaatatgggtcaatgttacttatatctaaatattttaatcatacaaattaacctaaaaacttgaaagagaagatgtgtgctatcttcctaccttgacaaatatacttcataaataacctggaagggggagttctaattttgaattattgttctgtgcctaaatg

SEQ ID NO: 185398 - DNA, 405 bp, Homo sapiens
gttcagagaagttgaatgatttgccctaaagcagaaggtagtaaagtggcagtgatgactaaaaacctcgtcaaccctagatccaaggctttgcattctgccacaggttcgacctaagaatcacctccaagtatgtacacttcctaaatcccagttgtaccaattaattttcccaagtaaattttacctagttcaaatttattgcctttcaacattgaagggatatcaatgtgtctacttcattaaaaattagctggcacaggccaggcgcagtggctcacacctgtaatcccagcactttgagaggccaaggcgggcagatcacctgaggtcaggagttcgagaccagcctggccaacatggcaaaaccccgtctctacaaaaagtacaaaaactaggtgggcg

SEQ ID NO: 185399 - DNA, 464 bp, Homo sapiens
gctgggattacagccatgtgcaaccacgcctggctacttttgtatttttgttagagacggggtttctccatgttggtcaggctggtctcgaactcccgacctcaggtgatctgcccgcctcgtccttccaaactgctgagattacaggtgtgagccatcgcgcctggccggtgtttgcttttaaaagactagagggtgttgaatttttagaaattcatcagtctccatgcacgttttcaaggctactttcttttctcataaaatgaagctttattttcatattacagtttgtattagaaaggtaacccctaggacagttaatctgtaaatttagcagaatctcaaattggatggcagaggttttagttactaatgctgattccttaaacttaagaaactcatttcttctgactgggcctctgtttcaatttcattatccaggaggtcccttttcttgtagtgag

SEQ ID NO: 185400 - DNA, 277 bp, Homo sapiens
actgaccacaggacgccctgctcacgagcgcatcccagaacgttccctcttataagaccttaaaactagagccaccacgcccagcacctattagatcttttaaaattacttctcttggttcagccatgtgagcatggaggccctgtggcatccttgaaggaaggaaaatagacagggatccagatcctggcacctgggtttagtggctgtgtgtcatagcagccgtgtccatgaaatgggatcaaacaagaacatagatgtcatcattagcataatt

SEQ ID NO: 185401 - DNA, 479 bp, Homo sapiens
acatttttatgtagaaatatattcttgaaatgtaactagcacatagtcagtgtttcttaaccattttggggtcctgaaactttttgataatgatgaaagcacagagatgctatcaagaaaaatttacccacataggaacacacacacatacacacagacacacacagagtttgcttataagctcaggaagcttaaagatctgctaaagattatgcttgggtttgccatgaatcataaataccaagtcaaatacctttgaatttgattcttaacaaatctttgtggctgagaaaccatgagatttcattctggcatgtccccagaatgtaattatcaatgaacaatagccattgaaaaaatctgaacagatattattgaggctcaaggttgtttaatggcacagataatataattcaaatcatgaccccagggctgatgaagtcttgttgtaacgtgtaaatggggtgggtgatgggaga

SEQ ID NO: 185402 - DNA, 158 bp, Homo sapiens
aatcaggcccatatattggaggaagattatttggaagttcttcagtattatttatcatctgctactactggcaaattgcctactttttaaaccacatactgtattatttgttaggtgggggtcattaggcctccaacctcttttctcccaaatctaca

SEQ ID NO: 185403 - DNA, 493 bp, Homo sapiens
gatccgttccagcagccatgccaaatcagttgtaccacttggattaaaggcagttgcagaatgccatactataaaagacttccatggcatgcttacaaattaggtttttaccagtttaccaggatcaggattaccagtttcacctgaccattactaaagtcccttgttgcactcttccatttgatttgaccctcatttgttgaacatgtgtgtaactgcctttacttttccatcccctgccacttggattcaagtacctcctccaatttcagaaggttagattaggggatttttaaggtttaaaattctttgggtctaggtgttgaaacatcacactgtcagttacaaaacacagtgtgtagcaagaacctaaattatgtttaaaaaatatgtatgtatagacctgaagaacatagactaaatagacctgcaggttataatttatgtatagtttgcaaattgtttacaacaatcgtgttgtttcacagtcagg

SEQ ID NO: 185404 - DNA, 463 bp, Homo sapiens
attcttctgcctcagtcttctgagtagctgggaatacaggcacaagccattttacattccagccagcagtgtataagggtttcagtttctccacatcctcaacaacactttttattttctgtttctttgatagtagccatcctgatggatgtgaggtggtccttgtggttttaatttatatttcccggtgagtaatgatgttgagtactatttcatatacttaatggcactgggatatatccttttgtgaagtgccttttcaaatcttttgcccatttttgagttgggttgttttttggttggttggtttttcttgtaaaagttcttttatatcctgcatatgagtcctttgccaaatacatatgttacaaatattttctcccagtctggtttgccttttcactgtctaaatggaatcttttgataacttggaagtctagtgatcaatttttgccttttaaaa

SEQ ID NO: 185405 - DNA, 1332 bp, Homo sapiens
atgttgaatgaatgaatgaatgagaatgaatgaatatataattgagagcagatgggctgggtgcagtggctcacacctgtaatcccagcactttgggaggttgaagtgggaggattgcttaaagctagaagttcaagaccagcttgggcacatagcgagacctcatctttcaaaaaaaataatatgttttaaaaattgagatcaagtaaatgattctgtctgcttaaccaaaaggatagtctttgggtaaggtattaaggtattactgccagatcttagccacaggctactcctgagcaacaaaaaccattcttttaacctggtaaggctaaaatgtaactggcatagagtccttactagcagaaaatgtatagctagttagcttcaagcattcacatggcattagttagctgctccagtcactcattcgaccctttattgagttccatctgcacatagggcattgtgctaaacacagagtgagatgcaaagggcaatgaggcatagttcctgcccttaaggagattacaatctgatgatgggagataaaacaagtacccagttgtaacccagaaagagaactggtagtgtcgcaaaaatgatgcacagcaaccgttaggtttggagggagacagagagcatcagtcaggtgataaaagaaatgtcacaaactactagtgtttgaaactagctttgaagactggaaaagaatataggagaggggagaggggctttctaggttgatacaacagcatgaacaaaggaagtcaataggtacgtttggagaatgataaatgagatgacttggattggagcaaatagaaagtgtaaagaatcttgaatgataagatttgggaaaatattgcttaacactctgctagcccagtgttcaaggctgacagcatctccctccaccaagcctacttctcagcaaatattacttcagtgcttctatattttccagacatattttatttagtgacctgtttttatgatcaggtagtaaacagattaataagaatgcattaatctttcaattaatacttaatggagccaggcatggtggcttatgcctgtaatcccagcactttgggaggctgagataggtggatcacttgaggtcaggagtttgagaccagcctggccaacatggcaaaaccccatctctactaaaaatacaaaaattacagggggtggtggcagacacctgtaatcccagctactcgggaggctgaggtatgagaatcgcttgaacccaggaggcagagggtgcagtgagccgagatcgcaccactgcactccagcctgggtaacagagtgagactctgtctc

SEQ ID NO: 185406 - DNA, 396 bp, Homo sapiens
aacctagttctcccaggaatggttttgatcttcaagcacctctcctgtcctctttgagggtggcatcacatcgatgtccctaacacaaacagatttagatcctcactgaatccctagaacgagacaattctgtatatctgaaccagaagcataagtatgccttgagcataaacatggcttttgtttcaaagagctgtatcctattaaaaaataaatcctcatgtcttagaaatttttcatacaacaaaaggctgaaaggaaatttgccaaaatgcatactgtagctgcatctggatgtagaatcacgggatctgtatttctttctgtttctttacactgttctgtactttctaaaatgtttgtactgaaaacagagcaattaggaaaccagaaaaa

SEQ ID NO: 185407 - DNA, 637 bp, Homo sapiens
taaaggagataaaggagtttgccacatatctacctgggcaacacgcaacctcagcaaaggaaatctcatcctatgcaaaggccctgaggcctgtgctgttcaataaagagcaaagagtcaggtgtgtctggaatagaatgagcaaggaagaaagagaaaatgaggtcagagaaataaagaggacagaagaaagagcttggaaggtttttagttcattgtaggactccattcagtaaaacaggagaaactgcaagtttttcacacatcccgagtaaaggagtgacataatctgacttgcattttgaaaggatcattctgattgctctgtcgagattacattgtgcaggcaaagataggagcaagggtacctattaggaaagtatattatgtgaatctggtaagagatgacgatggtttaggttaaagtgatagtaataaaagtaatgggaagtggtcaaaatatggctatattttcatggtagagccaatgagattttcttgtagattaaatgtggaatggaaataaagaaaagagtcaagaataactaagatttttggctaaacaacttacaatggagtcagatcaattgagatgtagaagttcgtgggttaaaccatttggggagaagggcaaata

SEQ ID NO: 185408 - DNA, 184 bp, Homo sapiens
aaagtaatcatgtcaggctttcaaaaggaaaaaaagtatttgcagggaagtaattctgaacccataagctaatctggcagcatgttataccaaccacagcccacgctcactctgaatatcctagcagcttcagttccagcattaatggggagaggcacctaggttggctatgggttatcagccc

SEQ ID NO: 185409 - DNA, 249 bp, Homo sapiens
tttgttgtttcaggcttatccagaatagtcttaatccattcagcagcagaaagccccctataagtcagttcccttggaacctcctccattacaaataaatccaaaattatggttggtagatcctatgaagtcctaggtccacttcaggtgatgacaactgagagaagcagcagttccattttcacagagcatgacacacacaaataaagcatatttacagtgctacttttccagctcaggaaaactcac

SEQ ID NO: 185410 - DNA, 347 bp, Homo sapiens
cgaaaattttattaccatatactaacaatgaacaactggaaatcgaaatttataaaaataaaatttacaaaaacatcaaacatatgaaataggaataaatctgaccaagagtgcaagacctatatatcaaaaactacaaaacactgctataagaagaattaaagaagacctaaataattgggaagatatattcatgaattggaagactcaatattgttaagatgtcacgtcctcccaaatttatttataaatacaatacgatcgaaatcccaagtggcatttcatttgtagaaatgagaacagaattatgaaatacagtaaaattcactcttttggtagtaatttta

SEQ ID NO: 185411 - DNA, 400 bp, Homo sapiens
tgaatctttgtaaagtgaacacacccatgcagtcagtcactagttcaagaatcagagcatcaccagccactcagaatccttcattgtgctccctctcagtgtttatggatcaggataaccatgatcctgaattctaatatcatatattagttttgcttttcttttaaaaaaaaactttttaggtagagtaatacagtatatgctctttgatgtcttacttcattgatcaacattttgtgagtcatctatattgttgtgtatagagatcattcattttcattgctgcttaatattctatcaaaggaagacatacattacaatttgcttttcatttcgctggcagtaatacaatttttggaaaactactaactagcatatgcatattcagcagaaataagta

SEQ ID NO: 185412 - DNA, 206 bp, Homo sapiens
gctctctcatgatctgcctccaccacaccgtccccgttcaggcctgctgcccacccatccctccagccagtgtgtgtccgctggactttcacattttttgcgtgtggtgcttgactataagcctgatggggtagggcccacactgcacttctgcccccgcacaggcggcacgtgacagacgtgcattagatttctgtcggtggacg

SEQ ID NO: 185413 - DNA, 359 bp, Homo sapiens
ataacattcgttgactgtcgtttgccatgcattgcatgtattattttatgtaatctttacaaatctatgaggtagttgctgtttttacttattacaggcagggaagctaagatagagttacatgaggaagctttctcaaagtcacacagtcaataaatggcagggccaggctgtgccccaggcaggctggctctaacataagtcctaactccagcctccttgttggtatgtttagaggacatgaaaggtaattcacacttcagtgaatactaagtataaaaaagaacctcagcttcctaataatcagacctgtgccattttttttgtttttgtttttaagacaggttctctgttgccca

SEQ ID NO: 185414 - DNA, 258 bp, Homo sapiens
tccagagctgctccggtgtcaccaggctggccaagtccaaagtccctgaggccaccagccttgactgtcctgctggtcccacttttaaagctgctccccaggaccccctggccgctgtggactggggtccctccgcacctggcccatttgtggctgcgtccacaggggctcctgtggcctcccagagccagctcgggggtcagatggtcgcgggggctatggtcactgtgggaaaagaggttctgggcatctgtggag

SEQ ID NO: 185415 - DNA, 477 bp, Homo sapiens
tcattgaaccatttcatctcttaataacagttcctaactcaggttgtcttcaaatgtttgacaggtcaagctaatgcctcctgccccaaacgatgacctggcaacgctcagcgagctcaatgatggcagcctgctctatgagattcagaagcgctttgggaacaatcagatctatacattcattggagacattcttttgcttgttaacccatacaaggagcttccaatttattcttccatggtgtcccagctgtatttcagctcctcagggaagctgtgttcctcgctgcctcctcacctcttctcctgtgtggagagagcctttcaccagctcttccgggaacagcggcctcagtgtttcatcctcagtggagaaaggggatcaggaaagtctgaagccagcaaacaaatcataagacacctcacctgcagggctggcgccagcagggccacactggattccagattcaaacatgt

SEQ ID NO: 185416 - DNA, 709 bp, Homo sapiens
tgctgacatttgccaatatgttttgaaatatattttggcttttgaattttcccttgagaattgtgtagagaagaatatacaaatcaaagaggatttaatatattattcattgcatatctttccttctgagatttgtttgttttaaatctttggaaagtatgttactcatttcagtatttccactgactttcactggtagatggttcttactaaattaatttcctgccatactatgttaaaaattttattctcaatagatattagccccatattgttttaaccaccattgctttatgttactaatctttttgatggtcctggaaagaactgattttaatttctatttattaatgaatttttgtttttacagttttaactcatgttacctaatcatagcataagaggactgttgcacagtgctcctgcatagagtacagcaacactggctccatgcatgttacctgctgatgggatggatgctagctgagtgtttgagtagactaatcatgatagatatatttcctgttgtgtgccagacactgtttaggaactgatgatacagaaatatgccttcaggtacctgacaccctcgtggggaagcagacagccatcaattgtgtgatgtaatgtgtcactgtcacgaaaaaaagaagactgggaaaggggacagaggatgagggagttgctagttcatatgtcagtcattggg

SEQ ID NO: 185417 - DNA, 357 bp, Homo sapiens
catcctgcctgtgctccctggttcgttttccctccagccactgccaaatgccaggacacaagtcaccacctcccctatgcttagccttgtcatcctccatgtcattgaggccttcacgactcccactctggaaccaagcaatcaaggcctctgaattgcactgttgcactgaccgttcacctccttactgtctgccttatgcagagtgcaagctctgtgaaggcagatgcctcgcctgagtggtttccagctgcccccagagcacctagaagaggcccagcaaatagaaggcactccatgattatttgataaaagaatgaatataacccaacactttatggctccccataactggat

SEQ ID NO: 185418 - DNA, 321 bp, Homo sapiens
tgtatttttacacagacaaatgttcatagcagctttttcaaaatagctaaaaagtggaaacaacccacatgtctttcagttgatgaataaacaaaatatggtatatccatacaatggaatattattcactcataaaaagaaatcactgttgatatatgttataaaatgaatgaaccttggccttgtgtggtggcttatgcctataatcccactactcgggaggctgaggcacaacagtcgcttgaacctgggagatggaggttgcagtgaacggggatcaagccacttgcactctagcctgggtgacagaacgagactcgt

SEQ ID NO: 185419 - DNA, 288 bp, Homo sapiens
ggtggccatctgagtggctttccagtttggacctgttacaaaattgcttccttaaatgttccttgatccatctcttaatgtacatgtgcatgtatttctataatatataaacctaggagtggaagcatgatcttttctaagttagatacctactttgtttcattatccagtaatgccagggattacaacttgtatttcttcatgctactattgtttctagttttgcatgatcattagctgtgaccattttgactttcttaggttcctctccctactggtttctaaatt

SEQ ID NO: 185420 - DNA, 177 bp, Homo sapiens
atttagtccatgtttccacaggtggttgatcttcagttctcctgagtcaggtgggttgttgatgcgtcttttacaattcatcttctgttcccttcctcactttcctccttttctcccagcgtaaatttgctgcctaaacaggaatccttattgcaggtggacccaaactaagacagt

SEQ ID NO: 185421 - DNA, 596 bp, Homo sapiens
cctgcacctcctggggctgagcaggagccttcctacgtggtccctgcctcccccttccctccccagccctgactcgttcctcccagaggaaatgttctgtttctagaaaacaaagaagagaaacatgaaaaacagtttgttttctgttctgtactccctgtctcaccacaccgtgtttgcaggggacgttttcaatgttgtttccaaagcagttccctgtggttacagcgtgtgccggagacagaaatggaaccttcgtcagaggatgctaaggacaggaggtgacgatgacaaggagtatgtctagggagagtcgctctgtgtcatcgaagcgtgacctgggtcagacctctctctcccagggattatccgagtgtttgatttttgtgtacgtggcttagagatgagggttgacatctcacagttggtttgaaagatcgcctctggttaatccattattttaaaaaataataacagacagccctggtcgcattggagtcactggagctggacttgtccagccaccatcaacaactaggaaactggacaaaatgtatgaaacaaccatttccagactctggagctcagaactaaga

SEQ ID NO: 185422 - DNA, 113 bp, Homo sapiens
ccaccttccatcaattttctcaaggcaaagtcatctttcatgtctctgttatcccctgatcgaattcattagcaaatcccgagggcttcaccttcaaaatatattctgggccg

SEQ ID NO: 185423 - DNA, 123 bp, Homo sapiens
ttctcattcggtgtgcaccagcagccacacgctgagcttcttcctgcttccatcaggagctgcactgtccaacatggtagcacctagtcacatgtggctacttaaattaattaaatttggccg

SEQ ID NO: 185424 - DNA, 332 bp, Homo sapiens
ttatttttgacccttgttagtagttctttaggtacaaggaaatgaaaagcaatctctttagcagaggtcaaaagaaagttgtacacttcagtgctttcccatagaaacaaaggaagcttagctgaattggcagaatgctattagaatgagatatccttaaaaatgttggtgggaagagctgatgaaataaataagttgggaacaaaggattgaatttggtattcttcttctactggagaaggtaccgaaaaagaatttgatcctctgattgcctagggttttgagacatgagaaataatgtactttgatctggttttgagaaattattgcat

SEQ ID NO: 185425 - DNA, 158 bp, Homo sapiens
gtccaacgccactctggggccgaacttcgaacccgtggctcctgaccctggcggccaagtctcgagaggcggctcacaacccctcaggtagcgtaagcgtgggccccgcaatggaggccagaggatgggagagccaaggctgcccaaggcatagccgc

SEQ ID NO: 185426 - DNA, 319 bp, Homo sapiens
aattacaggcatgtgccaccaggcccagctactttttgtatttttagtagagatgaggtttcgccatgttggccaggccagtcttgaactcctgacctcaaatgatccacccacctcagcctctcaaagtttataggcgtgattacaggcgtgagccaccgcgctcggccaaattttgaacccagttggtctgggtctggagtttattactatacttttgctgcagcctttgaggaccggagaggaacatgtcaggggaggagactgagaacatctgaaatcatgctgactcaagggaaggagatgcttcaatttccca

SEQ ID NO: 185427 - DNA, 350 bp, Homo sapiens
  misc_feature (296)..(296): n is a, c, g, or t
aagctttccaaagaggaggcaaaggttaattattttaagcatttagaacttggcaacaagtagggtggaacaaacatactgactagacatatgctatagaatattctgtaaagatctctgtctacagtggtttaacagaaagctgaacatatggcaggctttgtttgttttttttcctctggaatcgtctgtcaggacatgagctaccgcctcattatactcacattccactccgtctcaaaaaaataaaaaatctattgtgatggctcaagcctataatcccaggacttagggancccgaggcagtagggttgcttgggctcaggagcttgagaccagcctgggcaatt

SEQ ID NO: 185428 - DNA, 367 bp, Homo sapiens
cagatacatgcttcatcctttaacactacccaagtatctgaatgattctctcagatgtattttaaataaaattctgtacacataatcatctcgtctaatattttagtctcccacataaaaatctcagcaaaaaggccagcttttactgagattacctgttttagatgtgtgttagagtggaaaatgcaaaagtagagaaaaaaggttgtaaggaactgctttaaaatggaaacaatcttttccactggtcaataggattatggctaatctaatcttgatgttgagcccttgacccatatgctctacaagtgtgtctctctgtttcacaagtgtgtattacttttataacacgggtgtgggggagtca

SEQ ID NO: 185429 - DNA, 288 bp, Homo sapiens
tgtctggtaaatctgaagtcaacctcaagggagaaagtgattccatcgcagaaacattaaatattaagtgagcaatttgatttgagcagcgtgatgcacttcagaagtacaattccaaacaaagctggagggtgggggatgagggatcccctgttgcctgatgatcagttaactcagcaccacaagactacttcttagagcagggcatttttacttttaacaacttactttttctatcaggatttttcttctttattttttgtttgaatgttgccaatgaggaaaaca

SEQ ID NO: 185430 - DNA, 283 bp, Homo sapiens
aataaaaattagataaacagtatataaattatacctcaataaacataactgaaaaaaattaagcagccaaaacacaggcaaaaaaataaagtgcagtttacaagaaacttaactgtttcacaaagtgattaactgacttgtctattctagcaaggagagttgttcattcccacttttaagcatatttaatctggtaactaaagaacaaattaagttaggaaaaagtgcttcatcaaaacgtaagacagacaagctacttagactaatttctttcagaacaacc

SEQ ID NO: 185431 - DNA, 549 bp, Homo sapiens
atccacttcctttttttaatttgtttttgtttttataactctccttttatttttatttctagaagtattttaatttaataatataacttatgactgttacatatcttcatttgagcttgatttgggacatgagctatgtgcccaggagaaattagtttacatccttggagcttcaatctacattattaataaaagatactatttttccaagggctgttttaatttatacatagtagctataagcatttttcactgaaaggctcttctaaatatagcaaatatttaagaataagaatttatatttcaaagatttttaataactgggtatattttgtcatatttagtgtattcttttgaaaaatgccaaaataagaattttattatttttcctggaataacagcctaagggattctgcattgtggctttgctaattttagcatatggttttgactgctacaattgaaattaggttgaattttaaactcactattgtttagcttgtgtggtttttggttcatttgcagaaccaaatatattggacatgaagt

SEQ ID NO: 185432 - DNA, 499 bp, Homo sapiens
atgtcagtgtgagatgcgaaggagagagacattgaagtcatatcaccatctgttctctttctaactcttttttatcatatattcattgtttaccccgtcacggagtggctaataagttcaggccaagttaaggctgtcccttggcaagaacagggacaagttaggccaaagcgtggagaaatagtaacagctgattcatattcacaaagaagaactagtcaaagctagaaatgataccaggggtaggtgatatctaaagaaaccatctcagcctgatttctagctagcatacagaatcatgtatggaactgagaagtatccatattcatgaactatatttcacatacttaaaggaatttttttcccagttagtatctcaaattacccaacattccaccatactgcatttcttgtgctaattcctaacaagcagtagtaaaatcgtaatattaccagaactgtaagggggtacgagctcgattcgtatcatgcatgctgg

SEQ ID NO: 185433 - DNA, 547 bp, Homo sapiens
ctgattagtacagtggacattgctgaagaaagaatctctaaccttgagaatatttcaggccaggcacagtggttcatgcctataatcccagcactttgggagtgtgagaggatcacttgaacccaggagttcgagttccagaccaaccttggcaacataagagaccctgtctacacacacacacacaccaaaaaaaacaaaaaaaaacaaaaaaaacacttagccaggcactgtggtgcacacctgtggtcccagcaactcgaagagctgaagtgggaggatcgcttgagcccagaaggtcaaggctgcagtgagccatgatcatgccactgcactgtagtctaggcaacagagcaagaccctgtctccaccaataataataataataataataataagggtattgtaacagaaacctctaaaaaagagaatatccaaggactaaaggatgactacaaaagctatagcatatatttaatgagaatattagaaagagaagtaagaaaggaagagaagaaatatttgaaacaataatgacagaatttcc

SEQ ID NO: 185434 - DNA, 402 bp, Homo sapiens
  misc_feature (173)..(173): n is a, c, g, or t
  misc_feature (268)..(268): n is a, c, g, or t
  misc_feature (323)..(323): n is a, c, g, or t
  misc_feature (328)..(328): n is a, c, g, or t
ctaaaagtactatagctttaagctttatctatatatatgtgactcagtttgagttaatctttgtaaaggtgtgaggtcacttgaggttcagttgtttttttgtttgtttgtttgtttgtttgttttgagacagcaccttagttttcctacaacataaatgtaacaaagttatnttctactgtattgcaccttagtccaaaagtaaaacaactaaatgaaaatttaaataaatcagactgaaaaagcccaaagagtaagaggaataccntataaaatgtgactacccacctaaaaattcttgaactactttgttttgcataggnttttntgggactaaccaaatgttccaggaaccatgaggtgaagactgcggtttcatgataggcacattgttttacaatt

SEQ ID NO: 185435 - DNA, 269 bp, Homo sapiens
aagttgtagcgtaagtcagaatttccttcctttctaagggtgaacataccacattttctttattcatttatctatcagtggacagggttgcttttgccttttgcctattgtgaataatgctgctaagaatatgggtgtataaagatctctttgagaccttgctttcatttctttcaggtatatacctagaagaggaattcctggatcatagcacacatgggcttttggttttgtttttataatttgtttaaaatcagaattcagatata

SEQ ID NO: 185436 - DNA, 228 bp, Homo sapiens
ttagtcaccgatacatgaggagcaaataagttactctttgttttttacatgtgctgctgaatcttcatattccttccttctttcctcactgattatctcccaaaaatgtaatgtttgtttgtttatttatttatttttgagatggagtctcactctgtctcccagactggagtgcagtggtgtgatcttggctcactgcaacctctgcctcccgtgttcaagctattc

SEQ ID NO: 185437 - DNA, 460 bp, Homo sapiens
gcttgtgataatttctttcttagtatgtgatacagcaggccttgtcctaaagatttaggagcttacgtataatggttccagtatcatgtcaacttgatgccactaagcattccggaagaagatttctcttttttcccccaattcagagcaatttttagtattttaatatatttatagttttggaatgtgaacttcttagtatttacataaaattagcctcttctggtaataaattagaactaacttctaaaataatatactaaatgttaacatatcttaatttagacaacattttagttcattttgttaacagcaaatacatataaccttaaaatgttattttataattatgttatacattcccatgaatgaactgctaaaaaggcgcatatttgggtaataaaattgtggaataatcttagttttctgatgttatttcccttgccaccttaaacctacc

SEQ ID NO: 185438 - DNA, 798 bp, Homo sapiens
caggagatgcccatatttgtccttctgggtggttctaccagatgacttccaaatctcccttctagggtacaccctgaagctgtttttttttttcttttttttttcttttgagatggagcctggctctgtcacccagcctggagtgtagtcgcacgatctctcctcactgtagcctccgcctcccaggttcaagtgattctccagcctcaccctcccgagtagctgggattacaggtgcctaccaccatgccgggctaatctttgtatttttagtagagacagggtttcatcatgttggccaggctggtctggaactgttgagctcaagtgatccgcctgtctcggcttcccaaactgctgggattacaggcgtgagccactatgcctggcccaccctgaagcttttaatccagctgagctcaactggacaggcggcaggccctgtgaacaatacaatatgtgggccataaaacactgacaatgagttgcagacttgaaggcctggatttcccaacctgatagtgcttcatgccaaagtgaacatcattcttcctggccggtcatcttatcccagcccacatacaaaccccaaaattcagggataaccaggacagaagcagaggactgtgagacagccatggaagcttgacacaaagttccgatagggacgaaacaacaaactattgatacagactcacaggcaaacagaacagagacaagctggagcaagtgcatggtgtacctcacgggacaaagaacagggcacgtggggcggaatcccggaatacgggaaagagt

SEQ ID NO: 185439 - DNA, 253 bp, Homo sapiens
cattctgggaaattctcagccatgatttcttcactgctcccgcttccctcttccctttctgggctccacgtgtgtgtgcccctgcctgaggtggaggcagctcttgggtgcttgttctaccccacgctttctctctgtgattcagtttcagtatctctcgacctggctatgggacttgagcagcagccgctcgtcctggcgctgaagcagcagcagcaggtcgtccagcagcagcacatgcacctccaagaag

SEQ ID NO: 185440 - DNA, 253 bp, Homo sapiens
gagaatgagggagaaaaaaagaggtgtccttcagccttggaaagctctttggaacaccctttgtcagaaaggatcggttctttctctgccataatcccagccctgtggcaaagcattctcatggttgccattctcctcggcccccacccagtgaggaagattctttgagcttgctccttaaacagtctgaaccctgccacactcatgggcattgttatcttggttctgccctcccccttttccttgtgacagg

SEQ ID NO: 185441 - DNA, 213 bp, Homo sapiens
ggtatcttccggtggagcggggctggtctctggatttgaagacacacccaactctgtcttgtggatgactcaaggaagtgctgggaggagtctcttgacaaatcagtcatgtgagtcccggtgtcctggctcacctccagcttgggtatgaatagagtcagcccattttaagtgccccctgcagtttttaaacaggtctccttccacttcact

SEQ ID NO: 185442 - DNA, 401 bp, Homo sapiens
atctttgttcgggaactggcgccggcagagcagacaggccatcttcttccagtcagctagcttctcttcctcactctcaagtctctccaccagctcctcctcattgtcactgtcaccactgcaagcacgtcttgctgtgttgcccaggctggtgtcgaactcctgggccgaagtgatcctcctatctcagcctcccaaagtgctggaattacaggcgtgagccactgtgcctaacctatgtgtggcttttttaaagccaagattcgcagttaatgtaaatgctacaataaaataaaatccaaaattacggtacctatcaatgttaaaatgcagtattatttccttataactttaaaagggttaagggaaaagaaataaaattagtaatgattgtaatgatt

SEQ ID NO: 185443 - DNA, 249 bp, Homo sapiens
gctcgaggatcccctatacactgatacacccatctcagcctcccaaagtgctggaattacaggcgtgagccactgtgcctaacctatgtgtggcttttttaaagccaagattcgcagttaatgtaaatgctacaataaaataaaatccaaaattacggtacctatcaatgttaaaatgcagtattatttccttataactttaaaagggttaagggaaaagaaataaaattagtaatgattgtaatgatt

SEQ ID NO: 185444 - DNA, 535 bp, Homo sapiens
aaaatctccagggtggctgctccggggtctcattgagcttacgttaaagtgaaggaggagtccgttgacttagccagtcccagcgtctcccagctcagtcatatgattgagcttacattaaagtgaaggaggagtctgttgacttagccagtcccggcgtctccctgctcagtcatatgattgagcttacattaaagcgaaggaggagtccgttgacttagccagtcccggcgtctcccagctcagtcatatgattgagcttacgttaaagtgaaggaggagtcggttgacttagccagtcccagcatctcccagcatcagcctcacattctctcagagcccttgagtttcattgctaagcccaggttgagtgcgctgggaattggatgccccccctcacatctgtaatcattcagcctgggatctaggaagtggttttctgttttcatccatggtgccttctcatcctgctaaaatcccgcttaacagaggtgggcttgtgaggagacccttccctggtcaaggcagcagccac

SEQ ID NO: 185445 - DNA, 404 bp, Homo sapiens
gatttcaatagatgtaaacacaaccagtaagagataggcaataaataatatgtgctgagaaagaaggatccactattactgtcctttctacatctgatcgacctagtaagttttcttgccatttcaccaacatactgaattctacttgcttctctagttgaacaaccttctagttagctaagaaaattctttcctttggactgctaggtgataatgtatcatttacttaaaattacattgccaaatattaatggttatagaatcataaaatgctagagctagaaaagaccttagaaagcatctattcaaccctaattttataaggaaaccaaagcctaaagaagttaatcaacttgcaaaatgtcagattccgtatctaaccactcagtttatcattgcaaaga

SEQ ID NO: 185446 - DNA, 520 bp, Homo sapiens
  misc_feature (478)..(478): n is a, c, g, or t
gctgattctagaggatcccttccgggttgtgcatccactgatccagaatctcctaaccccaaataattttcttgggagaaagggacatttttcatcaatagattggaaaagatgtctccatagcagtgcacgtttctttcatggagccttggctaaaagaatgttagtggtcacctcctgatggctgctggagccaccatcttagaagtttgcccctgtcactgtgccaaccttggcaaccttggcagagggggtcagcagaaaatccacgtttacaactgtgactgtgcagacaatggtccacgtcactgataaatgtccttggtccagatctgatggtcgtctactgacacagaattcaggagagttgtgggggctgagagttcaggagaagctactgcctgacgcagaaagaggatgcatttgccaaggaaaccccgccgtaatgttagcggttaggcgtacggccagggctatnggttgaatgagtaggctgatggtttcgataataactagtatg

SEQ ID NO: 185447 - DNA, 425 bp, Homo sapiens
tggagtaaaaggatttagagttgaatccagcttgacctttctgtgaccttgaacaattcacttaacctctctaagtttcagaggagtaaataaagttaataatacatcaagaattgataggattaagtgagataatgtttagaaaatatctaatataatgtctgacttaccgtgggcatttaataaattttagcttgtggcaggtgctagagactaaaaggggaaaagctgcttccaaggccaccacatgtctgtgccccccacccagctctatctgcctagtgtacataaggtaatttggtgacagttgagactgcaaaaaccattaaaaacatttttaataagaacaaaaggcctgggtgcctacccgtgtgggggcactgtggaaagccttagctagggtgtctggtgctgtgtgataggtg

SEQ ID NO: 185448 - DNA, 562 bp, Homo sapiens
gtgcaagcttcatccatgcaggtgactcgataggatccgcagatcactctgcccttggaatgagaagacagccacagagaatccaaaaaccaacaggcgtggctgtgttcccgtaaaacttaaaacaggcgcctggctccagggtcgttttgccaacccccgtcttactgatctcttttccatatagacaggctgcttcttacagcaaccaagtagagttccccaaataatgcctcttaacctacataatccacctttggcacacacaggcaggaacctcagaccgcctgacaaccaatgtttgccaaaaatggagttaaaactcaacccttcacaggaagacgctggtttacataaagcagaatttggaaatattctgatgaggaaattatctcatgaaagaaatttcctcctattgcctaagctttccagagctcaaataagggcagtcaatccattcagcaggaatcctaacctatggcttacaggtgcaggcacggctccaggcagcacacacacatatttcatcctcagcaggctgcattcaggaatccgagctcga

SEQ ID NO: 185449 - DNA, 591 bp, Homo sapiens
gtgcaagcttcatccatgcaggtgactcgataggatccgcagatcactctgcccttggaatgagaagacagccacagagaatccaaaaaccaacaggcgtggctgtgttcccgtaaaacttaaaacaggcgcctggctccagggtcgttttgccaacccccgtcttactgatctcttttccatatagacaggctgcttcttacagcaaccaagtagagttccccaaataatgcctcttaacctacataatccacctttggcacacacaggcaggaacctcagaccgcctgacaaccaatgtttgccaaaaatggagttaaaactcaacccttcacaggaagacgctggtttacataaagcagaatttggaaatattctgatgaggaaattatctcatgaaagaaatttcctcctattgcctaagctttccagagctcaaataagggcagtcaatccattcagcaggaatcctaacctatggcttacaggtgcaggcacggctccaggcagcacacacacatatttcatcctcagcaggccctgaggtgggcgttattgccccgcacccccgtctacagatggggaaactga

SEQ ID NO: 185450 - DNA, 361 bp, Homo sapiens
attttcaaaccccaccaaacttagattggtttttacttattaatttggtgaatattttcttcaatatttgaaatattcagaagggaattactaatttagtaatataatatacctaataatattgggattttgtggggttaatcttagcaaattcttctaaattcctaaaatatatctgtattgagggaactttgttcatgactaaagaacagtttgtggtcttggatgaatagaaatgaagatttaattttcttttttactattgccctgcccacttaaatagtgtgatcattagtaagttgctcttttgcactcctggatttgtttccttgtctttaaaatcatgagattaaatgtatag

SEQ ID NO: 185451 - DNA, 367 bp, Homo sapiens
aggaggtatatgctgcgggagagcagaacaagggagaagagaaaagatgtgcgtaccaaaaggatgtgaggccctgagcccagggcaggtaaggcatgggactgccttattttaccctggcatttaggacagtactccacaaaccacaaattcttataaatcacagccagtgaaagtatgctcaaaatccagaaagctcttttaaaaaaggtctcaacactttgagatgttagtcttgaaataagttaatgtttcaaattatattcattcctttaaatggattaaattgctatttcttgacccggcaaaattttaccttggtagatcattcaataaagcagcactgtgcccttctctaagtctgtgg

SEQ ID NO: 185452 - DNA, 143 bp, Homo sapiens
agttacgtctggatcataatgaggtaggggagtgatgaaactgtgagtacctgccaagtggtaaaggtgaaatgctttttgcaagataactggcagtcacataagtctggcaagggacacaggcaggctgaaaaatgcaatgg

SEQ ID NO: 185453 - DNA, 563 bp, Homo sapiens
catgggataccaaggctgtgtaaaggttaatcatttaagaaatatataatagcttggaagaacaagccattttataataataataacaatgaaatcactgccatttagtgtacggagtcagccgtaaagaattagacaatccagagctaggaaggcaatacgtattttgagtctatttactacagaatacggttattttgccttaaactatatggtgcacataggtgtgaaacttccagtagcaggctgtatgtactgaaccaaaccctagagatagtcatcttcttcacccattccccaaatactgctacaattaggtgatgatgtggttgtaaagacttagaagaggcggctgttctgggtaacaggatgtttgcttcccttgacccagaactagtattctgcccaagccagcacagcctttgctgtaccttcctgaggggttctatttgcttctactacaagattctgaagtctccacatcatacaaacataaattagttgcttataacaccaacaaaagaaacccttcattcaacaaagatttaatgggtttgttccag

SEQ ID NO: 185454 - DNA, 482 bp, Homo sapiens
ggtacattcttgagaaaaccctaatgcagtgaattaagaaaaagttctaagatgaaatgggattaatagttgtctttgtgcctgggtgtggtggctcacacctgtaatcccagcactttaagaggcttaggtgggcagattacaaggtcaggagttcagaaccagcctggccaacgtggtgaaaccctgtctctactaaaaatacaaaaagcagtggctgtggttttggacccagtgtgtcttcagaagcacccagggtatcattataggctgccactatttcctggtaccacaggatatttccatatcactaccatctgggtgacagggaataataaaatttagaaactgtaactgggccggacagctattgacttggtgagttgaaactagaactatcttatgttcagtaaggccagtttaaagtgttttggaagccttatatatctgaggccattgtacttcttggtcactttacaaac

SEQ ID NO: 185455 - DNA, 340 bp, Homo sapiens
gggaaggcagatcacttgtgctcaggagattaagaccagcctgagcaacatgggaagacctcatctctacaagaaatacaaatattacctaggcatggtggcacatgcctatggtcccagctactcaggaccacaggtgggaggtgggaggatcacttgagcccagaaggtcaactgaaccattgcactccagcctgggcaacagagtgagaccttgtacaaaaaaaaattaataaattaataccaattaacttggaaaattagaaaataaaggaaaatagaagagggaaaatacccatagttctaccatgaaagagaatcattgctaaccttttctctt

SEQ ID NO: 185456 - DNA, 817 bp, Homo sapiens
agggcccagcaggtagatcagtgattgtggctggcatctggggatgcagggggaaggggagctttggtgaatgggagagtgtgccaaagtggggagggtgcctccatctgattgctgaccagcaggaatatggctcatccgctgtggccagctgggattttcttttcccctgtaaaactgcctcatttagaaatgtggtctgtgtagactggcttctctaaagatcatgcgtgaacccaacaaaacgcatttccgggtcagaagaagccgagggctgtcattttgcattccctgtgcgagactggccaaggcacaattcattgcagaatttggcctcaccatgcgtgagtcagaacaagcgccttgaaggccagggatttgcagcctgagaaatgatgtactccgcgggttgaattcacgtctccatacaaaggctcccctgtttgggctgcttgcgtcttgatcctgccatgtgtgcgttttgtggtagtgcttgtggtgtgtggatgccagcctgccaaagctgaaaccatttttaaaaatgtctgtgtaatgtcaccggcacaagggaatgaacgacttggaaacacgcacagatgcagcggaagcccaggatattaaaatcttgaacagtatcattcttgctgagatttgctgggggtatggatgtgttttcagagacaggatgctagagaatgtacaattatagcaatttgctaaccagccccagaccttaattagcacaggatccttgttctcactgttgtatgtaaattaagactttcacaaagggattgtttatgaggacggctgtgag

SEQ ID NO: 185457 - DNA, 456 bp, Homo sapiens
taatactattgcattacactagctacttcataaacagccccaccaagaaaagaaaaatcgcgatcccgatataaaccattctaggtctaaatgcaatcatgattgcatttagacaacacagctgcagcaagaggaagactttattttggccagtagatttgtctctcatttgctttagcaaggaatagctggtatgtgattcaaagtcattccttagaaaatcacaacctgccaggggcttctggagtggccagcaaagaatcaagacagcaacaggaaaatccgaaaacgtcagaggtctgtatttgatgacttcttgaatattatcggtgtgcacaactacatggcccagatgtagtacgagcaccaccgtgtctcctcttgaagtaataatccaacaaatgccttaatgctaagtgattaattaaatcttttcactgggtctaaatgcaatca

SEQ ID NO: 185458 - DNA, 328 bp, Homo sapiens
agaccagcttggtgaacacggtgaaaccccgtctctactaaaaatacaaaaattagccaggtgtggtgagcacctgtaatcccagctactagggaggctgaggcaggagaatggcttgaaccgggaaggcaggggattgcagtgagctgaggtcactccactgcacttcagcctgggtgacagaggagtgagactccgtctcaacaaaacaaaaaacctcttggtctctagtttccctgctcccattccttctcgaacctgctccaagtaggcttctctccccccattctactgacactgtttctgagatggtcaatgccctcctcgt

SEQ ID NO: 185459 - DNA, 505 bp, Homo sapiens
cttgtgaaggaggtgacatctgagcaaagaagcaccggcctgaacagatgagggcttgacggtggggttatctagggaagagcccagtaggtgttggggagtgggctagtttaggtcaggtggtcaggggagacctctaggaggaggcggcactggagatgagtgtggtagaaatacggggatctgggaaaagtaaggccaaagcccagagtggcaaacagcctgggcgtgtgtgaggaacggcagtggctggaaagaccctgtgctcccaggcagcccaggtggcccttgattcctttcagactgctgtgtgggttccggggtggcggggtactgggccaggtccctaatctcagcttgctgcaccccagctcttcctgctgagaagtgacgtggctacttgcacacctcgggggtttccggtccgtggttagctccttcccctaacagcatggtgttcacacaggcttttaaacacccagctggccctgaagacatctagtgg

SEQ ID NO: 185460 - DNA, 308 bp, Homo sapiens
  misc_feature (225)..(225): n is a, c, g, or t
gcagcttggggatctgccgccaaggtggctgttggttgaccttgggtttagagtagtcattgcttcttctttttttttttttctagacagagtctcactctttcactctgttgcctaggcttgagtgcagtggtgtggtcttggctcactgcaacatttggctcccaggttcaagcaattctcctgcctcagcctcccgactagctggcactgcaggtgcccgcnaccatgcctggctaattttttgtatttttggtagagacggggtttcaccgtggtctcgagctcctgacctggtggtccacccg

SEQ ID NO: 185461 - DNA, 143 bp, Homo sapiens
ccactgcgctccagcctgggcgacagagtgagactccctctcaaaacaaaacaaaaaaaaggatgcagcaagcacctccctctgtgctctctcactctccttctccaaccatgtgagatatgcctcctttctataccagcatc

SEQ ID NO: 185462 - DNA, 133 bp, Homo sapiens
ggaattcgagtatgatcacaccactgcactctagcctgggcaacaatgggaacccattggcacatctgggattggcatcctgagctcccatctgtgacctccctcctctcccctcctctcccctccattgccc

SEQ ID NO: 185463 - DNA, 199 bp, Homo sapiens
tgaatgtctagctcacaaggtggtggtggttgtgagatataaaaccggataatgtgtgtctgagggacttgtacaatgaaggagataggttataatagggacagagtatattgaacttggagccagagtttggattctcatcctggtctttttacctcattgagcttcgggctccccttctgtaaaatagggaatataa

SEQ ID NO: 185464 - DNA, 128 bp, Homo sapiens
aaatgctgatggtgagaaaggagggaagacaggagctgggggaaaattgagggcgatggtatatgctagtgaggtcctttgggtgtgggaattgtgaattcctacaacttttgattctagctcattga

SEQ ID NO: 185465 - DNA, 239 bp, Homo sapiens
gacacagagaccagggagcaccgggagggaaaggaagtgagtcagcacctcctctcaggaagccgtagaccctcagccctaatgtgactcgctgtgggcagagaccctggacctaaaggtaagggtgccccaggtcactgtcagcccagctcactggactacctccagggcctggcacaggcagggaggctgaaagcctcttccctgtgtcttcgtggcccacctgggggaccatcagc

SEQ ID NO: 185466 - DNA, 412 bp, Homo sapiens
tatcttaccatcactttaattctatgaggaatttataggtatgagaatggagattgagataataagagacttgcagaaaatcacaaattttccttggtacaagagacagagcaggttcaaggcttcaacccaggttttttaattttttttttattgaaaaccctgtgctctttccactggagcttttttgataacaatgttttgttgtttttaagtccaagaaatatatcggggaatatgaatttatatctcaccaacacatttctatctgcataccacatacgtgtttcagttattcactgctgtgtaacaaccgccccaaaagaagtagctgaaaatgacaaagatttattctttgtcctgattctgtgtgttgactgagcagttcttctgtagccagctggcaggttga

SEQ ID NO: 185467 - DNA, 477 bp, Homo sapiens
gcaggggttcaatcatagctcactgcagcctccaactcctgggctcaagcagtcctcctgccttggcttcccgtgtagctggaaccataggcgtgtatcaccatgcctgcctaattattatttattttttgtagagatggggtctccctctgttgcccaggctggtcttgaactcctggtctcaagctgtcctcccacctggaccactcagagttctgggattagaggtgtgagccagtgcctggcctcttcatttgttgttctttctgttcctcagactggataatcaaaattgactgtcttcaaattttgcaattgttttgtttttttgagataaggtcttactctgttgtcccagctggagtgcagtgatgcaatcatagttcactgcaacctcatacttctcaactccagaattgctaattggtttctttttataatatccatctcatctcactattgatattctccatttgg

SEQ ID NO: 185468 - DNA, 482 bp, Homo sapiens
atgctgggcggggtatggcttagttttttaaaatagtgaaatatattacttttaaattatattattactgaaaaatttaaaacacagtatatggcaaaaaatcagtaaagcttgtctaaaatgatgacagcaaatatttgcaaactattaatatatgtagctaattcttatgatataggaaaccttcccagtagccaatataaagagatggacaaatgaggtaagcagcctctaagacggtgatctcaatgagccatgcctcctagtgttcatgcacttgcataatccctatccttgagtgtgggctggtagttaggagaggcttaaataatgaaaactgaaattactctaaagcttttctgtttgaagcctccagggctctgaatgctctgatttccctgggtgctggcacttgatgctctccatggtattgctcaatttctgttataatgaactgttttatttatttatttgtacaatat

SEQ ID NO: 185469 - DNA, 397 bp, Homo sapiens
taataataaaactcctatctcccgcacagctggctctgcgtgaattactctttctccactgcaagtcccctgtcctgatacatcggttctgtctaggcagcaggcaaggtgaacccattgggcggttacacttgcttggattcaggagggtccaaagtccagcattttgcccacttgaaattactcataaccattattgttggtagttattccattattctaggagacacacaaggaattgcatttttcagttcctatgtaaaggtattaatgtttcctccttgccttaattcaggactggatagctcaccaacaaagactggtctctttaggaagtctgtgcacaaggtctaaagataagatctaaagaaaggcaattgtgtagatattcaactgg

SEQ ID NO: 185470 - DNA, 392 bp, Homo sapiens
agttgtttgaagtttggatatattttgaatgtgaaccccttatcagagtatagtttgcaaatgttttatcccactctataggtttactctttattcttttgattgtttctttggtgtttagaagttttttagtttaatgtaattcagttttttttttttttttgcttttgttgtctgtgcttcatactcaaagggtatgaatatttgttgtatccaaaatattatttcctagaccaatggcgtggagcttccctgttattttcttctaacagttttatatttaagatcttaaattaaaatctttactccattttgagttgatttttatatatcatgtgagatatagctccagtttcattttttctgcttgtgtacactgggttttccctaaa

SEQ ID NO: 185471 - DNA, 267 bp, Homo sapiens
ctgagtgttaaagataaaagaatagaatgactattcaagatgtacaacatgaccatccaagttccagctcaccccttggtgtaaaatgtcaagctggagggtacagaaacctaatctcatttaggagaaagtaagtaaaacagaactggaatccttgaatcctcagaaaaagcctagggagtctgcaagcccctcaaagaagttccatagtcatcatggaattacaatccattgtagtgagcaagtcatagggaagccaagacatgg

SEQ ID NO: 185472 - DNA, 225 bp, Homo sapiens
atgagccaccgcgcccgtccagtttactggtctcacagccacacgcttacacatgcacatgctaatgtgtgttgtgcactcacatgagcacgcgccgatgtgtgtccctgtgtgtgtgcatctgcgtgcgagtgtgaatgagtgtgtcgctgtgtgcaagtttcaatgtgtggtagtgagcgtgggtgtctggaacgtgcatctgtgtgaatgtggaagtgtgga

SEQ ID NO: 185473 - DNA, 447 bp, Homo sapiens
gcaggtgccaccggctcacagcgagtcccaagtcaggtgtcatttccgagattggctgggcccagtggatggcccggcgctggctgcacccgtgtgggatctgagctggggccctgccccgggtgtagccacaacccacgagtgctggtgcttctgcctttggattctgtcagggatgcggcgtgtggacatcctaacatgggagttgttgatatttaatttttctctcatagacactgtggtgttctcatttatttccaggagttttccaagtatcgtacgtttaacgaatggggttggctttttaactttcatttgcagctgctcatcatgacaatcattttctcgccccctaaccaatcagttctaatagcttttcttaaaaagattctcaggggacttaggaatgtaattacctctgagaataaagaacatttccccttgatt

SEQ ID NO: 185474 - DNA, 224 bp, Homo sapiens
tcactccatcctgccaccctgtgaggaaggtgcctgtttctcctttgccttctgccatgaggaaaaaggaaaggaaaaagatatatcaccccaaaatatgtctctgacataaaaattatttttgagcctaaagcaatgaataggggaaaagctctccatatcctcttgcttttctacctaaagacaggatacaaattctcctttactggtgacaactatagact

SEQ ID NO: 185475 - DNA, 673 bp, Homo sapiens
taagaattaaaaagctcaaaggagaactggcattaacaaattcatttaatgctagattgtttggaaaattttaatcttctattttgaaaacaagaagaatgctcttctcatttttgttttacaataatatttttcattttttaaaaatattctatcagttgtgggttaatgaatttctaggataactatttaagacctgccttaatattagttttctgttggttcttgagaaactaagatttaaggaaatatttgcttgaaaaagaaaagttttggaaagtgcttttgtaaacttacttggggattttttttttttaatcaaaaggaatcatctacagcatctctgtggaattaatttaaagagttgctgaagcagcaaatcaggctctcttctccccaaaattgatgataatggtgcgttttaaatgtcacattccaccacattctttatgtataaatggaaaatataaaatatgatattaagagagttattagtatcaaatagttggctactgataaccttctatgaaaaaagctgggagttttagaagtcccaataacttctttctcctttgggaaaagcagctggaaatacttagctgacctgtaggacaagagacttttaagcttaaaattcataagtaactccaatcgaagcaggtttttttgtttg

SEQ ID NO: 185476 - DNA, 436 bp, Homo sapiens
tggtgctgtgaaataaagccagttgattctgagagttactgaaacattatactctaaagtcattcatgttcaaattttaaatggtttactcagttttttagagtggttgctcacacacgtcagggcagttttaaaaatacactttttggctgggtgcggtggctcacacctataatcccagcactttaggaggctgaggtgggcggatcacctgaggtcaggagttcgagaccagcctggccaacatggtgaaaccctgtctctactaaaaatataaaaattagttgggcatggtggtgtacacctgcagtcccagctacttgggaagctgaggcaacagaatcgcttgaacccgggaggtggagattgtagtaagccgcgattgtgccactgcactccagcctgggtgacagagtgagatactccgtctcaaaaa

SEQ ID NO: 185477 - DNA, 449 bp, Homo sapiens
cgttctcggctcactgcaagctctgcctcctgagtagctgggactacaggcgcccgccaccacgcccggctaattttttgttttttgtagagacggggtttcaccaggatggtctcaatctcctgacctcatgatctgcctgcctcggcctcccaaagtgctgggattacaggcgtgagccaccgcacccggccctaaaccctaggttttgacttctgtaagaaggaaagatttaaacaaacaaacaaacattaaattacaaccataataaacaaaaaaacactaaactaaattacaaccataataaaatctcccaaagtccgtaggcactgacatattacagccttgccaaatcagaatagatttctcatgtgttgtcaatttaccagacacaaagagtagctcagatctcatagactcttcagatcttgtagactaatttcaagtct

SEQ ID NO: 185478 - DNA, 153 bp, Homo sapiens
aaggcaagctaaatggctctgtatttgtaaattaaatatagctgcacttcagctttccaaagagctgggaaggagagaaggagaaagaaaaagagagagaggaagagaagaaaagctgccgccctcaggaaagtctggctggtacagattgcc

SEQ ID NO: 185479 - DNA, 523 bp, Homo sapiens
ttccctccacgctttagaaatgcaactgggatgattcttacaagggcatttcccattccagagctgctgtgaagtcatgtaacttaggatcctttttaacttttcccctgtggtggcattcccccttcctcctcctcttctatttgtcatttatactaaggtgcaaatttctggcatcaccactattgggcaggatctggggagtcccaggggctttccagggccctgaaatacttccatcagcccccagggatgccctcacaagacacctagactagctaaaaggaaaaactacagaaatagaatctgtggggagacaagcacatgtacaccttgccagcggtactttcaagggattacatttttctggagagcaacctggtgataataacaggaactaaaaagcatccatagcctttcatctggtaatctggtaatgtaagtttggaaaataggcctccaggaaatatcccaaagggaaaaaaaaagttcaaagatattctcagcactgtttactacagtt

SEQ ID NO: 185480 - DNA, 779 bp, Homo sapiens
aggcctcacagtcatgctggaaggtaaggaggaacaagtcacatcttatgtggaaggcgcaggcaaagagagagtttgtgcagggaaactcccgtttttaaaaccatcagatcttgtgagacttattcaccatcacgagaacagcatggggaagacctgtccccatgattcagttatctcctgctgggcccctcccacaaccagtaggaattacgggagctacaaggtaagatttgggtggggacccagagcctaaccatgtcagtcactcatcagaagggttcctttgccctttgggggctaggccctgtgctcagtgctcatgtgctgtattgggttccacctttaaaagccccctgtgagttgggtagtggtgtgagaaccgtgacccgtcttacaggtgaggaagctgaggcaagatgctggcctaggccatccagttggtggtggaggtacccaggctgctcttggagaggctgagggcaccacaggagctcggggagtcctgtgggcgggaagcctcctagaggaggaaggccagtggggccagcccgcagggtgtgagaagggcccagttctgcagctgatggcatctccactgccctgtcctccactcctgcagcagaagtgccatagtggggttcgggaagactgtgggtccttgaaggacaggaggctgcagggagcaccttctgtgtgcaggcccttccccaggactggctctccaaggaggcctcacagtcccttccagaccccttcaggccagtgtcacctgacca

SEQ ID NO: 185481 - DNA, 578 bp, Homo sapiens
gccgtgcgcccaaaccctataaaaacacctttctcctgagcaatccttaacccaagctgttgtttaaatatttcatcttttaattacacatattaaatactgcactaatagataagtgaatgtttcttatgtccttcactacaatgcaaatgtttttacacctttattctcagaagccattattcagtttttttaaattgtactttgctcttcttctgtcaaacctaccaggtgccaagcacaattaagcccttgatgtatactgtttattaattctaagccttattttaatcataaccattatgcattgctgatgggaatgaaaaatggtaccgctgctgtagaaaacagtctctaaccctccgaagtaagattcattattgtccctttcttaaggctgagttataactaaggctcaaagaaactggataaactaactcaaagcctctcagtccagattcttaatgaacagacttacttaccttgactccaaaggttgtattttacactatttttcactataccatacttcctcccttcaccctaactgtttaggtaatcagcccatcactactaca

SEQ ID NO: 185482 - DNA, 215 bp, Homo sapiens
catttaccttcacactctttaaataccaaattttgagtgagtgagtgtgtaaggttttgtcatacagacttgcaattcctatatgggataaagtagactagcacaggaatttttcttgtatcactcatgcaagactctaaattccttaaaggcagggatcatgtatattttgatcactgttgtatcctcagcacttcacatggtgcctgtcacat

SEQ ID NO: 185483 - DNA, 371 bp, Homo sapiens
cccacgctgtgagcggttcctgcttctctgaaaggtctgttctgcttaaggttgtatcaaggttagtctcttgctacctacttctgtagagcagtctctcgtggctcacctgggttagtggccatgttgcctgtctcctattcttcctaaccttgtgtgttctccaggtagctgagtgatccatccgaagtaaaatattcctcagcttgtctgtaggggctccaagtttcatgaagtaaaagctagtcttgaaaacggcccattagggtcctggatgacagtctccgggtcacttagactccgttgtccgcctcccctcatctgtatcatctttgccttgggtactggcttcggagggtgttttcctgaaa

SEQ ID NO: 185484 - DNA, 239 bp, Homo sapiens
cacgattcttgcctttcactccatcttacccttcattattgcagccctagcatagaggttgtatttctctttgggcaggtatctttcctatacctcaaactgcagttctgttattttccctacaggcttggagctctttgaaggtaacatatgcattcaacattgttttattctctgcatcacctagcaccatgtaatatgttggggtaacaaaaaagatggagttggaggtgtcagag

SEQ ID NO: 185485 - DNA, 598 bp, Homo sapiens
tttattatgttgtttatgatgtctgacataaattggatccaggagagtccagtctagatgtcactgtgtggccttgggtgattgagtgtgactgggagggtgagttagtttctggtgagccagtatctatgatgctgtatcttggtcagctggggctgctataacaaaatatcatagactaagtgacttgactaagagactttatttttcacaattttggaggctgggaagttaaagtgctggcacattcagttcttggtgagggccccgttggcttgcaaatgggttacatcctgctgtgtcctcacatggcctttgcttggtggttgtgtaaacatggagacccctccttcctcttttttaataagtgcactgaccccatcataagggtatcacccttatgacctaatctaaaaccagttacctccccaaagtcccacctcctaacgtcatcacactaggggttagggtttcaccatagtaattttgggaggacatattcagcctataacatgttgtgtcatggtgagactggcaatgctagatttcgtgatttcctaaaaaataaaataaaaataaaaaactaagcacctactat

SEQ ID NO: 185486 - DNA, 619 bp, Homo sapiens
attcctatcgctgatgtgtgaccctgggaaatcttagcagttaattctggcatcatatttattgcaaaatgattatagaacatgtttagctttagagtctgactgactgaattcataccggctacttagaactgtgttgctatgggcaagttcttcactttctctcatctgcatttgctccatgaaatgagaatagtaaccttcccatttcatagaattgttaataaggattaaataagatatgcaaataaagcaattaaaacagtctctgacataaaactattgccaacaaaagttaacccttcttactaatgtgtgaagcatattggaaaatatcttcttgactacatcaatgtaatttttcttattcagagccaaatatttcaaaatttaaaaatactggtgcttattattttattcctttcagtcttagaagttccccgttattcctctagttattctgattagtcagtactcttaaatattgtaattaattcacagctcataaacttaaaaataattagtatttttagggggttgtgtttagcattaattaaaaacagaagcatgcagagttaattgtggttatgttaaactattctctgttctttcagtaaag

SEQ ID NO: 185487 - DNA, 335 bp, Homo sapiens
acacacactgggtttgtgaactctttgaggggtttcccggacagggaacagcaatggcccaggagagtggtatctggcaatggtccttagggcctggttgcctagggtcccagccagcgctgccactggcttgctgtgcgaccttgggctatttacttcctctccctatgcctcagttgccccatctgtacaatggggccatgtagattacctcatgggattgctgtgaggataaaatgagatactgaaggtaaggcactaggaagagtgttggcaagtagcaagctctcaatctcaatgcctgttaggattaccaaggattaccgtccgtctct

SEQ ID NO: 185488 - DNA, 357 bp, Homo sapiens
gtcctcgttcacctgggactcctgaccaaggaatctggatttaagattgcagagacagctttcagtggtggccctcttggtgaattagttcaatggagtgatttaattacatctctgtacttactgggccatgacattaggatttcagcttcactggctgagctcaaggaaatcatgaagaaggttgtaggaaaccgatctggctgcccaactgtaggagacagaattgttgagctcatttacattgatattgtaggacttgctcaattcaagaaaactcttggaccatcctgggttcattaccagtgcatgctccgagaccttgattcatttgcgactgaacccgaatttaatcat

SEQ ID NO: 185489 - DNA, 567 bp, Homo sapiens
gctgtcttgctccatcccacccatggtgtagtcatggagtcatggactcatccttttgtccagtgtatccatgctgtatacactacctgcctgtctgtcacttagtaggcatcttggttagcagatagattgttgcggtatcacagtgcctgtgttcaagtaacccttattttacttaataatggccccaaactgcaagagtagtgatggtggcaattcggatatgccaaaaagaagccataaatctttaggtgaatacgtgaacactcatgacttagtaaggaaagaaaataaaaggtgtgcggaggttgctaacatctacagtaagaatgagtcttccacctgtgaatttgtgaagaaggaaaaagaagtctgcactagttttgcattgtacctcaaactgcaaaggttaaggccacattaaaaagttatgcattcctgtaatcgcagcactttgggaggccgaggcgggcggatcacgaggtcaggagatcgagaccatcctggctaagacggtgaaaccccgtctctactaaaaaatacaaaaaattagccgggcgtggtgtt

SEQ ID NO: 185490 - DNA, 321 bp, Homo sapiens
ctctgccacccattagctgtatgagcttggacaagtcacttaacctccagcctcagtcttctcatctataaacaaacagggacgataatccccacccaccatattggactaagtcagatatccaaagtgcttggtacccagtaggtacctggcctctggtccgtcgcttcctccaatcaagttggtgccatttccgaggctgtcgccatgcccactgaagcgtttactacaggccttcccatgagacgacccacacctccctacagttgggacaaggtcactgaagcttcccttggggaatgggcgtcagtgtcatggggg

SEQ ID NO: 185491 - DNA, 443 bp, Homo sapiens
tgtaaaacccttccagtaccgggcatcgagctacagcatgtgattctctgagcagctctgccctcaaagactcaccaagaatacaagccttggcttgagatcctgagggccaggctctggaactgacaacccaaggagctgtcagaactttgtcagtaggctggagccccagaaaggaccccttggactttgaagccttgttacttaaagtgtggtccacagaccagcagccgcagcacctgggagcttgctgaaatgcaggctctccggccacatttcagactgttgactcgggatctgcaggttgacagtctccccaggtgatttcgcgagagggtttttcgagagtcaagacatgtccaatgacgcctgagtgcaaggcatgtgtacgcgttcatggtgacctcttgtggattcacgatgtatattgtagcagaagggat

SEQ ID NO: 185492 - DNA, 618 bp, Homo sapiens
tgtaaaacccttccagtaccgggcatcgagctacagcatgtgattctctgagcagctctgccctcaaagactcaccaagaatacaagccttggcttgagatcctgagggccaggctctggaactgacaacccaaggagctgtcagaactttgtcagtaggctggagccccagaaaggaccccttggactttgaagccttgttacttaaagtgtggtccacagaccagcagccgcagcacctgggagcttgctgaaatgcaggctctccggccacatttcagactgttgactcgggatctgcaggttgacagtctccccaggtgatttgtgtgcacactgaggcgtgaaagcactgctgtaaaggacaggtagagagaactgtggtggtggacacgagcacagggcattaaggagcccacagagatgggcccagccagagctgaggttcaagagaggaggcattacaagagaagacttcaagtgagaaagtaggaggtggagccaggtgaggggtcctgcagcacagtgcttgtgcagaggattcatttcagggtgcaggaagggtctcccagagaagccaaggtcagttaggatgaggctgcagtagtgtcggcggtt

SEQ ID NO: 185493 - DNA, 618 bp, Homo sapiens
ctactatgtgccagaccctcttctgggtgctagaggacaaagccctgcccttaggaagcttacactctagcgggaagacagtcaataaagtacaaacaaatgagaaaagaaggccctgccagatcccggctagcgccatcaacacaacagagaggctttccaagagggccatcggaggaggctctttcagctcaggtgccggggaaggcctctctgaggtgtctggagctgagacccaaaatacaaggagcaagctttttgaagaactaaggtaagaacaaatatctggaggcagccaccctcatttgtttctggaatattccagacctgctactgcacagtgcaaattaatgggtgtgcttacctgtggaaggaaccaccctcctctatcttcccaacactgcagctcagttgggcatggtggggtgggcgggtcctggactcgaccacctttccctgctcatcggagctggggcaaatgacctaggcccaggagaggggtgaggagggcatttcccctgaggcccagccttagcccctggaacctagccgctgatgaccccctgcccccaagccatcatccatgtttccttcccctcttgatcattcccactggct

SEQ ID NO: 185494 - DNA, 286 bp, Homo sapiens
ttctaaacaagctccttcccccaagcagacccccatatacctcaactaaccagaagctaccacctagacccacaggtgagccaggagccggcagtcagcaaatcacagcaaatcaagccggtaaccagaactgcttttctccaaagtgggagagaaagcaacttagaggcgttcaggccaggactcatcctagacaaggtcttacagcttgctcaattagaatcctctggcaacaaacaccgaggtgcaaataaccagtccatccacccctccctcccgctctcca

SEQ ID NO: 185495 - DNA, 223 bp, Homo sapiens
tccctgacttcccgcaacacgtttctctctactcacagacttctgaccaaatgtgtgtgcagagtttctacaccagttctccaactctctggataccaaccgcgtatcccacaattccattctgacactacctagagttagcgcagaacccacaggttaggggctcagtcccacaagaccactctcacttcagatgccacagtcacccacaagccacggtcaa

SEQ ID NO: 185496 - DNA, 422 bp, Homo sapiens
acaagtacccagctcctaaccagcaacacactcactccacaaggctgaaggaaacaccttagtgcctcaggggcgggggcagcaagagacgcaactctaacccaagaattgtttgacaggagaaaaggggcggagcgaggggggctggcatgtttataaatagcgtcatgaagggtttcccctttatccttagcttctctcccactatcctcttcatcccactgccaccttgccctaaccatggaaacttggaaactaataggaacacttaatcattccaggaacctcacaccttccaatactactaagtcaaaacaccccagtccctgggctatagcagatcacatatatacttgtatacttgtagcaggatcacagtcctgtagctgggtcatctgagctgaagagtggcatgccaatga

SEQ ID NO: 185497 - DNA, 308 bp, Homo sapiens
ggctttcacacattctgttccatttgagatacacctacaagtaagacaggcttgccagagaacgggaaaaaattccagtagagtctgactatccagatacttgtttttccctccgctctttaatcataagaaggggaaaaaagcaagtttgcaaatctactttttttgttaagtaacagatcattttggtgaaaaatcatgtttctgcagctgacagcaaaagtccccttttctttcaatgaggacaatttggtttaaaatagcttctttacttaaatgaaccatgaatcaattttatacatcctgac

SEQ ID NO: 185498 - DNA, 437 bp, Homo sapiens
ttattttcattgtgtgtggatgtgtgtgtttgtactaggctacaatgtaaaatgtttttgtaactgctagcagaagctagaaaacaagttaaaagccattgctattatgtttacagcaaaattccattgaaattcttggacaactaaatggtacatcattttggcccatagcacaaaggaatgtatttcataaagaaggtaagacattctcacataacccataaatacatacacctactatggactcacaaaattaaaaataaataaaaaacaaacggggggcagggaagaaggcaagatttatgacatccttcactactgactggcaaaaaggagtagccatccccaacgtttttggtaccagggaccaggttcgtggaaaaaaatttttccacggatggggtggggaatcagaaggtttcaggataaaactgttc

SEQ ID NO: 185499 - DNA, 648 bp, Homo sapiens
ctaccgacagtgaaataggtaggttagctctggcttgactctctcatgagaggggccgattgtgaaataggtaggttaacaaagaaatcttagttacatggtgctttataatttacaaagcattttacgcccatctcactagagattcacaacctccctggaagtggacagggcctggataatgagtgtaactagtgcccccattacagataagaaattgttctgagtgaggtgccccctcattacctatcaactcaacatagaacagtccagtaattgttcccttgcatcataatgctgctccacatgggctcagatgtttccattccaccttggaaatgaaaaggggaaagcatgcatttattgaacattcatcacgtgcccagtcctgtgtttgatgcttgttcttgcaacagggataacttcagcacgtttaccatgagcagcttcctctagcacagcaatgaaatacatgcacatgtgtcttctgcagatagtacacacccctttgctcttcttattcctatttgtctgaacacattacagcaataagtcagtccaccaatgtaaacccctaaacataagatgtgtgtgcccataggactatgagagcaatcacctacctatttcacaatcggggaacatgtg

SEQ ID NO: 185500 - DNA, 188 bp, Homo sapiens
acaatgagaggcagctgctccctgtggcgccctctgctcctgcctcgatgctcaagaagcctgtgggagcttggggttctttgctacccaagaggtcaaaaccagcttgtcttgggaggcctgggtgtgcctggctgacagggcgtcccagatgcagggctggcactgtcatgggaaaggcacgctca

SEQ ID NO: 185501 - DNA, 653 bp, Homo sapiens
acaaattatagagttcagcaaacgttccgataagactcaacactctgttcagttgttttggggattttctaaatatgatgactatatttacatattattcaaatagttaacctgattataaaatctgggagagatagcaattaactactacacagtagttaagatcaagtgcacaagttcttgaatcctggctgtaatactatagttgtgtaaccttgggtaaattaattaacctttctgtgatccagtttcctcatctgagaaagggaataaaacagtgcctccctcatagggttgtggtgaggatcagttgactcaatacattcaatatctttagaacatgtctggcagagagtaagactccactgacagtagttgtagttattatttctaaagtgatctaggtttacatatcctagtcagccctttgcatccatagattcaaccaacacggataaaaaatattcagaaaaaaaataaaaaaacgtacattcaaaagatagtataagacttatttacatagcatttacattttattaggtattataagtaatctagagatgatttaaaatatatgggaggatatatgtaggttataggcaaatattatgccattttacataagagacttgagctgtgggggacctggaacc

SEQ ID NO: 185502 - DNA, 364 bp, Homo sapiens
  misc_feature (311)..(311): n is a, c, g, or t
  misc_feature (330)..(330): n is a, c, g, or t
cagccatcagtccacctgtgtgagtagatgggtgctgtggctgctctttcggctcctgctgggatttatcagccatcagtccacctgtgttatcaatactctggctgaccatcgtcatcgtgggactgactttggtggaagtccttggttacttatcattactgtgtttctgagaagttataaatttgccatctccctctgcacaacttacctttgggttatcaatactctggctgaccatcgtcatcgtgggactgactttggtggaagtccttggttacttatcattactgtgtttctgagaagttatnaaatttgccatctccctcngcacaacttacctttgtgtgtctttcctgaagaa

SEQ ID NO: 185503 - DNA, 340 bp, Homo sapiens
tcagagtagaaatcttgaaagatgtgtctgagttgcccagaaggaaaccactcccctggatttggaagtatggtgttgctgagctcgagataactaccgcctgctcccacaagtatgggggacatcccggcatacccagcagcagtggcccatggtgagtactcagtacattgtgcagggatggacaggcctctccccctgctgtggggtgctggcaggagcccagaaagatgcaaatgagtgcccagcccagtgttgacaacccctttctccaaatccctgaggcctcgcagcaggactcctgagagacagagggaggtcaagctccgaatctcacctt

SEQ ID NO: 185504 - DNA, 493 bp, Homo sapiens
acaatgaagatcacccgcaattagctcgttttgcgtgacattcaggcaaaccgactaacaggcgatgcgacgaagctgatgggagcaaaccagttaaacctaacaccctgccttgtctgggctcatcacctctccctatcccagactaactttactgtgaaatcctaccacattccatgtctgaatttttggattcggggtggatttacgtcgtcttgaagaacacacgtgggtccttaaggtggattaaatagtgggggtgggggtggagagggagaaggaaggaggagtgagggaagcctattcttcctttctacaggtctgaaattgttaaattgatatcatcaggaagccaaaattttgaccttataaatcatatactaggagaaagggggaaaaagaaagagaaagaaaaagaaagacagagagagagacagagagttttctagctacacaatgttttcatttttcatggaaataaagcttcatttca

SEQ ID NO: 185505 - DNA, 259 bp, Homo sapiens
tgatacccagtaggcatctgaaaagcatcaggtccaaaatggaattcttgatcccccaacctgctccttacagagtgatccttgtctcagtaattccaacatccatcagttgtgtgatccaaaaacttagaactcatacctccctttcctcatgcccacagtttgttcatacaaagttctatagaatctacctcccgaatacattcaaaattagaccacttctcactgcaactcaataccatgctcctcacttccatct

SEQ ID NO: 185506 - DNA, 193 bp, Homo sapiens
tcaacactttttctctatttaactaagaaaataatgctgatcaacttcccggattaaaccttaggactaaataaggcttatctgccattacagaggggcaagttatgaaggtaaaattcaacaattagttaattagtcacaaaatgttggccatttcttctctgagggcctctcacaccagcaccttcccttc

SEQ ID NO: 185507 - DNA, 528 bp, Homo sapiens
atgtctttaaaggattgaaaaacttaaccttcaggtcagaactaaatcatagtaaattccagaaaaccatgcatttctatctaagctaatgtaagaaaccatgataaaattaacacttatagtaaattgattatttaacattaaattgctttaaattaaaatgtttttccttatagtaaaaaagtgtctaaatctcaaaaacaatgctgaattttgaaataaacaagttgcagaaatacatgtaatgttaagatgaaattttaaaatttgtaaattggtaatcccagctacttgggagactgagacaggagaatcacttgaacacaggaggtaaaggttgcagtgagccaagatcacaccattgcactccagcctggacaacagagcaagactcttgtctcaaaaaaaaaaaaattgtcccttaaaaacacacaaaatacaaatttgccccagggggaattagacattttaaccttacttgtaacaggtaaggagttggccccagaattggaaaccctcttgaaaaag

SEQ ID NO: 185508 - DNA, 189 bp, Homo sapiens
tcgaccagaggatcccctcttgtaaatacatgtaatgttaagatgaaattttaaaatttgtaaattggttatttctgagaaggggagagggatgagataaggaggaattcacaagggagggtctcaactgcattgattttacaatctgtagattaataaggtaaaatgttaagactttttttttttttt

SEQ ID NO: 185509 - DNA, 160 bp, Homo sapiens
gtgttgggattacaggcgtgagccaccgtgcctggcctattttttgttttatttttttaatcttgaaataactccacagttatctccaagtaagtctaatatcttctctttgaatttctaactgattcttatttataaacccatagaatctgtaaaccca

SEQ ID NO: 185510 - DNA, 297 bp, Homo sapiens
tgtctttattccagcgctgtctcttaagagttgatcaagatgcccagcctgatataccctcagcagggaaaattgcctgactactgtcttagtctgttccacctgctatgacaaaaatatcacagactgggtggcttaaacaaaaatgtatttctcactttctggaggctggaaatccaagatcaaggtgccagctatttcagtgcctggtgaaggccacttcctggtttgcagatgtgtccccacatgggagagagagagagagagaaagccagctctcttatgtctcttcttttt

SEQ ID NO: 185511 - DNA, 380 bp, Homo sapiens
tgatggttggtaaaggcagggtatgagggaatcattctctggaaagtaatgtaaaatcagatgactgactatgaggcaggcattcagtatcagtatgaagacatattttatggtaattcttttccttagaactttggcacttagaaaaaactgatgtggaaagattcatgacattacctgtagatgaatctttgagatttaaaaaatacactttgggccgggtatagcagcttacacctgtagtcctaacactttgtgaggctgagaaggttggattgcttgagcccagaagttagaggtcagcctgggcaacaaagtgaaaccccatctctacaaaaaatacaaaaattagcagggcatggtggtgtgcatctgtagtc

SEQ ID NO: 185512 - DNA, 549 bp, Homo sapiens
atgtgcgattcttgagaaggatagatagagtccatgaaagggatagatagataaagtcctggagcagaataggtctggaaggcctggcatggcggctcacccctgtaatcccagcactttgtggggggtccaggcaagtggatcacttaaggtcaggagttcgacaccagcctggccaacatggtaaaactacgtgtctactaaaaatacaaaaaaaattagccggatgtggtggcgggcgcctgtaatctcagctactcgggaggctgaggcagaagaatcgcttgaacccgggaggcagaggttgcagccgagatcacatcactgcattccagcctgggcgacagagtgagactccattttaaaaaataaaaatcaaagactgcccaggctgccaagcaagcatgttaacaccttgatctgggtgctagcgttggagaggtccaggattgaatcgtgactcccctgccttgtggctaggtgacactggctgggggagaggcctcttagctggtttcctccttggtgaaatgtgtgccccctcccggg

SEQ ID NO: 185513 - DNA, 470 bp, Homo sapiens
gatggtaggtggatcacttgaggtggggagtacgagaacagccataacacaatatgtgtagaaagcccatctctactacaaatacaaaaattagacgggcatggtggcgcattcctgtaatcccagctactcaggaggctgaggcaggagaatcgcttgaatagtatatgctggcataaactatggagaaaccaccatctccactaaaaatacaaaattagccgggcatggtggcacatgcctgcatacctgtaatcccagctactcaggaagctgaggcaggagaattgcttgaaaccgggaggcggaagttgtggtgagccaagatggtgccattgcactccagcctggacaacaagagcaaaactccgtcttgagaaaaaaaagaaaagaaaagaaagtctcctttccaaaaggttgtggctccacgcgggacacgtagttcggctagaaaagcatggacctagatt

SEQ ID NO: 185514 - DNA, 235 bp, Homo sapiens
gttggccaggctggtctcgaactcctgacctcaggtcatccgctcgcctcagcttcctaaagtgctgggattacaggcgtgggccacgatgcccgtcctatctttgttatacattctggaattggcttgctaatattttgttgaggcttttgcatctatgttgatgagtaaaatcttattttgttagtaatctatttaatgatgtaatttacataccacagaattctcttgcttt

SEQ ID NO: 185515 - DNA, 781 bp, Homo sapiens
attacttcttcccctaaatgtctgggtgactgtctttttaaaaattttattgagctgtaagatgcatgcagtttactaatcccaagtgcatggctcattattccttaatgctcagactgtgccatgtgtggccagttgggggcgctccaggcacctttagatgccgccccatcattctgtgagcactttcttgctttctggttcaggtatgtgttcaggctcatcttttcttgttttctccgtgtctcagtcctggaatcggccatttttccacagagttgtagttctttctagcaggatggggagtttcagtaactgcctgggcccaatgctgtttgtgcttcagaaggtttgggccaggtcctggttccaccagcagcaggcatgcctgcgttgactttctgcttctcctgctgatttggcaggggtgactggctgctcctgcctcctttgtgttcccggtcgtgtctaaggccaggccccttctgcccaggcagccggcgtggctctcttcttgccttttggttgcatatctagtggaatctcgtagtggacctggcacttgtagcaatgtttgatcagtagagtgaagatgatgacatttccctgcttccctgtgttatggagctgtcttgaggggggcttttggtaaataccatcgtcgaggtgtgtacagaatgccaagaaacaggagattggggaaggctgtaggcacagctggagccaggctacctgcaggggagcctcaggggccgtggagttccctggagacttgccacca

SEQ ID NO: 185516 - DNA, 203 bp, Homo sapiens
aggagcgaggtgaggagcaggggcgtggaaaattctccaatgcagcagagaagaaaacagtttaggtcacagcattttgatcttgcatgtgatacaaccactcagctagaaagaatgaagtgatcacactgatattcagagtttgtgtctaaacaccataatctttaagattcggagtgcttcttttattaaagtcccaaata

SEQ ID NO: 185517 - DNA, 312 bp, Homo sapiens
ggtagcatgtaacaatcaattgtaagtttttttgctctgtcattctgtaagatgactctcctctatccccctaaattcttctaacagttggctatacccaaatgtctgtttctttagggacatcgaggaaaagatcttcgtttagacagacagcagggcagggagaagagccgtatgtcctgaccccaagtgagactgacaatgccatagaagcagaaagctaatgtacataatgcctaggagacatacgtccccttgagaagcccagaaatgctggagtactaggcatcccattgcaggtaggatgaggac

SEQ ID NO: 185518 - DNA, 360 bp, Homo sapiens
ataaaatcactggcttgtttgtaacagaaaggataaatgcttgaggggatggagaccccattctctctgatgtgattgttacaccttgcatgcttgtgtcaaaacatctcatgtaccccatgaatatatacatctacgacatacccacaaaaaaagactttagaaaaacagcccattgcagactggccactgcggggagtggttttagttcaaaagcccttcctcacgctggcctctttggcagtggcgtcacagccccattgctgcaggaaatggtttgacatggggcggtgcgggaggggccctgacagtggggtttaggaagccacacccggcccaggtgcctgggggctgaagaaa

SEQ ID NO: 185519 - DNA, 177 bp, Homo sapiens
tacaaaaatcactccgtgttttccttgcctctctctctagtcttctaggcctccatcctatcctgcctactgatggaagagacacatttctaaaacccaaaaccctttaaacattctccactgactataggatgaaacaaaactcctccttagcctggtctataatgcactccaaga

SEQ ID NO: 185520 - DNA, 408 bp, Homo sapiens
cgagaggggccagaagcctggctggtaagaaatgtttaccctttttgcctgcatgtcaggtttctgggttcccattctctgtagcttccagaagaacggagcagctcttgatgaccctgatcgctgcacgctagctgtgggcgccaagtcgcattgcaaaggaaaaccatccgtttctgttttatggaaccacaggcaaaagcctctcaatttttcaagatgctgcccaatgggctgcatggggaactgaattaacattttccatcctggccagagcagagtacacatgacaaaactagtcactatgctcagtgcccagcatcaacttggcaaggctcacacttgctcccgttggtctctgtcatctttgatccactccactcaaggtgggaagggacgccttccacc

SEQ ID NO: 185521 - DNA, 414 bp, Homo sapiens
ataggcttaatttccacataatccagaaaagaaaccgagtcatggaaagattactcaatttcctataatcatacaactagaaatggacaaagtcaggattaagcccaaggactctctgattgctttccatacgcccctgtgctgttctcttctggtatggtggcagctaagcatcagtgctgaatgggatccaacacctggagctggtgtggatactaagaggagtccaaaataaaatgtctaacagaggaaatttctgaagactgagaacatggggctcacagaatcaaaataggaaagcagaatccggtcaagtccagggggtgagcacagtggctaaagcggaaaacatcagaggctgggaggccctagaaagacaccaggagatagagcatggaaattaagcctttgcaa

SEQ ID NO: 185522 - DNA, 534 bp, Homo sapiens
cagaatgtgactacatttgcagacaggacctttacagaggtcattaaattaaaatggggcattagggtggaccctaacccaacctgactggtgtccttgtaagaaaaggggatgtggacacacaaggagaccccaggggcacagaaggacaaccaagtgaggaggtcgcaagccaaggagacaggccccggaagaaaccagccctgtcgacacctggacctgggacttccagcacccagactgtgagaaaattcatttctattgcctagtcaccagtcagtggtattttgtgacggcagcctgagctgactaatacaagtgcatagttagtgctcagtgtttgctgaaggttgaatcaataagcgctttcgccccagccctgggttagctcagtgcaatgcagggaggcaaatgtgaaagggcccagagccgtcacaggagcagagggctgttcaggaagtcttcctggagaagatttctgggggcacacccggtggacacaggttggggaggttctaggtgggggctcgcgtg

SEQ ID NO: 185523 - DNA, 675 bp, Homo sapiens
atttttctggaaataccctcaatctaaccagagcatgaggaatggcttatctgaacttatgtgggaagagaatcttgatccaggtatcataaagatttttctccgtgtctgctattgaagtttgcatctccacatatctgtgactcagttgagaataggtagttttaagttccttcaaggcagatagggtatactattacttctttcatccctgatgctgttggcacagtgctttgcaaatgggcgctcttaaaaaagtttaaatcgaatcctgagatgttttaaccaacagtgatgttacatgtttgtagaatctgatattcattgctgagaggggaaagacagtttcaggcctaaaccaaggttttagtctctattcctcactacactcgccctgcaaactttacacctttgtgcctcagtttttctgtccttggcaaattgagagtaaaaggcccacttctacctttctgggagtgtagttagcataaaattaattttgatagagaataaagtccgcagtgtttcatttcacagaggaaagatgggcaatcatttatcactttggtgaccatgcccctttgggacctactatatttctgcaggtgattggtcagggagtaggcagtagctttggatgtcaggaatttctctgtgaggtcttggaagttctgt

SEQ ID NO: 185524 - DNA, 516 bp, Homo sapiens
atgtctgctgttcagaggatctccgattgtgaaataggtaggttgtttaattggtagttaataccaattaattaattggtagtatttaagcacaattaagatgttacttctctgtactttagatttagtgttatagctgtaatgttctaagagctctaaaattatgtcctagatattctaattgtgtttaaatgactttgctgtagtagtagtacccattttaatgggtacagttttgctttgctatgttctagagtctttttacaagattatgagatatccataaataattctaaaatgaaaccaaaagaaaatctaagataatttttttcttttttttttttttgagacggagtctccctctgtttccaggctggagtgcagtggcatgatctcagctctctgcaacctccgcctcccaggttcaagcaattctcctgcctcagcctcccaagtcgctgggaccacaggcacatgccgccacgcctggctaattttttgtgttttagaagagac

SEQ ID NO: 185525 - DNA, 453 bp, Homo sapiens
caaaaaaaatagcttgttttgtacccccttggagaagctgtattcatattcatcaatagatatttattaataaatgaaaaaggtgtaattggtatctatgtgattctaaacaactaattgaaattttgaacacaatgacacactggtattaggctgatgcaaaagtaattgcagattttggcattacttttaatggcaaaaaccacaattacttttgcaccaatctaataatttgatgtttgccaacttaaaaaattgttttgttggtatcagctactatttagttcagcagacattactctagcatcttctgtgtttcaagtacaatgctagggtgctgcatataaaaaaaatttcaagggaaaattcttggtcttgggaaagttatctaatagagatagatatataaatatatcatttcattataatatggtaagtaatacaatagaagag

SEQ ID NO: 185526 - DNA, 382 bp, Homo sapiens
taatgaaaataatatgataaaatgataggcccttcccacttacaaatttaagtgctgaactgtaaataaacattaaatcatgattaagcaggggtttacctgaggaattcaaatatgtgtaataacagaaattcatttcactaatggattaaaggagagaaaccacattaactgaataggtgcagaaaatacatttgatggtatccaatttccatttattataaaaattctggaagactctaaataaattgaaaattacttaatcgataaaaggcttatgacaaacaatacttaatgccacttaataatacaggagtctctactcccaccttgtattatctgcctcctggtattggagatcctgacacaatgcaatcagcta

SEQ ID NO: 185527 - DNA, 281 bp, Homo sapiens
catgcgcggtcgagctctaaggatcccccatgggtccgagagtaaacttagttaggcagttgagacacatctagcagaatcaagttagtgaatgggatcaatttccaagccacctccaaagtcaatttgtcttagaaaacaaaaatgaatatattcacattaaaaatttctataggtaaaactagattcctagctcatgtttcctatttcaagagaggtgctatggcagagtagttacaacctctgaagctaaactaccgtctatttgaccttggacaatt

SEQ ID NO: 185528 - DNA, 320 bp, Homo sapiens
gttttgaaaatgtggaactagaactatttttttctatgcctccttattacacataaaatagtactctgcctatgatggatacttaataattatagattaggccaggcatggtggttcacacctataatccccgcacttaaagaccagcctgaacagcaaagcaagagtttccttatccattcacctactgaaggacattttggttgtttccaggttcttagctattacaaagaaagctgctatcaacaattaaacaattgtgtatagaattttatatgaatataagtttgcattttctcttttcttcgataatgtgatag

SEQ ID NO: 185529 - DNA, 230 bp, Homo sapiens
attacaggattgcccacgctcagccagagcaggaagatttcttccccacatctccagtaggtacagtgatatgaagtgtgtggaggagaaaagaggaaacacctatcatttgagatggctgcgaaaggaaaaggcatcctcagggaagctagattttacttagagcaagaaatgaagggatgattcagaggttaaagagtggattttatgaattactcaagggagcggtg

SEQ ID NO: 185530 - DNA, 312 bp, Homo sapiens
tcctgtaatccaagcagtcgcattactgcaatgaataattttgacatacatcattttacgagtgtgcaattatatctgaaggataaatttctagagttggaattacctggtcaagggtgtgtacattcgtagttttggtagaatagctggagattcatgtattgccattttccctccccactccctagcagttgagaattgttgcagtataatgacagatattactgacaatgggagagtatgttccacatgtgaatcgtgtggaggcagaaaaaatagaatcactggccccccgacggcttttagttagta

SEQ ID NO: 185531 - DNA, 239 bp, Homo sapiens
acccactagcagagtcaccctccttttccccccaatcttgtcccaggaatgggagctgagctgacacccaagccccagaatagtgagggtctccattgagaggagaacgtgtctgagatgggttgacactcagcaccctgcccctggactagactaccattcacccaaacccctgcagggaaggtgtcccagcctccaggcacttgggtctcagctgagaagccctggctctctcagaa

SEQ ID NO: 185532 - DNA, 426 bp, Homo sapiens
gtcctggtgacacacggcctgaagggccctgtcagctgagagaatcagtgctcaaggggaatgttgtggagattacagcggtcagagggttttattcagagtctctgggagaggaaaataagaaaggacatgagagaaggggaaggaagggctaggcagaggatgaagggggatgtgcatgtgggataaacttgacagagggtgagcaggcaaaacagctttgcctgctagggaagacccaagtgtgagcctggcaggccttgtgtctaggagggacctgggcgattgtaaacaatatactatgctctgaagattgtacccacccctccagtccccactcctatcccttcccaagatggggtctttggtctcactgtgatttctaggcctagcctgaactgtgctggggtgacaccacccaacacc

SEQ ID NO: 185533 - DNA, 162 bp, Homo sapiens
ggagttcaagatcagcctggacaacatagcaagaccttgctcctgcagaaaataaataaaattaactgggcatggtgacagagtagctgtggtcccagctactctggagactgaagtgggaggactgcttgagcctggtagcttgaggttcaatgggctgtt

SEQ ID NO: 185534 - DNA, 571 bp, Homo sapiens
ccctttatcttaatgggttccctgagatggctccctggccacctctcaccactgctctgcgtactcaggtaggtagtgctccctgccctggctaagacccaggaagggaagggggaagcatggagaggccagagacttggtgccctgggattaaagctagttactaaacaggtctgggacttaaaactggaccctaaagtcaatgtagagaaggggaaaaaagaatacaaggcaaaagactgtcctcctaagagtgaaagcaggaaatgggcaggttgctggaggcaatcttagctgctaagagaaatataattacttttcaatttcggttacacctaggctaataaccacaactggaaattcttgttgggagaaggaagttttttctcattaagagataatagaaagtcattcacccttgaacctagaacagtcaacttcaaactgaaagaacttgactcagctagggcctctgctagcctgcagtgcttatcttgcacctctgtgcagattagaaaaaggtgctcctctgtccaagcagtcacagcccccagtttggcaagtgtccccc

SEQ ID NO: 185535 - DNA, 450 bp, Homo sapiens
cagagtactacgaatagcagtaatgaaatattatcatttaaaataaggatataatatcacttagcctgattgtggtcttcacatcacctcccccgaccaaagaaaagtcataaaagcagaagtgttctttgcctcagtggtttagattgtttgtgatatttggaattgaactagacaagaagagacgtatcaggaaccagttcctccttgcctccaggtatcagacatgctagatcccagttggtcttaactttttgtctcacttacccctttggttggaatgcaggcattattctgaagctttgtggtaagcgacttggattttctagtgtcgggctcttctcttttttaggaagggagaagcgggtctgggaaattaaagtgcctgtatctcccagggcaccgattgttaagagggttgggacctcagtatgttttttttccattctg

SEQ ID NO: 185536 - DNA, 312 bp, Homo sapiens
ttcagcttctgaccctatggtgggacaaggggagaaaccccaggcaggttcaccatgagcaggtgaagaagtgtggcttgacctcccactgccatgccccaggcaacctggtgttcctggttactaaagtgacaattgccacaaggtggtaaactctggtcctagacccaaaggttcaagctggaaggtcctgattaaaatcaggcactgggcctcagacatggactctctacctccaagtcctctaggctcaggactctgggcttgaggagtcctgagggggtcccagggttgaggtggaagactgtaact

SEQ ID NO: 185537 - DNA, 168 bp, Homo sapiens
cttttatgttctctacagtctctgcatgcctctgttggctgccatcgggggcagaccactcccactgcccatccttggactccactgttttggtttccctgggcagttaccctctgtctgggcaagtgaagattctcagcctgagcccaatatcaacaatgttccagg

SEQ ID NO: 185538 - DNA, 383 bp, Homo sapiens
atgacatttggcagcagttgagagtatgagtgctgttgatgaaataaacagaggcctttaaaagcaaggcaggaaaaatgctgggacgagtacaggaacagaaaaccagccatttctccaggtctattcaaagacgtagcaacactccctgcaaaccccagggcctcattatcaccactcagggcagtggccccgcacagcacctgcacagttgccagaggaggcctctctataggaagtgctgctttctgttgtggatagagtgactggctgggcctctctctgtgtttctcccctagtcttcaggaatatgaatgccttttccttcagtgctactaggtgcaaatatgcgagttaagggacaatgccaataaagtagccgc

SEQ ID NO: 185539 - DNA, 465 bp, Homo sapiens
aatggcttcaaacaacaggaatttcttctctcccaggtctggaggtcagaagactgaaatcggttgcaataaactgaaatcaaggtgtcagtagggctcattccctatagaagtgctaggggacagtctgttccttgcctcttccagcttctggtggctgccagcattaccttgcttggagtggcatcaccccaatctctgcctccatctggatatatcaccttcttgtcttctgggtgtaatatctctccgcctttctcttataagacacttgcaatcaaatttagggcccacctagataatccagaataatctccccatgtcaacatccttaatttaatcatacctgcaaagactccttttccttataatttaacatatacaggttccccggactagaacctgctatctttgagtggccatgattcagcctactataggtttcatcactatctctttatcaac

SEQ ID NO: 185540 - DNA, 425 bp, Homo sapiens
gtaagtctttttaaaaagctactcaaggggaattgtagtttggccatgaggaatggtgctgttcccttaataacaggagtcagccaaaatcagccatccacagatcaggcaatggaaacaataagatgtattggttaaagcagtattttccaaagcacgggtgagtgccattccaaatgaaatgtttttagtccttgcagacagccctagataatactcacagtgaaaaagtcaatctctttctttcttttttttgagactcgctctgttgcccaggctagagtgcagttgcgcgatcccagctcactgcaacctccgcctccaaggttcaactgggattgtgctaagattacaggcgtgagccaccacgcctggccctaatctcttttctaatacttcctttacattaaggagaaagtgtcagt

SEQ ID NO: 185541 - DNA, 261 bp, Homo sapiens
tagcccacactttggatctgctgtctcaactcagccaggctacttccccagaggcccagaggcacagaggccctcagttcctcatcaccacctccatcacttgcttggactgttgcataggaacaatgcgtcttcttttttgcccctctcagcagctccctgaggaaggcagggcatttttatggtcatggcactgccccacgctaccctgtgcatgggtccttcttcagaccctctctcttttgcccctggatcttctct

SEQ ID NO: 185542 - DNA, 271 bp, Homo sapiens
gccctctaggttgttgtgatgatagctttaaattgaataattacggtaaagcattcttgtatgtctggcacatagtaggtgtccattaagtgacagccaacaaagtgcctgggagagttaggcaagacttcatggaagaagggacatcagagttccagtagcattcagagacctggaggtggaggagggcagaagtaggagcagacatggaatgagttggggtaccaggttaggaattaagagtccatagccagatcccaccgtaccacca

SEQ ID NO: 185543 - DNA, 428 bp, Homo sapiens
atccccctacctcagtctcccaaagtgcagggactataggcatgagccaccgcgcctggcccccagccactggcccctggcctctggcattattttagagcataaaataatgtggactcctgtgtaccactctttctgagcctctggtggagggaaatgaagtagatcagagtgatatttgacatttcagtctctgttgccctttccttaaggcccttctgagcactgtggtgaaggcagagattatcaacccgttagggtgtggaacattcagagctgaggcgagaattatgggctaaggagcagagctggaggatttgctcacctttgtgactcttcggtcttgtgatgggaatttaaaattggagcataggagcatagatgaggatgctcagcaagtcagggagtggagaggaaacacttcttca

SEQ ID NO: 185544 - DNA, 459 bp, Homo sapiens
ataaaatagggctatttccctgttgtcttccctgaacatatcttgaattgtgacataagagatgaggatgtggaacaactggtgtagggtgtgtgaagcccatgtctggccaggcaaagtggaggattattgaggaatggtggtgattctctgggcagctgaagccacaagccctgctcacactctcttcccttggttatgtccaaactgagttgaggtcaaaacccaccagatcaaggtatggttttccagatgctgcactggggccaaagaagctacttttgggcaggactctctgccccgcttttctgcaacaactagcctggaggaaagaacacagacttatccagccaccaccctaaaacagctacaaatgggtctggccaagccagaactcatcaatttgctttctcttttcttctttttttaatagatttagggggtacaagtgcatttttg

SEQ ID NO: 185545 - DNA, 562 bp, Homo sapiens
acagtgaactcaattccaacaaaggtgccaagaacacacattgggggctggacacggtggctcatgcctgtaatccccagcactttgggaggccgaggctggctgatcacctgaggtcaggagttcaagaccagcctggccaacatggcgaaaccccgtctctactaaaaatacaaaaattagctgggtgtgatggcgggaacctgtaatcccagctacttgggaggctgaggcagggagaattgcttgaacctgggaagcggaggtggcagggagccgaaacgtgccattgcacttcagcctgggggacagagcgagactccatctcaaaaacaaaaaacaaaacttgagtgatgatggacttgaatagaagtattaaagtataagacgatacgttttaaaaattgaagtaatttacgtaccataaggtaccacgtgattttaaaataaatgttcttgaaatttagtggccgtaaagtgaattgaaggagtgcagtactggaaagagagtgagcagtgaagaggatttattattattattattatcctttatttggattat

SEQ ID NO: 185546 - DNA, 440 bp, Homo sapiens
ttgatctccgacccctccataatgatcccagacacaactaatcacccaatatgacagggcaacataggggccagggcatcccagacacagaggtgacacaaacatgcactataaagtgtcatggtcacataggtccagacacctacatgtgcagtggctgacacacgtggtccccaaacacctgtctgtacgggggcagcacacatatagccttgacagcaggcacggccacaggcctcacaaggtgaaatggccacttccccctcccctggcatcacaggtaggacaagggacagagagtcacagggccagtgaccagacaaagagacagtcacaaatcacgacttggcagcacacaggacagccacacactcccctgcacctgatgatgacataagtaccgacaacttcacgccctcaggcccacaagtcacacacag

SEQ ID NO: 185547 - DNA, 581 bp, Homo sapiens
aatgagctcgtccgattagctcctaacgggccctgacaaggtgacacacactccaagattggaaacagccatcaggagccggatgggcacacacccagccatgaccatcgccactcacaagggtgacacacggtggatggccaatcacacaagcaaaggacaacgatcccagacacaactaatcacccaatatgacagggcaacataggggccagggcatcccagacacagaggtgacacaaacatgcactataaagtgtcatggtcacataggtccagacacctacatgtgcagtggctgacacacgtggtccccaaacacctgtctgtacgggggcagcacacatatagccttgacagcaggcacggccacaggcctcacaaggtgaaatggccacttccccctcccctggcatcacaggtaggacaagggacagagagtcacagggccagtgaccagacaaagagacagtcacaaatcacgacttggcagcacacaggacagccacacactcccctgcacctgatgatgacataagtaccgacaacttcacgccctcaggcccacaagtcacacacag

SEQ ID NO: 185548 - DNA, 325 bp, Homo sapiens
cagaaagcgtcctgactctggggcattactgaactcccctgctgaggaaggaattttggggccaaacagcaacaataagtctatcaagcgtatagcaaaaatattcctgatagtgtcacatgccccacaatatagagatatctaaggataattaatatcaaggtctgaagtgagataattatggtgggcctagaatatgtgaaaacaatgtcacaggaatggcaagaaccaaatgaacagaaataatagagactgataaattatttcaagtcctactctgagtaattactcatgcatcacaacaagaatgattacttcaaacttt

SEQ ID NO: 185549 - DNA, 1204 bp, Homo sapiens
gatactgcgacggacgcattcatgtggagatgtctgacattcaactttgaaaacaaatggtcttataataaggagaacagccagactagaaaacggacctggagtcatctttatggaagtgataagtgatacctcgggaatagaggaatcactaagagtatataaaaagaaaaaaagacattaaggaaaccttaatccatatttgaagacctagtaacaaaacaaaagccagtggcaaaagagaaagtattaaatttcacagaagcatcagtccaataaacatttatcaacacccaccatgttccaggtactatgctagatatgggggtacaaaaaaaagacaggactcctacccttaagaaatgtatagcctagagaagagatagaaatagattatttccagagagttataaacggggcaccacagagacacagaagggagacacccaggaggtcagggaatactcactgatgtgaggcattaagattaaataaaatgatgcaaagaaagttggtaagggcaaaccaaatgaaatcaagacaatgctcctggacttctaaaatactgagtaagataactggtttaggaaagaacttggttggaaggagccaaaagaggctaaagtgatttaaactggaaagaataatctattcttggaagaaaataaacatagaagatgaaaaaaggggacaaaggacaaggggtttttggccaaaagtgtacaagtttggggtgaactgttacaaaagagagattgaaggtgccaagctgtgtaaggatatgggaaggtgggtaaaaagaacttatttgaagtttgctgagctttatgtaattgtatatttctatctcattagaagatttcactaatatattacagaagttcattactttccaaaggttcggggcttgtctgcttcttttgaatgcaatactgagactggcccaaaatgacccaggtatacgtgaccatgaatgtgtggaaaaggtaaatttgtaagcactaatggttgcagaggtcaagcatgatgtaaagggagaagccactagatttcacatttatgtggtgaccttcaagtgaactttcaaccgaaatgtaggggtagaaaaaaattacaggtagttcacaaagtgaatggcagaggcatggctctaacattgttcattcattcaaaaaatatttactgaatgcgtccgtcgaagtag

SEQ ID NO: 185550 - DNA, 230 bp, Homo sapiens
gtaacataaatgtcaagtcccctgggacactgacagcatctcagggttgacgtgtgacaacacctcacgtcatggcaagtacttaaatgtgcatcttagaattcttgttaagaatgagcttccacagatccacacttctgcgtctcccttttctgacaattaccttatgtctcaggctgcaaaatacccaaaagaaagattgacacgccacgatcactctgcataacatc

SEQ ID NO: 185551 - DNA, 444 bp, Homo sapiens
tgatatctcattgtggttttaacttgcatctctgtaatggctatgatattgaatgtcttttcatgggcttatttgccatctgtatatcctttttgatgaaatgactgttcatgtcctttcctcattttgtaattggattatttacttttttactgttgagttttgagatcctaattctttgtcaaatatgtggtttgcaaatatttccttccagtctgtagactgactttttattctctaaacaggttctattacagcaaaattttacatttcaatgaagttcaacttacccacttttccttgtatgatactatgggtgttaaatttaagaacacttagcctggctctagatcctgaagattttctagttttcttttccctgaagttttatagttttatgttttacatttaagaccatgacccattttgagttagtttttgtat

SEQ ID NO: 185552 - DNA, 294 bp, Homo sapiens
aacgtaaccatttgtgcagttatttacacctatttgtgtgtacagatattttagcaacctatttacaatatttctcccccaaaatgagtaatgatatctgcaagagagaaatcgtaagtctatgagatatttgcatttttattttgattactaaactagtttttgttttgttttgtgttttgaggcagtctcgctctgttgcccaggctagagttcagtggcacgatctccgctcactgcaacctccacctccctggttgaagcaattctcgtgcatcagcctccgggtagctg

SEQ ID NO: 185553 - DNA, 601 bp, Homo sapiens
gcctgttcactctaatgctagtttctttggtttaattagagctctttagtttttttttaatttaagctctttagtttaattagatcccatttgtcaattttgtcttttgttgcaattgcttttggtgttttagttacgaagtctttgccatgcctatatcctgaatggtattgcctaggttttcttctggggtttttatggttttaggtgttagtttaagtctttaatccatcctctgttaatttttgtataaggtgtaaggaaggggtctagtttcagttttctgcatatggcttgcctgttttcccagcaccagttattaaatagggaatcttttccccattgcttattttgtcaggtttgtcaaagagcagatggctgtagatgtgtggtgttatttgtgagacctctgttctgtcccgttggtctatatgtctaaaaagcagaagtataaaagagctagaactaatcttaacactagttccaccagtgagtaaagcaaccagcagcagtgaagaaaatggcagattttcctgttggtgtgagtggactggtcacaagaaagtctccatggggtagcagaatgttgcattgcaaattt

SEQ ID NO: 185554 - DNA, 529 bp, Homo sapiens
gccacaaggaaggaagaagagaccccacaaaacactcccaacagctctttgcctccggtcaccccaaagagaggccgttctttctagggtgatggaaattctaaaattgaatctgaggatagctgcctatatccgtaaatatgtgaatatgctgaaaaaccattgactcgtgcactttaaatgactgtattgtatggtacataaaactgtatctcgataacaccttctcaaaaagaataaatgcagtggctcacacctgtaatcccagcactttgggaagcaaaggagggccaatcacctgagatcaggagttcgagaccagcctgaccaacatggtgaaaccccatctcgactaaaaatacaaaagtagccgggcgtggtggcacatgcctgtaatcccagctagctgggaggccgaggcaggagaattgcttgaactcaggaggtggaggtcgcagtgagcccagattgcagcattgcactgcaacattgcactctagcctgggcaacaagaacgaaactcggtctc

SEQ ID NO: 185555 - DNA, 1096 bp, Homo sapiens
tattaaatgaaattaagtaactctttgtgatagactagttttaagaaaagaaagaaccttcctcaacctgataaagggtaattttctacctggggcgtgtagcaaacccaacgggtaaaatacttcccgtgaaaggaagaacaatactaagttcatttttagtgttctttttagtgctggagaccccagccaatggactaagagaagctgaagcgaaaaagttgtaaatatttgaagggaaggtcagaatgtgtactgtttgtttatgctctttgctaagcatgtaatctacctagaaaagccaagaaaatcgattgacaaactgagaaaactaataaatgagttcagtaagttggctctacacgtggtaaacgaggaaatccatacataggttcctgtacaccagcaatagccgtgtgagaagtactgtcactgtctgttacatctgataaaacctgcctattaatctttggcctgcttgtcagtttcttgtcccagacatgctttgagtcatgaggagagcactccaggagatgaggctttcagtttcctgcttatctcaacacgaaagtcaaatgttgtgaagggtggacacaaggctgatggtttcatgacagccccagagagcaaaattcattccccctgatgcccatctcaccctgctatagaaagtttcattttttggacagcatttcctgagagaatgtatcactgagttttctggagacctgaggtctaatccttagtaatctgcagaaataccaaaggatatactaaggaaaacagaaaaggcattcctctaaaaatagctagttttttttttaatgtaatagcttgcagtaaacaatggcaacaatacagaaaactgctttcctccctactctctttgctctcccctctgtgctgtttccttttccttggtaaccagtgttgttactgtatgtatcttcctaagattttctttccatttacattgcagcttgcctttttcacctaacattttctctatctccctccttttcggctgctcaccctggggttcatttccccgcagctctgtctgttcccttggcagtcctctcccactgctctccaa

SEQ ID NO: 185556 - DNA, 666 bp, Homo sapiens
  misc_feature (24)..(24): n is a, c, g, or t
tgagtgaccaaggcaagattttgnaatgggcacagagaacttcaagtaagcccggagatgattacctgtagtttctgctgctcttagaggcagaatcatctgagaactgattgaggagtgcatgtataccccagagactagtgcactctaggataaaaggagtcattcagcccttacttttggttggatgcagggtgtagtttcaataaaatgtcacagaacaaatttctaagaccatttaggttgagtgagtgttagagtttgtctagtagtatatttctcatcagttacctatttagctgttctgcataggcctttgagataaggaaataagtaagataaattctccccagaaaccgcaaaacaattataatgttgagagaagaatgaagtagtaactctgtctgtactgaagaaggaattcggtgtacagaaaagaggtcactgcctgaggtcgggagtttaagatcagcctggccaacatggtgaaaccccatctctacaaaaatacagaaattagtcgggcatgatggtgggtgcctgtaatcccagctactcgggaggctgaggcaggagaattgctagaacctgggaggtggaagttgcagtgagccaagactgtgccattgcactctggcctgggcaactgagcgagactccgtctca

SEQ ID NO: 185557 - DNA, 271 bp, Homo sapiens
ccttcagttagtgcttttttctgactctgaagctggtgctataatccactctgtcatactgtctttcttcagtacttcttgaatccttctccttttcttccatctcaacaaaccttgattcaggctctcatgatctttcatcaaacttgttaggagagcttcctattagtctatttctatttcctgtatccgttctctctcacacacacattaacacatattttactatggtacttccatatttaacatcgtctaatggcaggcttggtgg

SEQ ID NO: 185558 - DNA, 450 bp, Homo sapiens
ctgcaacctccgcctcctgggttcaagtgattctcctgcctcagcctcctgagtagctggaactacaggcacgtgccactatgcctggctaattttagtaactttaggagagatggggtttcaccatcttggctaggctggtctcgaactcctgacctgaagtgatcctcccaccttggcctcccaaagttctgggattacaggcatgagccaccatgcccggcatacatgagatttcaaatcccacccagttggacatggttactttttggagatatgacggcaggtcctcttctctcatgagtcctgtgaggcccactcgctttcccatccagccatcccacagccatggtgtccacagggctaggaccactcactcgccaagaaggcaggtgtgtacccagtgtttctaaaagtaaggcctggtgcagtggttcatgtctgtaatcc

SEQ ID NO: 185559 - DNA, 709 bp, Homo sapiens
tttcagtatatatagcatgtcaattatttattctctttttaaagacatgttttcaatattctgctattataaaaataccgcagagaatttgttggagaatatatttttatcttcatttcagaaaatgccttttggttgtatttatagaactgaaattgcagggttgaggaagtgaaaacattttttaatgtcttcatgcatactgttgcagcatggtatcacactaaacctttgccaatgctgagtattcttgtttttaaaataattccaatttgatgaactagaaatcagaatgtcaatactatatttattagtcatctacagtccctctcttgtgaaatgtcatgtcctttgcttatctttgggatcttaaatggtttttcttcttatagtttaaatttttattgcaatatagcccaagctggacttgaactcctgggctcaagcaatccccctgcctcagcctcccgagcagctggtactgtgggtgtgcgccactgtgcctggccatttttcttcttctattttttattttattagttttttttttcttttttgagacagagtctcgctctgtcacccaggctggagttcagtagcatgatctcagctcactgcaaactctgcctcccgggttcaagtgattctcgtgcctcagcctccctagtagctggaattacaggcgcccaccaccatgcctggctaattt

SEQ ID NO: 185560 - DNA, 526 bp, Homo sapiens
gagtagctgggactacaggcatgcaccaccaggcctgattgatttttgaattttattagagatggggtttcactatgttggccaggcaggtctcaaactcctgacctcaggtgatccacccgccttggtctcccaaagtgctgggattacaggcgtgagccaccacacccggccacaactctcacttttaattgactgtgccccagaatcaagcactttggctagcaaatgatggctagttagatcacagaggtgtgtgttgcattctgtgtctgttcactgtgaaatcgggattttaagagtgtatgttgttgaacatacacctgtctttgagtgatcggtccccagaggccacctctaaggtgaagatttggggaggtaattgtgggaagccccaggaggagcagaggaaaatgagaaaggggacgaagggaatgtaatagaatgtgtgttgggagagggtttccttatgagccagtgcagaggaaagtcttgaaatgcactaaggaaatacagtctgtgccgt

SEQ ID NO: 185561 - DNA, 307 bp, Homo sapiens
tccctccctcctctccacccccctcagcctcctcttcctcctcccatccttccttcccttcccgccttcccccagcgccccatgaagctagttttagaatggctttttggagcagttatgttataaggattggcagctcatgagtttaatattcttatgggtcttccaaagtgcaaagagaacacaaagttacttttgcttttgtaatagagtaaaacgcatcctatcctgacctaagatgcacaaatcaacccatcttgtcaggcagataaacttctcataaacctgtaaaacatatgacttatgt

SEQ ID NO: 185562 - DNA, 215 bp, Homo sapiens
gtaaacaaacattgcatttggttgtgatgccgtacaactctgtaaggtgaagaatccctgtgtcctgagaaactccatctactctatgatgctcgtttatgtttctttttctacagtttgctccatgtaagatacaaatatcagcttctggccatcatagcaaatgaaaatagtcattagcaaatggcaataggctgatatttccacagtggttc

SEQ ID NO: 185563 - DNA, 463 bp, Homo sapiens
acggaacagcacacacacccacggaacggcacacactcccacggaacagcagactctaccacggaacagcacacacactcccacagacagcacacacacacccacggaacagcacactctcccacgcggggccgctgggtttcctgcagtttctcctcctccaggcctttccctggaccctggtccagtccgtcatttgagcacaggtgcctgttagaacgagaccttcttgttaggacgatgagtgtcccagccaccacctcttttggactccgggaggcctggaacgttctgaacgctccgtggggctccagtcttctccgcagccagggcagcagggtttgctgtctgtcctgcaggcagatgaggagtcagggctggggcctgtgtgggggctctcctgagcgcacagccgccgaggtggagcgtgttctgcctgagcgccgacctggtcgggggaatc

SEQ ID NO: 185564 - DNA, 403 bp, Homo sapiens
ggggggtgccctgggctgatgcctgttcaccagtgtgttgagggcagacctgggattggaacctgggtctctgtgagtctagagatcccaccttctgtaccctactgcccctagggccctcaaaagaggaatcatgcagtaggctcccaggagggccctggtcccataggatgatgggaacagcctggggctcaggtcctgtgcgtctccagagcccacaggcccctgcagagaatctagaggcaaatactgggacaaggacacctgagccataggcacaggcccagccagcagcctggtgagcccatctacactggctagccatgccccaaggacctgggaggcctggctaacccaaagtagagggacaggaggggcagctgccctcacctccagcctgcct

SEQ ID NO: 185565 - DNA, 1291 bp, Homo sapiens
ggattacaggcgtgagccactgcgcccagtcttaaaagaaaaatctgttttctaaatgagagacttgagtttagttctcatgaacataactttttcatactaggtttcagacctggtatcattaaatataattcattacaaagactttttctaatgtcttcaaattctttaagtcaccttcaacaagaaactgtacaagaagcaagctacaaccttacagcaagtggtaaatgtatatttattgctttccccctaccagacagaaactcctttcttgttactaaccagaataggaatcattcacaatcttcaacttgtgcttcaaggatctgatccttctttttactctggcaattctttctcttttaccatcaagtgtaatgtggacctttcttttgattgtgccaacagacttccaatctaactgcatctgttcatataaactatatcaaaataatgctaaagcttttcttcaatcttacagatattgcaatattcatcttaatacttccttaagattcatctaattgcagttgtaagtatcattagtgaatcatttttaacctcatttttccaaggttgaatttctgccttaaatccataaactgtcaagacacatatctttttgtattgtacatataatttgacgaagtttactgattcttcagtaaatctgcaaaatgagaatcattcaccaaaagtttttctcctataatcataaacttttatcaaaacttttcttttggacaggtaacatacttcagcatccaacagtaggtattttgattccatttctcacctaaaactgaaaacacatgcaactgaagcagcttagattttattacagcctccatttcattatattatttaatatggaattcaggtctacagacaaacatatatataatcttgacataaaatctttaaatgttcctatcgtgaagcctcatcatcagtcataaacttaactagcatttccataggaccttctttgtttcaaagtattaaaaaaaaatttagcaattaaatgtatttctttcaggtcctagtaagtgagttacatttttttaaaattattttttatcttatgagtctaatgactttccagtgttagtcactaaattgcccttatggtgggaaaaattaacatctgtacattaaggctaattataaagtagtaaaaatgaaaaatatatcaaattcattatgttcttttcaagaacctccttatatattttacgataattaaaacaattttaacttctctgttaatcgaaaaaaggtaagaaac

SEQ ID NO: 185566 - DNA, 1115 bp, Homo sapiens
agatgttgtggcacctttgcctaattatggcatttgtgcagattgttctcagtcatgtaggtttagtctcaaaacatccactcctcctccctgtgtagacagaggtaagctgtggctgtggatgagagcatctgaatgaattgtatccatttcagatgttagctttaaaagctatagggtcatgttagaagtttggttcccgccaaatgagtaattttagagatctgcacatcagatctttatgggtcttggaaaaatgctcctcctcagttcaattttctgccgggaatgtgtttctaaggccctttaggtattgggcatcttcaggtttatgtggcacatgggtcattagggccataggccccatttctgcatcaggagggctgagtccagatgttctggtttaatatttatgagtggcttccattgaaatacctgtccttccgagagaagtgcccctaccccctgcctctctattccgggtgagtgagctgaaaactgcctcctgcttttctcattcacatgggattctttcagaacagagttttagataggtcttgaattgtgtttttgccttttgccataatcttgtgtctttggtagcaacagtcagggaagtgattgctctacccccatcactgtgccaagccacaggcttgggcggggccccgggatgacagccttcggtggttcagccactgtggctgtctggacaggcatcctcttcttccattcctgttccatgtgccccctcgcgatgctgtctgctcacttgaaggagatcttctcagatggagggtgtagctggtggagaccctggggaaaccttccccccagatcacagggggtgtctggtactacttgctgtggttgggcctcctcactagtcctgctctctctcttcccatgcccagggcagcctgtcagaagccagaatggtagcaggcagagagaggcctcagtccagagggccatggaaagtggagtcatggagcacagtgcctgcagagctgctgtttttccctccctttgaaatcgagggctcatcctaaattgctcttcagtgccaacaagcaaagggacgcccacacaagttcttcagcattttgtacaga

SEQ ID NO: 185567 - DNA, 474 bp, Homo sapiens
ggttcaagcaattcctctgcctcagcctcctgagtagctgcgactacacacgcgcgacaccacgcccagctaatttttgtatttttagtagagatggggtttcaccgtattggtcaggctggtcttgaactcctgacgtcgtaatccacctgcctcggcctcccaaagtggtgggattacaggcatgagccactgcgcccggctggcaattattttttaatatagttaagcatgaagccagatttagcttgcagccaaatttcacacatgcttgcagtgcttcacgctatatttgcaattctgtatagatagtactatcagtaaagtgcttgttggtcatgtacctaaagtgaatttcttaactgcactccagcctgggtgacagagtgacacccggtctcaaaaaataaacccacaagaaggaacagcaaataacgagggcacctgatttaatcctaggaatcagaaaaagac

SEQ ID NO: 185568 - DNA, 147 bp, Homo sapiens
ggaaatgaaggctgcagcgagctatgatcatgccactgcactccagcctgggtgacagagtgacacccggtctcaaaaaataaacccacaagaaggaacagcaaataacgagggcacctgatttaatcctaggaatcagaaaaagac

SEQ ID NO: 185569 - DNA, 644 bp, Homo sapiens
tatataaaaggtatatatacactttttccttgaagttgaggccttccttttatgtggcagaagaggggaagacttttaggaaacatagtctttaggatttaatgtgctttttttcttcaaatctactacttcatgatgagagatctttttgttaaaagagtccaactgtatattacaaaataataacttctctgaggctggaaatttagaaatttttttttaaaaaagagtccaactgtgaaaaagtaaaactatttatgggctacacagttttttcattcaaaacagaaagattttattgagtctcatgggggtaaaaatatatactagcaacctagaaaccctgtgtgactgaacagaatatcaagaagaaattgttaccgcatttcagccactaaaatattaaacagctgggtacacttaagaaaggactacagggagataactttctaatctttcatcaggaaaggatattgcaggctccactgtgaagcaggaccatagttacccttcactgttctagccttttctctttacagattaatggtggaacccctacaataactacctcattctcttgctcatactcatctttctctaaacacatacaactgtgtatttgagaattccaagtgaaaactggc

SEQ ID NO: 185570 - DNA, 221 bp, Homo sapiens
tgcatatttcagatgcctcagtctccccgagctttaatctctgcctcctctgcaagattggtgtactctgcttgggttccctatccctgcactgaagtcaagaaagtaccgccaggtagaaagctgggaggttgtagagctcacctatttgtttcttttctctcaggggtcacaattgtgtgctgcctgttgttctctatatgaaaaacagtttttaaata

SEQ ID NO: 185571 - DNA, 399 bp, Homo sapiens
tgatttcttcgtttagaatatgaagacctttcattggtggatatggttttaacgaatcattttttagttatcctcacctctttgggcctttttgtaagtgaagatcttcgttatccatcacgccacagcttatcgttgattatgttacagttacctttgagagaaacagaaccctaagtgagtcaagctcttgtttttatagtcaggaaccatttcttgaatgggtaccctgcttacctcacatttttaaaggaataaaaatttttccaactgtgctaacatttcttgttgaccaagagcgtggtactggagtttacctcttctataacaaggtcaggaaaactgccattgcatctgtgagcatcactgagaaacaaaatgaccaactgggggatcctc

SEQ ID NO: 185572 - DNA, 230 bp, Homo sapiens
ataaaaagaaatgaggtcatgtcctttgcagggacatggatggaactggaagccattatcctcagcaaactaacacagaaacagaaaaccaaacactgcatgttctcagttataagtgggagctgaacaatgagaacacatggacacagggaggggaacaacacacaccggggcctgttgggggtagtcgggagtgagaacatcaagataaaaagctaatgcatgtgggg

SEQ ID NO: 185573 - DNA, 543 bp, Homo sapiens
tatccagaacatttaaagactcttacaacgcaaccacacatagagaaacaacccaattaatgaatgtgtgaagagcttgaataatttctgcaaagaaggtatacaagtggccaattagcacacgaaaagatgctcgacatcattagtccttagggtaatacaaataaaagctataatgagagattacttcaccactacaagggaagtgtctaattaaaacaaaacaaaaaacaaagtaacaagtggtggcaaggatgtggagaaactggaactctggtacaatgctggtgggaaatgtaaaatggtacagcttctgaggaaacttttagtggtttcttaaaaaccaaccatagaacagcatctgatctagcaattgggtaggtaaatatgcactgggtaggcatattcccaaaagtgagagcaaggacttggacacttgtatgccaatgttcaatgcagcatcacacacaacagtcaaaaggcggaaagaaaccacgtgtctatcaggagatgaacggatacacaaaacgtgataatatacac

SEQ ID NO: 185574 - DNA, 391 bp, Homo sapiens
aggaaggaaggaaggaagaaaaaagtggggcaaggcagcaagaagatgctgacttgttttcagcaatcatcagttatgattacttctcttcttttaccaaaaacttggacctccagcttcctgtaaacctttatcccagctcttactggtagacatgcagtgaagccagagggaataacaagtacccagcacttgaaaaacactttcagtcaagcatggtggcacatctgtagtccccgctacttgggaggctgaggtaggacgatcacttgagcccaggagttcgaggctgcgatgagctatgattgcacctgtgaatagccattgcccgccagcctaggcaatagagcaagaccccatctccattaaaaaacaaaacaaggctgggcgc

SEQ ID NO: 185575 - DNA, 338 bp, Homo sapiens
acacttttctcagaagcaaggttgggagaaagcactgtgcatgcatagctccagcctctgtggtcccccttctggagccagctgggctgcagcgagggcacattctggaccatttgctgccaggaggtgaacagcccgcctgctgagcctggcctggtgagtgtacaggctaacacagggttgaagggttagcagcccccttggccacaggcctggcctttgatctccatccatctacctcctacctctctctccctccactggttcccaacttgggcacccccaaaccccagcactcacacaatcttcctgctctttgccacctctgggatcctgtg

SEQ ID NO: 185576 - DNA, 616 bp, Homo sapiens
ctcagtgatattgacagccatgttattggtcatccacctttagaatctaaactctcagaaaattataatgtgaaaaggaagggaaaacaatgggggagacggcgccattgcactccattgtagggacagctgggtcagttctagtcatctggctgaggaggcagctttgatcagtttagcctggacactggcagcttgcagaaaggctgggcagcacagggtgcagtcaagttacaatgaacctctcgttaaaacaagccccagcctgtgaatgacctattgccaaatgccaggtagcctccttccctgctaaaaaagggatgggaagatgagagaggtttcctaggtacaccttacaggatgctactggggagaagagatttggggcactttgctttaagcagtggttctcaaacttgagtatgcattagaattatctggaagactggttccaattccagagtttctgatgcaggaggtctgggctaggcttgagcctctgcatttctaacaagttcctaagtgatgctgaagccactggtccagggaccgcattctggagccaccgccctagaggacttgtaggggtgtggatgttttctcattccaggtgtgg

SEQ ID NO: 185577 - DNA, 431 bp, Homo sapiens
atgatttttagaaggctctagttataaatgctcataatttctcaagatttcaagttcatctcatgtcatgaaattttaagtgtattgaaggaacgtgtaaaacatcttgggcattttattctccaacttcttgctaataatactttttaaacatcagttctcaagttaagtcattttctactatgctaaatttcagcaacccaaggttgaggaaactctccagtaatgaaacaaagggaagaaaagtatgaccttctaaaattctccacaggcattgagtcagcatattttaatcactgatccttccccaaacaggtattattctctcttaaaggaaagagaaggaaccaagataagggccctactcgaagtttttcagtaacagggtcaagacaggaaaagaaagctccctgtcaaggtctatcctttgt

SEQ ID NO: 185578 - DNA, 477 bp, Homo sapiens
agtgtatggcatttactcaggctgattaaggagctgctgcttaatgcagaatggggaaattgagcagacaacttcttccaaaactcagattcattctacaaagaatccacaagaaattcaatagaccagaaaaagtagaacaactgaataacaggtataagagcccacaaggtgaaaacagctggagttgatggaattcaacagtattgtgatgactataacccaggccctttcagtatcagtgtatcatcacaggtgtgcaagttcaggagcaatactcaatgtaaacttaaaaaaaaaaagaatttgtagatgacatggcagagatagggtgagggtgatagttcagaagagctaaaagttcctttgccaaggttggaacgggagttcaaagaaaaaacaaattttaaagattttaaaaattaatttatctttccctttactaagaaccctagccaaacatactgagaattagaa

SEQ ID NO: 185579 - DNA, 525 bp, Homo sapiens
agccaaaacattgcaatgcagtgttatgactgtaactgtcctatttcattcaggtaatgacttgttaacaattctcaagctgcataggtggataacttcactttgaaaccagtgctgggtgaccctgaactttgggcaggtcctttaaactccaagcctcagtttaatcacctaataagtgagaatcatgatctctatctcacagtatcatcatggggatgaaatgaaatgacatctgcaaagcctgagtgtgagactcagttcattccaactcagctttaatagtcatgtcagacactaaggcaaaggtcaagtaaagagaacatatattataccatagtgtggaccagatggattagttttggattagctcctaatgagataatcattgtgttgggggctgacagaactttgcacatagtaggttctggaaaacattactgattaattcatttaatagtcaatgcctatttagtgggtgtctatcatgtgccaagaactattctagatgaatgagccagacaa

SEQ ID NO: 185580 - DNA, 197 bp, Homo sapiens
atgcatgccctctttttgtttgaatacaatattcaattaagcattaaaaaaaaaacccactctgaaatcctcaatcacaaacctaaaagttaaaacaacaaaatcagcactaactgtaatggttttgaaagttaaatacatttcagcacaagtaatagacatttaaattatccaactgtaagtatcttgttacactt

SEQ ID NO: 185581 - DNA, 301 bp, Homo sapiens
ctatgatgtaatgttcataaccatcagggacttacctttgactacatcccacaggtcttcttgaaatgccagggggcacagtgggtactcacaaatgtggattaaatatttatctcagctgcaacttcataaatataaatctgctcgccagatttctttttacttttcaaatttaaaatacattcttatttaataagctcatggacttatcagtcactggtatgtaaagagaattcagacatcatttcttttctttatcaagtgaaaaatgagacaaaatagtcttctcttaaatgaaaat

SEQ ID NO: 185582 - DNA, 318 bp, Homo sapiens
gaaagattctgtcttgcccaagaatacagatcttggcagagctgaccataaggccaaaggaagccatggagatcgttgtgaagtgtgggaattgctgcaggtgacatctaaaaggagatttattgaggatcaaggcagaggtccccagaggacaaactgtgcctctgattccttcctgctgcttttcttcctggcagaaatagatgattgaattcatctttctcctggcaccttgtctcagagacttcccttgccacagttccagacccatccaggccatgactgccatgtagatgacacacctctctgctcacaaat

SEQ ID NO: 185583 - DNA, 706 bp, Homo sapiens
tctactctgggtgataggacaatctcttttggcttctgtgttttttctgtcctacaactcttctgttttataactgaaaaaaatgttttgcatgtgaattttagactggggtctttgggtaaaagcacctagagattactggcaggttaattctaaaaagggcaatttgttttttcactttatctcagagtttcatttgtttcccagtgattgactaattattttaacaaagtaaagcttcattgttgtgtgtatgcaattgaatcgaaaatatacttttcatacaaagacaacttcctaaaggtaagtgtaaacttgtatgtagtttgttaatcttattgtggtattttgtttttcttaaacacagtttcctgttcttttgcttttgcatgtcaacattgctgaaaataaatattttgctctgcagggatagtaagccagatggagtggtatttataatttgaggaaatagcttaaactttgtcatcagtttaaattgcattaaaaaacctgaagcacattgattagagttgtttaaggtagagaaccagaaatattctaaatatcctatgcctaacctgtcaaaactgttcctgaaatatatagagagggaaagagtacctgaggagctcaggaagagtgatggcctagagcgtagcttgaattgagcagcagaggtttctctggagtgtcctgtattatctta

SEQ ID NO: 185584 - DNA, 583 bp, Homo sapiens
acagcaggtgctcagtaatatttgttgaattatactcagttcatgttggacttcatgagttgttcatcttcatctcttaacttttattgcacatttaaaaatatttttcttttctggattttgagatatttccttaacatgatctcccagcactgctgaatatttgctttttctgtcacccaggctggaatgcagtggcacaatctctgctcactgcaacctccacctccagggttcaagcgattctcctgcgtcagccttctgagtagctgggattacaagcacgtgccaccacacccggcctgcagagtttttcttcctaggcaactgagaaggcagagttctttcatgcaggttcctatttccatgatcatctcgtgaagagggaagagactgttgagacagaaaaggatagcacttactcaccaactcctgctgctatactttttcagtcatgtttatgtcaaaaggatttttcttaatttttctgtttacaaaactaacgttctcactgtaaaaatccaagtatcttggaatgccatttagaatgttaaggtaaaaataacattggcaaagaaaaaag

SEQ ID NO: 185585 - DNA, 280 bp, Homo sapiens
cactcagtctccggagtaaggcgactacaggtgtgcaccccacacccggctaatttttgaaaaaatttttttgtgcagacagggtcttgctatgttgcccaggatggtctcaaattcctgatcttaagttatcctcttgccttggcctcccaaagtgctggtattacaggtgtaagctattgtgctcagcagtttgccacatttttatatgttctgggtacccagttacactgttataaagacatacctgagactgggtaatttataaagaaaataggtt

SEQ ID NO: 185586 - DNA, 263 bp, Homo sapiens
cctcagtcttactcctgagttgctaggactataggactatgctaccatgcccagctaatttttctattttttgtagagatggggtctcactatgttgcctaggctgatcatgaactcctggcctcaagtgatcctcctgccttggcctcccaaagtgctaggattactggcataagccaccctgcccagcccccatcttgatttttaagtctggtaatttatgtagttagaattaaaatcctgaaccagtaatatcaaagaag

SEQ ID NO: 185587 - DNA, 501 bp, Homo sapiens
tcacctgaattactgcagtgacctcctgattagcaccccttcttccagtactctctgcctccagtccagccgccacagggtacatggatttgtttaacacatgaagctgaagaaattcactcattcattcagtcttcactgagcaactactttgtgccagacactattctaggccctgaggatacagctgtcagcaaaacagacattgtgcccattctagtgatgaaatcaaatttaagatcccattatggctttccatggctttaactaaaatcctaacatcttcggtagcatacaagaccgttcctgagcctggccccagtgacctcactgacctcaccgaaactcttttgtataaaggccctactctatccctcatctctctccagtgcctgcacactccctaaacactaaatattaaggaacctgctttctaaggagctcaataagcaactaccttgccaaatcctgggatcctgtgaggtaaacaggaggcagaaa

SEQ ID NO: 185588 - DNA, 608 bp, Homo sapiens
aatgcagtgtaactactggatgactcacggttatcatttttgaatgcttccatagtcactttcttgtcatttggacatatttcaaacaacttcccatattcgccctccttcttggccatcttgaatatgcagtgggctgagaaccaagctaagtgtccaccaatagagaatggattaagtcaagtatggcaacattacataggtagcaaataaaaatgcaaaatatacttcactagtcatcggaaaaatattaattaaagcaacaagatatttttgtccatcagcatagcaaatactaaaaagtgtaatgttatttaaggttgtcgaggatacagcaaataagcactctcctgcactaatggtgggggtatcaattggtacaaactttttggagggcaatttgttagatgcatcaaaatttaagatatatataacatttgacccatcaattccacttctaaaaaatctatgccaaggggtctgttccacatggacacaaggatgtatgtgcaaaaacacaagtgttagttggtgaagcagagaaattagagcctttgtgcattgccagtgggaatgtaaaatggtacaaccactacaaaaaacagtat

SEQ ID NO: 185589 - DNA, 221 bp, Homo sapiens
cttgactttctgtctctatatgtatgggctctgcctatatctggggtccattccctttgtagttactcaggtaccagtctctgggcacaagtccctccataaaggtcaccacctcccaaagagcttctccagttccctccccacgtccacagccttagatgcttacctctgtggaaacaattctctccttccaatctccagggaataaactcttcggaagc

SEQ ID NO: 185590 - DNA, 591 bp, Homo sapiens
aaggcgatctcttccaccggctgtggcacatcatgaatgaaatcctggacctgaggcggcaggtgctggtgggccacctcacccacgaccggatgaaggacgtgaagcgccacattactgcccggcttgactggggcaatgaacaactgggactggacctggtgcctaggaaagagtacgcaatggtggatccggaagacatcagcattactgagctctaccgattgatggaacatcgacatcggaagaaagacaccccggtgcaggccagcagtcaccacctctttgtccagatgaagagcctcatgtgttccaacctgggagaggagctggaggtcatcttctcactctttgacagtaaagagaaccggccaatcagtgagagatttttcttgaggctgaatagaaacgggcttcccaaagcccctgataaaccggaacgacattgctccctctttgtggatttgggcagcagtgagctaagaaaggacatttatatcaccgtgcacattatccgaatcggtcgaatgggagcaggagaaaaaaagaatgcctgtagtgtccagtaccgacgaccctttggctgtgcag

SEQ ID NO: 185591 - DNA, 253 bp, Homo sapiens
ttcctcacgaaactcccaggcgctgtataggaaacataaatccgttgtcaggcagcagtagcacgctgttgctctcggagcttggctgctcgttcgtgctcgcaaccactaaggtctacgcaaacctccacggtttccttccgccttcgcgtcacctttctaagaaattcccagagggcagcgcagacggggcgggctctgagactccgggctccgcctctttccgggaaccgcccactacccaggactccga

SEQ ID NO: 185592 - DNA, 178 bp, Homo sapiens
tgaaacctaatagacacatccagaacccccacccaacagcaaaacccagtgaaacctaatagacacatccagaacgcccacccaacagcaaaacccagtgaaacctaatagacacatccagaacccccacccaacagcaaaacccactgaaacctaatagacacatccagaaccccca

SEQ ID NO: 185593 - DNA, 334 bp, Homo sapiens
cttttcttaacctaactagttattagaatcccgcttgtcataagcctactgaggaagaggtgagtaggctgttcattgatgttattgtaggttggaatatggattttctttttgttgccctgcagctacctgattttagcttttagctctcatattaaactgttagacttacggttctacatggatcatgtttatacttagtgaatgggagcctgttgaccccactcttcgtttacacctgtatgaaaaacatgtcaaaagaatacacgatgctgtaaggacaaggtcacctttcgcctggtttatcaaggctttctcccatggcctaagtgtg

SEQ ID NO: 185594 - DNA, 148 bp, Homo sapiens
ggaatacaatgtagactgctgtttatcacatcacagcaattaatcgtgtccctgaagtagttctttttttcctattacagtcacctatagatacaaccatttaatctcaagatgctaaaaatacctttgccagagtaccggcggcgtg

SEQ ID NO: 185595 - DNA, 368 bp, Homo sapiens
atgctgaatggcaatctgtctgtgatgccacgagcagcttccttcctctctttggttttattttcactagattgttgttaggagtttttcttgtaattcagtcccttagtgttcaaagtgtggttctgggaccagcagcattggcatcgcctgagcgtttgttagaaatacataatctcaggccccatacggccctactaaatcagaatctgcattttaacaatacccccaggtgtttacgctcacattatagtttgagaagcactgatggaatcccaaaaaactttttaaatcaaagttgcatgaactaagacctgtgatgcctcttcccctttcctatcccaatttccctaccaggggcctcccac

SEQ ID NO: 185596 - DNA, 343 bp, Homo sapiens
cgcggacagactcggaccgtccccagctctgttgctttccctgccagtgcctgcacaagtccacgtgagaccctgccctctgcctcaagttagtaagtggggagggtctcagaggggagagcaaggagagctggggtagcggggacgaggttgcatctgatggtgtcagagcggggatcgattcctgaaggatggagctggctgcaatcttctagacttatcccaaagatctctgcccaaatgtgttaagtttttacccgtttgcgtgtctccaggaaaactaacgctgcttcattgggatgcccacgccagtggggctggcacggggtgcactgaggtcatt

SEQ ID NO: 185597 - DNA, 548 bp, Homo sapiens
tccccaagagtttattgtccacaaatcagctagactgaaccctataaactctccaaaagattcccatcccactcagaataaaatcctacttccttatgatatacaaatcctacataaccagtcatcagcaatccccatcactactcccacacaattcttttactttctttttcctcttatatattatcccctaccattctccttcagccttcttctccagccagtctagcctcttctgccattctggaaggatatacacctctactgtaaatacagtctccagacttttgcccttgatggtcctcttcctgaaatgtttttatctcaaaagccaaaagtttgactctttcagtaattctctgctcaaacgttaccccatcagaggctttccccagccacccaatctaaaacagcacatctgctgggcgtggtgacgcaggcctgtaatcccagcactgtgggaagccaagctaggtagatcacctaagggcaggagttggagatgagcctggccaatatggcgaaaccctatctctactaacaataca

SEQ ID NO: 185598 - DNA, 564 bp, Homo sapiens
taagggctttagttttccacttacaggtgccactctccctgggacccaggcgcaggcaagcgggagttctggttcccacccagctctgctctcctgctcatgttctgcttccagggcctcctcaagcccagtgaggctgggccttttgtgggtcaccccggcagatgccaagaccttcccagacacaacacagatttgaaacaggatttcagccccctgaagcacgcccatcaacttccagtgacattggtcagatttctgcaaaacgaatgacgtttatgggaatgcccacgttttcctgcagatcccgactggtagttctccaggtgtccaggatggccaggatctggaagcagctctgtggtctgaaaggcagaggttgactttagcgtgtttaaatgtgagatttgcagaatggactcagggcgtggggatgatgctcactgtgtgccaggtgctggtctatgctcttcgttctcccagaaaaacagagagcttaaggtcagtgtctctattttacaaatagggacacccaagctcttggacattaagtcatttgctgaa

SEQ ID NO: 185599 - DNA, 174 bp, Homo sapiens
aaatccaaagaagcatactattaagagtcatggcagtagtataaagtgctaaaagagatcaggatagagccgtgttttaggccttgttttatacctgtgttacaggttgctcctctcccagcaccttggatatattagacctgcaataaatggttgttcgagcagggaatgaat

SEQ ID NO: 185600 - DNA, 351 bp, Homo sapiens
agctgcgcacatttgccttattacagttctttatgataaattaaatgcatgcttcatacatcctttggtgtagtcatattctctcagcacttgactaagcaggtggaaagcttatttagtcataggatgactgaaaacaatgaactataaacccatgtatatccactccaagaaaagagctaataaatgtcatgttttttattttcccgtggaccccctttttttttttttttttgtattttataacctttccagaatcttgagtgatttttaaatgtttgccctttggtcataaatgcagcaagtaaatgtgagtctgcacactcgaatgttgtataaatcagttgacca

SEQ ID NO: 185601 - DNA, 358 bp, Homo sapiens
cttgtcagatgctgcaaagagtgatgaggggctgagtaaaggctattagatggagttatcagtggattccataccagtgacttttgagaggttagttccaaaggagtggtaagggtaaaagctaaattgttaggagttaaaaattatgtcaaggaagagaacaatacactttcaaaaaacttgcagaaaagaaacttgagagacaagcaaagtaaaagaaagctttgttttgttgttgtttataggatagggatgccttaggcagagaggaaaagagtataggcccacaataaaataggataattaaaaattacagaggaggcagtagaagatgagattaagggcacaattggaggtg

SEQ ID NO: 185602 - DNA, 207 bp, Homo sapiens
tttcttctggccctgacccaccttccgactttctccttgacactaacttccttgtcaaagcctcgcgtccattaagcatgtctggtatttgatctctgtaccttccatcccataactagagtgcccttgtcacagatcttcatcttttgcaattctgtcttctaaagtcagaaaaacatggtagtatagatagcgtcagtatagata

SEQ ID NO: 185603 - DNA, 622 bp, Homo sapiens
gctcaggtggtgtgtttttgcaaggcctcatcttcatcctgggtggggaatgacattggctgggaggagcaaaaggccctgaagtgcctgtcgaatcaacagtgaaaatgccatgaggtgcttgtgggtgggtgggtgagttgtttgtccctaaatctgcagtagccccctggcacataaacataacgttgaagagaaagagtgtgcttactctgccaaggcttcttcaagggaaatttcctgtcccccaccccttcatgcctccccatcagatttgctccaaaccagctctgtgaataagtcaccctaactagcttcccaaccgttgcctacccagatgccactccaggctcaggccttaggataaagcagggacagggctgatggcagagagggatgggcaggctccatgtgcagttcatgcggaggaaggaagagcagtggtgagttccacagactaggaagggaaggaagggtgggtctagtgtttacatgcttccctgagttgtggaggaagttagtgcacaaggtctttaatgcaggcatgagggtggttagggcctcaacggatggtggccttgggattagaaagcaagagatacgtgtacgagatttaggaggg

SEQ ID NO: 185604 - DNA, 124 bp, Homo sapiens
cagtcctcggggcctgttcaaaccactctggaagcccagccccttcaagcctgggagacttaacagagtgtatattccagctccaaatggctgagcacccctgctctacctagaagcctcagga

SEQ ID NO: 185605 - DNA, 240 bp, Homo sapiens
gggcgtgggctgccgcctgctgtggagctgccgctgcccctcgtaccctacacaggctcctcctaaagccagacccgcagccttcccagcatgaaggcaagcacggggtagctgctgttctcttcccggacggtcctcagtcctcggtccagctttctcagtccacatttttattaaggattattggccagacgcagtggctcatgcctgtaatcccagcactttgggaggccgaggcag

SEQ ID NO: 185606 - DNA, 273 bp, Homo sapiens
aaattcctgggatcattaggggagttaggctctatataacaacaatcattcaggagggactcaggatactggttagcttaacaagattaaaactgacttcctagtatacacataaaccaagctagtttctcaaattagcaacagaaaccagatgaaactcctcaaatgagtgttgcaaaataaggagctggtactatagttttatttggggagaaattgttaagtttgggttaactgctcagcctatgcctgatactacccttccatctatgg

SEQ ID NO: 185607 - DNA, 270 bp, Homo sapiens
aagtcacagagctggtaaatgccagagccaagatggaaacccactcgatttatttccagagcctgtgctcccttccttgaggtttccctagggtctttggggaggttttttttgtttgtttttttggcagagtcttgctctgtcgccaggctggagtgcagtggcatgatctcagctcactgcaacctctgcctcctgggttcaagcgattctcctgcctcagcctcccaagtagctgggattatgggcatgtgccatcacacctggcta

SEQ ID NO: 185608 - DNA, 404 bp, Homo sapiens
cccaccgctcccggcctgtgctttatatttttgagcacaaaaatcttgcatttattttgttatattctatctctttttaatgtttatacaattgctactattttgtgaacttatttctaattattcgttactaccactagaagtacaatgtaattttgtgtgttgaccttgtcttctgcaattttgcttaattcatttagtagttttaatagtagaaatttattagataaattcagtagattaatcctttgggattttctatatagacagtcttgtcatttgtggaaaaaaacagttttgtttccccttttaaaatccatcttctggcttttattccttcttgcatcactgtactgacagtgtaatacaatacagtacattgttgaataggagtggtgagagca

SEQ ID NO: 185609 - DNA, 146 bp, Homo sapiens
atacaggtgggtgcacacacatacctacatatgcatacattacatacatagagtattgtcttactaggagattccaggcagaggaagtagactatgcgaatggcatgggaaagcatatttggaatacagattagcccagcagggtg

SEQ ID NO: 185610 - DNA, 523 bp, Homo sapiens
ctccacatggcacacaccgaacaccgaggctgtgaaaggctggcccgtgagtgtctccaggttcaatatcgatttgtcaattgtagagaaaaccagcagttctagttcccagagaccaccctgtgaattgaaataagaaggaacggggagaaattggagctatttttaagctcagcttctgaggcttattttaggaggcattattgatcatacttcggggaaaccgttctgcgtcgctggtgccagtgtctacatgtgcacatgtgaagtgttggcctagactcctgagaccatctgtgtgcccaagggaggctgcagcccagaggagaattcggactgaggctactttgcaccaaaattaggccaaactcatgaaagggccattgttgcagctgccctgggaactgtaacttagaagtgattttgtgcccttacagcctctttagtaaatgaattgagtcatagcatttgtgatccttccgcatgtactttggtacttttctgtacttttctgtcctctttt

SEQ ID NO: 185611 - DNA, 356 bp, Homo sapiens
aagtgctgagattataggcgtgacccaaggtgcccagccttcctggatgttcttgatgcctgcaggtgttcatcgacgtctgggcaatcaagagttaggtatttattctatcttcacagtttggacttgtttttatctgtccttcttgagaaggctttccaggtattcaaaggaaattgagtgttgtaatctaagtctttggtcactgcagccgtatctgcactacagggagccccaagcccagtaagactgtgaccccttgcaggctcctggaggtctcaccttggtgtgcttgggtaagatggagaggaatttcctagattattaggcgatctctcattctcttccttcacttt

SEQ ID NO: 185612 - DNA, 287 bp, Homo sapiens
caaaatgagcatttccaacaaagaaactttgtgtgtttaaagaaagcaattctattttaaagcagcatgattgagccccacaaaacaaagtgtcagctacaagacaacaatcttttggtaaggtattggggcttacgatatctgttttgtgccctcttccttctggttcagagttgatctgctatgataaatattttatttggggagttttttggtactggacaataaacagggccacagctgattgccagagacaattttctaaattagaggacaatgacagctga

SEQ ID NO: 185613 - DNA, 238 bp, Homo sapiens
gaccctgcatgcggagtatacacacatgccccaatacctaggggccagtctacaaaatatattttaaagacaggagttacagtgtgacttctggattattctcagtcttgttaaatagaaattgtctaaaatgcccctagtggtttcaggcattgctggatccagataactaaacaatgtgatgagggtgcgctcttgctcttatctctgagctatgctttcctctgtgctggcttcc

SEQ ID NO: 185614 - DNA, 239 bp, Homo sapiens
aggactctggttccaatcccacggcctttagtgttagctttgcctaggactaaacctccgtgagcctccatttcctcaatctgtagatggaaccactagctagaatatagaaaccatgagggcaagagtctctcttgtttgctgctgtatccatagtgtttaaaacagggtttggcaaatggtagatgctcagtagatgtttgtggaatgaatgaataaatgaatgaaagaatctgaga

SEQ ID NO: 185615 - DNA, 434 bp, Homo sapiens
gttggtgtttattattctcgtctgcttttagttttactatatacgtatgcatctgtaaacgatgccagatagatcgttttgcagcctcctttttcacttaaggttgttggtgagatctgccaagatgttgagtcgtctctgtttctcagcctcggcactgctgacatgtttctgctgggtaattcctcgttgtgggggccgtcctgtgcgtcgcaaaatgttcagcagcatccctggcctctacccactagatgctcaccaccctcacctccaagtgtgacaactaaaaaggtctccagacattgcctattgttcctgggacagaggcaaaatcaggggtctggggtggtggtgggggaatcattctagttcatttgtcttcactgccatttaatatttcattgcatgaatacatactgcagtttatttcctat

SEQ ID NO: 185616 - DNA, 313 bp, Homo sapiens
gaattattggccattgctctagcttttgcttgctggatttgaactgtagtcattttgctgtcacctgcctgggacccgagatagaccacacacctgtggaggcagagctgagagatggagaactgaattctgattttcctttttggaacctgaatccagtagtggttgaagttctattcctgaccttttgacttcctcagcacttttccctcccctctttagcttaagccaattggaattggtgcttctgtcatctgtcacttggaatagaaacaacccaagtgatacacaccaagtatctgtagtccaagtt

SEQ ID NO: 185617 - DNA, 286 bp, Homo sapiens
tcaaccaggcatggtggcatgtgcctgtaatcccagctactcgggaacatggtgaaaaaaaaaaatcaagttagtcattaaattctgacagtaataaatgtaatttgcagaaaataaatttttaaaactgtcccactgttttgcaaacaggtagtttacaaaaataaaaaatatccagtgtcagtatcatatatgaattcaagaaatactgtatcagtagggcatggtggctcacgtctgtaatcccagcactctgggaggttagggtgggaagatcacatgagac

SEQ ID NO: 185618 - DNA, 168 bp, Homo sapiens
agacctccctccggccacccctggtcacacacacctcccaccctgctgggcgggggacaagcactatggacaaaactgcctacggcacaagtccatgaaaccggatcacccaggacttggcacggaggtggggaggggaacagcacatacttctctaccatggtgcca

SEQ ID NO: 185619 - DNA, 351 bp, Homo sapiens
aaaaaacccaaacaaaaacactaatcaaactatacacttataaagggtgaatgttatgtgaaaattatatctcaataaacctgacttaagaaaataataaaacaaacctaaaaaaccaactaagtaaaaataaatctaagaaaaaaataacttacagtttttccaattcaacagtcatcctgagaatgttcttaattgttgtaagtgggacttgtgttgttcccatgtatctgaagaagaaagccgaaacattcatgatatgaagcccaataccaaaattctgtccttaaaaagatatttcaaggacatgtgactacttcaattttggcttctctataaaacaagccagtt

SEQ ID NO: 185620 - DNA, 336 bp, Homo sapiens
tctaaccggactagacactgggccttctgactcttcctccatcaccctctccccaggagatgggagactcttcagagtccctgtggattgataagggacccagacttagaagcagtttgatcaagcagattctgtggatataatgcagcagtttctaaagtcccagggcagggagagtttgatactgtgagcatccatgggagagggaaaggcaggattctgaaccacagctcggtgttgggggcagttctatgggctctgagggcttcagagaaaaaagaaactaagaggcaaataggacaggttgggtgggctttctaattgagacaagaggag

SEQ ID NO: 185621 - DNA, 306 bp, Homo sapiens
cggactactgcttctttgagtctctcctccagaatttctttgccttacgtgcaaaacccacgatgatactgtccaacttaaaacctttcactgtcttcacctgacctccaggatgaagcccccaagcctttgttaggataacaaagacctcattgtcttacccctgcctttcttcagagtccggagcaccaccctattcatactccagcaattttttctctatccttcttgcagattagatgatcattagcatatcaatgcctattattctgtccttctaattttgcttctcctgctctctatata

SEQ ID NO: 185622 - DNA, 510 bp, Homo sapiens
gagtgggaggaataacagtaaaaggttgggaattagatttagtccagtctcttccacaatgattctccacacaacatctctaataattatgtgcatagcttctgctcaaatactttctgtaagagaaaaatactgtgtagagaaaaacaaagcagtgtacttaattcaggtcaactaactataagtcagtggtttctttaacctattttgagtcacagaattttttttttctgagacagggtctcactctgtcacccaggctgaagtgtggaagtgcatatacaactcactctggctttgacctcgacctccaagactcaggtaatcctctcacttcagcctcccggacagatgcagatgggactataggcacacgccaccatgcctggctaattatttgtattttttggagagatggggtttcaccactttgcccaggctggtctcaaactcctaggctcaatggtcctcttgcctcggccacccaaaatgctgggcctcgccactgtc

SEQ ID NO: 185623 - DNA, 208 bp, Homo sapiens
ctattccttgctggctgttggccagtggcctccctccattttctgccatatgagcctctccacaatacagctcacagcacagcagctggtttccatcggagcgagcaagcaaccaaggcttatttggaaaggtgtaactttccagatgtttttctgctgtattccacaccttagaagcaagtctgtaggtccagatcatgcttgcagg

SEQ ID NO: 185624 - DNA, 322 bp, Homo sapiens
aaaattcaagtggttggaaataacttgaattttagcaccattcgtgatagagtagttacaaaaatagacactttttgagtagtaataaattcacttagtatttgtaaagacctggagaatataattctgttacctacctttatgtgtgatagttatctacctttatgtgtgatacttaggattagttgtttaaagaaccctttctgtagtactataaggcatattaagtaatagttatatgttacctagtattttgtagtgtttctttgatctgttactttgggtttgctaaaagatgttaagcctccaaataaaaaatttt

SEQ ID NO: 185625 - DNA, 348 bp, Homo sapiens
catctacaaaatctttgggacaattcctcttgggagtcaagctttagatgcctgctgtccagccatgagagaacatcagagggtcacagcataccccaaggttccgttaacagagcaaaacatcatcccttgcaacccaaaggcaggaacacagctgggccccaggaagacagggattgtactagaatcccttgcagtcctgagagtgctgtcttctggctgcttggcttagctcctctctgcaacccagcttcctctcgccttgctgactctcctgtagggagtaaaagaggctgcctccagcctctactcatacagctttgtttctgtgtgtttcccagcctctgc

SEQ ID NO: 185626 - DNA, 213 bp, Homo sapiens
gcttactatctctagagggcaaaacaagtaaatttttatactggttagatattgaaataaaaatatgttaggtatattgtgttaaaataaattattcacattggtttcatctgtttctttttgccccccttttttttctttttttcttatggagtctcgctctgtagcccagtctggagtgcagtggcatgatctcggctcactgcaacctcc

SEQ ID NO: 185627 - DNA, 184 bp, Homo sapiens
ctcctgacctccttgtaattatccaagaatctattaggcttaagtcacctcatcctctgggggttggaaaaacagcaagcaagcaagattggggtttgtttttcatttactaaggtgaagacaggaaaccctcttggagctcttccactccctactataactgaaggaagctagtgctgtcagt

SEQ ID NO: 185628 - DNA, 737 bp, Homo sapiens
gacaaagttttcagtcgcaaatcacaccttgaaacacataagataatttatactggagggaaaccatacaaatgtaaggtttgtgacaaagctttcacatgtaattcatacctagcaaaacatactataattcacactggagagaaaccttacaagtgtaatgaatgtggcaaggtttttaatcgactgtcaacccttgcacgccatcgtaggcttcatactggagagaaaccttatgaatgtgaagaatgtgaaaaagttttcagtcgcaaatcacatcttgaaagacataagaggattcatactggagagaaaccatacaaatgtaaggtttgtgacaaggcttttgcatataattcatacctggcaaaacatagtataattcacactggagagaagccttacaagtgtaatgaatgtggcaaggtttttaatcaacaatcaactcttgcacgccatcatagacttcatactgcagagcaaccatacaaatgtgaagaatgtgacaaagttttcaggtgcaaatcacaccttgaaagacataggaggattcatactggagagaaaccatacaaatgtaaggtttgtgacaaggctttccggagtgattcatgccttacagaacatcagagagttcatactggagagaaaccatacatgtgtaatgaatgtggcaaggtttttagtacaaaagcaaaccttgcatgtcatcataaacttcatactgcagagaaacc

SEQ ID NO: 185629 - DNA, 227 bp, Homo sapiens
tcctgctgtgtgttcctttgcccagaatacttgggagacttgggacctactccctcactcccctaagtgtctgctcaaactacgttctcagggaaggcttcacattttaacctccaacccccaccaacacctgacagctcgctttccatttttttctttgcaccaatcactattcattttgtttgtccaattgcatcacacgtgagcaagggcttttgtcttcctgc

SEQ ID NO: 185630 - DNA, 404 bp, Homo sapiens
tgccaaggcatttatcccttatttaactgctacatggacgtgttttgcctctccaactggattataaaatctgagtctgtgtcttattcttcattttcttcccagtaccagatgtggaaccaagaaagacttaactagtggtgtcccaggtttgacctaagccagagactgaaagccctggagcttcagtttactcatctatcagtgatcaagatggttattgatcaaggttgatcagatgaatcttgaggacattcaagatttctctatttctatgtttttgagaaccaggagacatgtccatagatctgaagctcaagaaaacaagcctcagagaatgcttcacctatcagtattccatcatatgtgggtttatggctcttttttgttactacactgccttg

SEQ ID NO: 185631 - DNA, 214 bp, Homo sapiens
ccaaaatgtattctccaagtagccttttcagtgtagcccacttgtagcatcacaggagctgtctgacaaacaaatacccatgaccagtatcagaagaagtcagaactcttctgggattatgtatttaagactttgcaaatcctctttttgaaatacatcttccgccaagaaatctttatggatgcagtggctgcatgtcgatcttctagcagca

SEQ ID NO: 185632 - DNA, 330 bp, Homo sapiens
catttaaaaaaaattgtgccaagatgacattgggtaactactaagtaaataaaaatcatcaaaaaagtggaatgcctttggtaacgtaactgcagtaaaactgatatgcagtaccctgaggaatgtatggtaatcatgatccttttggaaacttttatataacttttattggaaactgcaatataaaatagcatttgtggagcacttgctacatgtcaagcacagttctaagagcttgtcttatattgtcatttaatcttcatgatacctcatgaaggaggattcagttatcactcatatttcacaggaaattgagtcatacagggatta

SEQ ID NO: 185633 - DNA, 288 bp, Homo sapiens
agcaattccttctagctgtgcagacctcagcactgctgagcccatgcattcccaaatggccaaaaaggctgtgccatccatctccctgtatctatgccacagtgttatatgacacatgtaaatattgcacatccagccaacagccggcagaaaagttaacagcatccagatccttgtccataatgagaacacttttacttttttcttttttaaaagaaattggcatggtgtagtcattttcttataaggcaccccctgtgcaaatctggaagagaattcaactttgga

SEQ ID NO: 185634 - DNA, 702 bp, Homo sapiens
acaaatgcaaaagtagatgaaggtgccttggatagggaagtgtgctggtagttaaatatgactaggatgcatggtggaattacgtttggtagtgagatacgagattttaaaggtagaggggccaaatcatgaaacgcctagtatgttaacaccaaacctttagaaggagaaagggacatatcaggtactagtacctgaatgtatcattctgaaacccatctgaagaatggattggaggaggagaataagacagagaccggtaaagaaactattgacagcattcccagttaaaaatactgacggcctgaactaaggtcagtatcaataagagtaaaaaaatgaagatggggtgtagagatacttaggaggtagaattgatatttcataaatggttagaagttgggggcacgggtaaaggatagagattttaaggtggtatcaagcactcatgctcttggtggaaacataaattagtacaaacgttttagaggactataaatgttcatttccattggctaagaaacttcacttctagggactactccacacaagtttataaaggtacatgtacaaatgttctttgcagcattgcttgtaattgcaaaaacatggagtattctaaatatccaacaataggaaattgtttaaaaaatggcacatctaggccgggcacggtggctcacgcctgtaatcccagcactt

SEQ ID NO: 185635 - DNA, 226 bp, Homo sapiens
tgaagttataattcaccaatggctaaagaacttttactgggatgttggcctctgcagcagaagaaataaaaacattaggacttcaaagtgcaaaatttataaaatgaggtagggcactttccttgcctagatgggggccactgatactgtacaggggccctgatgtttgcagagcagggatatggtctacctactggtgccctgcctatcactagcagcataaggc

SEQ ID NO: 185636 - DNA, 251 bp, Homo sapiens
gtcacgtacactgccattctaatagtcactaatttatctaagtctgaatgtaaaatttctaaaacatttaatagacatttaatgagaaaaaaatatgatatgttaaatatatttgcagtatgcagctggggacacagctaaaccatatcactcagtaatttaacagacaaataaatagtatgcttgaacattgaaaacaattctttataaggtcactttgccactgccattctaatagtcactaatttatc

SEQ ID NO: 185637 - DNA, 165 bp, Homo sapiens
ttcggttttagagtgttaggtctacatatactgtttccagattgttctttgccctggtcacggtgctctgcctagggtcccatttggacacacctctattaatgcagcaaccagaatgaaacacgttgttcacaggcttttctaaccatccgaagagcagcaggc

SEQ ID NO: 185638 - DNA, 336 bp, Homo sapiens
agaaccggaaaataaaagcatatgaatgaatagaggcttgaagtgaactacagggtgcacattagtaagaaataaaaaagagggtcatttaagaaaaagaaaaagttttatgtgccagaaactgcaagcaaacaatggaattttgtaagggaaagttgacagaaacagtttttctttagtaagctgaacgattctaagcattagtgaaggaaactcgtagtcagtgcacgactgaaagagacagagatggggatgatggagctgcatttaaaaatgaataaagatttaataagccaaagaatcacagaggtcctcaggaggcctgatgataaagaa

SEQ ID NO: 185639 - DNA, 180 bp, Homo sapiens
tgtgttagaaaaacacttggatactggactataaacgagcaaataacatcaacagacaactagtaagattatgaaaattattcagtgcactatcaaagtaatgagaattagaacatataccatttattgcctgctaaattgaaacaattttttaaaataataaaagtactcgatgttggt

SEQ ID NO: 185640 - DNA, 463 bp, Homo sapiens
aagaaaaatataatcactgaattaaaaaattcatttgagacagtgaacacagcatggataattcagataacaattagtcaatgaaaagaaaaacttgagaaatgtttctggcaagtggcttgatatctatcatattagattggagttgaaccgaatgctttatataccataagaaaaatgcatattaccaaaattaatttacaacatgaaaaggaggaggaggaacgttgcaacatacatatgtcaggaaagacatattaatattcttctcatataaaaagttcttacaagtcaataagaaaaaggcaaaaggacatagtcatatataaatataaacaaatggcaatatgcaaatgaaaatgttcaacataatttctaatacaatatgtgtataatctttgtatcatatctttgaaatttatagcactggatgttaatgttaataaactgaaaagtttcatac

SEQ ID NO: 185641 - DNA, 200 bp, Homo sapiens
tgccaaacagacccgacccagccccaggcagggcgttctcagggccagcagaagccgccgtggcctgttcactctgcagctaccctcttgccgcaggctaaccctctgtcaggcagagagctcccggacagcctgctacccatgcatcactgcacccagggcacctcttctcaaaacaaggacagcgttaactgggacag

SEQ ID NO: 185642 - DNA, 173 bp, Homo sapiens
aattgttgctagaattattatttcagtattcccctggacgaaggaacgctgtgacagaagaaaacagagaagtagccaggtccctaaacattcccaatgtatacatacacttccctgggtgcatgccaatgaaagcagcacaagaactttgaaattcaacccccacatgcagg

SEQ ID NO: 185643 - DNA, 559 bp, Homo sapiens
tctctctgttttcctattcttgagtgggttttatgtgaaagaagatggacttccttcaggcctacaataaagtgacactgacttaagaaaaacaaaatatcatttatttttatacacaagaagatataaaatttctacgaatgagcagatttgggtttgaacattaaactccatcattcacatgctgcattgttcagtagcatgtgtttaattttatcataaattatcaagtactttaaaaaacatgtaaaatcctgttttctgacttttgtaattcagataacattctggaatgggacacacacacacacagacacacacttatatctccctaaaaccactgcattagttaggatcttcagggaacagtcacccagataacctaaagtaatataagtttattgtaagatcatatgtctcaaaccgaggtagccatatctcaagggattacatggcattagccaaaaattatgagaagtaactgaaacaaaaaatatgccatgtctctctaaattatccattttaaatgaatacaacatttttaataaaaaataatacc

SEQ ID NO: 185644 - DNA, 404 bp, Homo sapiens
agtagtgacagccggaatgtcgccatgacagtcagaaaaggttgagatgaccaactagcatccctccctgggcaggcagatgaaaaagaaaaaactcagtaaaaacaaaggttggatcatgtgtttcttaactctttaccagttccaaaaagagctagggtgcctcccttgctaataacaagaggaagagcagtaaaaacagtcatgaaacacttccatgagaggggcatccgccctggacactccacaggcatccttttaccttcccactcaccagcgccagcctcaggagggggcatcatggtcccggtgctagagatgaggactttgaggctcagatgaatggaacagccatttgcaatgaaattattgtttggtactgctgggtgctgtattcgtttgtt

SEQ ID NO: 185645 - DNA, 303 bp, Homo sapiens
gaaaaaactttttaaagtatgtgatttatatgtctcactgaaacattctttgctttgttaattatctatctcatcgaattttgttttataccattatggattgtatcaatccctttcatctgggaaagtgttgaacaccattttgagaggaaggcaagtacatcggttcccagtggcactaaaccaggaattgtttttaattacggcttctgcctaaaaatattcttccctaatattttaaaatctggaactaaataatggtttagttcccaggagtcaaatagcctacatataacactctct

SEQ ID NO: 185646 - DNA, 481 bp, Homo sapiens
cggtgatgtgcgatcttgagtgcgatcttgatatgttttcttatcagggttatcttggcctcaaagaaagtttggaagtgtttcttcctttctgctgtttcattcaatcaataaaagaaagcttcaggtattttcaaattagaaagtgcacaaatatttaggactactgttgataatttgacgcttttatcattttgaaatatcctttttgctggcaatactccttgttttaaagtctactttgttcattaatacgcagttttctttctttctttttttttttttgagatgagggtctcaactctgttgcccaggctagaagtgagactgttcaaaaaaagatttaatgtaattattgaattactgatttagttgattcaagtccatcagcttgcaattttctatttgtaccaagtattaactgttcttcattttcctgccttttatgggcatcagttttgattgattccttggctttcgg

SEQ ID NO: 185647 - DNA, 500 bp, Homo sapiens
cggataatttttgtaattttagtagagatagggtttcaccatgttgcccagggtggtctcaaactcctgagctcaagtgatctgcccaccttggcctcgcaaagtgctgggattacaggcatgagtgactgtgcctggcttgtcattgctctataatgtacttttcattctaatacatttcacgtttatccttgcagcatttttgctttgagatgttatggcccactttttgtgggttaaaaatctggaccacacaggtcagttaaaggtgctgagatcagagtaagtccttatcacagtggatctggggctaactatggtttcctaagcttttgtcccttatagctttgcctgtgtagtagatgctcagcaaacacctgttaaacggattagaataaattatatactactgggttttcaccaagtccttaggtcatttttagactaaactttggcacctgcaattgaaacgatatggaaatcttgcaggaaagtgttga

SEQ ID NO: 185648 - DNA, 639 bp, Homo sapiens
gtcttcacctcacagtaaagaattaggtctgtctttattttcctcccactagcctcttgacaaaggacagtgtcttaatcaacttaagcagtatccagcaaatattgggaattacaaaatatttttgctgaattgaactgaatattcattcgcttctaaaatattgtgactgcttagagtctgcaagacagtttgacatgagaaattaatctaacatctttttaagcacactctgaatataaagaatgtattagagattatatagttacaccgttagcaaatcaaagtgtattagaatgaatttgtgccatgaattcatgtttcccctacccattttgaatagtgtattctaattttctccactgaagctgcattttgaaaatatattcacaaatataacttctgtataaaacaaaagtaaataggaaacagtgaaagcagcatagttattcaaactggaaaggtactgaataactctggttatactttttaatgaattaaatccaaagttaagaacttcttaccacaaaataatttaaaatttgacgatttacgtgtgtgtgtgtgtgtgtgtgtgcctatgcaattttgtcatgtttagctatgtataaccaccactggaactggtcactaccacat

SEQ ID NO: 185649 - DNA, 543 bp, Homo sapiens
agaataaaggccatctgggacagaggcagcgtaccttcttgattgctctcaaggcacaggtgaagacttactggggctagtgaaacagtaaaggaaaaaagcctctacccctggaagaggagcaagacacattcccgggccaaaaccattagaggtatcctactgttggtgggagggtctaaaattctcttgtacaaaacctgccaaagatagaaggcaaagttaactgtcatgggaaggaggagcaggagaaagagaggccacacagggtctgcttaagactgagcctggaccaggacaacagaaaaattaccgtacttccccaccaccagatcagcaagtaccaagtaacaaataatagaaatctactactgagagacaggcaagagcataaagagagatcccttctactgtgcgcacatgcaggaaggccaaaacatgggggcagaacaggaacatttcagggggtggggggactctccaagacccctgaataagtacagaataacaccaatggaatttgaaattagtaatgttagtaat

SEQ ID NO: 185650 - DNA, 254 bp, Homo sapiens
aactgtaggtcaggttgacatagaaaaggattattttaagtgacttttatgaaacccagtattttgactgcaaatattggatatttggacaaaaaccagaaaagaaattttaaaatgaattcagtattgctactaataatactggtattgttactttaacagcattaacaaacttattctatctgtctaaaacgcatacaatgcaatgcaaataattgctaatgtaatcaggaactaagattgttcagcataag

SEQ ID NO: 185651 - DNA, 469 bp, Homo sapiens
gagaaatttcttcaaataaccagggataagccagggcatttagaaaagagattttactttaaaccctcaattcttttgaaacaagggcaaggcaggcttggggcagggtagaaagaggagacccagttaatgtaattccagaagcaagttgcatttgccaagcagcttacacgtgggcttatgactgggttcctaggctgattatgataaaatgccagggtgatgtgctgggaagtgtgtgattcagcaaatagttgaccacaaaaggccacgcaaagacctttcagctaatgttctcaaagacacacccatcagacacactgactgactctctaatgtgtgtgtgtgtgtgtgtgagataagagttgagtgaaaccagaatggaagtgactattcctaatagcaaaccaaagaagttttgcttcatcttagatttagagtcaaacttctttggtttgctattaggaat

SEQ ID NO: 185652 - DNA, 261 bp, Homo sapiens
agcctggccctattacgcgtgaagaatggctgacttatgtgactgtgagagcacaaaaggccacgcaaagacctttcagctaatgttctcaaagacacacccatcagacacactgactgactctctaatgtgtgtgtgtgtgtgtgtgagataagagttgagtgaaaccagaatggaagtgactattcctaatagcaaaccaaagaagttttgcttcatcttagatttagagtcaaacttctttggtttgctattaggaat

SEQ ID NO: 185653 - DNA, 506 bp, Homo sapiens
ttccttccttctgggagtgtttgaatgaagattagactctccttgaccatgaatgaagagcaaccagttttttagtatacagtgatttagactctgggtctagagtgtagatatcacgggcactgtgaaagcacagaaggagaaaaggtttttattttggtggggctttgtgactgaattctggccaatggaaccacatggaggcctggcccagaacatctccctgtggattctctcatctggcaactggatgcctacacgaagggtgattttggagtcatgtgttggagatcacaaagcttttgtcagccaggttcctgaatgactgctagacaccatgggctgaactttacgagctccagcaccacctccagccttcagtgactgtctggagcaggcatccggatggaagagaagggggacaaccatgaacttggtgacccacggtcagcctgatttcccttgtggacacatttatgcccagtgtgcattcctcctgaggtctg

SEQ ID NO: 185654 - DNA, 584 bp, Homo sapiens
ttccttccttctgggagtgtttgaatgaagattagactctccttgaccatgaatgaagagcaaccagttttttagtatacagtgatttagactctgggtctagagtgtagatatcacgggcactgtgaaagcacagaaggagaaaaggtttttatgtgagtatatgggagaggaaatagtttattgtcataagctttttggctatggcctccattacatctctagcttttggaaggcactaaattgaggccattcaaatccatgtccacctatcctttgcccgtcacgagactgatggcttaggaagcatgtggtctaggtactagagagggagcctgacccacctacctcaccgctgctgctgaatttgtgcacaactctctgacctggttccatgtcacaaagggtttcattctctctgattccctgaatccccagctctagccgcagatcctggaaccctagcatatgcctgaagctgaatattttacttgccagagtaagagtttttacatagactctgtcatcttctactggccctcctcttaaactgaggcagcggctgctagctactcaccaaacct

SEQ ID NO: 185655 - DNA, 492 bp, Homo sapiens
ctaatgatgaggaaacattggagaaatccaaaccttggaacacgctacaaaacaactaactcgtactctgagaaacatatcagtggactggattccaaacagtggctcatgcctgtaattttaacactttgggaggccaagtttggtggggctttgtgactgaattctggccaatggaaccacatggaggcctggcccagaacatctccctgtggattctctcatctggcaactggatgcctacacgaagggtgattttggagtcatgtgttggagatcacaaagcttttgtcagccaggttcctgaatgactgctagacaccatgggctgaactttacgagctccagcaccacctccagccttcagtgactgtctggagcaggcatccggatggaagagaagggggacaaccatgaacttggtgacccacggtcagcctgatttcccttgtggacacatttatgcccagtgtgcattcctcctgaggtctg

SEQ ID NO: 185656 - DNA, 781 bp, Homo sapiens
aaattaaaggggattaaagaaacgtgacagctaaatgtgacatatgattctgaattggatcctgaaccacagaaaggatattagtgggcaactggcaaaatctgaataaagtttatagtttataaaaaaaaaacagacaaaaaacatgtagttagaccatattttctttcttttttttttttttttgagatggagtctcgctctgtcacccagggtggagtgcagtggcgccatctcggctcactgcaacctccgcttcccgggttcaagtgattctcctgcctcagcctcacaagtagctgggactacaggcgagcaccaccatgccctgttaatttttgtatttttaaaaatttttagtagagatggggtttcaccatattggccaggctggggttagaccatattttctaaccagctttctttgcagtttggtggggctttgtgactgaattctggccaatggaaccacatggaggcctggcccagaacatctccctgtggattctctcatctggcaactggatgcctacacgaagggtgattttggagtcatgtgttggagatcacaaagcttttgtcagccaggttcctgaatgactgctagacaccatgggctgaactttacgagctccagcaccacctccagccttcagtgactgtctggagcaggcatccggatggaagagaagggggacaaccatgaacttggtgacccacggtcagcctgatttcccttgtggacacatttatgcccagtgtgcattcctcctgaggtctg

SEQ ID NO: 185657 - DNA, 296 bp, Homo sapiens
ggaatggaatgagataacatctgaaagctgcaaaaactgacatgtagtaggcagcctataaactttagctttgctttgtctcattttaacttaagaaaaactaaaggtggaaagatttaaaaagttacaattgtcttaaccaagaatgtgacctaccttatattatcattccatagtaagaatccacaaaactttaggaatgaaatattcgttgtaggagggatctgtttagatcagtaattttcagtgcccttggactttccaaagtcacataagagagcacggacctagatttt

SEQ ID NO: 185658 - DNA, 333 bp, Homo sapiens
atagagaaaggcaatgtgaggagaactgaaggcccagacacatgagtgaaactggctgacagcatgtggaagcagagacgacccaccctcgctatgcccttggactcatggctcacagaagtgtaagcaatagaatgttgttgttagccattaagcttcggggtgccttattacatagcaatggattgctgacaattaaaaattggcaccttgaagcaggatggcgccataacaaacacctaaaacatgtggcattgactttaggaccagctggcaggtggaggctgggaggctgataaaaaggttggtggagacttgctagtgcagaggggg

SEQ ID NO: 185659 - DNA, 247 bp, Homo sapiens
gtggttttgcttcatgaaggggagcggattacttttccttgtgtaatggaaaattcggccttggcttttgagattgatttgaattttgatgtgtgttatagaatgcgttcatgtttctatgctgcaccagatgcctgtcttttccaaatgtggcaaaccctcagctgcatggggaaatcgaggtgagggtcctgttcttcacgcccatttcaaatgagttccttgccaggcgctgcttgagctaccc

SEQ ID NO: 185660 - DNA, 327 bp, Homo sapiens
gaataatgaaacagaaagcagagttctgtattagtattcttccatattctggtgaatatacatctatctctgtcaaaaggatatgatagtacccagctggctgggaactagaggatagctaaggagttccccgagccctcttcatcttagacaacatttcaaagtttatgttttccaaactatcctgtattagataattaataaacgcaactagatcaattatgttagaaaagttttgttttcggcttaattgttctgtttgaatctacgttttattttctggaaaaaaagttaaattagatatttagatctacaaatatggatttc

SEQ ID NO: 185661 - DNA, 547 bp, Homo sapiens
ccattctgcgaggaaaatggggatggggtgaaagttccaaccctaccttccggccacagagagagaatatcccctctcttaaacacacacagccacatccaactcacaaccacttccctccagcctctctgactcttcgatccctccctgccttcctcctcaatctatcatggcctaagcactccacttgaccctttaaattgaatttctcaggtagacaacgagtctgctttgcagatgagaggactggatagtatccaattcgacaggattccttatccagagaggataaggaacttgtccaaggtctcagtatttgtttatttaacaaactctagcaatagagcaggagcccatcacaaaacctagatgtgcttacgtttcaggcacgttctaagcacttgacaaatacaaattcatttaacccttataacagatcaatgtagatgctatttctagtttcccatttacagatcactgaggcgacttggcacagaaacagatctggctctgtcccacactcagctatttgtgccttacagcccct

SEQ ID NO: 185662 - DNA, 528 bp, Homo sapiens
tcctgggacaaccatgtttggttccaggaaaccacagatttccaggctaaggcaatcgatccttattttccaagattttgtagtactggagatttattactaattctgttttactgcattcttttggcataaaatctctgtgatcttgcccctctctgtctccagtctcatctcttgccacacagtctctcttacctgcctggtccttaatgtcttagttggactgggtggcttataaacaacagaaatttatttctcactgttctggaggcagcaaagtccaagataaggcaccagcagatttggtgtctggtggggacatgcttcttcacggatggtgccttttgctgtgtccttacatggtggaaggagcaagctaaccctcctttgtaagggcactaatcctgttcctgagggctctacccttctgtcctaatcacttcctaaaggccccacctcctaataccatcaccttggggtttactattttaatatatgaatatgagagtgggcacaaacattcagtcc

SEQ ID NO: 185663 - DNA, 546 bp, Homo sapiens
tagaggatccccgtgacgcttgcatgttcggtttccagtggatcccagcagtatttccatggtgctaaggcaatcgatccttattttccaagattttgtagtactggagatttattactaattctgttttactgcattcttttggcataaaatctctgtgatcttgcccctctctgtctccagtctcatctcttgccacacagtctctcttacctgcctggtccttaatgtcttagttggactgggtggcttataaacaacagaaatttatttctcactgttctggaggcagcaaagtccaagataaggcaccagcagatttggtgtctggtggggacatgcttcttcacggatggtgccttttgctgtgtccttacatggtggaaggagcaagctaaccctcctttgtaagggcactaatcctgttcctgagggctctacccttctgtcctaatcacttcctaaaggccccacctcctaataccatcaccttggggtttactattttaatatatgaatatgagagtgggcacaaacattcagtcc

SEQ ID NO: 185664 - DNA, 310 bp, Homo sapiens
gctgcttttacgaggaaggcacaaaaattcttaaaacaggatttgagcaaaatatcaattctgttcagcttgaatgaaatctaccatatcaccctatgaggaggcatggagcagaagtggtgaatcctccaaggcactgatgagaatcacagcttcatgcacagccagctccccagccctcagcctcccctcctcctgctcccatctcctcttgtctgggagtacctcccacacaaggtcttctccacgctgaaatccaatgccctcaggggcttctgggctgcatgcccatctggactcagagctgaat

SEQ ID NO: 185665 - DNA, 178 bp, Homo sapiens
aagccatcagacaatgttaaatttacaatgtgctgcttgtttgtattaataataagtagattttaaaccttgtctgttgaatggaacactgcacttcaaacagttgcaaaagaaaacaggcaaaatgttttctttgtatgtaataagagtaggtttgggtaataaaagaagtatttgg

SEQ ID NO: 185666 - DNA, 173 bp, Homo sapiens
agccctcactgttgtgagccagccaacaacacactcaagccccagccactgagtgtgtcacagggctgggcgcagtcccattctgagacagaaagatgagaagaaacatttgctgagggatccttgcaaagcagctgattggttctcaaggagcaatttaacaagactgtgtt

SEQ ID NO: 185667 - DNA, 270 bp, Homo sapiens
atcttcaagatttctccctcagtcttctgactgaggaacctcggctgattattctctgactaatttacagtcgaatcttggaatttcctggacatttcctttgcctctctttaatgttagaacccgtaattcctttaatggctaacttcctcattttgttggagccgatcctccagtatctatatttttttctctttggagatggggtctcagttacccaagctggagcgtagtggcacaatcatagctcactgcagccgccatctccgg

SEQ ID NO: 185668 - DNA, 467 bp, Homo sapiens
ggttgttcccactttgttgccattatgaataatgctgctataagcattcatgtacaagtgtttctgtgaacatattttcattttgcatgaatatatacataggtctgggactgctcagtgctgtggtgtgaatgtattcccccaaaagttcatgttagaaacttggtcctcaacacagcagtgttgagatgtgggaccttggggaagtgagtaagtcatgagaattctgccctcatgaatagattaacccactcatagattagtggattaatgggttagttttcatgagagtggatctgttataaaaacctgtttggccctctcaccatgtgatgccctgtcccacctcagcactctatggagagtcctcactgtctaaaagagcctcaccagatgtgatccctcaatcttggacttcccagcctccagaattataagaaataaatttcttttctttgtaaattacc

SEQ ID NO: 185669 - DNA, 243 bp, Homo sapiens
aactgttaagaataaatgtttgttctttataagccaacaagtttgtgatatttttgttatagcaccccaaatgaactgaaagaatgcaatcttccaacactgtttgacatagctataagatttgttggtagatgtccttcataaggttgaaaaagttttcttctacttctagtgtgttcctcatgagagttcttgtcataaatggatgctgcataatgtcaaattctgttttctgtatcaact

SEQ ID NO: 185670 - DNA, 614 bp, Homo sapiens
cttgcgattccgcctgccattagcttgctaaccaaaggaatgtttaaactattcacttttgattctgaccaaaaaaatattatggaaaatgactggttttcagtgtgttaaatctgaaccttggaatggctaattattatattgtttccacaatttgggcaactgtgctgaggtggatatattttcacatattttttttgtgtactccaaaaacattataatggtattttagctaaagaaagaaatcaatctggacatttaccaaaaatatcccatttttaccagaaaccccctaaactctctgactttttgtcatgattacctatgtaaattccaagaagaaaggattccaaactaaacgattttatttactataggacttttcagatatgtattgtatatctccaagaagatgaagaacacagcattatttgcacattgtgcaggattagtgttttatagatcgtattttggcaaattcagctctagttatagtttaggagcatcaaaaaatgtgttggtctgctctgaaattttctttataacgtgtgctatggagcatgcaatgggagcacaggtctggaaatgacagtgatatcacttatttgtcaaag

SEQ ID NO: 185671 - DNA, 123 bp, Homo sapiens
ggaagaggaaaggaaggaagaaatgatgaaaggaaggaaggaaagaaaggagagggacagaaagaaaaaaagaaaagaagaaggaagcaaaaaaggcctcaaccaaagattctgagtcaccgt

SEQ ID NO: 185672 - DNA, 380 bp, Homo sapiens
ttttttgcaagcataaagtcacagcatgcacatttatcaaacttttctcttgcccatgtcttcccaacaagcaagcaacttcccagctgagttggctgctgaaacgccaaattaacatgcagtaaaggccagacattgtggctcacttgtactttctgaggatcgccaagtgatgtcaatgcacaaccaagtttgagaaccactactttaacttaccaatacccttattctagcttaaataaggtgttctgccaaacttccacggagagaaaaaaaacaaggaagggaagtcaggttcctgagcaaaccctcaaccaagacaggtcttgagactagtgagatgtgttatttaaaagcaccatcagtcacacgttagtgtc

SEQ ID NO: 185673 - DNA, 440 bp, Homo sapiens
taccagcggacgcatcagtaaacatcaaaaccagcatgactgaggttgtcctttcatggtggtgatacttcttgaaacaatatcttgttgaaaacaaactaatacattcaaaataatatgagtttcttttcagccgggaattgtgtagcattcatgcaacgccctccaccagtagcgatgggccacgtgcccacaggacaccatatggatagctcacggtgtcctctgagcttctacattacctcattttagcctcaccacaaccctaaggaggtaggcacagtaatttttcccattttgcagaggaggaaactgaggctttcagacttataaaacttgcttaacagcctgtgtgggacctcaattctaattccagaaccaagctcctaactgctaccctatgtgcctcctaagcacacagtgaatgcgtccgtcgaagt

SEQ ID NO: 185674 - DNA, 374 bp, Homo sapiens
gaggctgcactcaggccccctctggtgcttctcctgctcagcccttagcagctcaccgactgggccgcagggtccatctaaaggcttgaatgcgcctccagttgactcctcagccctccagctctccatgattctgcccacccacagttccactccacgatacctgcctttcttacacggtcacccatatgctgcttctcttcattcacccgttaagtctctgtgcacccctggtagcaagcgtaatgagacaggagggactcgacgccctcagaggctgccgtgtgtgaggaggggcgggtgcgtagacgaagagatcattgacggtgggggatggattctgtattaaaggtttgcacggggcgccttgggat

SEQ ID NO: 185675 - DNA, 228 bp, Homo sapiens
tggattataggtgtgagccaccacacctggctgccttattctttttaagtggccagaaaaaaaataaattaaggatgtgtagagatcaagcctgtgagaaaatagaaattaactccacttgtttagatttagatcattttattgtagatattcttgtcactgagtgcccaaggaatggatattggaaagctatagctgtccttaacttcagtgtcaaagagtaggaat

SEQ ID NO: 185676 - DNA, 103 bp, Homo sapiens
tgattcattgtgagaagaggaaaaataagctcaggatgggattatgtagttaagggaggtgagaaaacagagactctttgagttccttctgaaagcaaaagat

SEQ ID NO: 185677 - DNA, 443 bp, Homo sapiens
ggagtttgacaaccactggtacaggcgatgatgaactacagaatatctggagggtaaacagggatggggaaggggggtggttaggcagagatgttgctggagggatgcatagaaggcatatgcagaaaaactttgtatattatgagaaaagttttggatcttatctggagaataatgaagagccattacattattatattatgaatacgaaacacacaaaataactatttaaaaatatatgtgatcataaagatactcctttatatcattccagatatttaaaaactcattcctgtgcagaaaagttttggattttatctggagaataatgatgaaccattacattattatattattaacacaaaacacacaaaataactatttaaaaatatatgcaatcataaagatatttctttatatcattccagagatctaaaaactca

SEQ ID NO: 185678 - DNA, 434 bp, Homo sapiens
ctgaatgcctgggctggcaatcaggcatgttggagtttgagtcccagtctgccactccagctctgtgaccaagaggaagtgaagtcatgtaccctttctaagtctctagcccctcttctgaaagacgaagatgccaccaccaaccatgttagtggttgtgaatgccaagaaagtccatgtgaagcacatagcatagtgtctgccatgcgttaagtgttccaaaaatggaagctatgactatttcacagagtacacttcccatcacttttcagttcattttggccttctccctcaaaagcactccagtgttctgatccagctgataaaacaccaaacattcacatagtgctttaaaagtgacccactgtttttacagactgcattacatatgaccctaacaaccactgcaatatagaaattcgcatctccattct

SEQ ID NO: 185679 - DNA, 285 bp, Homo sapiens
cagcaatgcttcacagtgccgtaggaagagcactggactatgtatgtctgtctatctgtgtcttcctgaacaggttatcatttcacttttctgagcttcaggtttcttgttcgtcccaaacatttcttaagtatctgtcagatgtctgatactatgcttgggtgtaaagttacaaaaatggctcctaaagagcttacagtttagtgacagacaattctaaaattatgtggtaagtgcttgggtatagggaattatgtggtactttgagaaaagaggagttgtagg

SEQ ID NO: 185680 - DNA, 791 bp, Homo sapiens
accgcgcccggcaaggtatagtcttaacatttacctcaacacctatgtctctattttaacttaattgcataatactgaaaaaaatcttgatgcacacaaagtaagtggctacagtggtaacggtttgctttgcaatctcagggaaattttcacttaaacagaaacagcatgagaaactttgttctaacatctatataaagacaaactaatgtgctgacctgaaccgtgttaatatttaaatcagacaacagttaaaatgggccccttttactgtctctaattatccctcaaaaaagttgattaaaaattaatacctatgtgcatactgccctaccatttaaaaaataagaaaagtcggtggtttatgcctgtaatcccagcactttgggaggccgaggcgggcagatcacgaggtcaggagatcgagaccatcctggccaacacggtgaaaccctgtctctactaaaaataaaaaaattagccaggtgtggtggcgcacacctgtaatcccagctcctcaggaggctgaggcaggagaattgcttgaaccaggaggcagaggttgcagtgagccgagatagcgtgactgcactccagcctgggcgagagagtgagactccatctcaaaaaaaaagaaaattcttcttcaaaacagtgaaaatagaaaacacactagcagggtgtttataccattgaatatcctgcagcactgttgtgggcactacaccagagataggacacaatgtggtgatggggtgagcaaattgagatgagggtatcggaatggacac

SEQ ID NO: 185681 - DNA, 257 bp, Homo sapiens
acttcccaatcgccacgacaaggagcagcggagtagagatgcaatcttgtgtgcctgtgtctctagtgttcagactcttcttgcacaatggacataggctggtttcctgcagctgactaacatggaggagctccagctgtgtcagccatgacagagttgttattgcttcactgagtaagcacccagcgcgcaagctgaggcgggctgtttcatagacgggctcggatcatttaccctggcttccctcccacttggct

SEQ ID NO: 185682 - DNA, 438 bp, Homo sapiens
gtggctctgaccaaatctagctcagggggtgacatctgttgtctcatcgacagcactggagctcccacggagaagtaggtctaacaaagtcctaccttgctcgcatttcacaggcagacatcccttgctcaggggtaaaatctctcagtgttgacattgaagaaggcaagagggctgggttggggttcatctcagctcagagtctagaagtgactcagagatgctgctggtctgagagttttaatatgagccttgggatacaatacagggatgcagatgggaattgtattctctatgtcagtaacgaaccatcagtaattgaaaagtcaatacattgagaatagcataaagcatgaaatactttaggataagtatgacaaaaattgttgttttacacactagaagtcctaaaacattgtttagacgcaggtcttaaag

SEQ ID NO: 185683 - DNA, 473 bp, Homo sapiens
actcccctctctcattgcgtatgccgagatggaaaaattggaccacctaaactggatatcagaaaggaggagaagcaaatcatgattgacatatttcacccttcagtttttgtaaatggagacgagcaggaagtcgattatgatcccgaaactacctgttacattagggtgtacaatgcgcatgagagatggctcgtggtgttaagaagcagaagaagcctctggtgggaaaaaaggcagcagctaccaagaaaccagcccccgaagagccacccgaagcgggcgccttgggatacaatacagggatgcagatgggaattgtattctctatgtcagtaacgaaccatcagtaattgaaaagtcaatacattgagaatagcataaagcatgaaatactttaggataagtatgacaaaaattgttgttttacacactagaagtcctaaaacattgtttagacgcaggtcttaaag

SEQ ID NO: 185684 - DNA, 350 bp, Homo sapiens
aacctagccccaagtcccctgagtgtaattagcttccacaatttaatttaatgcagagaacagttactgagcatttataagcttctgtcctggtaatacacaaagagcctacatgagcagatacatttcttcttttttttttttttttttttgagacggagtcttgctctgttgcccagatgggagcgctttccattccccgttccctttccagcctccagaaactccacgaggctcctggacttgattctgcttctcttgggaggtgctgagtgggtgtctctccctgagctgcactgacacctgttgaaggctctgacggcctcagtccacgaaggcccatggcaggg

SEQ ID NO: 185685 - DNA, 287 bp, Homo sapiens
ggtgcacacctgtagtccaagctactcaggagaccgaggcaggaggattgcttgagtccatgagtttcaggttacactgagtccagtgagctataattgcaccactatactccagcctgggttacagaaaaagaccctgtctcaaaagaaaaaaagaaaaagcacaaagaagtgaagtgacttctccaaggtcccagttaatacaaatcaggagcgcttagctcctgttagagagcctaacagttagaaaacagtgttagaattcacaaagagctgccaaagtaaaa

SEQ ID NO: 185686 - DNA, 213 bp, Homo sapiens
cagaatattaattatctgcaactaattaggtgttaagattgagaagcattaagtgatgaggtggaaggctgcatgagtcatttagctagactgatgagagtgggtggagggagctggatgcaggctcagctctgttcctccgtgggccccctcgtgggtcgaggtcccgtgtggctaagtctccttgtcttttgcatgctcggcgccgcccag

SEQ ID NO: 185687 - DNA, 472 bp, Homo sapiens
tggcaagtggccatctctgcaaagagctagatttcctccctctgtcagcttcaggtaatggaaggattatttccctgttcccacaatgcacgtggccccggggttattgcaccaaggagacctttaaggacaatccatacacctctgcctttcggcctcagagcaggatgcaggctgtgtgttcggatagaaacgactgtcccccaaagagagggctgaggtaagaaaagaaagtttcccccattttccaaaatatcccgggagtctgttgggagtgctggacacagcaggccagcaaagcatcacctgatcttgcctcggtgcccatcattccctcctccagctccttggtccacacacctttctcttccatctccagaggcctgctctaggtgcacaccggcccctctgcaaatccccggctggccgaacggtgccctggcagacaaatggctctcaatagtttatgctg

SEQ ID NO: 185688 - DNA, 208 bp, Homo sapiens
ctatcagaattctagaactctcccagagaaaccaggcagatactgctccacaccggtgagctgcttctcacctgggtagtctagggtggtttgctccagaattgtatttctgctttttctttttttaacttggcagtggttaaccattccctggagcagcaccaggtaagtcagcttgtatcagagtcatctgctttacctgacatga

SEQ ID NO: 185689 - DNA, 375 bp, Homo sapiens
acctggggattcttatccctctgtctttgcttcttatgtaatacgtctgtggactattttggaaacatctagatgaacttgtgatcgatcttcccattctatgtatttctcctggttccctgcttttctatcatctcctttgggagggaatatttttcctcattaactagtttccaggtcaaaatttctccatgaagtatgaacttttctctatcccagtatttaatttccaccacttttttttttaaaaaataacataaggctgaaactttttaattgggcaggttacttaattgctatgtggctctattttctcatctgtgaaaagcaggtttactgagaagactggcctatcacggggattcatgtgaggct

SEQ ID NO: 185690 - DNA, 211 bp, Homo sapiens
cagttgtctcctgttcgtctacttcccctgggatcctgaagattctggatggcaggaacgagctcttatttgactattttcacccctggccatgtgctcagcacatcagcacgtgctcgatggatgtgcaggtgcacatttgctttctgttgttggaaaatctcgaacctcatttctaaaatatcagttttcccgagaaaaaccttaatga

SEQ ID NO: 185691 - DNA, 614 bp, Homo sapiens
ggttttgccatcttgcccaaactggttttgaactcctgggctcaaacgatctgcccacctcagcttcccaaagtgctgggattacaggtatgaaccactgcatgcagcccattactaactattaacaggagtgttggagaggtatgaatagaatcctttacaaattcttataaagatgggaaatgaagtgagtacagactaagaagggaaaaagcaaaaagatattgcggatactggtttgcaaagtaagataacaaatatttattgaatacttaaaagccaggtgttgtggtaggaacacacacacacacccctttcttcatcctcacaacaaccaaaaagagtaaatattatagtcctcattttatagaagaaattgaagctcagaattgttcatatagctgacagtgaacagagtcaagactcaaacacagaatttctgattctaaaatatagtttaacatatttgaaatataatttttgatcagcagttatatacagttggactataaatgaatgtttttatgcaaaggtaatgcatattaggcactatttcacagttcccctgggtttgagttatttgaagatggccagaagggattttcacttccaac

SEQ ID NO: 185692 - DNA, 272 bp, Homo sapiens
ggaagttgcagtaagccaagatagcaccactgtactctaacctgggcgacagagtgagactctgtcttaaaaaataataaataagaaagatgcactactctcactataactagagttgaggagacaggctcagggacatccaagtgttcagggcaaggtcaggtagctaatcaatggtggagctagactttgaattagggtcattggctctaagttccaggcttttctcattttgacacttttttctgtctataggacaaatgctggagaca

SEQ ID NO: 185693 - DNA, 506 bp, Homo sapiens
attattcattttcccacaacccacttttatctgtttaacatctttcttcagaacacatcacagtcttcacactgtagggataccttccctgagtccctgggttatccagccttgcctccaaattcaattccttctaccacaaactctcacaggacctgtaccactctgtcatagcaattctccaattatcttttatcaatttgtgcaatgcagtcttctccacacatataaactccatgaagacaggaatcacgtttctttttactcatcacattactcacagtgcctagcaaaatttctaggaagagaagagctaaaatacctgcttaatcaataaagaatgcaaaaccagacaatttatatttcataaatatttattcaattatattaatggtcaataagcattgaactcacctagttattctagggaatgaattactattatctaaacctgatttccattccaacaatttgagaataattttttcctttgttttatggattag

SEQ ID NO: 185694 - DNA, 320 bp, Homo sapiens
tcttcctagccccatgtccttccttaattcatatacatgctagaacaacggggaaaaaaatgctctttttcgtctgagtctgttttgtgaagacaataaaaagcattaacagcagtaaacagatatgatctgaaataacagtatgcataaatttcttaacaaggtttacccccctccggtatttcacccagagagagttcattcacccattcgagctgattttctcatttaacatatggctagtagcagtatagagaaaactaattgtccgtttatgattttgtgaaaatatggccatagttaccctaaacctcaagagc

SEQ ID NO: 185695 - DNA, 272 bp, Homo sapiens
atcacttccgaggttcgtggactagagagaatcagcactggactaaatactggatgtaggaaagctggctagggtggggggaaaagcctgctggaaagcagtgagaattctcctaattaagtagttagggcctagctgcggaaggccttaacctttttatgcctagtattccattactggaacgctaagggcgtgggagttacttttatccgactgctcaagtcattgccaaggtctgatttttcacaaaaaaagatttgcaacctctggca

SEQ ID NO: 185696 - DNA, 507 bp, Homo sapiens
ctttttcttccaaaacttgtttgaaaagcactgtcacctgttaagagtatggggaggagagtgggcattataaatgtgaagaggggtggataaagtctgaaatagtccttgtggaaaatgggggactcaactgaattgacctagacaggctatgaggaagcctaaatgtcataacattaatgaagattttcttgtcatctttccagcagctgtcagcctttaccttctcccactctgaggtagaactaatctttaatgtcttcttcccttgaaataccacagcacatttttcatatcatgatagagatcatctcgctgtattaaaccatctgttagcatgtcttgttcgtaatgatagactatgaaatgaacaagaccatttctgatgccttcatttgtctttgtacttcaatagtttagcaaataaagaaaaaaatgtaattattaggcaaaaataatgataaaaataacagtaacaatttttaaaaataaaagttattgaccatt

SEQ ID NO: 185697 - DNA, 290 bp, Homo sapiens
aggcccagggctgggtcctcaggacttgcacaggtagcttcaaggagacaacagaacggatgtccatccctcccacaggcagtggagagagaaaagagagggagcgagaagtcagcgagaattgctgctgctggcagaccaggccaggccagaccacagcttgaacaactgaaggagaccccaggcctaagctctttgctaaagcagggactctctaaccatgggaccatctgtcccagagccatggagccatgtattacagtgcaagttctcgggcttcagtgagggcc

SEQ ID NO: 185698 - DNA, 138 bp, Homo sapiens
ataaatttgatgccttagatgaaattggaaaattccttccaagatacaagctaccaaagctcagatgaagagaaacagaaaatctgagtagtcctatatctatttaataacctgaagttttttttttttttttttttt

SEQ ID NO: 185699 - DNA, 701 bp, Homo sapiens
  misc_feature (1)..(1): n is a, c, g, or t
ngaggtctagaggacccgaaaatgacatagaggcgggtggcatagtacagcatagtgttcactgcatgtgggcatatgacataggggtgtatgtttgtgtgtgtgtaattggcttaataagcaccaccttcttcagtaacatgaccaagaacacacatctgggaagtgggtgtgcttggatttgagctcatgtttgactagctttcaaacctatcttttcgtcgctctaggactgttgcaacgtttgttgtcgagaaaagaatacttgggccgttccctttcattttccctttggcgcatttatgtgtgctgccatgtggggacacccttgaagttagctgaattggcttcctctggtatctccaaccttttgtcacagagagttgaaaggaaaggtaaattcttttgtcctaaatgaatcatcagctggaagaaaagtctgaactctagccctctattatattccccagccagggatgactttgggcaaattggtgtccctccagttccctgggaaggcacttgactcaacaggcctctttccatttaaataccacaggtaacacttggcttcctctgagaaagctttcaagtcctgcccctttgcttacagctggctggcattctgtgtacccactacggcactaggatgagaccggccataaaatatttgctctatgcttttatcactgcctggaaat

SEQ ID NO: 185700 - DNA, 296 bp, Homo sapiens
ctccccagcccgacaaccactcatctttttactgtctccatagtttcgcctttttcagaatgtcatagagttggaattgtgcagtacgtaacttttcagattggcccaaagtgataacttcacatccttcttttccagttcaaatgttgcctttttcaaaaccactcatggcctgccccgccctcatcctgtgcccataaaaaccgcaggctccactaacagagtagaagagggtgggggctttagttctgtctctagagcaaagcccacagttattggttaatgaatgcgttaag

SEQ ID NO: 185701 - DNA, 118 bp, Homo sapiens
aacaccatagattactctgtttcttcactttatggaaatataatcatatattatgtgtgcttttgtgttcggcttcttttgttcagcattatgcttgtggaattcatctatgccgttg

SEQ ID NO: 185702 - DNA, 464 bp, Homo sapiens
agaggctattcactatgttggtctcttgaaccattattgtgaagtatgttttatgccccatagtttgtatgtaacaataaatttgtgatatttatgttctaagatcttagaaaacaccttaagatctttgcatcttctatagttttatatttatatttagttacttgtatgaaaacacataaccaacttgtttaaaacactgtacagcttcaaagtaacttttgctttttgctatcttttgcaaacttatttgtacttcagatcattttttttttcctttgaaaagccttgcagtgagagaatttctttgtttggatgatccaccgggtccatttgatagcctagaagaaagcaggcgaggtggctcatgcctgtaatcccagcactttgggaggccaaggcgggcggaccatgaggtcaggagatcgagaccatcctggctaacacggtgaaacccgtctcta

SEQ ID NO: 185703 - DNA, 3566 bp, Homo sapiens
tgtgcgtctgggaggcgctgggcgcgcaccggtcagcggaggcgggagagtctgtgatcccagggagctgcgggtctcgccgcctgcagtgcggaagacccgtgaccggcgcagaccccggccttaccttccgagggtcgaactgtgcctggtatttgcctctttcctcccgcccacggggttgctcagagtcgggccacctcacctgaggttttccagagtgagaatgaactgagcgtcctgggagcaactccgcatcaggtactgtcaagatgataagcatggaataaagcttcagaagggtctttaccaatctttctcctaccaacttttacatacatgaaatcaggttaaaatgaactttacagaaatacttcacaagggaataaagtagaggaaaaagggataacatgtaacatggagtcaaggaaaaagagtgtgaagtagttttgctctctctatcttgcaaataggagtccttaaagacaactgggagaaggggtttgagatagtgaattcctaagaagaaaataatggattgcatattagttgttctctaagtggactcaacagtgtgcaagcttgttggaaaagccaaaagaagatggcaactccttatgtcccagttcctatgcccataggaaactctgcttccagttttacaacaaacagaaatcaaagaagttcttcttttggcagtgtctcaacaagctcaaattcttctaagggccagttagaagactcaaatatgggtaattttaaacagacaagtgttcctgatcaaatggataatacttcatctgtctgtagcagtcccctcattaggactaaatttacaggtacagcttcttccattgagtattctactagaccaagagacactgaagaacaaaatccggaaacagtgaattgggaagatagaccatctacacctactatactgggttatgaagtgatggaagaaagagctaaatttactgtatataaaatactagtaaagaaaaccccagaagaaagctgggtagttttcagaagatacactgacttctctaggcttaatgacaaattaaaagagatgtttccaggttttcgactagcacttcctccaaaacgctggtttaaagataattacaatgctgactttttagaagacagacaattaggattacaagcgtttcttcaaaatttagtagctcacaaggacattgctaactgccttgcagtgagagaatttctttgtttggatgatccaccgggtccatttgatagcctagaagaaagcagggcattctgtgaaactttagaagagacaaactaccgcttacagaaagaactacttgaaaaacaaaaggagatggaatcactaaagaaactgctcagtgagaagcaacttcatatagacactttagagaacagaatcagaacattgtctttagaacctgaagaatcactggatgtgtcagaaacagaaggtgaacagatcctaaaggtggagtcctctgcacttgaggttgatcaagatgtcctggatgaagaatctagagctgataataaaccatgcttaagttttagtgaacctgaaaatgctgtatcagagatagaagtagcagaagtggcatatgatgctgaagaagactaatgtatcacaagcagttccctccatttagactattcaaaaatttagaagagtggcaaatactattttaaaagaagaaccaagaactgtaaaacatatagaaaagagcaagaatgcacatgtataaagtttacataaagaagtttttttaagttattgagataggaaatatattcactgctgcttttaattgtattttatccaattacatttaatacactaaaaaaaatcttgttggaattctgttatcaaggcccacattcttaaatactgtgcataaattattatggtgttttgcctatatattgctccaaactactgtgtatatatgtatgtgtgttaaatcaccaattatattaatcaaatggaaattaattgcatgttactatctgggtgatatattcttctttatatctctgacatgacatattttcattaatagtttaaatcagtgaccatcataataaagataaaatttagttgagtttttaatgtttacatgtttacatctctaaataaaatttgcttatttgaaatgttaatgctctttagaaaaatgactttctagtaccaaaggaaaactacttgaaagagctgtaatcatatagctaaagtgataagatagccttgattttaaaagctgattcattaatatcaaaatactttaataagtgtcacagttattaatatgttacatttgtttagtttccacgtaatctttatctctacctagatttagtgagtttgcctctttcagaatactacctccttttgttaaggcatattctttcgaaaatatagattctaaataaataggggcttatacaaaaaagaaaataaaaagccatatatactgcaaagttcctaactggcttgactcctgacattgcatttttatttctatttgtgtgaagatgttgttatactgtattatggctgattttctttttaatatatttagccaagtgatgcactttatgataattaaactcttttgtgccaagtttaattggtggatttttttagtaagtagagttaggagaaagaattatgtagtgcctttactatttcactttctacaaaagtctcctagggtctttgagtcagctttatgaaaaaatgtttgtttatttcagctttgtgtacagtcattaaaagtgccttgtttcatttttataggatgaagttatttattttctattttcactgttttgcatattgctgttaataagcattgtaatcatgctggcattttgcaatcccagtcggtatgctttctaaaaactgagggaaacttactggggaaatagaataacaatctccatttttttctttactatctaaaagtttatcggtatcttgatgtatatatatattaaggtgtggctgtttaaaattctaatgacatatatcaacacattcaatggctgttgttaacctttgaagtaaaaaggagatcactttttaccaaataaccaaaaatttttagtctttgtcaaagtgcacaggtatgttctcagaacatttttcacaatgtgtatcagaaatatgtttgctatccttagagacagaaatgaatataacaaattgatctgcttatttattaaaattattattctagacttacaaaaggcttaaaaagaacaatcatttaatcagtaccattctgtatcttatataacagatctttgccaaattctagatattatagtgttgcctgtctgttctaaagcgaaccagccactttttcaatctggctttttggaagattgtatttaaagttcttcaaggatgaagaaaaaaatctgttaattaggtaaaccactattatttatatttataatttacttttttttacttttataatgcattttactcccagtattatgttcatttaataaattattttttcactacaaaaaaaactgtg

SEQ ID NO: 185704 - DNA, 3479 bp, Homo sapiens
tgtgcgtctgggaggcgctgggcgcgcaccggtcagcggaggcgggagagtctgtgatcccagggagctgcgggtctcgccgcctgcagtgcggaagacccgtgaccggcgcagaccccggccttaccttccgagggtcgaactgtgcctggtatttgcctctttcctcccgcccacggggttgctcagagtcgggccacctcacctgaggttttccagagtgagaatgaactgagcgtcctgggagcaactccgcatcaggtactgtcaagatgataagcatggaataaagcttcagaagggtctttaccaatctttctcctaccaacttttacatacatgaaatcaggttaaaatgaactttacagaaatacttcacaagggaataaagtagaggaaaaagggataacatgtaacatggagtcaaggaaaaagagtgtgaagtagttttgctctctctatcttgcaaataggagtccttaaagacaactgggagaaggggtttgagatagtgaattcctaagaagaaaataatggattgcatattagttgttctctaagtggactcaacagtgtgcaagcttgttggaaaagccaaaagaagatggcaactccttatgtcccagttcctatgcccataggaaactctgcttccagttttacaacaaacagaaatcaaagaagttcttcttttggcagtgtctcaacaagctcaaattcttctaagggccagttagaagactcaaatatgggtaattttaaacagacaagtgttcctgatcaaatggataatacttcatctgtctgtagcagtcccctcattaggactaaatttacaggtacagcttcttccattgagtattctactagaccaagagacactgaagaacaaaatccggaaacagtgaattgggaagatagaccatctacacctactatactgggttatgaagtgatggaagaaagagctaaatttactttaaaagagatgtttccaggttttcgactagcacttcctccaaaacgctggtttaaagataattacaatgctgactttttagaagacagacaattaggattacaagcgtttcttcaaaatttagtagctcacaaggacattgctaactgccttgcagtgagagaatttctttgtttggatgatccaccgggtccatttgatagcctagaagaaagcagggcattctgtgaaactttagaagagacaaactaccgcttacagaaagaactacttgaaaaacaaaaggagatggaatcactaaagaaactgctcagtgagaagcaacttcatatagacactttagagaacagaatcagaacattgtctttagaacctgaagaatcactggatgtgtcagaaacagaaggtgaacagatcctaaaggtggagtcctctgcacttgaggttgatcaagatgtcctggatgaagaatctagagctgataataaaccatgcttaagttttagtgaacctgaaaatgctgtatcagagatagaagtagcagaagtggcatatgatgctgaagaagactaatgtatcacaagcagttccctccatttagactattcaaaaatttagaagagtggcaaatactattttaaaagaagaaccaagaactgtaaaacatatagaaaagagcaagaatgcacatgtataaagtttacataaagaagtttttttaagttattgagataggaaatatattcactgctgcttttaattgtattttatccaattacatttaatacactaaaaaaaatcttgttggaattctgttatcaaggcccacattcttaaatactgtgcataaattattatggtgttttgcctatatattgctccaaactactgtgtatatatgtatgtgtgttaaatcaccaattatattaatcaaatggaaattaattgcatgttactatctgggtgatatattcttctttatatctctgacatgacatattttcattaatagtttaaatcagtgaccatcataataaagataaaatttagttgagtttttaatgtttacatgtttacatctctaaataaaatttgcttatttgaaatgttaatgctctttagaaaaatgactttctagtaccaaaggaaaactacttgaaagagctgtaatcatatagctaaagtgataagatagccttgattttaaaagctgattcattaatatcaaaatactttaataagtgtcacagttattaatatgttacatttgtttagtttccacgtaatctttatctctacctagatttagtgagtttgcctctttcagaatactacctccttttgttaaggcatattctttcgaaaatatagattctaaataaataggggcttatacaaaaaagaaaataaaaagccatatatactgcaaagttcctaactggcttgactcctgacattgcatttttatttctatttgtgtgaagatgttgttatactgtattatggctgattttctttttaatatatttagccaagtgatgcactttatgataattaaactcttttgtgccaagtttaattggtggatttttttagtaagtagagttaggagaaagaattatgtagtgcctttactatttcactttctacaaaagtctcctagggtctttgagtcagctttatgaaaaaatgtttgtttatttcagctttgtgtacagtcattaaaagtgccttgtttcatttttataggatgaagttatttattttctattttcactgttttgcatattgctgttaataagcattgtaatcatgctggcattttgcaatcccagtcggtatgctttctaaaaactgagggaaacttactggggaaatagaataacaatctccatttttttctttactatctaaaagtttatcggtatcttgatgtatatatatattaaggtgtggctgtttaaaattctaatgacatatatcaacacattcaatggctgttgttaacctttgaagtaaaaaggagatcactttttaccaaataaccaaaaatttttagtctttgtcaaagtgcacaggtatgttctcagaacatttttcacaatgtgtatcagaaatatgtttgctatccttagagacagaaatgaatataacaaattgatctgcttatttattaaaattattattctagacttacaaaaggcttaaaaagaacaatcatttaatcagtaccattctgtatcttatataacagatctttgccaaattctagatattatagtgttgcctgtctgttctaaagcgaaccagccactttttcaatctggctttttggaagattgtatttaaagttcttcaaggatgaagaaaaaaatctgttaattaggtaaaccactattatttatatttataatttacttttttttacttttataatgcattttactcccagtattatgttcatttaataaattattttttcactacaaaaaaaactgtg

SEQ ID NO: 185705 - DNA, 3400 bp, Homo sapiens
acacagcagggatcttgggcccgggcagagactggctgaggcggggagcagctgcttttggggcgggggtgtcacgtgaggcttctcgctgctgagggaggaggcgaaaagctgcggttaaggagagtccggtttaaccgtcaccgggaagcgcgctcgttcgggatcgccgagtgggctgagtactgtcaagatgataagcatggaataaagcttcagaagggtctttaccaatctttctcctaccaacttttacatacatgaaatcaggttaaaatgaactttacagaaatacttcacaagggaataaagtagaggaaaaagggataacatgtaacatggagtcaaggaaaaagagtgtgaagtagttttgctctctctatcttgcaaataggagtccttaaagacaactgggagaaggggtttgagatagtgaattcctaagaagaaaataatggattgcatattagttgttctctaagtggactcaacagtgtgcaagcttgttggaaaagccaaaagaagatggcaactccttatgtcccagttcctatgcccataggaaactctgcttccagttttacaacaaacagaaatcaaagaagttcttcttttggcagtgtctcaacaagctcaaattcttctaagggccagttagaagactcaaatatgggtacagcttcttccattgagtattctactagaccaagagacactgaagaacaaaatccggaaacagtgaattgggaagatagaccatctacacctactatactgggttatgaagtgatggaagaaagagctaaatttactgtatataaaatactagtaaagaaaaccccagaagaaagctgggtagttttcagaagatacactgacttctctaggcttaatgacaaattaaaagagatgtttccaggttttcgactagcacttcctccaaaacgctggtttaaagataattacaatgctgactttttagaagacagacaattaggattacaagcgtttcttcaaaatttagtagctcacaaggacattgctaactgccttgcagtgagagaatttctttgtttggatgatccaccgggtccatttgatagcctagaagaaagcagggcattctgtgaaactttagaagagacaaactaccgcttacagaaagaactacttgaaaaacaaaaggagatggaatcactaaagaaactgctcagtgagaagcaacttcatatagacactttagagaacagaatcagaacattgtctttagaacctgaagaatcactggatgtgtcagaaacagaaggtgaacagatcctaaaggtggagtcctctgcacttgaggttgatcaagatgtcctggatgaagaatctagagctgataataaaccatgcttaagttttagtgaacctgaaaatgctgtatcagagatagaagtagcagaagtggcatatgatgctgaagaagactaatgtatcacaagcagttccctccatttagactattcaaaaatttagaagagtggcaaatactattttaaaagaagaaccaagaactgtaaaacatatagaaaagagcaagaatgcacatgtataaagtttacataaagaagtttttttaagttattgagataggaaatatattcactgctgcttttaattgtattttatccaattacatttaatacactaaaaaaaatcttgttggaattctgttatcaaggcccacattcttaaatactgtgcataaattattatggtgttttgcctatatattgctccaaactactgtgtatatatgtatgtgtgttaaatcaccaattatattaatcaaatggaaattaattgcatgttactatctgggtgatatattcttctttatatctctgacatgacatattttcattaatagtttaaatcagtgaccatcataataaagataaaatttagttgagtttttaatgtttacatgtttacatctctaaataaaatttgcttatttgaaatgttaatgctctttagaaaaatgactttctagtaccaaaggaaaactacttgaaagagctgtaatcatatagctaaagtgataagatagccttgattttaaaagctgattcattaatatcaaaatactttaataagtgtcacagttattaatatgttacatttgtttagtttccacgtaatctttatctctacctagatttagtgagtttgcctctttcagaatactacctccttttgttaaggcatattctttcgaaaatatagattctaaataaataggggcttatacaaaaaagaaaataaaaagccatatatactgcaaagttcctaactggcttgactcctgacattgcatttttatttctatttgtgtgaagatgttgttatactgtattatggctgattttctttttaatatatttagccaagtgatgcactttatgataattaaactcttttgtgccaagtttaattggtggatttttttagtaagtagagttaggagaaagaattatgtagtgcctttactatttcactttctacaaaagtctcctagggtctttgagtcagctttatgaaaaaatgtttgtttatttcagctttgtgtacagtcattaaaagtgccttgtttcatttttataggatgaagttatttattttctattttcactgttttgcatattgctgttaataagcattgtaatcatgctggcattttgcaatcccagtcggtatgctttctaaaaactgagggaaacttactggggaaatagaataacaatctccatttttttctttactatctaaaagtttatcggtatcttgatgtatatatatattaaggtgtggctgtttaaaattctaatgacatatatcaacacattcaatggctgttgttaacctttgaagtaaaaaggagatcactttttaccaaataaccaaaaatttttagtctttgtcaaagtgcacaggtatgttctcagaacatttttcacaatgtgtatcagaaatatgtttgctatccttagagacagaaatgaatataacaaattgatctgcttatttattaaaattattattctagacttacaaaaggcttaaaaagaacaatcatttaatcagtaccattctgtatcttatataacagatctttgccaaattctagatattatagtgttgcctgtctgttctaaagcgaaccagccactttttcaatctggctttttggaagattgtatttaaagttcttcaaggatgaagaaaaaaatctgttaattaggtaaaccactattatttatatttataatttacttttttttacttttataatgcattttactcccagtattatgttcatttaataaattattttttcactacaaaaaaaactgtg

SEQ ID NO: 185706 - DNA, 3183 bp, Homo sapiens
acacagcagggatcttgggcccgggcagagactggctgaggcggggagcagctgcttttggggcgggggtgtcacgtgaggcttctcgctgctgagggaggaggcgaaaagctgcggttaaggagagtccggtttaaccgtcaccgggaagcgcgctcgttcgggatcgccgagtgggctgagatagtgaattcctaagaagaaaataatggattgcatattagttgttctctaagtggactcaacagtgtgcaagcttgttggaaaagccaaaagaagatggcaactccttatgtcccagttcctatgcccataggaaactctgcttccagttttacaacaaacagaaatcaaagaagttcttcttttggcagtgtctcaacaagctcaaattcttctaagggccagttagaagactcaaatatgggtaattttaaacagacaagtgttcctgatcaaatggataatacttcatctgtctgtagcagtcccctcattaggactaaatttacaggtacagcttcttccattgagtattctactagaccaagagacactgaagaacaaaatccggaaacagtgaattgggaagatagaccatctacacctactatactgggttatgaagtgatggaagaaagagctaaatttactgtatataaaatactagtaaagaaaaccccagaagaaagctgggtagttttcagaagatacactgacttctctaggcttaatgacaaaataattacaatgctgactttttagaagacagacaattaggattacaagcgtttcttcaaaatttagtagctcacaaggacattgctaactgccttgcagtgagagaatttctttgtttggatgatccaccgggtccatttgatagcctagaagaaagcagggcattctgtgaaactttagaagagacaaactaccgcttacagaaagaactacttgaaaaacaaaaggagatggaatcactaaagaaactgctcagtgagaagcaacttcatatagacactttagagaacagaatcagaacattgtctttagaacctgaagaatcactggatgtgtcagaaacagaaggtgaacagatcctaaaggtggagtcctctgcacttgaggttgatcaagatgtcctggatgaagaatctagagctgataataaaccatgcttaagttttagtgaacctgaaaatgctgtatcagagatagaagtagcagaagtggcatatgatgctgaagaagactaatgtatcacaagcagttccctccatttagactattcaaaaatttagaagagtggcaaatactattttaaaagaagaaccaagaactgtaaaacatatagaaaagagcaagaatgcacatgtataaagtttacataaagaagtttttttaagttattgagataggaaatatattcactgctgcttttaattgtattttatccaattacatttaatacactaaaaaaaatcttgttggaattctgttatcaaggcccacattcttaaatactgtgcataaattattatggtgttttgcctatatattgctccaaactactgtgtatatatgtatgtgtgttaaatcaccaattatattaatcaaatggaaattaattgcatgttactatctgggtgatatattcttctttatatctctgacatgacatattttcattaatagtttaaatcagtgaccatcataataaagataaaatttagttgagtttttaatgtttacatgtttacatctctaaataaaatttgcttatttgaaatgttaatgctctttagaaaaatgactttctagtaccaaaggaaaactacttgaaagagctgtaatcatatagctaaagtgataagatagccttgattttaaaagctgattcattaatatcaaaatactttaataagtgtcacagttattaatatgttacatttgtttagtttccacgtaatctttatctctacctagatttagtgagtttgcctctttcagaatactacctccttttgttaaggcatattctttcgaaaatatagattctaaataaataggggcttatacaaaaaagaaaataaaaagccatatatactgcaaagttcctaactggcttgactcctgacattgcatttttatttctatttgtgtgaagatgttgttatactgtattatggctgattttctttttaatatatttagccaagtgatgcactttatgataattaaactcttttgtgccaagtttaattggtggatttttttagtaagtagagttaggagaaagaattatgtagtgcctttactatttcactttctacaaaagtctcctagggtctttgagtcagctttatgaaaaaatgtttgtttatttcagctttgtgtacagtcattaaaagtgccttgtttcatttttataggatgaagttatttattttctattttcactgttttgcatattgctgttaataagcattgtaatcatgctggcattttgcaatcccagtcggtatgctttctaaaaactgagggaaacttactggggaaatagaataacaatctccatttttttctttactatctaaaagtttatcggtatcttgatgtatatatatattaaggtgtggctgtttaaaattctaatgacatatatcaacacattcaatggctgttgttaacctttgaagtaaaaaggagatcactttttaccaaataaccaaaaatttttagtctttgtcaaagtgcacaggtatgttctcagaacatttttcacaatgtgtatcagaaatatgtttgctatccttagagacagaaatgaatataacaaattgatctgcttatttattaaaattattattctagacttacaaaaggcttaaaaagaacaatcatttaatcagtaccattctgtatcttatataacagatctttgccaaattctagatattatagtgttgcctgtctgttctaaagcgaaccagccactttttcaatctggctttttggaagattgtatttaaagttcttcaaggatgaagaaaaaaatctgttaattaggtaaaccactattatttatatttataatttacttttttttacttttataatgcattttactcccagtattatgttcatttaataaattattttttcactacaaaaaaaactgtg

SEQ ID NO: 185707 - DNA, 1602 bp, Homo sapiens
acacagcagggatcttgggcccgggcagagactggctgaggcggggagcagctgcttttggggcgggggtgtcacgtgaggcttctcgctgctgagggaggaggcgaaaagctgcggttaaggagagtccggtttaaccgtcaccgggaagcgcgctcgttcgggatcgccgagtgggctgagatagtgaattcctaagaagaaaataatggattgcatattagttgttctctaagtggactcaacagtgtgcaagcttgttggaaaagccaaaagaagatggcaactccttatgtcccagttcctatgcccataggaaactctgcttccagttttacaacaaacagaaatcaaagaagttcttcttttggcagtgtctcaacaagctcaaattcttctaagggccagttagaagactcaaatatgggtaattttaaacagacaagtgttcctgatcaaatggataatacttcatctgtctgtagcagtcccctcattaggactaaatttacaggtacagcttcttccattgagtattctactagaccaagagacactgaagaacaaaatccggaaacagtgaattgggaagatagaccatctacacctactatactgggttatgaagtgatggaagaaagagctaaatttactgtatataaaatactagtaaagaaaaccccagaagaaagctgggtagttttcagaagatacactgacttctctaggcttaatgacaaattaaaagagatgtttccaggttttcgactagcacttcctccaaaacgctggtttaaagataattacaatgctgactttttagaagacagacaattaggattacaagcgtttcttcaaaatttagtagctcacaaggacattgctaactgccttgcagtgagagaatttctttgtttggatgatccaccgggtccatttgatagcctagaagaaagcagggtaagtgctgtattatatagcacatgaaaagaggaacaaattaatgcagtacaaataactacattgtttcttggatggaatagcaaacagcaaaatattataatttcaggctatggtagttttgcacagaaagctttcatgtttgagtcaaaggttgctttcagtgaaatacatagacttagctcagtgaaaaagtaaaaattcatatatgtcttatagtcaataaagctctaaaattaaatcctgcattatttttactgtttcaaaaaaaatgatttgggggacctttttatatttaataatactatgtgtaaactgagttttcttccatttgagtgtcaaaataaggaatgtacagctgaaatcaaatttaaaacttcaggggtaggagtgattatcttgttatcggtttagcttgtgcctgatgcttctcaaattacattaattgacgtgttaaagtgtcctgtttcttgaagcaatagcctagattcacaaaacagatttggtaatagtagattagctaggattttatgcaagttttttccccaaatgtttaatggcatttaaatggaacagatttaattggtaggtttgtaatgttttcattcaagctgagtcagttctttgtgttagattgaatgc

SEQ ID NO: 185708 - DNA, 353 bp, Homo sapiens
gtaagtactataataaatccaaactaacatttcagttttgaattcttttctgtttcctatacttctgttatattttttctttgttaatgagtcaaattcattctagttcataagaaaattaattttttaaataaatttttaaaataaaaatttttagcataaaaatgtgaaactttaaaattgccaacagaaatataaataattatcttgtgagtctgaaaaagatgtgtataagatcttttgaattattataaaattatatatgtctataagataatgaacaaaaacatatttaacatattgtattagtttcctattactgcataataaattaccacaaactttgttgctta

SEQ ID NO: 185709 - DNA, 3241 bp, Homo sapiens
acacagcagggatcttgggcccgggcagagactggctgaggcggggagcagctgcttttggggcgggggtgtcacgtgaggcttctcgctgctgagggaggaggcgaaaagctgcggttaaggagagtccggtttaaccgtcaccgggaagcgcgctcgttcgggatcgccgagtgggctgagatagtgaattcctaagaagaaaataatggattgcatattagttgttctctaagtggactcaacagtgtgcaagcttgttggaaaagccaaaagaagatggcaactccttatgtcccagttcctatgcccataggaaactctgcttccagttttacaacaaacagaaatcaaagaagttcttcttttggcagtgtctcaacaagctcaaattcttctaagggccagttagaagactcaaatatgggtaattttaaacagacaagtgttcctgatcaaatggataatacttcatctgtctgtagcagtcccctcattaggactaaatttacaggtacagcttcttccattgagtattctactagaccaagagacactgaagaacaaaatccggaaacagtgaattgggaagatagaccatctacacctactatactgggttatgaagtgatggaagaaagagctaaatttactgtatataaaatactagtaaagaaaaccccagaagaaagctgggtagttttcagaagatacactgacttctctaggcttaatgacaaattaaaagagatgtttccaggttttcgactagcacttcctccaaaacgctggtttaaagataattacaatgctgactttttagaagacagacaattaggattacaagcgtttcttcaaaatttagtagctcacaaggacattgctaactgccttgcagtgagagaatttctttgtttggatgatccaccgggtccatttgatagcctagaagaaagcagggcattctgtgaaactttagaagagacaaactaccgcttacagaaagaactacttgaaaaacaaaaggagatggaatcactaaagaaactgctcagtgagaagcaacttcatatagacactttagagaacagaatcagaacattgtctttagaacctgaagaatcactggatgtgtcagaaacagaaggtgaacagatcctaaaggtggagtcctctgcacttgaggttgatcaagatgtcctggatgaagaatctagagctgataataaaccatgcttaagttttagtgaacctgaaaatgctgtatcagagatagaagtagcagaagtggcatatgatgctgaagaagactaatgtatcacaagcagttccctccatttagactattcaaaaatttagaagagtggcaaatactattttaaaagaagaaccaagaactgtaaaacatatagaaaagagcaagaatgcacatgtataaagtttacataaagaagtttttttaagttattgagataggaaatatattcactgctgcttttaattgtattttatccaattacatttaatacactaaaaaaaatcttgttggaattctgttatcaaggcccacattcttaaatactgtgcataaattattatggtgttttgcctatatattgctccaaactactgtgtatatatgtatgtgtgttaaatcaccaattatattaatcaaatggaaattaattgcatgttactatctgggtgatatattcttctttatatctctgacatgacatattttcattaatagtttaaatcagtgaccatcataataaagataaaatttagttgagtttttaatgtttacatgtttacatctctaaataaaatttgcttatttgaaatgttaatgctctttagaaaaatgactttctagtaccaaaggaaaactacttgaaagagctgtaatcatatagctaaagtgataagatagccttgattttaaaagctgattcattaatatcaaaatactttaataagtgtcacagttattaatatgttacatttgtttagtttccacgtaatctttatctctacctagatttagtgagtttgcctctttcagaatactacctccttttgttaaggcatattctttcgaaaatatagattctaaataaataggggcttatacaaaaaagaaaataaaaagccatatatactgcaaagttcctaactggcttgactcctgacattgcatttttatttctatttgtgtgaagatgttgttatactgtattatggctgattttctttttaatatatttagccaagtgatgcactttatgataattaaactcttttgtgccaagtttaattggtggatttttttagtaagtagagttaggagaaagaattatgtagtgcctttactatttcactttctacaaaagtctcctagggtctttgagtcagctttatgaaaaaatgtttgtttatttcagctttgtgtacagtcattaaaagtgccttgtttcatttttataggatgaagttatttattttctattttcactgttttgcatattgctgttaataagcattgtaatcatgctggcattttgcaatcccagtcggtatgctttctaaaaactgagggaaacttactggggaaatagaataacaatctccatttttttctttactatctaaaagtttatcggtatcttgatgtatatatatattaaggtgtggctgtttaaaattctaatgacatatatcaacacattcaatggctgttgttaacctttgaagtaaaaaggagatcactttttaccaaataaccaaaaatttttagtctttgtcaaagtgcacaggtatgttctcagaacatttttcacaatgtgtatcagaaatatgtttgctatccttagagacagaaatgaatataacaaattgatctgcttatttattaaaattattattctagacttacaaaaggcttaaaaagaacaatcatttaatcagtaccattctgtatcttatataacagatctttgccaaattctagatattatagtgttgcctgtctgttctaaagcgaaccagccactttttcaatctggctttttggaagattgtatttaaagttcttcaaggatgaagaaaaaaatctgttaattaggtaaaccactattatttatatttataatttacttttttttacttttataatgcattttactcccagtattatgttcatttaataaattattttttcactacaaaaaaaactgtg

SEQ ID NO: 185710 - DNA, 3162 bp, Homo sapiens
agctggtgatgactacaagtcccatgatgcaaagtatgagcacggaccaatgttggtcgcagttccttctgggaattgtagtcttctcctgtttggcaaactagatagtgaattcctaagaagaaaataatggattgcatattagttgttctctaagtggactcaacagtgtgcaagcttgttggaaaagccaaaagaagatggcaactccttatgtcccagttcctatgcccataggaaactctgcttccagttttacaacaaacagaaatcaaagaagttcttcttttggcagtgtctcaacaagctcaaattcttctaagggccagttagaagactcaaatatgggtaattttaaacagacaagtgttcctgatcaaatggataatacttcatctgtctgtagcagtcccctcattaggactaaatttacaggtacagcttcttccattgagtattctactagaccaagagacactgaagaacaaaatccggaaacagtgaattgggaagatagaccatctacacctactatactgggttatgaagtgatggaagaaagagctaaatttactgtatataaaatactagtaaagaaaaccccagaagaaagctgggtagttttcagaagatacactgacttctctaggcttaatgacaaattaaaagagatgtttccaggttttcgactagcacttcctccaaaacgctggtttaaagataattacaatgctgactttttagaagacagacaattaggattacaagcgtttcttcaaaatttagtagctcacaaggacattgctaactgccttgcagtgagagaatttctttgtttggatgatccaccgggtccatttgatagcctagaagaaagcagggcattctgtgaaactttagaagagacaaactaccgcttacagaaagaactacttgaaaaacaaaaggagatggaatcactaaagaaactgctcagtgagaagcaacttcatatagacactttagagaacagaatcagaacattgtctttagaacctgaagaatcactggatgtgtcagaaacagaaggtgaacagatcctaaaggtggagtcctctgcacttgaggttgatcaagatgtcctggatgaagaatctagagctgataataaaccatgcttaagttttagtgaacctgaaaatgctgtatcagagatagaagtagcagaagtggcatatgatgctgaagaagactaatgtatcacaagcagttccctccatttagactattcaaaaatttagaagagtggcaaatactattttaaaagaagaaccaagaactgtaaaacatatagaaaagagcaagaatgcacatgtataaagtttacataaagaagtttttttaagttattgagataggaaatatattcactgctgcttttaattgtattttatccaattacatttaatacactaaaaaaaatcttgttggaattctgttatcaaggcccacattcttaaatactgtgcataaattattatggtgttttgcctatatattgctccaaactactgtgtatatatgtatgtgtgttaaatcaccaattatattaatcaaatggaaattaattgcatgttactatctgggtgatatattcttctttatatctctgacatgacatattttcattaatagtttaaatcagtgaccatcataataaagataaaatttagttgagtttttaatgtttacatgtttacatctctaaataaaatttgcttatttgaaatgttaatgctctttagaaaaatgactttctagtaccaaaggaaaactacttgaaagagctgtaatcatatagctaaagtgataagatagccttgattttaaaagctgattcattaatatcaaaatactttaataagtgtcacagttattaatatgttacatttgtttagtttccacgtaatctttatctctacctagatttagtgagtttgcctctttcagaatactacctccttttgttaaggcatattctttcgaaaatatagattctaaataaataggggcttatacaaaaaagaaaataaaaagccatatatactgcaaagttcctaactggcttgactcctgacattgcatttttatttctatttgtgtgaagatgttgttatactgtattatggctgattttctttttaatatatttagccaagtgatgcactttatgataattaaactcttttgtgccaagtttaattggtggatttttttagtaagtagagttaggagaaagaattatgtagtgcctttactatttcactttctacaaaagtctcctagggtctttgagtcagctttatgaaaaaatgtttgtttatttcagctttgtgtacagtcattaaaagtgccttgtttcatttttataggatgaagttatttattttctattttcactgttttgcatattgctgttaataagcattgtaatcatgctggcattttgcaatcccagtcggtatgctttctaaaaactgagggaaacttactggggaaatagaataacaatctccatttttttctttactatctaaaagtttatcggtatcttgatgtatatatatattaaggtgtggctgtttaaaattctaatgacatatatcaacacattcaatggctgttgttaacctttgaagtaaaaaggagatcactttttaccaaataaccaaaaatttttagtctttgtcaaagtgcacaggtatgttctcagaacatttttcacaatgtgtatcagaaatatgtttgctatccttagagacagaaatgaatataacaaattgatctgcttatttattaaaattattattctagacttacaaaaggcttaaaaagaacaatcatttaatcagtaccattctgtatcttatataacagatctttgccaaattctagatattatagtgttgcctgtctgttctaaagcgaaccagccactttttcaatctggctttttggaagattgtatttaaagttcttcaaggatgaagaaaaaaatctgttaattaggtaaaccactattatttatatttataatttacttttttttacttttataatgcattttactcccagtattatgttcatttaataaattattttttcactacaaaaaaaactgtg

SEQ ID NO: 185711 - DNA, 3154 bp, Homo sapiens
acacagcagggatcttgggcccgggcagagactggctgaggcggggagcagctgcttttggggcgggggtgtcacgtgaggcttctcgctgctgagggaggaggcgaaaagctgcggttaaggagagtccggtttaaccgtcaccgggaagcgcgctcgttcgggatcgccgagtgggctgagatagtgaattcctaagaagaaaataatggattgcatattagttgttctctaagtggactcaacagtgtgcaagcttgttggaaaagccaaaagaagatggcaactccttatgtcccagttcctatgcccataggaaactctgcttccagttttacaacaaacagaaatcaaagaagttcttcttttggcagtgtctcaacaagctcaaattcttctaagggccagttagaagactcaaatatgggtacagcttcttccattgagtattctactagaccaagagacactgaagaacaaaatccggaaacagtgaattgggaagatagaccatctacacctactatactgggttatgaagtgatggaagaaagagctaaatttactgtatataaaatactagtaaagaaaaccccagaagaaagctgggtagttttcagaagatacactgacttctctaggcttaatgacaaattaaaagagatgtttccaggttttcgactagcacttcctccaaaacgctggtttaaagataattacaatgctgactttttagaagacagacaattaggattacaagcgtttcttcaaaatttagtagctcacaaggacattgctaactgccttgcagtgagagaatttctttgtttggatgatccaccgggtccatttgatagcctagaagaaagcagggcattctgtgaaactttagaagagacaaactaccgcttacagaaagaactacttgaaaaacaaaaggagatggaatcactaaagaaactgctcagtgagaagcaacttcatatagacactttagagaacagaatcagaacattgtctttagaacctgaagaatcactggatgtgtcagaaacagaaggtgaacagatcctaaaggtggagtcctctgcacttgaggttgatcaagatgtcctggatgaagaatctagagctgataataaaccatgcttaagttttagtgaacctgaaaatgctgtatcagagatagaagtagcagaagtggcatatgatgctgaagaagactaatgtatcacaagcagttccctccatttagactattcaaaaatttagaagagtggcaaatactattttaaaagaagaaccaagaactgtaaaacatatagaaaagagcaagaatgcacatgtataaagtttacataaagaagtttttttaagttattgagataggaaatatattcactgctgcttttaattgtattttatccaattacatttaatacactaaaaaaaatcttgttggaattctgttatcaaggcccacattcttaaatactgtgcataaattattatggtgttttgcctatatattgctccaaactactgtgtatatatgtatgtgtgttaaatcaccaattatattaatcaaatggaaattaattgcatgttactatctgggtgatatattcttctttatatctctgacatgacatattttcattaatagtttaaatcagtgaccatcataataaagataaaatttagttgagtttttaatgtttacatgtttacatctctaaataaaatttgcttatttgaaatgttaatgctctttagaaaaatgactttctagtaccaaaggaaaactacttgaaagagctgtaatcatatagctaaagtgataagatagccttgattttaaaagctgattcattaatatcaaaatactttaataagtgtcacagttattaatatgttacatttgtttagtttccacgtaatctttatctctacctagatttagtgagtttgcctctttcagaatactacctccttttgttaaggcatattctttcgaaaatatagattctaaataaataggggcttatacaaaaaagaaaataaaaagccatatatactgcaaagttcctaactggcttgactcctgacattgcatttttatttctatttgtgtgaagatgttgttatactgtattatggctgattttctttttaatatatttagccaagtgatgcactttatgataattaaactcttttgtgccaagtttaattggtggatttttttagtaagtagagttaggagaaagaattatgtagtgcctttactatttcactttctacaaaagtctcctagggtctttgagtcagctttatgaaaaaatgtttgtttatttcagctttgtgtacagtcattaaaagtgccttgtttcatttttataggatgaagttatttattttctattttcactgttttgcatattgctgttaataagcattgtaatcatgctggcattttgcaatcccagtcggtatgctttctaaaaactgagggaaacttactggggaaatagaataacaatctccatttttttctttactatctaaaagtttatcggtatcttgatgtatatatatattaaggtgtggctgtttaaaattctaatgacatatatcaacacattcaatggctgttgttaacctttgaagtaaaaaggagatcactttttaccaaataaccaaaaatttttagtctttgtcaaagtgcacaggtatgttctcagaacatttttcacaatgtgtatcagaaatatgtttgctatccttagagacagaaatgaatataacaaattgatctgcttatttattaaaattattattctagacttacaaaaggcttaaaaagaacaatcatttaatcagtaccattctgtatcttatataacagatctttgccaaattctagatattatagtgttgcctgtctgttctaaagcgaaccagccactttttcaatctggctttttggaagattgtatttaaagttcttcaaggatgaagaaaaaaatctgttaattaggtaaaccactattatttatatttataatttacttttttttacttttataatgcattttactcccagtattatgttcatttaataaattattttttcactacaaaaaaaactgtg

SEQ ID NO: 185712 - DNA, 423 bp, Homo sapiens
cccaccgagtcccgcttcctgagcagacaggaccgcctgctgttttcttctcctctcttattgccccttgtcatgaaaggagaggtctgacttccacttcagtttgtgtggatagacagcagtaagggaacagaggggaaatgttcattaccgctgttaacaccacagcatttcttactgctcggacattcgctccctctttgggaaggattaaaccaaaggataaattcgtgagcatgtaaggcttcaagctacacccaagaagagatgtcgtatattgcaaattttctgggggatctttcagaattcattttttgttatttcccagtcttattctcaactatctggaatcttgactaggatactctgtgagacttgagagctttttcctgaggctttttgttgttgtttagcagctctgcc

SEQ ID NO: 185713 - DNA, 456 bp, Homo sapiens
ctccactatcctgtttgtctccatcataaaatcttcacccatgcctgtgtgcttatgtcattgctaggttgtcttccaggatttcatagttagagtttttgcatttaagtctttaattcatcttgagtttgtttttgtatatggtgtaaagaaggggtccggtatctctcttctgcaaatggccagccagttatctcagcaccatttattgaatagggagtccttttctcattgcttgtttttgtcaggtttgtggaagatcagatggttgtaagtgtgcagtcttagttctgggttctctattctgtttcattcatccttgtgttctttaaagagtgttttaggtcttcttggccatgaatatggtgtatctctcaattttttttaggtcttctctaaaataagtcttctcaaattttgttagagcggttcttagatacttgggatttttaaaat

SEQ ID NO: 185714 - DNA, 518 bp, Homo sapiens
ccttcccccctttcctgccctttatttgcccatcactatcattaacatctggcatattatttactcttttatgttgtcaatctcccctcactagattttaaactccattagagcaggactttttgtccacttttatacgctcagcatctataagaacaccaggatgtaaaaagtgcaccacaaatatttgctgactgaattagtgatgagaaaaatttaacaggaaagagaaaactcacctgtactaccattaaaaactatagaaataaaactagcaggccgggcgtggtggctcacacctgtaatcccagtacttagggaagcagaggccggtggattgcctaaggtcaggagttcgagagcagcctgaccaacatggtgaaaccccgtctctactaaaaatacaaaaactagcagggcgtggtggcaggcacctgtaatcccagctagtcaggaggctgaagcaggagactcacttgaacccgggaggcggaagttgcagtgagccaagatcaagc

SEQ ID NO: 185715 - DNA, 197 bp, Homo sapiens
tggagcaggatctagcaaatccatggaagtggcaacaagacagtctggacaagggctgaggtgcagtgtgcggtcagcttccacctggaaatgaaagctgcttgactgggagaggtaagggggcatctcagataatgagatggtgtattgtgtatactcacactaactaacatagtaaacattatgagctaagtaat

SEQ ID NO: 185716 - DNA, 408 bp, Homo sapiens
caccgcgcccggcctctcgatacacttttggttccagaagtaacacttgacactcttcttgcagagaggaagaaaatggaacgtttacagggagccccgagtccctcccttgacctctagggcatgagccgcatgttctccaggcctttctctgcccactcacacccaggaatgtgacctgggaggtatctaacgtgtgatcttccgggcaggtcgggaggttcctcccgccgctgccttcgaggagctgtttatcttgggtgcgttcgcgtcgtaattgggatgttccgagccacctggttcttttcagctgtatggacgttcccctcgtggcgctggacacccccacgtccacacacttccctcggtcatttccctgttgtaagcaatactgtaacgaacatcttc

SEQ ID NO: 185717 - DNA, 303 bp, Homo sapiens
ttttggtcagatatattagtggtttccaattttttcattataaataattctgcagtaaaaattttgtaacttattttatgtccttaggatacagttctaaaggaaatatcaaagaataaaaacattttaaagtttctgatacatatcaccaaactgcttttcaagagggatccatcaatttgtattcctatttatattgttgcaaaacattctttactgtcatttttaacaggtttaattagcatataataaagtgcacatattgaaagtatatgatctgataacttttgacgtatgtatata

SEQ ID NO: 185718 - DNA, 214 bp, Homo sapiens
gttggccaggctggtctcgaatgcctgacctcgtgatccacccgcgtcagcctcccaccgtactgagattacaggtgtgagccaccacgcctggcccagtaaaggggcatttttgtcagaggtccctgagcctagaactaaacagctaattctaggtctgattcccaataatagtgagataactacaagagaaaaataccgtaccgaggttcat

SEQ ID NO: 185719 - DNA, 636 bp, Homo sapiens
tgttcgtggaggacagagcaggccacaagataggggccaggatcgtcccagcccattctggatgtgctgtaatttcaagtccagtgaggtctcaggaaagcctttttgaactgaccatttttcagaaattatcatcattctacaaacacagtaatatggtcatttgtgtcaaatgtcttgaccccagggcagtaaaaatgggtgggaattcttccccctgcctttctgtgttttctcagagcactcttatctaagcaagaaaatggacttctgtcttctttaacaatacccaggaaaagaagggtcaacgagaaatgtgcaaatattcgaaaggaaaactttcagggccagcatctaatcgtctcatctgatttccttctctgaccttcactgacttgtgttcccaagtttctcgcaaatcagaagtctaaatattatatgagcttatctcctcggtacaactgagcaacagagccacaaacacaggaaaatgggtgggtgagctgccaggtagccgttagccacgggagctagaacgtcagccagaactatgggccatgcgaacacgctcacccatcctccacccaggatgggacactaggatattccccatcagtcagcaacaggcagctcctg

SEQ ID NO: 185720 - DNA, 610 bp, Homo sapiens
ggctcaggaattcccggtttgttaaaatggtcaactgaagtctgggcccctgtacaatgacttcaagatcccactaggagagaacactttaagcctgttcccatcagcaagttctccaactctcccttctcccaacctgtgacttgcctccccgcaggagtggtccagcagctctacagagaagtcctgattacaaatggtgtgagcctcatccttcctgaatgttaggttgaattgtgttccccacaaaaaagatctattggagttctaagcctcagtacttcagaatgtgatgttttatggagacagtgtctttagagaggtaatcaaattcaaatgaggccattagagtaagctctaaatcagtatgactgatgtccttattaaaagcggaaattttgacacagaaacaaacaggcccacagggagaacaacatgtgaacatgcaggcagagatcaggggatgggcctacaagccaaggaacaccaaaggatatcagcaacccaccgagagagttaggaggaaggcacaggacagattctccttcacagtctcagagaaccaattctgccaacaccttcatctcagacttctagcctccagaactct

SEQ ID NO: 185721 - DNA, 505 bp, Homo sapiens
gcccctctatcatgcaacctggtggtcccccgatctctgggaggtcaccatattgatgccgaacttagtgcgggagcacccgatcgggatagcgcactacagcccataactcctggtggtcaagcgatcctcccaactcagcctcctgagtagctaggattacagacatgtgccaccatgcccagctaattttgtatttttagtagagatggggtttctctatgttggtcaggctggtcttgagctcccaacctcaggtgatccactagccttggcctcacgaagtgctgggattacaggtgtgagccactgtgcctggcttaaatgcatattcttaagtgaaagaaatcaatctggaaaagctatgtattgtatgtttctaactatatgacattttagaacaggcaaaactatggagacagtagaaaagctcagttattgtcgggttagaggagaggaggaaggaggaatgaataggctgcatgtgcatatagaattttcaggg

SEQ ID NO: 185722 - DNA, 520 bp, Homo sapiens
tgagtgtctgaagaggaaagatgtgtttcaaataaataatctcactattaatcagagaaatgcagattacaataataatgtgatatttttctttatccaccagatcggttataatgaaaggattggatagtattaagtattggagaatttgggcaatggctattactgtccattgttgataagggtctaagttggaggggaatttagcacatagggtgtaactgaacctccacatatgaccagcgattcctcttctagtttccacctagtgaaacacccatacatgagcagaagaaaatatgaacaagggtgttcactgcagaattgtttgtaagagtaagaaatctagagccatcctaaatgtccatcgacatggagatgataaataaagtggagtgctaaaaggatgagattatgtaaaaagttaaccaaaagtgtttgaaaagctgtgagcatatttttggttgccagataatgagggcagggagtcggggtgctattgttattttgtgagagggtg

SEQ ID NO: 185723 - DNA, 195 bp, Homo sapiens
taaaattccccgcaccaccactgccacattgtatttctttgtggttcactgactaaggatggaatatttcgaactcccagatgtctgactggctagaaaccatgctttttctctactcagtctaaagtaagctccaggtgtagtttctcctacagagacatcctgcagggattaggaggtgggcaggggatgaga

SEQ ID NO: 185724 - DNA, 430 bp, Homo sapiens
tctgaagatggatgagaagagggctaagaatggctaaagcttggagaataatttggggagtcacagtaaatcaataggatgagatagatgaaagaaattggctctaaagagagcattggaagttttagattgtcatatttaccaccttcagttctcagacctgatagttttcagtgacgtagccttttaggaatttcagaagtgtgattttaccttgaatttattagggctaaattcaattgtttatgtttatgcagttcataattttgcagtttagtttgtgtgggttagtggccctactgttcaactggatggcaaatctgtgctaggaggataccatatgcacaagtattttcttaaataatgttggcgtttgccactggtgttaggggaagaagaaaaaaaaatgagagcaattctggaagccctc

SEQ ID NO: 185725 - DNA, 134 bp, Homo sapiens
acaatttagtacagattccggttgtaggaagcatctcaatatttgttgctgtttttttccctgctgggtgcatatttttctgagtgttggtggttttggaattgtgatgcttttccagacattcacattgcatc

SEQ ID NO: 185726 - DNA, 459 bp, Homo sapiens
tctagacggatccccggagacacttacggaagacacacattaactataaggagccaggaaggccacaagtgaaaggatcaaaaaagataataccatgcagacattaattaaaagaaaacagttatagttaatatcacacgaaagagacctacaacaaaaagcattactagagataacaaggaatatttcttaacaagaaaaggtctaatttactaggaagacagaacaattctaaacattatatacttagcctaaaaatacacaaaacaaaaactacagaacaaggataaacagacaaatccacaatagtgggaaattctaacatgactctcagtatctgaaatacccagacaatatcattaatcagtatgaccctcttgttatatacaaaatgctacaactgacaaatacaaatatacattcttttcaagtagcgtaagtgtttaccggtgctgacca

SEQ ID NO: 185727 - DNA, 308 bp, Homo sapiens
tgaacacagctcactgcagccttgacctcctgggctcagctgatcctcccacctcagcctcctgagtagccaggaccaaagatgtgggccaccacacctggctaattaaaaaattttttttttgttgggattacagggactattatcttttttcaacttgaaatttttattgaaatataagatgtacagaaaagggcacatagcaccaactcagtacacatgtgtaaccatcactttatgccctcttctagtcacagtctttcaccaaagagtaaccccacctgacccagaacagcgtcaattagttt

SEQ ID NO: 185728 - DNA, 425 bp, Homo sapiens
cctcacccatcactgctaaaagctctactgtaaaatctattggcacacattcattcctctctattgaactgctacctcaccactactctctgagttgatttctctcaggcccctctactatctcttctacacatagctatcagaagaatcatttgcaaacataaatcagaccacatcactctttcattccaatccctccagtagcttcctgtagcactcagaataaaatctgaatgctgtaccacggcctataaggctctacatacctcattccagcctacttttataccgctaggacatggtatttttcctctacatcaccaggctctggccttcctggctgctttactgactggaaaacacaacaggcttgatcctgccctagagcctttgtacattatgtttcctttccctagaacattctg

SEQ ID NO: 185729 - DNA, 579 bp, Homo sapiens
aagcgattctcccacctcaggctcccgagtagctggggctacaggcacgcaccaccatgcccagctaatttttgtattttttttagagatggggttttgccatttgcacagactggtcttgaattcctggactcaagcgatccactccacttggcctcccaaagtgctgggattataggcgtgaagcactgcgcctggccaccatcagcttttttttaaggcagggagaataggaaaacacatattaatagagcatcttcaattgcctttcttttggtatctttaggaaggtcactagccagagttagagcatctgagtaattaagattgctgggagtggggtgaagggggacaataataagctccatatcactaaactgggtgtgatgaggtggagataagaacagtaggatagatgtctgcaacacacaaagcctcagtaagtaataggtaagcaataagcaataaggtagatgtgtgaataccagtgccgtatgctgggatgataacatattagcttatatggagcaggcctctcaaaaataaatttgctaattgtgtggcatatagaaaaaatac

SEQ ID NO: 185730 - DNA, 857 bp, Homo sapiens
gagggccctacctggggatttccaggtcatattcttgcaggctgtggccacacaacacttcaggaaggtgaatgagccatagcagctgatgcattgattagatttgttctttatgttgccaggcccagaagaacccagcagtaatctaaaacattaccttatacctagaatggcccaaaccaacagcaggcaatccacatcagcaggaaatccagcctgcctctctagccctgactttggaatgtggaacttaaagcacttcctatttcctttgagttgcagcagatcctttgctttattattattaggggcacttacaatgagtgtatggccctggagacatggcttacaagcacgctgtgaggcgtacaaaaatgagtcaaagcacttatgcttgccctgcaaaattcaagaaatgatttctccccactcagacactctaatagaactacattaacatttggaacttgaggtcatttcccctatttgtgccactgatccttgaactcacattctgagtacgagtatgtatcctgtatgctattaaaatataacttgaggccggacatgatggctcatgcctgtaatcccagcactttgggaggctgaggcaggtggatcactagacgttaggagtttgagaccagcctggccaacatggtgaaaccccgcctctactaaaaatacaaaaattagttgggcgtggtgggggatgcctgtagtcctagctacccaggaggctgaggcaggaaaatcatttgaacccgggatgcagaggttgaagtgagccgagatcgtgccactgcactccagcctggatgacagagcaagacaccgtctcaaaaaataaataaata

SEQ ID NO: 185731 - DNA, 597 bp, Homo sapiens
cccagacgagtgacagagtgagactagtctcaggaaagcaaaaaaggtaaccactgtcctgacttctgacactgtagttgattacttttgagggattgagagactgaaataaaatggtaacagtgaacatagaaacatagaatcctactacacacatcaaacattatgggattattaaatatctaaatttggaaagctaaccttttataagaatatcaaggaggctattttcatgaacttttgagtagggaaagatttctttagcaaaattcaaaacatgaaggatgaaggtataagatttgactgttaaaatttataatcttggatgcagcaaaagatactataaataaatacaaagataaaaccacaacctaggagtatctgtttggagtgcattaactgacagaatattagaatccaggattaaggaagaaaaagaagcaaatcagtaggaaaaaaacagcctaataaaaatatgggcagttcatagaagtgaaaatccactgggtgataaactttagaaaagataatcaatgacagcacttctcaaaataagacatatacgcggtcaacttgtctgagtagggatcctactag

SEQ ID NO: 185732 - DNA, 199 bp, Homo sapiens
atggagagagaatgaatgcagccagtgtgcaatgtgtcatgtcctctaaatgttcaagtccctcaagtcatagatccacctattttttctcaagttaatatctctacacctagttttaattccctgtcatgtatacaggactcacacattttatcttcaacttaggccttctctctccactcccccttctctctccact

SEQ ID NO: 185733 - DNA, 513 bp, Homo sapiens
aacagagtttcaggaagtctaaggaggccagagtggttggatggagcaagtgaaagactgaatggtaaaaggcagaaaaatgacagttgtaggcggtaactgactacacagaagatgttgcccaggctggagtgcagcggcatgatctcggctcactgcaacctccacctccgggttcaagcgattgtgttgcctcagccttccaagtagctgggattacaggcatgtgccaccatgcttagctaattttttgtatttttagtagagaggcggtttcaccacatgggccaggctggtcttgaactccttacctcaggtgatccgctcacctcagccccgcagagtgctgggattacaggtgtgagccaccgccctccactagaatttaacctctcaatctccttagatttccaggctcctaaataacatcagccaacacagtattgatgtgatttattaaaaatttgattttcagctccaaacataggtgctttacacaattctatttgtttt

SEQ ID NO: 185734 - DNA, 324 bp, Homo sapiens
agctctgcctccacgggcacccccatcttccctagtcagtatttgcatgtggagacaaaggtataaggatattttattagggaaaatgggaggagatagaaagaagagaaaaaggagaaagagaaggttagagaaaaggaatgggagaaagtataaaagggagaaaagataagagagaaaaagaaaagaaaaggagagaatagaaaacagcaagaaataaaggaagaaaagacaaatcttatccactagaagaaaaacaaaaacaggaagagaggaagaaaaagagaaatggaaaagaaaacttctttaaggggatagttttcc

SEQ ID NO: 185735 - DNA, 300 bp, Homo sapiens
cacaacactggcccagattcttgcggtgggattaagacaagataaaaaatgttgagacgtaatcattggaaggaaaaagaaggtactatttttatgttagagaataatgttatttacttataaaattcaaatctgcctgtaaaatttgaccaattgaagtatgttttaaaattatcagttcaaaaaattggtttcatacaaaattggcacatgaaaattcatagcattactatttaagagtcttttataaaatgtagccaaaatgtttcattcacaataacaattgtgtgcaaagaccag

SEQ ID NO: 185736 - DNA, 254 bp, Homo sapiens
cattttaaaaccattttttcatgcattgactatgccagtaaaaataattttgaagttttttttccagaaatctgaggttagcaagaaaagaaagaaatcaagaaaatcaatcataccatagtgttttatataaaaatacatcactaaaaagagcatttactctgtgggaaattatcttaggcaaaaccggttgctaaataagtcaaatctatcaaattcacgtgtaatgccagcatgttgccttctagggctta

SEQ ID NO: 185737 - DNA, 658 bp, Homo sapiens
cgatcgtgacataggtaggtatggtagacaaaataaataataaaaaaaaaacaacccatgctctgaatccttctggtctatagctttgggttcaaaaagcccttttcctctcagaaagctaactctgaaagccagaatttcaagaccatactctcttctgtgaattaaaaataattcgattgtgaaatcaggtaggtagatgtccacaacaatatggaagattcctcagatataaaatttttgaaaggggccaaacagtggtagtatgttcccatttgcttttcttaaaaagtgggtaaacaatgaaaacaattttcaaaagaatatgtgaaactttaaattacagatatagttaggaagagggtaaaataggagaaatttgtaggggatatttgtcatcttcaggctgttaggcaaccaaaataccatttcaatttggagataatttcaagagattagaagcagatacttctttcctcatctttctcttaacacatgtacaggcctgataccaactattaatagatctttttgccgtggataccgaatcctagtgaggacaaggtacaggagagtcagagattattcctagagatcaccagaggaggtgagttaatgagcagagtcaccagtttcgaggcatagtggcagcagctat

SEQ ID NO: 185738 - DNA, 642 bp, Homo sapiens
ttaagcacctgccctgggtcccaattcacctcctctacaatcacctcttgaagcctttggaataaagtttccctaggtccgcatcaaatttccttccctaatttttggcactgtccatatcaactcagtgcagccctgcaagtactgatcacacacgtactatgtatgtgtctaggaccatgttctgctttctgaaaaatggtatggacaaggagcttagggtcttggtagctgtgtttgggacatcaaaaataacataaaaaattgaggatgaaggatcaagtatagtgaggtgaaaactgagcatcactgaatcaaaaatgtatgatttgaaagagggctgcagcaactcaaggcagcctgtagggaagtggtctctggactcccggcaggctgggttcaaagtctgactttgccctttactaactctgtgaccgtggatgtttcccttaaccaccccgggcttcatcttcctcatctgtaagatgttgctaataataacatgtatctttaaggctattgtgtggactaggtgagaggtaaggaatttatttagctcagtgcctggcaggtaggaggcactgcataaatgtcagtgaatattattgatctccacactcattctcagcacagagccagact

SEQ ID NO: 185739 - DNA, 592 bp, Homo sapiens
tgacattagggcaggatatgaacaataccatccccttcatttcactccatatgctaccctcagaggaatcttcttataatgcccctctttattagccatcaggcccccttttgcctccagcccaaatatatcataccattcaaggacccccagcattggaatctgtcctaaccttttaaatctgacctgaactttcacctgtagccagtgctagtccacacactgtagaccgtctcgtcttgatcatgtctcccacacttctgcttcctccccttggtacactcccttctcctctctgcatctgcacaaatcgtattcatcctttacacccagctcaaatctcttgactaccccagcaagtagtaatatcttcctgttctaatttctccagatcttgtctgtctgtgttacatattcagcttttccaagggttctttatttggcaaactatttttgcctcatctagattgcattcaagatttcttacatattttctatcttttcctctctctttagtaaccctacacatgctaaatactcaataaacatgggattggttgtaattattagttcagtaatatcaggtgcttca

SEQ ID NO: 185740 - DNA, 264 bp, Homo sapiens
tggtattgagaagtccaaagttagtgatcactaaatggaactgggagagcgggtgagaagaaggaacatggtgttttgctattatcacaggccgttgtgtgtgcctggaactacaagggaagctacataaccaggcaatataggaaatctccactggtcacatcattttgccagctctgcaagactattccgtttcatattaattaaaagacactcaaggaaagaaaatcttactatgacaaagagagaaaggagagcctcatg

SEQ ID NO: 185741 - DNA, 157 bp, Homo sapiens
tcaacatccaagtatattctgctttaatgagagaggctaaagagcatgacatgggaaagtaacagaattcaccaggagggattagcaaagaaggggcggggtcaaaggtgacttgagagccacataggagagcttttggagagaatcataaacctaa

SEQ ID NO: 185742 - DNA, 209 bp, Homo sapiens
gaacatggctgtacaatgtggtggatgcacttaacaccactgaatttttcctttgaaaatggctaaaataatagattttgtatgtattttaccacagtaaaaaatcaaactggccggacatggtggcttacacctgtaatcccggcactttgaggctaaggcgggtatatcatttgaggtcaggagctcaagaccagcctgtccaacat

SEQ ID NO: 185743 - DNA, 187 bp, Homo sapiens
ttcagaggcgtctagcctgaagaaacatcctacccagaggctagaacatctccaactatctagaagatggccataattatttggttaatagccacctccaccactgaacttctgcaacttgcctctgatgaagctgttccaataattgttcatttcttcacccattcttttgctccaccagtatttc

SEQ ID NO: 185744 - DNA, 121 bp, Homo sapiens
acatacacgcttcccttctcacacctatgcattaaacagaacatactcattctctcctcaagaaagacaaccctactgtctcatccaattactgcaaacagctttaaacagaatccctggg

SEQ ID NO: 185745 - DNA, 278 bp, Homo sapiens
ttgcgaggatttagaaacgacatggagtagcttttaaaaataagattccaagctgggtgtggtggctcacacttgtaatctcagcactttgggaggccgaggcgggaggatcatgaggtcaggaatttgagaccagcctggccaacatgacaaaaccccttctctaccaaaaatataaaaaattagccgagtgtggtggcactcacctgtaatcccagctactcgtgaggctgaggcaggagaattgcttgaacccaggaggtagaggttgcattgag

SEQ ID NO: 185746 - DNA, 415 bp, Homo sapiens
aggcaagggagaaaggaaacgcaagaggctgaccacagccagatgagagcacaggccatgagaccaagacatactctagaatgcggcaagtggacaaaagtgagatgcgaagtttaggaatttcccagacagacgggggagaaattggttcggccaacagccattgactgactcctgtgccaggcactcgtgggtgtgacgtgaacgacgacaaaggacggcccgtgccctcgcagagcagacgctctaaaggagacgcccaaccaaagcacagagagatgcaggcgaccgcgtcagactgtgacgagtgctgcaaaggaaaccaggcaggcaagggacaaagggcaaaaggaaccacatcctaattttatttagggcagcaatgagcccacactcaagcgcgtgctctctctct

SEQ ID NO: 185747 - DNA, 508 bp, Homo sapiens
ccaagctgctcacacctgcaatcccagcactttgggaggccgaggcgggtggatcacgaggttaggaaatcgagaccatcctgggcaacatggtgaaaccctgtctctactaaaatacaaaaaattagccgggcgtggtggcttgcgcctgtagtcccggctacttgggaggctgaggcaggagaattgcttgaacccgggaggtggaggttgcagtgagctgagatggtgccattgtactacagcctgggcaacagactgtgactccgtctccaaaaaaaaagattccagtttgttattttctatgctgaagtgtaattcgagtgcattgtagaaacttttgaaaacacagtagtctgttgagaggctgttgttgcattagtgattctcaattgggtatcacattggagaagaattaagcttttgggggcccaggtactatggttattgtaatttcttctctgtacctcaccagatgcttggggaaggtgtctggttgtttataggc

SEQ ID NO: 185748 - DNA, 446 bp, Homo sapiens
tctaagttcacttagaaggaaaataagatgatcagaacaatgttttaaacagtgaaacctggactggtctttagagttaaagtaattaaaacattgtggctgtagcatatggagacacccacagaatgagacagaataaaagtccagaaatagacccaaatacatgaaagaatttagtgcataaaagcagaattccaaatgcatgaggcaaaatgaattatttaaaaaatcacgtggggcaactgggtatcatcagtgcggcgggtcgggggaagctgcatccatttctcacaacttacgccaaaataaattccaactaaattaaagacttaagtgtatatataaaaaaagaggaaacatccaatggctagaagaaacatgggaatcaaaaaatacatattgacgaaaaacttctccaagtataaaaactacctcagaggttctta

SEQ ID NO: 185749 - DNA, 267 bp, Homo sapiens
aaaacctagtaccatggtctttggctcgggtgcctgagagacccgattcaaatcacattgtgcgagtgttctagagtgagggccggtgggggggaatgtaaccggaaatgccggcaggcactctggggccgggataagtgggatgttcgtttgattagatgcctcccttctggttcctgcgttgcccaccagtgtcccctcgagggacagtgacgccatcagcctgcctggcagccaatgtgacccctgccaccagggaaaggtcgg

SEQ ID NO: 185750 - DNA, 661 bp, Homo sapiens
ctttttttaaaactcacagatggactcaatagcagaatggaagtgacaaagtgaagatttagtgaacttgaagacagaacaaaagaaatgactaacctaatgacagagaaagaaaaaaaaagcagagcttcagatttcagagtttcgctcttgttgcccaggctggagtgcaatggcgcaatctcggctcactgcaacctccacctcccgggttcaggacattctcctgcctcagcatcccgagtagctgggattacaggcattcaccaccacacccggtaattctgtatttttagtagagatggggtttctccatgttcgtcaggctggcctctaactccagacctcaggtgatccacccgcctccgcctcccaaagtgctgggattacaggtgtgagccactgcgcccagctgagaacagaggtttaaggagttatgttgattcctcaagatcaagtggcagaatttgaatgaaatgaaagcagtttcgcagagatatctgcactcccatgtttattgcagcataagtcacaatagccaagatacagaaacaacctatacaaatgtggatgaataaatggatgaagaaaatgtggtatatatgtgtactggaaacacatatatacttttaagaaggaaagaaatcccgtcgtttgtgac

SEQ ID NO: 185751 - DNA, 247 bp, Homo sapiens
cgaccgtctatagaggatccccgcgttcggccaaaggaagggacatgcgacccaaaggccactgcgcatgtgggcagtgtgtgaggattgagcaccatgaggtgtggccagagtgagggaactgaagggcagggctgaaggtcagatatcaggcccaattcagagggagcaagcctctggcctctatgcctccatgtgactccagaagacctacagagagcaccacacagaatccccagatacctga

SEQ ID NO: 185752 - DNA, 580 bp, Homo sapiens
ggacccagggtccacttcaggataatctgggcaagggagcttcccaaatgagcctgtagaaagccagtggaagggcttaggttggctaaggtgggatggagggcaaaaccctccccttcattgcagagtataggggcagtggcagagaatgaatgtatgtgtgggtttctcagccttgaggtataaggtctaaaggctctggggattcactgcatacaccacttccagttcaagcgcctaggttggttacagcaggaagttgacaagtatgtatttagtacattcgatgtttttaggcatctgctaaaagtaggtcaaaccactgaactcagggagggggctggggatccatttctaggatgctgtggaatccttttgggacatctgtagtataccacgttgggtagtgagagttgggggacaccccttccattgctgctgcttagtgtagggagtcatgtctttgggcagcagtaatattattaagaaaagctttttttttttttgagacacagtctctgtcacccaggccactgcactccagcctgggcgacagagcgagactccgtctcaaaaaaac

SEQ ID NO: 185753 - DNA, 492 bp, Homo sapiens
tcaagttaggaaataatttgatccttttgaagcttgcttctaagctatcagagttggccaagaacagtcatagtcaaaggctaatttagtctccctaccgaagcagtacctttctgaatactccaccccatgccctgtaaatgacaagactcttctacactgggtgatagaaacgcaagctgcttgaggcctaagaaatgcttcctatgttcatttcaggtggctttttccccagctttgggtggtttctttccatgcagaagctgatcaatattctgctgaagactcaaaggggaccctctgcagatctctgaacttgctttgtgcagctattttcttctggtactctgccctgtgaactcactacctgggcctctccggactccaagaagctctgtctcataactcagggagaccatttcataaaggatgccactggacttacaaagtgtccttgtagctcactgtgaggagtgcccaactgtagtgatc

SEQ ID NO: 185754 - DNA, 578 bp, Homo sapiens
tagagtggtcatgtgaggggtgggcgctctgccctggcatctcgccaagactacagctctaggatttcacatcatcgtcctgtctgtgtaccatgtgctggtagcgatgaagtaacctgccaaaagtcaagctaggtttccagaggtggcctgggtagaaatctgtgcttgccactctagccactggcttccctggagagggtcaggatagggagagcagggtctgtctcttgccttggctgagtcacagcccacacttcccaagtagccaacgctcctggagcctgtgctcaccctggggacaaaaaatagccagtatcgccatgccaatttggagcgccctcagaactttacattggggacctgggaagaggctaccacactgaaaaaaatctgaagtctctttaggggctgttatgaagcaaggttagcaaatgcagcactctcactcatcactgtagaaaagtgcttaacagggccgggcgcggtggctcacgcctggaatcccagcactttgggaggccgagacaggcacatcacctgaggtcaggagatcgagaccatcctggctaacacag

SEQ ID NO: 185755 - DNA, 131 bp, Homo sapiens
caggttcaagccgaagtcgaagctagagatgtgctatttgtgcctacctctgaataatttaacactccctccaaaatagactatcattagaatttgtcaattccagtgcatttgagcagagaacctcaacc

SEQ ID NO: 185756 - DNA, 341 bp, Homo sapiens
tctcctgattgtttcctttgctgtgcaggtttttagtttaatataatcccatttgtctatttttattgcctctgtgttcaaggtcttagccataaaatctttgcccagaccaatatcctgaagcgtttcccctatgttttctttgattagttttatcgtttcaggtcttacatttaagtctgtaatccaacttacttgagagataggggtccaatttcattcttctgcatatggatatccaattttcccagcaccatttagtgacgagactgtctctattgtatgttcttggtacctctgtcaaaagtcagttggctgtaaatacgtggacttatttctgg

SEQ ID NO: 185757 - DNA, 196 bp, Homo sapiens
agtctagaggatcccgcggctgtagaggtggtggaggagagagagacattggccaaagagaatagacaataggagcacctggccagtgcctgcccaccatgtgcttgttcctcttgggggtggttagtggttttctccttaatctcccatattctttttcactcacctgcagcctggtcccagctcacctgcccag

SEQ ID NO: 185758 - DNA, 332 bp, Homo sapiens
tgtgtgctcctgtggacttgggtagaagagtataggactcagcagttttgggggcccagagtctctgcacccactcccaggccttcccacaagttaatttatgtttctcatgtgaagagtttccacttagagagtgaataaaagcaacagtggtatcatgaaaactatgctggtaaaaggcccctggacttggtcatttcaagggatactaagttacctcatcttttgcatttacccacaagttctattgatgctgtatctgagagatttcacatatatccccacttcaccacctccagtcattctgcctgacagtcaactttcacaatttc

SEQ ID NO: 185759 - DNA, 247 bp, Homo sapiens
tacaagaaagaacatcaggtagactaacaatcaagaggctcatgtcagaccaccactcagactactgaagcctccaaattgtgcagatatttaatcattgtgaaaatcttccttccaggaggaataacttcaatccactttggatcacccaagtgctcttagaatttcaaggattttatgagcttgtctgaaaaagcaatataagttgtttcatatgttatttctttgttcgttcttgtggttaggt

SEQ ID NO: 185760 - DNA, 233 bp, Homo sapiens
gaggctgatggcgactagggctgaaggtctaggggtatcttattttacaatcaagggatctgaagaaagagagtttgtcagaacaggacagtaactgccaggcttctagggtaggagataatctccaggcgtaaggccattttatttccaggagctttgagcagaggctgctgggcagacacagaatgtctaagataagagatctttcttatctttctcccattcaggcacgc

SEQ ID NO: 185761 - DNA, 418 bp, Homo sapiens
caagagatggtaaggaggcttgttggagtggcccatgtgagaaatggattccaacttaaggtgcggatggggtggtggtagtgaatggattctatggattccctatctcactggtcactactcagtatcctttgctgatttctccaggtcttggatgtcagacttcatctctagctgtgttcttccctgggtgatctgatccaatcccatgattttgaatatgatcagcattttagtcctgaatatttctaggccccaaacctctcaaaactcatattcaacatcttgatatgaatttctcaatattccaagtcaactccttgattacccaacaccagttgttcattcatccagttgctcagagcaaatgttttgggtgccatcttcaatgtacttttataacctgcatctaatcctt

SEQ ID NO: 185762 - DNA, 169 bp, Homo sapiens
ttcaaaattgaagagcaaaaacgacctaaggcagctacactgtacagtgcctggcacacagcaggtaaccaataaactgctgttgatcagatgctggactaatacgtgtaggtttattttcttccttcaacacgctgtacctgtgttggatacaaataaggccttggga

SEQ ID NO: 185763 - DNA, 363 bp, Homo sapiens
gaaaatgagagagcaaaggacttcgatgtctgggaaaagggcacaccaggcttaggaaaacggagagaaaatatccagaggtggaaacagtcctggtgaatggagtgagggagcaggacaatgagggggagggatgaaaagggaaggatggcccagagaagtgccaggaggagccctgggaaattgtagtcaggagacagtttgtgctttgatttttatgttaaaaaatgactacgacactgaagaatggctaaaataaaagtgttggtgaagatgtaaaggaaccagaatcttcgtatcttatgtgggaatatgagtcaataaagccacttgggaaaatggattgacagtatctactaaagc

SEQ ID NO: 185764 - DNA, 215 bp, Homo sapiens
cttcaccccataatgtaaatgagtatcgaaaaaaaggaaacaaagtaagccccgtcacacggacagtaagagaaattctgaactccaggtctgttccaggatgagagccatgtccaagattctgcattctcttcttccaaccactcctttcaagaactcaaaatgccagtcagtgcaggtaaaggaagatgcacatccgccggttgccaatttct

SEQ ID NO: 185765 - DNA, 143 bp, Homo sapiens
ggaaaagcattagcaaaggtaaagaggaacaaaagttcattttggatcaggatatttgcagttgaaactggaacataagatgagaagtggcatgtagtaagaaattagaccaaagtagtagtttggaactagtttggatttta

SEQ ID NO: 185766 - DNA, 384 bp, Homo sapiens
tgggggttcttcagtgttccatgggtcattctaaatttggcatttgtcccttcttttaccttataaatgtttttaattgctcaagagtgctacatgtcatgaaaggaattgcctgggtgatgtcctaaatacagaaataataatttgcttgaaatggaaaaatagaaatatcacctcttatccaaagtacttctcttgggcttggccatgtaatgactctccaggtggaactgaattatcttctcatttggactataaacacaaccataataaatcatccaggcagtatatgttcttcatttcagtagttctggactttgaaactgtctttattgtttaaatgttggcatttatttatgaataaaactctctccaggcttttca

SEQ ID NO: 185767 - DNA, 284 bp, Homo sapiens
caatcaggagccttttaaatgcattgagtttgatttgcatcttgaacctgagtcttctgtggcatcctctgcccaatctggcttgcaggtgctccactttagctccctgtgaatttaaatatagaaactttatttgtgaggagctgcttccttcctctcacttaacacacaattttccaatgtaataatccagttttgggcatttgattttcataaaaactttccatgtctcagcttgtgagatatgtgtcttgagttctcaatgtaaacactttgccagtctg

SEQ ID NO: 185768 - DNA, 452 bp, Homo sapiens
acctattcagtagagtatttcaataatcattattgaaatctgactcttgttttctgaaacccagaaagcaggttcagtaagtgcacacgcattggtaccagggccaatggaagaagtatgttgatgtttatattttaaagtttggaactagaaacttgccttctactgaaatagtcattatagttttgaagctgatgagtgatgtgaggaggtgacaggagtagggagaaaaggtactggaaggtaagaaatactaatctttatttgataacggctaagtggacgatcaaagataaagacattgtagtacatttctcagttgttaaaaccattcacataaaggcagacaacataaatctatggaagggtttcaagaccattctaggggaaaggacagattcactttggatttggccatgatttcctgaatgtgacatcaaaagtacaggcac

SEQ ID NO: 185769 - DNA, 287 bp, Homo sapiens
acactggaggtttacactgaaacatgagagttaagtctccaagtaatgctgattatttattcttaatgtatagcaaggcttctgtatgagcagagtcctggcatttagaaaaaaatcttttgcggaaatatcaagatttttgtaatagggagagcctctgtggtttgaagtttgtagagggagtgcagttctatttttgaaatgtatccaggacttccaacaggtagagtcacagagctccatgtgatcaaatcagattcatcatgaattgccagtagtaagatgag

SEQ ID NO: 185770 - DNA, 298 bp, Homo sapiens
aagacgaggtctctatgggtgcagcacaccaacatggcacatgtatacatatgtaacaaacctgcacgttgtgcacatgtaccctagaacttaaagtataataaaaaattttaaaaaaataaaaaagaagaaattagccagacatagtggagcatgcctatagtcccagctactttgggaagctgaagctctgggaggactgcttgagcccaggttaagggtgcaatgagccgtgatcatgccaccaaactccagcctccacactccagcccaggcaacagcaggacatcctgtctca

SEQ ID NO: 185771 - DNA, 369 bp, Homo sapiens
cccccaatatgcagtgccttacatcaaaacagctaccagcattaacgtgatgatgagaaatactaagcacattcacatatcaacagggtctttctggaagcattggtttaactgtcaggagtgatgttgaatgttgagaatagcgggggctgtggttggctgctgggaaacttctgtggggatggtcctgtttaatatctctcagatgacaagaactgtcaattctacccacagggctggatgtatcagccctctcacccccaaatttccataggactcttctaccctaatcggttctaatgtttggatgtagtcaaggacactcacatttataatatgcagttagatgcaaagaaaaataattctgta

SEQ ID NO: 185772 - DNA, 433 bp, Homo sapiens
gattacaggtgtgagccaccgcgctccagactatagttgtctttaaaatgtcttgtgcttgctaaaatgtagaatctaagacctcattggcagacagactgattgagaaatataacccaggtttctgtattttaataaccttcctcaagctgggcgtggatgtgcacctgtggtcccaactactcgggaggctgcggggggaggatcgctggagcccaggagttcaagtccagagattgtagtgcagatcacctggactacactgggaaattcctctatgcctgcagtaaaaatcagccatgagagagtcccctatcctttctgccttttcttccttctgatctgcaggaggggtttatgtgatagaaggcagcttagcattaccaggtctctccctccttgaggagagcaggtgttcgggagccacactcag

SEQ ID NO: 185773 - DNA, 293 bp, Homo sapiens
gacctccctaagaagagtgaaatgattggcacctaatacagagtcaggagaaacacttggttaattcatgctgtttgtcaagtgtttctaagtctcccttcctctgggcacaggctttttcatttagtggaattaactgactagctctggccctgagtttgcagagtgaataaatggctgcacatcttctgtatgaagcatgaagtgaggctatttgctatgtagggtcctgggaagtgaattagcaatatgagggaagggagtgagaaggcccactgtggaaaatgtgatgg

SEQ ID NO: 185774 - DNA, 646 bp, Homo sapiens
gagcaatctccaagaagagaggaatgatcccctagatgttatcagaacctcacaggagctctcattcaagatttaacctttcttttcttcagtttcttcatccatgtaaagtgtgtggtacatattacccattcaacaaatattacctgccatttagccaatacttactgagctctgactatatgtcattagccctcgaagcctttttagagtaatgcaatgtataggtcaatgaatctctgattaggcactgtggctttcttttttctctctgtctttctgagtttgtgtgccttctctgggtggtacatccaaagcaggattgtatgagaataactgaaaacccatcctaacttgattgtcctaccctcaacacctatcagaagaggtagcctttaagacttagccatagtttttccagaattgttttgtaagccagcacagaaaatgactgatgtcaaaactgcattttctgaaaagcaagtacattgttgcagttgacctagatgtatattcacttttggcccatcaataaaatcatgaggcaaagctgacgtgtggtacaaatcttgtgcggattccagttaatggaccactgcatatataaaaccttttcccaagaatttttgtgttagtattttggtta

SEQ ID NO: 185775 - DNA, 357 bp, Homo sapiens
aatcccagatatttgaaggccaaatgttgttctctctgaaagacaggacattagacaatttaaacatcagcaaattgagttcagctatccttagtcactgactgatgactctattcctatttgtacatttttaaagtaatacttatgtccttcctggaagttctttttgcattccagattacgacagggactaaagtacaacaaagaaaaaacgcaaaaagtcaagtgtcaggcagaataagatccataagcatacatatatgtaagtctgggtcaaattcaccagggtattaatctttattttaaaattacaagtaatatttatcaaattttgcccaaagtaatttaattctggct

SEQ ID NO: 185776 - DNA, 380 bp, Homo sapiens
gtggggtggggtcggggagaccataagagggccctgtgctaggcactctctcccctcctttcaaactctgcctcacaagcctccagtaccccttccacagattcaaaaactgagcctcaatgggattaggtaactgttccaagaccccacaaaaatgataaatggaaggagccaaaaagtcaaaatttggtctgatcattaagtctcctcttttgaccaggctctacagcctaacaaaatccctcaaatacagcagtctgtagaaaggacacagccacctggtccccacagatgccactgatgctcaggtcagaatcctgtgccagtgatgcaggaggcatttctagggtttcagcaacaggtgtttccagtggagaaag

SEQ ID NO: 185777 - DNA, 660 bp, Homo sapiens
ccagcactcttttcttcatcctcatggtcaccacactagctcaagccccagtatctctttcctagatttactggtgaagcttactaaattcacaccctcccatccttcatgatgcagattcagcaatctcagaaaaatgcaaatctgtagtacatgcatatgacggaacattatacagctatgagaacaattagcaaccacagtcaacaatatggataaatctcataatcgtaaggcttcacccaagtgaaaacacattgcctgccctcacagctaaagaggagtgatggtgggaaagtggaagtgatcagaacccaatctgaggtcagaaaacaaaactacaatctatttcaggttgcacaaatgaaattttaactgaatctgagggacattagatttaatcaaaccaaatgagaaggcaaggtggtgttttgagctaagggcacagcagatgtaagagtcataaaggaagaagaacaaaacacattcaagataaaagacacggagagagggaaagatgacactgtacggtgaaatatcttgcaagtcaatattagatactagcctttgggctttagcttgagaacagtgggaagacattgacgctcagatttttttttctaaagttttttattaatgcctaatacatatagaagcatt

SEQ ID NO: 185778 - DNA, 284 bp, Homo sapiens
cacacgccaaaggcttccctgaatgaagagggtggctagtgagaataaaggtgagtggggaggatgtcgccttattttgcgagatttggggaataatcgtgtcttagagacattacattctcttgcacatgaagtagcccctccagggtgaaagatcaggaaaatcagtggaagaaggagtcttgagaagaggtagtaggtatagcacaaagccagaagttaggagctttctgtctagtcccaagggcactaatacgctatgtgatctcaagtccttccccctc

SEQ ID NO: 185779 - DNA, 220 bp, Homo sapiens
aggatcgcctgacgcgggcacagcgtcctccaagaggccaccttgctgagaggcagacttcccatccacaaaatgggatgacaaaacggctcagagttgaaaccacttctccaaggagacacaactgctgcccgcagagctgaagctcctgacccactatcaaatttcaatcatttatttgcctaccccctttatgatttttaccacccgttacttcaac

SEQ ID NO: 185780 - DNA, 718 bp, Homo sapiens
gctgttctagaggattcccgatcgtgacataggtaggtaaggagcgcactatgtcaggtgtggtcagcaggatgccatgttgctgggcacttttaaaacctccattctgtgactggctgcagtggctcaagccatgtaatcacagaacctgtgggatcacaggagcgagccaccgtgcatggcctacatgactccatttctgatatgtgacatttgattgttgccatgttaaaagagccccacctccccttagtgcacacttttaagcaacctggataaaaaagtctacatgctccttccctttgcaacagcaggagagccaaactcacacccctagccagtagcacggcagaaggaggcagtccaaggcaatgctagttggcattataagctttcacttcgcaggatagcgccatctcaaggcaagcagtgagagtcgtcagcactccactccctgcagccctctccaaagacagatcaaggtcacaaaacttaaaacaagagcgcttcaaggacatttggaacaggtaaaatagagacctacctatttcacaatctgccctctgcatattcctttaatttttagcatatataatatctgaaataaatgtaaattggtgagaatatgtcttagtatgaaattaaacctgaaaaaatctagaatattgagatattatgcattatttatgacttcctacttactatgtaagcaaccaaa

SEQ ID NO: 185781 - DNA, 725 bp, Homo sapiens
accactacatcattgcaaatctggtaggtgaattaattggtatatattattttactagatatgcttatttattaaaaatttaattttgaatggccagcatttatcagtggtgttttaaaaaatacagtttgattgtaattagccaggtgtagtggtgggcacctgtaatcccagctacttgggaggctgaggcaggaaaattgcttgaatccagaaggcggaggttgcagtgagctgagatcccaccattgtactccagcctagtgacaagagacaaaccctgtctcagaaaataataataataaatatagcttgattatatttgatatattagatatattgctgcaattatgttttagaattgcttcccactttgcatcttctaatcaatttcttattattataaatgatataagaatttatagaacaatatttgacaagcttcataaattgtcttagatgctgtattttaagaaaagggaaaattctcaaaaatatttaaagtttaattgtccacatattcccttgtctctgtttttcactgtctctattttttataaactctgccctctgcatattcctttaatttttagcatatataatatctgaaataaatgtaaattggtgagaatatgtcttagtatgaaattaaacctgaaaaaatctagaatattgagatattatgcattatttatgacttcctacttactatgtaagcaaccaaa

SEQ ID NO: 185782 - DNA, 380 bp, Homo sapiens
aaaagcccatgttcccaccagacagcccatgcctgtacttcccgtcgtactgacatgtcagatcctagaatgttcttttcctccccacactcactcactctctcaccttaaacactcattctcagagcttttcccatctccttgccttccccagagtatgtcaggatctagatgtattctaacactattcctcatacacggaccacaagtgtaatcctgctgtcacctggcagcccatgggtgctctgcgaccgtagggagcaagtctgccttgttcattcctgcctcgcggcacagcacccaccgtgcagcagccatgcaatcatctgtttacttgtcagtctaccccatttgagtgtaggttccatgagggcaggggc

SEQ ID NO: 185783 - DNA, 391 bp, Homo sapiens
taacatgaagcagatttcaagagagaaacagtaagaagaagttgaaaggtggttaacaccaaattatggaaggtaccagagtcctgactactgatcattatctttcagaaaataagaaacaaaaagtttcagccgaagacagcttgggtgtggtggctcattgctgtaatcccagcactttgggagggtgaggcgggcagaccacttgaggtcaggagtttgagagcagcctggccaacacggtgaaagcctatctctactaaaaatacaaaacaaacaaacaaacaaacaaaaaattagctagacgtggtggcaggcacctgtaaccccagctactcgggaggttgaggcaggagaatcgcttgaacccaggaggcagaggttgcagtga

SEQ ID NO: 185784 - DNA, 541 bp, Homo sapiens
tcccgggttcacgccattctcttgcctcagcctcccaagtagctgggactacaggcgccgccaccacacccagctaattttttgtagtttcggtagagacggggtttcaccgtgttagccaggatggtctcgatctcctgaccttgtgatctgcccgccttggcctcccaaagtgctgggattacaggcatgagccactgagcctggccgggatgtgatttttaaatcgaggagaggacttgaaagagttgagggaggatcccctgggttgtgcatatggcgggaaggggtattccaggagtggaggatgtcagcagggtgggaatgggatcagtgaggggaggaggagcagaggagtcagaaggatctaagggtagggctgaaggtgggaaaacaacctgtagggctgtttaggacacggaaagggccttgactttgctgccaacgaagatgtgaaggctccaggcaagggtaacaatctaacttacattttatgagggtcctgtggcagctgtggtgagaacagactttaggggtgctg

SEQ ID NO: 185785 - DNA, 203 bp, Homo sapiens
gtgagcggagatcgcgccattgcactccagtctggataacaagagtgaaactctgtctcaaaaaaaaagaaaaaaagaaatacctgggaataatggtccccattctgttacccttgctgggattacgggcatgtgccaccaggcctggccctgccatagtttttccagtcacctgttagttggcacaagtgcttccttttgta

SEQ ID NO: 185786 - DNA, 205 bp, Homo sapiens
acaaaccaataggatccctgtcctgtgtgttccatgcttagtgtctgacatatcacatacgaaacagaatccacatccagaaaaatctccatgtgcactagactaaagctatctaaaagcagtcatttcattttgattcctaggatgtccaggaaataaaatatgtgtattttcatgaaatgaatgaccttggaaatatcaagta

SEQ ID NO: 185787 - DNA, 201 bp, Homo sapiens
gcacttagccaggagaaatgacagaacttggtgagtggtatgcgaaggcaagagaaagagatctagaaagaatacagaatgtgcacttgggcaaacattgatgctaccaaccaaagtagagaataaaggagtcgaaaccagaagagaaaaagttcagtacaaggcatatgagtacaaaaagactccacccaagtggaaatg

SEQ ID NO: 185788 - DNA, 335 bp, Homo sapiens
tgaaagagaagaagtggccctgagcatttgtgaggggagagggctccctccctcctagccacctcctttcccaagaagcagtgctggatggagaaaggcccatgtttactcttctagaaattccatctctgcccccacaccacatcctgctggggtcatctggcatctgctctcccatgacaggctggcatctgacaagaccccttgggcagcatgctagactcagctaaagggacagcactcaatggtgactcagtggtggcccaaccccaggggtcttcctagtacacttcccagcagatctggctcccctgctccaagcaaagcagctgggg

SEQ ID NO: 185789 - DNA, 429 bp, Homo sapiens
tttttttttctgtgagcctacctacctaggttgggaccactcaggtaggatgttctatgatgggcaccttggggcaccacggtgcaaaggacaaagcactggctgctgggagaataggagaagcagaggctttggaattcgacctacttggctccgtggctcatgcctataatcccagcactttgggaggccaaggtgggtagactgcttgagcctaggatttcgagattagcctgtgcaacattgtaaaaccccatctctattttatgaaggaaaaaaaaaaaaaaattataggaataatttcaaacatcagtgattgcagtaaaaataaacttattaaatgacacgtttagattgtgttccaaaatttagctaaaactagctaaatcaaagaattcaagataaaaagtaatcagtaggacagatagg

SEQ ID NO: 185790 - DNA, 516 bp, Homo sapiens
actggacggaggtggcaccggtgggagaccaacagaggaagccctcctcccggctcccaattctggctttcgctagaagacaagagaaatgaggaaaacagctaccctaggaaatagccttccttgaaaatggtttcctttttctcaggtttgatgaatttggggatttgttgttgtcattttttaagtaaaaaaaaaatgccccaaacattagcgttcattatcctagtctgatttgggtccggctctacctgtaggagatgaatgtggtaggccagggggcccctgtggattctaatttatgttttcagttgtttgccattttgtatcttcattacggggctactttcctgcctccctaaagtcatctttcccagcatgctgtttctggactttatttagtaccgtggttacctcctgcaggctgtgtggccccatccttcaccaaaatgtcacctcaattaattcggcggccatgagacagatccatcagtggcccgccgactcccgtcagca

SEQ ID NO: 185791 - DNA, 418 bp, Homo sapiens
accattaacccacgagctgaggggtgcagacaaactacaccaacaagacaatgccaagcatgacaacatccctcggaacagaggaactgatgatgtatatattttcataaacatagaaaaaagaaaacacacaagcagaaacaaacattcaataggcccgtaacattaatcagttttaggtatatagaaaaacttcctgtttaaattctgttagactataacatctttcctataaaactttaatttggctaaggtccattatttctcccgtatgtctaacattagtgccagtattttggttttttcatgtttaaaaaaaaattgttttgattagctgggcgtggtggcaaggtgcctgtaatcccaactattcaggaggctgaggcaggagaattgcttgaacccgggaggtggaggt

SEQ ID NO: 185792 - DNA, 374 bp, Homo sapiens
agcgatggctgatgtttgggagaagagaattacaagcagaggccccagagtcaggagcacatctctagtgtttgaggaacagagagaagcgagtgagtctggattagaatgctcaggaagaaggctatggggatttgagtttacagaagaaagaggcaactaaattttgtagaacctcacagattatggcttggttttatttagagggaaacgggaagcttctagaaggttctgagttgagtagtgacatgacaatgctgtggtaacaatggtttcactctgactgccttactgaagatgcataaaggggatctctggtggaattgggagaccagttaggagactactgcaatcattcaatcagcaggatgatg

SEQ ID NO: 185793 - DNA, 908 bp, Homo sapiens
tccttctttctctatcccgtagaatagttttaaaaggattggtaccaattcttctttgaatgtctgtagaattctgctgtgaatccatctggtcctggactttttgttgttggtaatttttaaattaccatttcaatcttgctccttgttattggtctgttcagggtatctaattcttcctgatttaagctaggaggtttgtatttttccaggaatttatccatctcttctaggttttctagtttatgtgcataaaggtgttcatagtagcctagaatgatcttttgtatttcagtggtgtcagttgtagtatctcctgttttgtttcttagttatgttatttggattttctcccttcttttcttggttaatcttgctaatggtctattaattgtatttatcttttgaaaggaccagctttttgtttcatttatcttttgtattgtttttcttgtttcagtttcatttaattctgctctgatcttggttatttcctttcttctgctgggtttgggtttggtttgtttttgtttctctagtccttgaggtgtgacaactatagaatgtcaatttgtgctcttacagtctttttgatgtaggcatttagggctatgaactttcctcttagcactgcctttgctgtatcccagaggttttgataggttgtgtcattattgttattcagttcaaataatttctatcttgattttgtttttgacccaatgctcattcaggagcaggttatttaatttctatgtatttgcatgattttgaaggttcctttgtggagttgatttccagttatattccattgtggtctgagaaagtgcttcgatatgatttcaattttcttaaatttattgaggctcgtttcatggcttgtcatatagtctatacttggagaaggt

SEQ ID NO: 185794 - DNA, 285 bp, Homo sapiens
gggcctggtggggggacaggggatacacccagtgcttgtgtgagctcttggcagtgcagcctgacagtgagtgccatcccttttcaagggctctggtgagggtcttgcaccagctcctgtctgtctgtgaagactcaagtcctgtttctgcagggggatgccacactcctacatccactttcaaaccagccactctctcctcagcacctgggaatcagctcctaccctcctcaacctgttcccaagttaccaaggtccccaacccccccgccatttctcctgtcc

SEQ ID NO: 185795 - DNA, 430 bp, Homo sapiens
atagacaataaaacaaaccaaaacaaaaacactctgttcatgcacaaaggcaaccctcttccagatgcttaaccccttaaatgagtatttcgatgacacagagggatcatcacttcacttgccactgaaatacagccatctctggagtgaaatttggcagctgggaagtagtcaagctgcagtacttatatgacagtttggggaaaaggagtgagacagaaatagcagattccaaaataatcccattaaaacagcagggaaagtggaattgggcaataagatgggaggatggtttgccccaaagtctgactgtcctgtttagacaatgcggacttcagccccagaagctctaacttgtgtcactgctggaatatagtgaccacagtcaagaatcccctacacacaccccaaaaaggggggcttatctaat

SEQ ID NO: 185796 - DNA, 758 bp, Homo sapiens
tactttccccattgttcaagatgtgttttctcaggcatctccgtgccctggcttgtcattcagccagcatgtgagagaagactcaacaagatcagaaaccaaggaagaagaaatcaccagtctcttcccaggggatccagggacagggctgtcgtcactcatggcctttttcactttctttagttccacctactccccaaggtcttaccctccccaggatggagccccaggaaaccaggtcctggcagtccctcttgagatgccagaggcctaggtgagctgtgcttccctctgccttgcttgggattctctcaccgctccctgaatctggcctcagcctctgtctcttgccccagcatgacacacggcagagtatgaaccccagctgctgccttcctaccctccctctgcttctcttctggaggctgccaaggattggatgtccactgggcttggagttccaatcatccaggtggggaagctgagtttccatccaggaaagtgattgaatggaggtcccttggaaagacgagaggccaggtccatggcccagggatcctagtgcttgatcaggttctcttttcaggacttcttggagctgtggttaggcctccatgttagcaacagacacccactccagaccctcacctcttgaccctggcattactggcgctgcccctgcctcattctaaaatagatggaaagactgatgagccctgggaattctttcaggatttggtgacatttgatgatgtggc

SEQ ID NO: 185797 - DNA, 403 bp, Homo sapiens
aaccaacccaggggttagtcatagcttagttaacactttcgtacattgctaaaggttcctcactgctgtatcccgtgggggtgtggctaggctaagcgtaagagcagcataaactattcaaacttatctttacttcccaacacacacccactatcatttagtcaattcagttttctttactgtccctaacaaatcatgttcatttctgcttatgtgtcatataaacatacacactctccctttaaacatacaaagtaggctgagcatggtggctcatgcctataatcccagcactttgggaggctgacggggcggatcaggaggtcaggagatcgagaccatcctagctaactcggtgaaaccccatcttttaaaaaaaaatacaaaaattagccaggcgtgg

SEQ ID NO: 185798 - DNA, 511 bp, Homo sapiens
aataatttagtagtagtaggagcagcagcagtgtttataagtactcaacaaattttggccgattgggtaactccttagcttgttattgctccattcaatcatataaacagctggaaaactaatcttccaatcatttcactctgatgattcttgtctaccatttcatgtattaacatttcacaatggcattcaaggcttttaataacctcactctcctctaactattcaaacttatctttacttcccaacacacacccactatcatttagtcaattcagttttctttactgtccctaacaaatcatgttcatttctgcttatgtgtcatataaacatacacactctccctttaaacatacaaagtaggctgagcatggtggctcatgcctataatcccagcactttgggaggctgacggggcggatcaggaggtcaggagatcgagaccatcctagctaactcggtgaaaccccatcttttaaaaaaaaatacaaaaattagccaggcgtgg

SEQ ID NO: 185799 - DNA, 499 bp, Homo sapiens
tattctaccacgtatcttataaatgaaggaatttttacaactaagcataccattattacaccttgaaggggggaaaaaacccaactcagtaacagctaccatcccaaaataaaaccatcttacacattactatgtaaaaataatttcctaattattgctaagaaaagaaacataatacaaatataatttttaaaattatattttaaaagtgtttaatatgaaacagtatgttccctaaaataaactaaaatgatttcttaacatttcatatgaaaatacattacacttttaagttagtcctttcccccatcaatgcttacagcggccttaattttatagacataaatattctcaatactgtcaatttttaatcaacccttcaacagatttcctcacatccactgtaaatgcagctccaatgctacacacaaggatatctttgctctaaaatacacactaatgatacttgaaaacttaattttttttttttttttgacac

SEQ ID NO: 185800 - DNA, 296 bp, Homo sapiens
acagtgaagagacaaactcttgaatgagagaaaatatttgcaaagtactcacctgacaggggactaatctaatatccaaaatatacaggaaactcaaacaactcaacagttaaaaaaaatctcattaaaaagtgggcaaaggacatgaatcaacatctctcaaaagaagacatacaaatggccaacaggcacatgaaaaaatgctcaacattactaatcatcggggaaatgcaaatcaaaaccacaatgagatatcatcttaccccagttggaacgactgttaaaaaggcaacaat

SEQ ID NO: 185801 - DNA, 405 bp, Homo sapiens
ccctgtgaatcacttcgtcttaggtgtgttggatgcaaatagcatagttttcttttgttgatgttgctgttgttcttacttgggtttgggtttttttcttttttcttttgctttcttgctttatttctcttctctaatattgctatatgactcaagttgtctcaacatttttttctcaagtgatccacctgccttggactcccaaagcgccggctctttgggctggaaaacgctgaagatgactgctttcactgaggtcaaggattgtaatattgccagctttgtaaagtcattacagccagaagtttcttcagtgatcttctctcttaaaaacatcatcacctccacgggccggcgcgttggggaaaaccgggatttggccattagtcggctggatgaggtcct

SEQ ID NO: 185802 - DNA, 473 bp, Homo sapiens
tcttatcaggaggcacataatggagtgacccattatagtacattgtaatatatgataggctggtccttgacttttaggatctctgttctggtatctctctcttttaaaaatgatcacttatagtttctgtacatttgttttttcacctgtattctctcatattctcttcattaataaaagattaacagataaaactccattttatagattaattataggctatggaaaattgttgtttatctaatgccatagacttttaagtttcatagccccaatattggtaaattgtcgagtactacagttctttggagtgttttggatcatgtgtaactttgaaaatgtaatggaagttgtagacccactcactggaaaatatgcttgaaagctcctacaaaatttggcgatttcatttcagtaggtttaaagacaccctctgctatctccactcatccatgaacttcagttaaagacct

SEQ ID NO: 185803 - DNA, 217 bp, Homo sapiens
atgaaattctttgcattcattgaattcctcttcaagatcttgttaggtaagtgtgtatcttttgccaagggctagaagaaattctgatgtgatctgaatttgggctggagattgccaccaccagacacatgttctttcccttcctgcagtttgaaatcttaccttgattcaccttatatgtgtatataatatttttgcaacttgagtgttattttaa

SEQ ID NO: 185804 - DNA, 127 bp, Homo sapiens
ccatttgctttattattctctctttacatacatagttataaatatatgcacattttttcctgaaatatttgagatatattcgagactcattacccctgagtgtatttcttaataacaaggtcggccg

SEQ ID NO: 185805 - DNA, 304 bp, Homo sapiens
tgtgattgcgccactgcactccatccagcctgggtggacagagcaagaccctgtttcaaaaaaaaaaaagtggccaagcgcggtggctcatgcctataatcccactactcaggaggctgaggcagaagaatcgcttgaacccaggaggcagaggcttcagtgagcaaagatcgcgccactgcactgggcaacagggcggactctgtctcaggaaaaaaaaatgtaatgataaagcattttttcatgtgttatcttcttcattaagaagttttaaaaatgaatgtgttggccgggcgcggtggct

SEQ ID NO: 185806 - DNA, 359 bp, Homo sapiens
atttgtgcctagaaaaataaagaatgatgtgctggtgaatcttgggtcacctatgtactatactataattgaaccttacctggggacccacacgttcaggctcaggtgttttgtttcttagagcctttgttaagtttcctacgtgtgcgacattcctaaggtcttcaagtttcctattctgttttgtgctgtgtgaaagttctgatatgacccctgatgataaagtccataactgtagttaactggtcatcactgctcaggtcccagttactaagaagactaccaaaatggcatcatcttaatcttgaagcgtatttctgacattcctgaaccgttcaacccttatgagttttatagaa

SEQ ID NO: 185807 - DNA, 707 bp, Homo sapiens
  misc_feature (41)..(41): n is a, c, g, or t
gctgaggtatctcgaggattacgatgcattgtcttcctttngaagcctcttcctctataaacatctcaggcatgaattcttcaaagaagttgacaagggggaggggtgcagtgactcaagcctgtaatcccagaactttgggaggccgaggtgggcggatcacctgaggtcgggagtttgagaccagtctgaccaacatggagaaaccccctctctactaaaaatacaaaattagctgggtgtggtggcgcgtgcctgtaattccagctactcgggaggctgaggcaggggaatcgcttgatcccgggaggtggaggttgcagtgagccgagattgcaccattgcactctagcctgggcaacaagagcgaaagtcggtctcaaaaaaatattatccccaaatatttattgagagtacagcatgcctgcactgtgctagatattggatccagtaatgtattctgcatctacaatgcattgcagattacaaagccctcaacacaaatcaaagaagttggtgtatcaattatctattactatataacaaatggctacaaatttagcagcttaaaactacacacactatttcatcatctctgtgggttaggagttccagctatggctcagcaggatcctctgcttagaatctcacaaggctgtcaggtgcagtggctcttgcctgtaatcctagcactctgggagacggat

SEQ ID NO: 185808 - DNA, 456 bp, Homo sapiens
ttgcttgaactcaggaagcagaggttacagtgagccgagatcacaccactgcattccagcctgggtgacagagcaggactctgtctcaaaacaaaacaaaacaaaacaaagtgcataatatataaggaagtatttgtcatataaagttatatgaccagaccagaataaataatgcatacaaatataatatttaaaaagaaagtttatacatcaaaatgttaaagtgattgtagtttagactgagagattttggttttctttttacaaaaaaaacccataaacacgaattttggtagctttctgagttttctatgatgagaattgcttttataagaatatggaattttaattggagataataaatagtgaatgttttcatgtcactggtgttacccttatcagtgtattgttcttatttgctgttccccaaatccacctctggctttacccctggga

SEQ ID NO: 185809 - DNA, 170 bp, Homo sapiens
gcagccaacagtatgtctgttttctgtctctgtggatttacctcttctgaatacttcatgtcaatggaatcatagaatatgtggtgtttgtgttgcttcaccataatcaaattttaactatcaatccagtttcaagccaggcacggtggctcatgactataatcccagca

SEQ ID NO: 185810 - DNA, 231 bp, Homo sapiens
atctagtctttgagcttgaagaactcagacctctgaagacaggatactacccagctggtgctggtgtctctgagtggaacacaatggaactggtttggcaattgttgggaaaaactacaaagtggattcagcagctgctacaagaaggacctgctactgtctgggtaaaggagtgttgccagagtgacccttacaggaataggaagcaaaaagaagagtcccagctgggcg

SEQ ID NO: 185811 - DNA, 383 bp, Homo sapiens
agaaaggaaacaggttacaacatgacgactgagtcgctgcacgcctgttttcccagcatttcgggtgtctgcagcagtaggatcacttgggcccaggaattcaagaccagcctggacaacatggtcaagcttcgtctctataaagaatttaaaagttagctgggtgtggtggtgtgctcctgtagttccagctacttgggaggccgaggcaggaagatcccttgagcccaggaggtcaaggctgcagtgagccacgatcgtgccactgcactgcagcctaggcacaaagtgagaccctgcctcaaaaaaaataaaattaaattgaattgaaattttatgacacaccaggctttagctaatacccgccccctgcagttgtatag

SEQ ID NO: 185812 - DNA, 158 bp, Homo sapiens
aaacctgcctgttggttaatctcctttgtgtcctctagcaagggcagttgttaatataagtaatttggccagccacaatggctcacacctcaagaggactgcttgaacctgggagttccagaccagtctgggcaacatagcaagacgtcgtctctact

SEQ ID NO: 185813 - DNA, 340 bp, Homo sapiens
ttctcataacagatgacgttaaacatctttatatgtgattatttgctatctgtatatctttgatgaggtattcgttgaatcctttccctttttttttaaatagggttgttcattttcttactgtgttctaacccagtttgtgattgtgtttctttttcttaacattgtttttacagagatgttttaaattgtaatgaattccagtttattactttttcctttcataggtcatgcttttggtgttgtatctaaaagttgtaactgaacccaaggttacctagattttctcttgttattgtccagaagttttatatttttgtgttttacatttaggtctatg

SEQ ID NO: 185814 - DNA, 333 bp, Homo sapiens
ctctgactatgtgttgtctcagcaatcagatatatcttacgttgaggtaatacgaatggttcctcttgccgttaggggctcatagtggggtcagtacatttggctaaccgggttcgatcccagatggtggtagtagttgcaccactctctgaacatgagacttactagagacgttcaaatttgcagtgaatacgacgatcaggagatcctctatagacaagtcatgcttttggtgttgtatctaaaagttgtaactgaacccaaggttacctagattttctcttgttattgtccagaagttttatatttttgtgttttacatttaggtctatg

SEQ ID NO: 185815 - DNA, 112 bp, Homo sapiens
agcagaattcaggaatgaataaagtgtacactgaagaaaaccaatgtaattttcccattatacacaaacctatttagaccatcacctaacagtcttcttctctgtgacttaa

SEQ ID NO: 185816 - DNA, 135 bp, Homo sapiens
acctttcctgaaagaaaaagaccgcctcaactaatcagaacattgtgactaagcatcaagacatacataggtgtctgggcatggcggctcacgtctgtaatcccagcactttgggaggccgaggagggcagatca

SEQ ID NO: 185817 - DNA, 763 bp, Homo sapiens
  misc_feature (697)..(697): n is a, c, g, or t
ttccccaattccgtccccttcatcccaacagagctcctttcctaagtacctttgcaagtcttttttatattcatgtaatacatatataatcattacatgtaagcattttcttatttatttctacgcaaatatattgttctgtatctttcatcagtcagcagtaggtcttggggacctgtccatgttactgcatgtagaggtatttcgtttctttttattgcatctttagtgttaatatatcctagtttatttagccatttctctttggtatttaagctgatagcaagttttcatttctataaatgtttcttcagttggtatctttgttggtgccttctgtgtgcatgtgattttctttagggtagaaagcaaaaagtagaattgctgagtgttgagagtatatatttaatacatacactcacaaattccttccatagttctattacaggatttgtaccagccagtattcccacttgtattacctgttgtttcacacatgcacaccaccatttgatattattaaacagcagtgttttgagtaaaaatggcattccatttgcttgattgctagtgaggttcatcatctttacatatttgttatccatttggtttctttgtgggtaaatttgcttattctcactgtcctttgggttgcattttttacctattgagttttaggtggtcttccttttttgtncatgcagagtgtatgagagtctcctctttctttcttaaagaagtcttcttgagaatcgtactatcg

SEQ ID NO: 185818 - DNA, 166 bp, Homo sapiens
ggaagtggctgggatcaggccatgaaatggatttaagtagacacttggtatcagagagactctaggagaagagcttcaaggtctatggaaacaggcaggcagtacacggagggctccaatcactgatcagccttcagaggccaccattgtaagaaccctgaattaa

SEQ ID NO: 185819 - DNA, 579 bp, Homo sapiens
tcctcttagctcccagtttcccaaactgtgtgccaaggtgcccagagcacctcaggcttgaacttgtgttttgagttggttcatggtttcaatattagatacctacacccgtttctacaatgtcatgtctttgtaaagatgtattttcagaggttgctccgataaaaagcaactactacatgaaaatgaatgtagaacaggaaatgacagtgtggtattgtccaatttgattctaaggtttgataagttctacagtgctctacactaagttgtaaggacataactactaagtaagttgttcaaacctatttcttttggcctgggggtgtcgtgaaaaatttgctaagactcagagctccctgaatgggtttggaaacctctgccttagcttttagtttgcttttctgataaaattattgatataaagctagtaccagctgatcatggcttaatatatttcctctcctatgtaatatgtttataacttctgcccagttctttcattttaaaactaatcctattgctaacttgttgtactagtcacttcctggtttttcctgtactggtcttctgcttcta

SEQ ID NO: 185820 - DNA, 155 bp, Homo sapiens
tattaagagtacttactatcaacatgacttatcactgctgatgataaccttgatcacttggttgaggcggtgttaggttttttcactgtaattattccctgagcccctcccccacccacatactgtactttttggaaagaagttgctatgcacag

SEQ ID NO: 185821 - DNA, 490 bp, Homo sapiens
caccaggatgatgagtttagtcctggaatagatgtcgtacaagtcgggtggtgaactgcactgaacatgcctggagtgatgttaggaagacagcaagctgaaaattagcattccagaagggataaagccatctgcatacaatattagaaaattttatgacattatgtttctaggtagtttggactccctgagttagttaagaaacttaattttctttccatcacaaatatcttagggatcttttggttgcaagtaagagaaatccatgtgcttattaaagtaaagggagatgctttatgagtgaggcaggataacctggtagagaaattaggtgttttttccttccttctctcaaaaggctggcaaaagactagctccttattttggaggactgatgtagtctttgctttgagggagaagagaatttttaaaagtcaactttaaatatcagtttcatactctaaaatgtatcagttcaaaaactgtaatt

SEQ ID NO: 185822 - DNA, 445 bp, Homo sapiens
aggcaatgaatacttgagatactggctacggatctgattcaatcagaagtttattccagttaaatggtcagtctctcttctctccatctcccctgaatataatgttgctgattctaaacagtggctctccagttggtgacaatcgaaatcagctgggagctcaaaactcctgacacctaggtcctaccatgaaaattctgatgtaattggtccgggatgtggactaggcaacagaatttttaaaactccctcaggagattttaaagcccaccaagattagagcccactattctaaaaagcactgtaccccttatttaagctaccattaactccacggtcttggcccagtcttgagtatgtctttatcagcagtgtgaaaacagactaatacaagccccacggaaagagttgtcttggccaggcgcagtggctcacgcctgtaatc

SEQ ID NO: 185823 - DNA, 353 bp, Homo sapiens
ctcttgtaaaagtgctcaggtgaccctagcacccctgcaatctggatgaagcactgttgaggtcagtttagtcaggtttaggatggccccagggcccaaggctgattacactgtggggatgcaggggaaagcggccgggaagacccagccaccagccagtgcttctgatggggctttctctgtacttggccctgatggacagaataagagaaggtattcacatggtactgaccctgtgccaaggattactgtaagccccttccatagagtaactcatttaatcctcgcaacaaccatattattatccccaatgtacagactgggacattgaggcatgaggagattaaaatatc

SEQ ID NO: 185824 - DNA, 233 bp, Homo sapiens
aaagctgaagtacgcataagttaagtaccttcacctaagaccacaagtagctgcataagaacccccgccttctattttctaaccttaaccttcctctgctagaccaaggggccttgctgacaaaggcttctattaagtactcatcccctgtaccgtaagcagaattgcgtgtgatgaaggccaaccacagacggcacactttcatgatgtagttggttacggcataaactgtg

SEQ ID NO: 185825 - DNA, 468 bp, Homo sapiens
tgtgtaacaagcctgcatattctgtacatgtatcctgtttttttgttttgttttgttttgttttgttttttaaggagaaaaaggaaaaaaagtctctgagggaatgacagttaagcaggtatctaaaggatgaatgatgaattagtcagcctgaggagagaataggttggctcccagacagagaaaaagaaaaccagaagagagccagtgcatggaaaagcctaagacaaggactcaaatggatctgagtggctgaagtgtagaaagcaaggagaaagcagttgaataagcctggagacctaactaggggaccagatgttgaagggccacctgaacatttgagaattttatttttatttaaggagaaagccattaaatattataagcagggatgtatcatgatcaaatttggatttcaaaaagatctctcttgtgtggaaaacagatgatgaggaacagaatagagca

SEQ ID NO: 185826 - DNA, 506 bp, Homo sapiens
ccattgatgtgaaggtcatagagaatgtaggtaaacaaccaagggcttgaagttcttttaagcctggagaaaatgcacatcttgccaaggacttaatacaaggctttcttccataacacgtttaccaaagctgtccactaggggcacacagagaagaggcaccataggactttattctgctttcctctaccttgaatagcttgaccctctacacttctgcatctgaaactatgcccagaagctctaagtgcagcattttagcagattttctggacctgctttgagtatgaggttctttaagaagtctggttccaactcagatcctggaccaagtgcagtaatcactgatccctacataagacaggagacactaagcacaaatttgtctccagtaacttttcttaggaccccaattctcaacagcaaaaataaaaatcctcatttttgcttcgatacctggggcaatgagattatttcaaaatggtttaccaaactaaaaaaatggt

SEQ ID NO: 185827 - DNA, 521 bp, Homo sapiens
gtggggacaaaccacatccaaaccacatccgaaccatagcacttactattactggcttattataaaggacacaaatgaataaccagatgaagcactgcataggttgaggtctggaagactctagcaccggagcttttgtccccatggagggagagtaccataccctcctggtaaatggttgtgtttgtcaactctgaagctctgcgaataccatcatttaggggtttttatggagcttccactacacaggcataactgattaaatcattggccattggtggtggaactcagtctctagcccctttcctttccctagaggtcagggggtgaaactgaaagttccaatgatctaaagatatggctgattcctctgaccaccagcccccatcctgaaggtcatctcattagcatgaactcgaatatggttgaaaggggctcattttgatttttttttttttgagacggagtttcactcttgttgcccagcctggagtacaatggcacaatctcggctcactaca

SEQ ID NO: 185828 - DNA, 392 bp, Homo sapiens
agctccaagggatgtggtaagaatgtatgagtgacgcacgtggaagagtgtctgggagagagcaggcaacctctacagaagtgcaggtcactagggagacagcaggtacaacacagccttaaaagcatggactccagagtcagccacctggttcccagccgcaatcttagatgatctatttaaacttttccagcctatttcctcatctgtacaatagagatgatgaaagtgtccacctcacagtcttattgtggggattgcaacacacatggcatagagcacatggcagagtgcacatttttaggagctcaattagtatttacttcaagaccgtaagtgtcgctagaaccccatcacatgtctgctatctgcttttcacttctacacaggaa

SEQ ID NO: 185829 - DNA, 332 bp, Homo sapiens
actgtcctgccccagtcctgctgactaaagccacagccctcaaagccacttgaggctcccatctccactgctgctgataccctcttgtccatgccaagtctttgcctggattttactaaggctatgctggcttccaagcagaacaggaggaatgtcttgctctccattctgtgtccatgtcatgtgaccccaagccttaaggtcccttaggataacagttcctttagtttctgcctgaagctcatctcccctccaggctgacagccagtatctgagataagcaccattgtgtcctcttgattccaatttcctaatcaggcccccactcaaat

SEQ ID NO: 185830 - DNA, 367 bp, Homo sapiens
ggtgcaagctgttggtgggtctctaaatctggggtctgtagggtggtagccctgtgtgggggctccaagtccgtattttccttctgcactgccctagtagaggtttcccaagaactctgcgtctgcagcaggctgctgcctggaaacagtgggagatgggggtgggaggcagatccttcaccaatggttaagcaccatcttcttgatgctgacctagtaacagtgagttcttatgagatctggttatataacaaggtgtggcacctctttcctctctcagtcttgcttctattccagccatatgaaacatctccttgccccttggccttctggtatggttgtgaggctccctgagacgtcccagaag

SEQ ID NO: 185831 - DNA, 1832 bp, Homo sapiens
  misc_feature (905)..(905): n is a, c, g, or t
  misc_feature (1088)..(1088): n is a, c, g, or t
  misc_feature (1464)..(1464): n is a, c, g, or t
  misc_feature (1626)..(1626): n is a, c, g, or t
gagccacctccctgaggccgctgcatcgcttccttacagcagtcaaccacagactttaattaatacaataaggtacagacaacagggtgccacggacatttaggcccaaggaatattatgcaaaagcagtgttttaagggagtttcacgtgacagaccagcagattacactgaacaaagaaacaagaagtgatgttgtccctgcctggaagtgaacttggggaggagagagggagaattattcacaaaatctccttccccaaacagtcaacacccagaaccaacatggagctcctaccccactgggacctgctgactgaattctttctgagacccagtaaggagaactggttccggcagctgagaagccaggctgtctgctaacggcctacaaggggctctctcgctgctgttagggctggtctgctctgtgtccgtggtccagttgggtacaacaaacccattcactcaacagtgccagagacccctctggagactggggaagcagcttccttgtggtcgagagctgtgcagccgggacaggagcctgcattcgttatcacacatcacggccttcggcttggctgggggccaggtgggcatggatgctggcatgcccacaggcagatctcagctttccagtgaggtagcagcctgccgcaccaagactcagggctgtcatgaggaagagcccctgggacccccagcatcctcgcgaactccctggagcttcatcatggcccatgcgcagcacacggcagacaaccggttcagcagtccctggagcccacgtgcctccccttccttttgccttggctcccttatgcccacccaccagctcttccaggctccaaaggggaagttgaagaagaatctggtacctggcccagctgccaagccccaagntcacacagccctagaaccctgctgccaagtccgtctcgggggacctaggagaggaagtccgccagcctgggaagctgcctctccagccttggccaagcaccacctggcaaactgcagctgaaatgccgagcacactacagggggataccccctccaccccagccctgctgagaagcccagccncactcttgatctccctgaaatccttgaatctaggtcaagggtggtgctaggggttggatgcacagggaagaggctgagcaccaagacatgtggaccagtcaggactagagacctccttccttccagacatgcacactcagccacgctggagatgacaaaaccttacacactcaaagccaatacatgcgtaggggcggccacatgccacgcactgttctaaatatcttgtacaaactcagctaatcctcaggacaattctcattttacagatgaggagaccgaggcacagcgtggtgaagtgacttgttcatggtcacataggtggtaaggcagtgaggtggaacttgaacccagacaagcagcctccactcccccnacctgctcacctctaactcaggccgctcttcgaagacaacctgaagatttttctttgcaatcgatagtctagagcaggagtctccaaggggagagaccatgtcccactgggagcccaaagcactccagggagggtaggaaaaaaatatgagagcttttgtantgattttgtttcctcactcctgtttccttctctccccttgtgggtgagggcgagtgagcagttgatcatctcttaaaccagggctgccagagccagagccagagccagaaaatggagtgccttccttccttcctttccttccttcctttccttccttccttcctccctccctctctttttttttgatggagtctagctctgtcgac

SEQ ID NO: 185832 - DNA, 205 bp, Homo sapiens
tgagtgggtggagggagggaggggtggaggcagcattacagccgcagccaacgcgcagttctttctttcttttttgagacagaagtgagactccaccttaaaaaaaaaagaggtgtgagtcccctgtgagtgcagaacgggtctgacatctgacacaggcgaggctccctagcagtcatgggaaatggggttgaacttaacaaat

SEQ ID NO: 185833 - DNA, 608 bp, Homo sapiens
tttgatatacacccagtagtgggattgctgaatcatatattagttctatttttaatgtttttaggaatttccaaactgtttttcctaacaacttttctaatttacattcttatcagtagttatcaaccattcccttttttccatgttctcaccaacatttgttataacttttgtctttatggtaatagccattctaacagtcatgaggtgatagctcattgtggttttaatttgcgtttccctcatggttagtgacattgaacacattttcatatacctgttggccacttgtatgtcttcttttgaaaaatgtgttttcagatcctttgcccaatttttaattaggttatttgttttcttgatattgagttgtttgagttccttatatatcttggagattcaccccttatcatatatatactttgcaaataatttctcccattctgtagattgtctcttacctctgttaattatttcctttgatgagcataagctttttagtttaatgtaatcccatttgtctatttttgcatttgttgcctgtgcttttgaggtcatatccaaaatatcattgtccagactgatgtcaagaagatgttccttatatt

SEQ ID NO: 185834 - DNA, 142 bp, Homo sapiens
ccccccaaaatattaaaggaccagactccttaaactacgttatttttaaatccaaataattcagtagctttttgttttccctagtatatgtacacaccgtacatacctaaagttaagaggaagggttaatttagtgcagtgt

SEQ ID NO: 185835 - DNA, 196 bp, Homo sapiens
ccaatcctttttctgtttggagaccctctcttggatgacctgctttctctgcatgaggaagctttctctctctcttctttttctatttaactttctgctgctaaacccactcctcgtgtgtgcccatgtcctgaattctttctcaaccttgaccagaaatcagggtatatagcccagacaacggagctgtttcagt

SEQ ID NO: 185836 - DNA, 258 bp, Homo sapiens
gaccccagcttagctctgtggcttgtctttctggtcactggcattagttgttaaatttgaccatctccctaagccccaatcttgcaggcttgtgaagtttaaattggatcatgtgtgtgttgcacttagcccagggcctggcaagaaataggctcttaattactagagcttaattcttacaagagaagcagggcaactggaggaaagggcctgcatcgaagcttttggctgttgcatgatccacttcctcaaaccctt

SEQ ID NO: 185837 - DNA, 398 bp, Homo sapiens
ttgcttgaacccgggaggcagaggttgcagtgagccaaggttgcaccactgcactccagcctggttgaccaggtgacaaagtgagaccctgtctcaaaaaaacaaaacaaaagtttcctgaggggagtagtatttgaattgacaaggtagagggagtgaaacgaaaggtattctaaccagaaaaaaactcagacaccaggaaagaacaaataaggggctatgtgtagggtggggagaaagacagcatcaggttttccactcgagtcctctgtagctctgccttagctcgctgtttagtttccttaaagtaccgaccaaattcacaactagtttgtctattttcttgctagtgcttgcgacactagaacataagcccggtgaaaggaaaataaatcttg

SEQ ID NO: 185838 - DNA, 263 bp, Homo sapiens
tctagaggatcccgtgatgtatcgcccaacacccaactcttctccaaagacttcatccctccctcctgcctcaggaaaaccagggctggaccaagggggatcagatggggaaccccaagcagcaccttccttctttcctctgatctcaacagaaggtggatatttacatcatgaggcctgaaaaagaccaccaacatcaaaataccaaaaattactaatttatattataaacgtactccctccccaaaaggatatagtcatgt

SEQ ID NO: 185839 - DNA, 657 bp, Homo sapiens
  misc_feature (588)..(588): n is a, c, g, or t
gctgagtcttgaatgctttgattggaagtctgctcagctaaatgtgcaaacttattgcttatgattctgccttccacacagctacaggacacaatccagctaaactttttgccattatattacaaagatcacctttgctctagtttccagtaacatgttccttgtttcctttgttcctttagaatcacctttaattttcatgtttctaacaacattctgtttttgatagtatatgtattcttgaagataatacagactttctgtatcaagttcgtcatttcctttaaggcagagtctgggtgacagtctttaacatccgcatttctacccacagcctgttcaaggaaacctaggccttttctatcatgcttctcacaattctactagccctcctttgttattgagttacaaagccactgccatatttttaggcaccctactcctggtaacaaaattcgtatgtttcctgtggctgctataacacgttactacaagcttggtggcttaaaagaacagaaatttaggctgggattacaggcatgagtcactgtgcccggcccaagctgagtcttgaatgctttgattggnagtctgctcagctaaatgtgcagacttattgcttatgattctgccttccacacagctacaggacacaat

SEQ ID NO: 185840 - DNA, 233 bp, Homo sapiens
gtcgttattaagacgctctgaaaggcatcattttggttggcagtttgcacatctgagacagaacattgaaaaggaagtatccctggaaggttgtcagtgtgcttgttcattggaagccctcacttccttctcctcccaacttctccctccagcttggaaagtaaggggaatattgggcatggagagtgactcactgccatagaagggttgtgtagagaaagtgggtgtgtaac

SEQ ID NO: 185841 - DNA, 339 bp, Homo sapiens
actagatgcttagtccttcctgtctacaaaacaagaaccctgggggcaaggagggggaaaaaacaaaaccaagaaccccagctgcgccccactccgtgctccagccaccacctccttcctctctcccttcacagacgagcttcctgaaggagtgatctctacatgtgcggtttccagctcccctccacccactcacctttcattcctctaacatagcttccctcataagacacacagctcttgataaagccaccaaagacctccctgtctgcctcccccaccataggaagctcagaaagggtagggagtggactgttttgctcctctgctgtatttcca

SEQ ID NO: 185842 - DNA, 237 bp, Homo sapiens
attgagaagttgctaaggcttaacttccaccagaccaggtgcttggactggttctctggtttcagggcaggattctattccattgggtttttaaaaatattttctttctgaaaatctttatagttttaaaagagaagaaattagtgggactggagaatgacagtattaatgtcattcttaatcttgttctgctctttagtttggaaatttgtttgaatggaaattaagcctttgcaa

SEQ ID NO: 185843 - DNA, 281 bp, Homo sapiens
ggaaatatttcctaacctattctatgaggccagcattaccctaaaccagacagaaaagaaaccaaagaaaactacagaacaatacctctcatgaacacagatacacaaatgctaaataaaatactagcaaactgaatctaacaatatacgtaaagaattataggccagtttggttgaaaaaaaatccacatataagtggacccatacagatccagcctgtgttgtacaaatatcaaccgtatatgccttgggcaagaaaaactgagaaggagcttctaaat

SEQ ID NO: 185844 - DNA, 517 bp, Homo sapiens
aacccctaaccaacgccactctttcatatacctaatatgacttagcaggtgagcctccattccctatttttatgcagatatctggacttttcatctacatttttaccttcttggaagcgccatttctgaccctcaggacccacaattattaatatctttccttgcgtggattcctagctcttacatgtattgctcatgtacatagttaaatttcatcatgtgatgcatttgtacatggacaatcacaaaatcccatactgtggaaaggacctgagaacacccttcaaaatcacctggcccaaaatccttatttgcaagtgaaaaacccaaggcccaaggaggtgacatattttttccaaagtcagagtccattgttgaggacactaaaatgagaatgccagttccctggctcccaatccagaacatgccccattatggtctccctaaggagccggtgttctctgaggcaggagctacagttatcaacctcctggcacattgtggaaagctgttgagc

SEQ ID NO: 185845 - DNA, 218 bp, Homo sapiens
gctccagtcacagctgttgctcgtccaatccattccagctcttcttctgtccctcaagcagccagatcccaactggccctgactagtctctcttaacctcccgggctactcttcctcagcctcctttggtgaatccttctctggtgaatcctcctcttcgcccaaatcacaagttgggctaaccccggggcccagtcctcagccctcttttgggctct

SEQ ID NO: 185846 - DNA, 319 bp, Homo sapiens
ctgatccagttaaggtgggattacaggtgcgtgtcaccacacctcgctaatttttgtatttttagtagagacggggtttcaccatgttgtccaggctggactcgaactcctgggctcacgtggtcctcccacttcagcctcccaaagtgttgagactacaggcatgagccaccatgcccagcccagaaaatactttgagatgaatgatgaaacacaacataccaatatttatggagggaaatttctatttgtaaaatgttgattttaaaaaagaaatatcttaagccaataacctaacgattcaccttaagaaactaga

SEQ ID NO: 185847 - DNA, 440 bp, Homo sapiens
gcggccgcctactactactactactgctcgaattcaagcttctaacgatgtacggggattagcatgaacaatttcagttttcagtcacactgaccagtatctgtaagttaggattgagatgggcttgttttatttatttacttttaaatttgtgctgctacatatcccaaacaaatgtggtctttatcatcactggcaagccattttacttattggttaagctggaattttattacaccaccccagcaagatagaggagaaaagcgaaaattaagtagtaaatggttattatgccttaagggaaggtgtgaactggcaagacaaaagagccaaatttagtagtaaagcatagtcatcagcacacagaaaataagtggtgaggaggagtttggccagaaaattggctaagaaaaatggcagtatgaccaagaatgaaaaaa

SEQ ID NO: 185848 - DNA, 968 bp, Homo sapiens
tgcgacagctaggccctgactaaggtcgacccaccaaacactggatcgtccccaggcgaaagagagcttgttcccctcagcctgtcgcggaggagcggagccaatcgagggtctggtgtccccgtcgcctctccaggggcaacctgcggactaggccaaggtctgtaacaggataacgtaccagcgcctggcccaggcgttcctgccgccacctccccgcatatccggaccgccgggactgcacgcagctggcaagcgtccccctgttaactctgcaagggtggggcggcaccatttctcagaccaggtaaggcaagaaaacatgcaagagagaagagagggaagcctaggccaatcggaatgaaaatgtaaacgccacaaccacgttttcagctttacaaatactgaatcttgtagtgggtctagtgggttaggggttagcatgagcaccctaatggttgggagacagtttcaggggactcttgcatttgtgaagatgatcagtcacaggcaatgacttgaagccacgaggcttgaatattaaaatctgatgagcagatgttacacgtagaataattacataatagttctcaaattcctgttatatccaggaatatctggtatgagtgaaaacttggaggtgccttctctaaagtcatcaggaattctgagttgtgtttgtaaaaataggagcacagagggcaccaaactgaacaaaatgttaggtggaaactgaaaaacgttggttagcatgaacaatttcagttttcagtcacactgaccagtatctgtaagttaggattgagatgggcttgttttatttatttacttttaaatttgtgctgctacatatcccaaacaaatgtggtctttatcatcactggcaagccattttacttattggttaagctggaattttattacaccacgagccccacgaagagccacacgaagagccacacaaagag

SEQ ID NO: 185849 - DNA, 1128 bp, Homo sapiens
tgcgacagctaggccctgactaaggtcgacccaccaaacactggatcgtccccaggcgaaagagagcttgttcccctcagcctgtcgcggaggagcggagccaatcgagggtctggtgtccccgtcgcctctccaggggcaacctgcggactaggccaaggtctgtaacaggataacgtaccagcgcctggcccaggcgttcctgccgccacctccccgcatatccggaccgccgggactgcacgcagctggcaagcgtccccctgttaactctgcaagggtggggcggcaccatttctcagaccaggtaaggcaagaaaacatgcaagagagaagagagggaagcctaggccaatcggaatgaaaatgtaaacgccacaaccacgttttcagctttacaaatactgaatcttgtagtgggtctagtgggttaggggttagcatgagcaccctaatggttgggagacagtttcaggggactcttgcatttgtgaagatgatcagtcacaggcaatgacttgaagccacgaggcttgaatattaaaatctgatgagcagatgttacacgtagaataattacataatagttctcaaattcctgttatatccaggaatatctggtatgagtgaaaacttggaggtgccttctctaaagtcatcaggaattctgagttgtgtttgtaaaaataggagcacagagggcaccaaactgaacaaaatgttaggtggaaactgaaaaacgttggttagcatgaacaatttcagttttcagtcacactgaccagtatctgtaagttaggattgagatgggcttgttttatttatttacttttaaatttgtgctgctacatatcccaaacaaatgtggtctttatcatcactggcaagccattttacttattggttaagctggaattttattacaccaccccagcaagatagaggagaaaagcgaaaattaagtagtaaatggttattatgccttaagggaaggtgtgaactggcaagacaaaagagccaaatttagtagtaaagcatagtcatcagcacacagaaaataagtggtgaggaggagtttggccagaaaattggctaagaaaaatggcagtatgaccaagaatgaaaaaa

SEQ ID NO: 185850 - DNA, 465 bp, Homo sapiens
ctaacatcatgcatatagtgcattttgtacattaatgaatcaatattgatacattaatattaaagttcatagtttacattagcgttcactttttgtgttgcgcagttccttaggttttgacaaatggtggtttcactttttatcagtttaaaatgcttagaaattttccttttgattttttctttgtctcatgggtgatttggaagcttgttatttagtttccaaaaacttggagattttccaaatagcattctcctataaatatctagtttactgaactctggtcaaagaacatagtctatatgattggaatcttttaaaatgtattcgtgtttgttttatggccttgattatggtctgtctttgtaattattccatgtgaatctgaaaataatgtgtattctgctgttgataggtggtctgttctataaatgtcaattagacaagttggttgatactgttgtt

SEQ ID NO: 185851 - DNA, 479 bp, Homo sapiens
cactgcaacctctgcctcccgggttcaagcgattctcctgcctcagcctcctgagtagttgggattatagacatgtgccgccatgcctggctgatttttgtattgtttgtagagatgaggtttcgccatgctgcccaggctggtctcaaactcctgagcaatccacactccttggcctcccaaagtgctgggtttacaggcatgagccaccgcacctggcctgcatttgtttcaaaaggaggcctctgtaactatgattcaattatctctatagttgatggaactgatatgagactgcaaaggaatcaagaggactgaattatactaaatgaggctagtaaaaatcagccacttattcacaggaattagaaaatcaagacatctgaaagggcagcagtatcaagtgagttgtgttctatgtgggaggcttataaatgtgtgaaaacaagaaggagctagtggagagattggagatattg

SEQ ID NO: 185852 - DNA, 700 bp, Homo sapiens
atgggaagcacagtccacgagccctgagcagaaggaggatttgggaggtggttgctggttgactcagctcctgctttcccccatcagacccatccagaaatcagcttcctgctctctcatgtccctaggccaaggtctgcctacactgagagacctgggtgcaggtggcccccacattacagaaactcatatgattgtttcttctgtgactcagggaaccctaaaccctcacagttcatacatgtggggaaataaatatcgaggcacagagagggaagagagtcactcaaggtcacacaatgtaggatgaaagaggaagatactgatcaggagacctcctgggagaagccctcctgtccagtcttacctggtgccttcactggcctccctccagcccccaccagcacaacctggtgctaggctcaccctcccaaggcccaaaaagagtatacagagtttgccgtcttttctattttattattgcattcctgtcccaggggccacctgctcaccttagaagtctctagcgttagaagtttcaggggatggggcaggcacagtgacttatgccggtaatgccagtactttggaagggcgaggcacgaagatcgcttgagaccaggagtttgaaatcagcctgggcaacatagcaagacccctatctctacaaaaaaaaaattttttttaattagccagatgt

SEQ ID NO: 185853 - DNA, 483 bp, Homo sapiens
gtcaaagaagaaaaagaaatagcaaatggactggatgcagtggctcacacctgttatcccagtgcttcaggaggctagggcaggagaatcgcttcagccaaggggttggaggctgcagtgagctatgatcccgccactgaactccagcctgggcaagagtgagatcttgtttccaaaaacaaaagaaaaaggcaaatgaagacaattttaacttgtgtctgcagttgaataactcactgatcttaatttagattcagtttatgtagaaataagtaaactttaaaaatctgtcattccacggtttaacaaaagttcagctctctgcttgctgtagttgggcatcttctgtaaatcgcacgtgcctttcctttgcctgttgtggtttttaattgatctgtggaagttctagttatattctggacactaattctctggtgatttatgtatttgcaaataacttctagtttgtttttaactttgtgt

SEQ ID NO: 185854 - DNA, 549 bp, Homo sapiens
gatgggggtaatgcagtgtagtaccaaaacctttggcctcagagccacttgaagtggtttaaatctcaactctggcacctgttagtgggacggtctcaggcaagtcacttaacatttttgagtttcattttctccattctgtaaaatagaatcgactaggatcagttgtttgtaggattataatctatgtgagatatgtgtgtgcatatttaccttatgagcaggtggtttagtatccattgattcaatggtcctcacctttatttctaattttagttatttgtgtcttttctttttttctctgtccagctaatggtttctcaatttttattgagttcttcaaataaccaactcttaatttcattgatttttcttttcttctattctctatgtatcttacccgtaatctttattattttcatccttctggtaccttcgggtttactttgctcttctttttctagctccttaaggtgtaaagttaggctgctgacatgagatctttttttcttttttaatgtaacctttacatctataaactttcctctg

SEQ ID NO: 185855 - DNA, 282 bp, Homo sapiens
ctgtgttctactgacacgctataaactccccttcactcgaattacatgaaaacaaaacttttaacctttttaccaaattactaaattgtaagcttcactgagagaaaactagtagtgctttccaagcatgtgtgccagacgtctttacaggcacacaggacatgcccctgatgattagatcactgcacgactcaggaagtagcacaactgtaaatctggttaagagcccccagcccacctttctccacactcagacccacactaaccaggaactgcaagaaa

SEQ ID NO: 185856 - DNA, 271 bp, Homo sapiens
cacagatcagtgagaatttaggtgtgtggggaccagagggttcaggatgaataattctgaatttctcttgcaaaataaaaattattgtcattctatgagctagaacatgatgtgattaaatgaggttcagtcttgcagcatgcaatttgaaacatggagtggcatgaaagtcagttaggagaccagtggaatagtgtaggaacgaatgataaggatctgactgggggatgggaaagcaatcgattgaaaaagactaatttctgaggcactg

SEQ ID NO: 185857 - DNA, 1857 bp, Homo sapiens
  misc_feature (109)..(109): n is a, c, g, or t
  misc_feature (788)..(788): n is a, c, g, or t
ctgagggcagctggggctacttctgcccttggctatgccaggctttgcatctcgggctatggctcactgcagagtttcgtgggggaagggcaggggaagccaggtgggngccagctgaatttcagtgtggaagaaactttttacggtctcatctcggcccagtcggtcaggtgggtggcactcggcctttctgaggcttctctctctaaaccatccctgagcagcaattcagaagacaagctagaaagccctttgatggcatcacagtgtccctttaacccctgagcacgccccagtcctctgtagctgcccactcagcacagccgttcctggaggctgagcggcacgggccctcggggcagctgcccggtgcctgccacccacacatctctccaccggtcctctcctttctcctcacctcacttgtctgccaggccctgcgtgtgggcccagccatcccaggcaggacaggcagggctctccagctgcctcacagactcaccgtcagccatgcgggagaagaaccgcagcacccaggcaggtctttctggctctttccccaaggccagcaggtcttagaaatcgtcagacttgccagattctctgagtaggaaacggaaccctggggtctccccactcggcctcctggcctatctctccctgagccttgtggaggctcaatgaaggaaaagctcttgctggggatcttggcagtgtccctctcagctaccacaacaagatttcttctgtacgggtcacttcaagccacctaaaaccctgcgtagaanggacttcttggttggagaggtgccctccctggggctggcggggctgcgtctgctggggctgctggtggtatcttttgccggagtgtctctgagacccctggaggccccagctggtgagtttatccaccaggcttaggaggcctgtgggctccaccctctccgtccctggaggcttctccagctaccgggtggagagatgtaggcggcatctgtggggagcatcgggcagcatggggtcctgccgaggcacttgtctgctgagggcattctgagaaagcccctctgccccgagccctagcctggcgaatgagctgtcggccccaccatggagccctgggtggcacaggcccatgaaccggcctcttccccagctgagcgacctcctttggtcactggctctctgcctggagagtgagtggccgggccatgtgctccaagcagaggggcctcagcagggctccctgagcccagagagatgggataggtgggccttttggggccttgcccatcagaatccccaggccgggggactgctggtgagtgcagctgcggcagctttaggggactcagtcctggggttttgtccccacttcacagccaccacccaagagtggcgtggcaggcaggaaccacagcctcatagagggggcaggaccctctcacagccttgcctggcagcagctgcagggagccaggtgtcacccatgtaatgtcaggtacttggcctggttgctctttcccgtggaggttcgcagacaaccttgcaaacgtgattttgatggcttctcaccctggagagtgctcatgttatgcttaaaatttagtgcctaattcggatcacgaggtcaggagatggagaccatcctggctaacacggtgaaaccccgtctctactaaaaatacaaaaagttagccgggcgtggtggcgggcgcctgtaatcccagctactcgggaggctgaggcaggagaatggcatgaacccgggaggcggagcttgcagtgagccgagatcgcaccactgcactccagcctgggcgacataacaagactccgtctcaaaacaaaagc

SEQ ID NO: 185858 - DNA, 727 bp, Homo sapiens
ggcaaaactgatgttctaaggaacattctttaggaaaggttagccagatccgtggttctcaacaggcatgtggtacacatttaataatgtctggagacgtttttggttgtcacaactggggatccagggatgctgctaaacatcctgcaatgcctaggacagccctccacaacggagaattatccaactcaaaatgccaatcattctaaggggttgaaaaactctggactatatgaactatctcaattctctttcaacactaacatttaaatgtggtgtttcttgttttttaaacacacaaaattttatttctgttttacacaaagtcagctatgggtatggatgaatctgcggacagttttcttccatgtgttggctccatatttcagctgctttgatctttttgacatcttatcaatgtgttcttctatgatttccttggcagagaaagagaaagcagagagaatcatgtgctggatcttaaatgcttctacgtggatgtagtaaatgtctcttctactttttttaaataagaagtgtattaaaatataatccatgtatcatataatttactcatttaaggcataaaattcggctgggtatggtggctcacacctgtaatcccagcactttgggaggttgaggtggggtgaatctcttgagcccaggagtttgagaccagactgggcaacatggcaaaaccccatctctacaaaaaatacaaaaa

SEQ ID NO: 185859 - DNA, 408 bp, Homo sapiens
gtgtccactcctttacattattaaccttaataaacatttcacatagagtacgcaggattaatcggaagaatttaaaaagcttatgcagacaggcctgcataaaacgttataataactgtatatcataactgcattttaaatgacaagttatcatttgctgaattttctaaatgtcaggtagtttgccaaacacttcatatgaagcatcttatttaattccaacaatcatataaggtgagctatacaattattatccctatttaaaagctttcagaggttagtagcaaccataatgtctatttgagatcgaagcccatgttctttaccaactaaccaacatacaacagtacaatacagtatgtctccctacatacataaatctaacaaaaacattgtgtcctgtggctg

SEQ ID NO: 185860 - DNA, 1103 bp, Homo sapiens
gttcaatttctaacactacttatattttataaccaaacaagtcatgtaggggcatactcattaggattgagtgctttcttacaccaaaatacatgtaatacaaagatttaaaacactctcggcctcccaaagtgctgggattacaggtgtaagccaccgcggccggcccattctttctattattatgtgtaatttgttaagagttttcatcatgaagggatattgaatgttaccagaggctttttctccacctatggagataatcacattttttgttcttcattctgttgatttatcatgtttattgttttgtgtatgttgaacccattcttgcatccctagaatgaattccacttggtcatggtaaacaatctttttgatgtacttttggatttggttggctagtattttgttgaggagttttgcatttatgttcatcaggaatattggcctgtagttttcttttgcatgtgtgtgtccttatctggtgcttgtgtcatggtaatgctggcttgtggagtgagtttagaataattccctcctcttcattattctgggaaagtttgagaagaattcatatttaattcccctaaaatgtttggtagaattcagcagtgaagccatgagatcatggactttcctttgatgggtgactttttattactgcttaaatcttgttactcagaattggtcaattgaaattttctgtttcttctaggttcaatcctgatgggttgtatgtgtctaggaatttattttctgtaggttttccaactttttggtttgtagttgttcataatagtctctaatgactctgtatttttgtggtatcagttgcagtgtcatttttgtatgtgtttgattttgagtcttttctcttggttagtctaatggtttcttttcaaaaaatgaacttttcattttgttgatcctttgaatttttttttaagtctcagttttatttattactcttctgatctttattaattctttccttgtaattttgggtctgatgtgttcttttctagttccttgagaagcattgttagatttttcttttttcttcttttcttttttaaagagacagggtcttactgtgttac

SEQ ID NO: 185861 - DNA, 106 bp, Homo sapiens
cattccagtatggctcaagctaaaagaactgacctgagcttgggcttatttgtccatcagactacatcacagtatttaaaggcaagcttaatctgatccaggctgg

SEQ ID NO: 185862 - DNA, 117 bp, Homo sapiens
aaccccctcactcagtgtgctgtagagcactaatttcaagacttgccagaatttctttttgttttttgagatggagtctcgctgtttcgcccaggccagacagtggcgcgatctcgg

SEQ ID NO: 185863 - DNA, 233 bp, Homo sapiens
cacagggctcccgttgagacacgagagttcttccccagaaatcccactgggggcccgacactttctgttaggaactgagagcagagacctcgatcccgcaggcaggaggagagctctgcacaacacagggcctctctccataagggcttactggaaagtggtcagaccggctaagtcgtgccacttggacatttgggacaaggaaggcccctggaggagcggtcgcagggagg

SEQ ID NO: 185864 - DNA, 169 bp, Homo sapiens
gtgatgttatccccaacactggagtcagaattaagaaatctcttttcctgtctaaattccactcagatttcttgataaggatagtcaaggcaaatctgaaataaccaagttaacccatatcaaaaatgactgttaaacagcctggcaactgtgttgggcgataacatca

SEQ ID NO: 185865 - DNA, 162 bp, Homo sapiens
tgggcacatgagaactttctggtgtgacagaaatgttgaatagaggtgacaatcatataactctataagtttactaaaaattattgaactgtacacacacaggccaggtgcggcggttcacgcctgtaatcccagcactttggaaggctgaggtggcggatc

SEQ ID NO: 185866 - DNA, 177 bp, Homo sapiens
  misc_feature (20)..(20): n is a, c, g, or t
ggtcgatctaaggatccccntcctattgtgttaatttcctgacatttgcagggtcaatggttctacttactgatggctttctttccttataccataatgcaacaagcagttcacctattccaagttgagagataaggaaggtgacctcttcaggtaatctccaaaaaactttttaat

SEQ ID NO: 185867 - DNA, 445 bp, Homo sapiens
caaaaaaaggagcagaagctctggtacagcagctccatgggcatcaggaatccagctcctgtctttctcagcaccctcaaggttgcctcatggtctgagatgactaccagggaactagctatcatgtccacattccaagccaaaaatagaagaggacaaagtgacatatgccccctcccttttaactattcttcctagaagttccatataacgctggccagaaattaattatgtatgtagatatacccacccactaaggaggctggggaatgcattattaaggaataagaggagggtaagtgttaagagacaactaccagttcccacaccctccactgagaaaatattcagactatagctgccttgagctctaaacttgtacgcttcaaatccttaagtctggctggatttaagcaagaggcaaaccttttcttgggatggagtc

SEQ ID NO: 185868 - DNA, 558 bp, Homo sapiens
tccatcgagctcggtaccgattacgctcctaacggaagaggggaggagagagataagggaagggtattatattgagggtaattaaaggaagtgaaagatgtgactgggagggaagaaggcgtggagtgatcaaggataataggagaagtggtcgattggggtgtgtggcgagggctaggggtttggcaaagacagctgcagagaatctggcgtgtttcggtcccgcccccccatccaccgcccaccagcaccagcacgagtaccttccgggcctacagtgctgatgagcacctctgctctgccccgggctctcccggcggcggccagcaccggcaagcaacccgggacgccatcactcacgaacagtctcatttcgccgtgaatccctcgctgatgcaaccggaaccggcctcccgcttctgagttcagcggcctccgcgaggcacgccgggaaatggagttccgtattaggccactgccctggcaccgctaccggaaagtagactatttctcccatcatgcaacgctaagacacaggaaaagactatcatcgagatg

SEQ ID NO: 185869 - DNA, 435 bp, Homo sapiens
atggagcaatgagctaaattctctacttctgtaataaagtatcaatagataatgactaaaactgaaaaactgaccacagaaatataaatgtgtcatttagagactagatgtataaactactgcaagacttcagtggttaactctggagagcaggaaatgggctgggggagaggcgtctactggttttttgtaacagcccttgtaaaacaacgtccacgtataactttggtaaatttggcagggcacgatggctcatacttgtaatcccagaactttgggaggcagaggcgggcaggtcacttgaggccaggagttcgagaccagcctgtttgtctccataataaatggctcctgactgctgtatttatttcgtgtcttttgttaatttatatttccttctccctcccctcacctttgctgtcaggcagctatccc

SEQ ID NO: 185870 - DNA, 285 bp, Homo sapiens
gaggaattgaggatgatcctgaagtttttggcctttcacagaatggaaaagaatggggagcagcaggggcgttttgttttgctttgttttgattttgttggtggtaggcattgcaggcagagaaatcaagttctgaattagacatgttattgcactgtgttcagatatacagagacatatatcgatgcctagctgcctagttatctaccaagatgtctattggaaatctatgtgggtaaagagctggagttcaagggagaggctagggtttgagataagaacatg

SEQ ID NO: 185871 - DNA, 429 bp, Homo sapiens
aacaaggatggcgtgggtgaggtcactggaggagagaaaggttgcaaggcctcaatcctgagctagggatgggggtgtgcaagagacccgaacaagctaaggaaggaagaggtgggtccacaaagcaagcagctcatcttgtttctaaacaagcccccagatggccttccgatgggaggctgcaggaaataggaaaccaaagagaagggaggatgggtttagaattaacaggcatccccagcccaccccagctcactctgggggctctgtgtgcatcatctgagcagacaccctgagccacaaagtgcccaggtcagtgctgatggctaacacagagtacatacccagcacatagtacaggctgcccagcatgtagtacaggctgcccagcatgtagtacaggctgcacgctgctctcctggaatgggg

SEQ ID NO: 185872 - DNA, 4918 bp, Homo sapiens
  misc_feature (292)..(292): n is a, c, g, or t
  misc_feature (671)..(671): n is a, c, g, or t
  misc_feature (1677)..(1677): n is a, c, g, or t
  misc_feature (2207)..(2207): n is a, c, g, or t
  misc_feature (4406)..(4406): n is a, c, g, or t
  misc_feature (4794)..(4794): n is a, c, g, or t
  misc_feature (4890)..(4890): n is a, c, g, or t
gataccactcttaaaacagcttaaagtatgaatttgtgccaaacactgttgtaaaaagattactaccctagcatcccagtctccgtgtctataacaggtttcccagccttcattacgatctacttattccaggcagtatttgattggaattcattattgtaggatttaacttacaggaatttaggtgtattatttgagccataatgaaaagaattggcttagatctcagaatcaaggtggtgtttgtaccccaaaaaacttgttcgggggctgctacattgtaggggagggngagctgatttcccttgctgctttcagcagggattcttcttgtttgctttctatagagggcgctgtagtccacatctttcttgggaagtctgagctccctctctaccaccagcactcagggaatggtgaagacattcattcatacccaaggctgaatcctgaggcgagaggcagggtcagggcctgatgagtgcatgaagatcttaggagagggggcagttggggcttggaagaattggtaaaggatctggaaaggcagcctgcatcaacattctaaatctgcttgaccagactgttgaccacttaggttttctgcattctagaatggcggggagcagacttctccagggagcacttattgctctctgttatgtcttctncttactcttgtcctggctcttgagtggactgaatcatccagccagagatatcctttccacctttccaccttgaggaggcatccggcgtcctggccataacaggatctgctatgactcagggtttgaagaagaccttcttgtaacacggtctctcctgacctgggcctgagatgcaaggctcatggatgacttttgcagccaggtttcaggagagtagagtcaatgggacacagctctcaagttatcggagtctttttaaaaagtcttaccatgaaacaaaaggatatctcgtgatgctaggaggatttgcaggtgttcccaaaacagcaacagagagggggaatgtcattaatggcttcttatatttggagaaaaaaaatcatttctctttgtcaaataaaagaatccatctcctgtagttaatgatggcacagcagtctgagaatcccctccctagtgtgacagttgacaggagcacaaagactaagcactgcagcacgggtccattctcagactcatttcatttccacaagtttcccattgaatacagaacataatacttttattttgcagcgtatcaattgccaagtaattattatttatctaagagtgggcttgatgcatattcatgatatgattttatcagggaggcatttgaattcgaagtcactgctaagtactagagagaaactatttgcaaatgtgtaatccacacaatagtgttgtggcggtggaaggaagcattcaatctccaaagcaacaagacatgtaacttatcacaggtctactacagtcaggatgaaaccttaagagtagttttctggtatagaatcaattgtcagtctccatgggaaatcctgccctggccctgttttaattgtgtctctcctagaagacaatgaatctaggggaaggaaagggtgtggtattagagatttgcttcatgagcctctctcggttccacatgtccacaggctgagcacccttagcctctcactcacttggnatctgttgaatatagttgccctgcttgactctcaatacaagcagtgtggtgatcaaaaggccaccatactgcatctgtgtcccacatttgtgagatgactttagggagagtcttaggcttccaaaatcatcagataggacgttggggtcatctgataggttcttgaacatactcctgtacctctgtctgccatgcccatctgtctctgactaccttctttctgttcgcatcttgcttttgctgtccaggaccacagcagggatattgtacatttcagctggctttcagctctcctgtcctgcagacggattcggtcctaaactgaccttcagttagaggtttctccgcacactgttcattcttccactttctttgtagtgtttaattcaagggcttttttactagtgtctatatccttgggtaaaaacaattacgtaagatgtagctggattaataggtgggtcttcttggcatctttcacacatttgaaatagaccaagtatagcaagcttggtttctctacgcggggnggggctgatttcagtttccagcacgaggtcagctcttacttgttctgtcagactctgttgccaccaaactgcaaggcttctgtctgtctttattaaactaccagcagtccccagaattccagtgagtaaaactatgacctcagcctttcaggtgggaatagtttccttctctcggagagcatccaaatcctcctatgttgttcctggataaaaatctaaggataaagacagtttcttgcagacaagtgtacccttgatgtcacttgttgcactatttatgtcgtcccccccccaccacccccatttcttcccacagactagtctagttctgctgttgccatggggaccaggcttaggtttccttcacagtgtcctgatttggtctaagaccgcaagacctctcccagcctcaccctaaattggttctgagctggtctcaaaggggcccgccctgaccttaaaggtatatgggcaaaggtggtattcaaccaactcttaagtatttccgggttagacctcagtgggtaagtagtgaatacccaagtccctctgaccgctcttccgacccagcatgaggcttgcctggctgcactagcttcctgcttttaggtggaccagaagttcaagggtgtgaatgagagtatagctaagcctcgaagcgaagctgggatgtagctggcacctgcatggccatgggctgggccgacatagtctcagaactgatctgggcactgtggctgattggcaagtgttaagtaggccaggtctattcacagtttgccaattcccagcctttttcctgaggaaagtgttagtacagttcagtattgctatttaaagatttctcctctacctgctgccacttctgtttgttcaggaacaaggaattggttatttatgcttcgcaatcatgtatgctgtagttagaggaacagtgctaacaaaactccgcatccccaccccaggccctctatttagcatatgtccctgtggcttctcccagtccccagcacgctggcatgcactgcccaagtccctgccatgtgcatgctgagacagcggcgcctgcctctgcttctgtgtccagtgtgtggtggggcaaattgctctggttctctccactgccatttccatgtgcctgctactccctaacttcagcctggccctgccctcacttctgatggaggagctggagtccaggcaagtaagctggagagtgagggcgccaatggtctggtgtggctgggtgggttgagggtgggtttcagagtttgggaaagcagtgtagagctggagggtgcagggctgaacttttgtgtgtcatgatgaggccagagtgcagagctggacatctgagccctggcactcgggacgtggccgtagtgtcacatcactctgtgccacatcactgacttagtatgtaagtacaacattcattgccaaagacaacacagttctgcaaaggagacactaatttgtacctttccagaaagaaatatggtctacttttacaaaaggggcttaattctttgaaagaaaagcatgctaaatacaaaaaaaaatcccatctggtggggaggaggtggtgctctctgcccctgttgtatgaatggggaaacaaagcacagagggctgtagcagactgcccaaaccaaggtttcacgtaacgctgcctcgtttcagtgcttcaagttcgagcctacatagttataaaatgctgcacctcaaagttaaaagaagtccaggctattttgtctcagtatggcctggtttgggttctcctgcagcacagcctgccacagcttgaggtttgagccttatgcccagtaccacttttgacagctgcagaagcagagggctcattagtgctggctcaggcagtagcagcagtgggtgctcacatattcacaggacttgaaaatacctgaaatagtgtaactgggtttacagaggtaaaactcttatttaatctggtacaaggagcattttctcatggcacttggtgccaatggatctgcgatgggaagcatttgagtcaaaggtcttcttctaggtattgctggtactccaccattgaacttgggtacctgcaaaaaaagctttcaatttttttcctggcttctgtaagaggggacttttccttcaccctcaattctaattctgacttcacaatggggaactgagagttttcttcaatgngccattaacaaattgcctccagtactgaccacaatgtcaacctggatgtagaattatcaactgtctcagcctcaagccagtcctctcggttgacagatggagaaactgaggtccagagagaagtgagttgtctacaactgcctagggagtacccaacagacaagcactccagctcctggtctggtgcattcaaatggcctgtcctgttgggatgttcagactggaaagcaggaaactgactctgggctgggcatggtggctcacacctgtagtcccagcactttgggaggccgaggcaggtggatcacttgaggtcaggagtttgagaccagcccggccaacatggggaaaccccgtctctactaaaaatacaaaaattagctaggtntggtggcgggcgccagtaattccagctgtttgggaggatgaggcaggagaatcgcttgaacccaggagggagaggttgcagtgagctgagatcatnccactgcactccagcctgggtgagtctc

SEQ ID NO: 185873 - DNA, 242 bp, Homo sapiens
gtacagttattcgtacggacgcatcagtgctgtggggcacagagcacgctgatgcgcgtgtggcgtgaaagatggtccctctgcaaggatcggcaccgtggcatgggaccagccactccaaaatgccaggactcctgtcctgagtctgtaaccacttttatctctattataatttattctcccagcctacctcctcagtatacgttctctgatttttttttttttttttttttgagacggac

SEQ ID NO: 185874 - DNA, 107 bp, Homo sapiens
tgctgggattacaggcgtgagccactgtgcctggccagtagagctactttttatactgtattcattataaatgtctagattgatgaaacaaatgaaagattataata

SEQ ID NO: 185875 - DNA, 279 bp, Homo sapiens
ggtgtgagccactgcgcccggccgaagattattattttaatgaccaaaatgaaatcacatctttaggatagatctcttctgggtgttttatgcctgagaggcagatacacagtgaggcagttatggtctctagagccctgccttgctacttactagagttgtgaccttggatagaatattcagagtgtgctttaatctcattcgtgaagtagggatgatagtagcacctatctgagttgttgtgagacttaagtgagttaatgtatgtaaggcatatag

SEQ ID NO: 185876 - DNA, 197 bp, Homo sapiens
atgatttgactccaaccaaagtatggcacatgaaaatgagggatcagaattggcacattttctgatttttttaaaaaagacgtcaaaaattaagagttgaacttcttgaatttaaaaaatgccatgtagaccaagcaaaacacatcttttgcttgtctatttttgacctctgatttaatccctttcttttcctcttc

SEQ ID NO: 185877 - DNA, 400 bp, Homo sapiens
aggctggtctcaaactcctgacttcaggtgatccacccgccatggcctcccacaatgctggaattacaagcgtgagccactgcgcctggcctgatctttatatttttagtagagacagggtttcaccatgttgaccaggctggtcttgaactcctgacctcaggtgatccacccgccttggcctcccacggtactggaattactggcatgagccattgtgcctggccttgcaacttccctgcttccatcctatccatctccccgtcgctcacttggctccagccacatggctgatcctccagaatgcaggctggtccagcctcagggcctttgcacttgctgtccccactgcccagagctctgttccctcctttcttcttccgtcacatcctcatcaagg

SEQ ID NO: 185878 - DNA, 855 bp, Homo sapiens
gagtgtcagcattctgttccccatagaataagaagaggctagaaagtttacagatgagatatctaggaatgccagaagatcaggggtcaccgttgaggcagagtaattaattatggttaaaatggtgttgctgataagtgggtgctgggaaataattaaaatttgattttttagaagaatacttctcatgcttgaagagcgccctcattatatgctaaagggcctcaggtttttccttattgccattatgctgcagattctattacatttgtctgaaaagatctaagacagaagggctgtttaataccttcccttttctcctgaacttcccctctcctctcccccatcaggagctaagtaggaaccccttcaccttgttaccatcagatttcatcaatggtctgtctttacaatgaaggaagtagtactgcattctgggcagaggccagtcctgaggcatgccttttcaaggacattgttactttagttacactggctcttctgttttaactcttatcccccagactctaatcctgttgctttttttggtccccatctcccacctttcatcatctgaaatccattcattgtaacttctggaactcagtcgttagaaaatcctttatattctcaatcttgtgaatgttcctttctttcttattccagctgtaacctagccttctccccaagaatgctacttcccttgcagctctctcaagtggtgaatttttcccttcttgcacaccttataacactgaactaggaggtgtgtggactaaatgtctgcttttgttccttattgtcacttcttgacctttattttccaaaacttcaagctttgactttcatgtgatc

SEQ ID NO: 185879 - DNA, 207 bp, Homo sapiens
gaaacttacaattacggcagaaggtgaaagggaagcaggcacctttttcacatggtggcaggagagagagagcgtgcaggggaaactacttttaaaccatcagatctgagaactctctcacttatcacaagaacagcctggggaaaccacacccatgatccagttacctcccaccaggtccctccctcaacatgtgggtatcacaat

SEQ ID NO: 185880 - DNA, 353 bp, Homo sapiens
aacaaaagcatttgagaatttctgaccaggcagtgctccatcaactcttaataatcatctttgtgatattctcctatgtgacttgtccatcaattattccaattcaaaggtctaggttttttttcaattgtcttacacatgtgacatcacaagataccagaagtagcacagtaaattcaagagcatataaagctaagtggaaaactaattcttcatatttagacagtggaaattctcaaaacaatcatttgctaaattaggtccaaatttattattcattcttcttctggaggagacatgggtaccaggtacctgttctgctgtaggtatatttcactggacttggtcttagc

SEQ ID NO: 185881 - DNA, 357 bp, Homo sapiens
aggcgctgcgttcaggtcgcagtctcccctggaggcgtgggttcgaatcccactcctgacaagccgaccttttggcccgcccgccggagggcaacgcccatggcaaccctggagcacctttggccgcttcctgccttgagcccttgcccgctctccagactccagcccccttgaagcaagcctccaaaacgccgccgcttctcaggcacgtccgttcttcctgcccacccgccggctgtcgcagaaacagcccaggaccatgcgccagcgcccgcgaccctctaccaattgcccttcggacagacgccctccccaccacctcacacgccctcttccctggccccacacacagcgagc

SEQ ID NO: 185882 - DNA, 525 bp, Homo sapiens
tctcagtaggatggctcacaattacataagccagaacaagtaaaaaaagtactcagctcagccagaacaagtaaaaaaagtaaaaaaaaaaaaaaagtactcagctcaacatctggccttagcagacctcaaaccttatttaaataccaatattttggcaaatagttgatttgaatatgttcaaaggggagaagaacagatcctataacagtaaaccttctttgcaaagaaaaatagttcctttacataaagagcaaagaaccagttccttatttggagttttgaggactgtggtaggcagaaaaggggcccccaaagatgttcatcatatactaatccccgggaacctgtgcttatgttgccttacagggagatggcattatatcaagtacctgtagatgggagattacgctgcattaacctgcttggtctaatctaatcacctctcagtaggatggctcacaattacataagccagaacaagtaaaaaaagtactcagctcagccagaacaagtaaaaaaagt

SEQ ID NO: 185883 - DNA, 361 bp, Homo sapiens
tattcagtgaatgtgactcttcaatcctttaagtgaataagaatgctatgctttatctgtgcaatcctgggaaatattaatgatgtgctgatagtgtcaagaaaggcagggtctataggtttatttagcagagttgctagaggacttaaaactgcatgtcatggtttctaacctcttcaaaatggatgctgaattaagatgagcccttcccaaagcagactgacaaagtgactaattgctggctgctggcagaggactgatttcccctctctctgctgtccagcgttattaccctcgtccattttacagggaccaaatggcaagtttaaggtggaagaactgtgtttgttcacctgtgagt

SEQ ID NO: 185884 - DNA, 1798 bp, Homo sapiens
acaatcctttgcggtggttcaagatggcggcgcccagtggcactgtgagcgattcggaaagtagtaacagcagtagcgatgcggaggagctggagcggtgccgcgaggcggcaatgccggcttggggcttggagcaacgcccgcacgtggcagggaagccaagagccggtgctgcaaatagccagttgtcaacctcccaaccgagcctcaggcataaggtgaatgagcatgaacaagatggcaacgagcttcagaccacccctgaattccgagcccacgtagccaagaagctgggagccctgctggacagcttcattaccatctcagaagcagcaaaggagccagcaaaagctaaggtacagaaagtcgctttggaggatgatggtttccgccttttcttcacatctgtccctggaggccgtgagaaggaagagtctccccaaccccgccgaaagcgacagccctccagctccagcagtgaggacagtgacgaggagtggcggcggtgccgggaggcagctgtgtcggcgtccgacatcctacaggagtcagccatccacagccctggaacagtggagaaggaggcaaagaagaaaaggaagttgaaaaagaaagccaagaaggtggccagtgtcgactcggctgtcgctgccaccacccccaccagcatggccacagtccagaagcagaagtcaggtgagctcaacggggaccaggtgtcgcttgggaccaaaaagaagaaaaaggcaaagaaggccagcgagacctctccattcccaccagcaaagagtgctacagctatacctgcaaactgaacccagccatgggcacagggctcagccagctccaaggacaaggtgtcccccccaccctggggacaaggcatttccaagccccacctccctctccaagttcaaggactgggctggcaaacccagactgcccatgagaccctgatggtgatgaaggcttgctcgagagttgggccaaaaaagtggctgtagggtgagaagaccaatcaaggcctgcccctctgtgctcccacggagggctggcgggggcgctgtggttccagaacatttcatgacctcaggaaaaaaggaaccttccagttatttgagactagtggccaagtggtgaaacctccatctccctagaactgtctgaggtgggcaggggaagggagaccttccccaccacctccttagcctggtgtgagaaacagtttttagaaaatgagagaagggatccccaagaggccaaggcccagagaaacttttgttcttctctccttagcccacatagacttaacagaatcgtctgagaaaggagagctttttcacccctggctttctagaattttctttgtctgcatttgtgaatataccacacatgatggtgtctctgagccgaccagattatggaaactcaattgtcagaggacccaaaacaaaacttagagtgatttggatattgcctctctgtcaatgctgaaccttaagacattttaagtaaacatcctcctcctctctacacccccaggatttgtgcgttcaccccacccaagacttcaggaagtgtcatagcactcgtggactaggtttcatgggacaaaggcattctgcaagaagtagaagcttgtggccgggtgcagtggctcatgcctgtaatccaagcattttgagaggccgaggcaggtggatcacttgagccaagttccagaccagcctaggcaacatggtgaaacctcgtctctataaaaaaaagaatacaaaaattagttgggcatggtagtgag

SEQ ID NO: 185885 - DNA, 1642 bp, Homo sapiens
ctcggctctaccttgtctgaggctcgatgttgtcaacctcccaaccgagcctcaggcataaggtgaatgagcatgaacaagatggcaacgagcttcagaccacccctgaattccgagcccacgtagccaagaagctgggagccctgctggacagcttcattaccatctcagaagcagcaaaggagccagcaaaagctaaggtacagaaagtcgctttggaggatgatggtttccgccttttcttcacatctgtccctggaggccgtgagaaggaagagtctccccaaccccgccgaaagcgacagccctccagctccagcagtgaggacagtgacgaggagtggcggcggtgccgggaggcagctgtgtcggcgtccgacatcctacaggagtcagccatccacagccctggaacagtggagaaggaggcaaagaagaaaaggaagttgaaaaagaaagccaagaaggtggccagtgtcgactcggctgtcgctgccaccacccccaccagcatggccacagtccagaagcagaagtcaggtgagctcaacggggaccaggtgtcgcttgggaccaaaaagaagaaaaaggcaaagaaggccagcgagacctctccattcccaccagcaaagagtgctacagctatacctgcaaactgaacccagccatgggcacagggctcagccagctccaaggacaaggtgtcccccccaccctggggacaaggcatttccaagccccacctccctctccaagttcaaggactgggctggcaaacccagactgcccatgagaccctgatggtgatgaaggcttgctcgagagttgggccaaaaaagtggctgtagggtgagaagaccaatcaaggcctgcccctctgtgctcccacggagggctggcgggggcgctgtggttccagaacatttcatgacctcaggaaaaaaggaaccttccagttatttgagactagtggccaagtggtgaaacctccatctccctagaactgtctgaggtgggcaggggaagggagaccttccccaccacctccttagcctggtgtgagaaacagtttttagaaaatgagagaagggatccccaagaggccaaggcccagagaaacttttgttcttctctccttagcccacatagacttaacagaatcgtctgagaaaggagagctttttcacccctggctttctagaattttctttgtctgcatttgtgaatataccacacatgatggtgtctctgagccgaccagattatggaaactcaattgtcagaggacccaaaacaaaacttagagtgatttggatattgcctctctgtcaatgctgaaccttaagacattttaagtaaacatcctcctcctctctacacccccaggatttgtgcgttcaccccacccaagacttcaggaagtgtcatagcactcgtggactaggtttcatgggacaaaggcattctgcaagaagtagaagcttgtggccgggtgcagtggctcatgcctgtaatccaagcattttgagaggccgaggcaggtggatcacttgagccaagttccagaccagcctaggcaacatggtgaaacctcgtctctataaaaaaaagaatacaaaaattagttgggcatggtagtgag

SEQ ID NO: 185886 - DNA, 527 bp, Homo sapiens
tagcttttagtaattcagcactgaagagtccgaactcctggcacaaagtcctcagatttaaaggaattatatcataagaacataacttaagttggatgtaaacaaagtttagataggtgtgatcttaagatgatacattggtaggccaaaatgggaggacagcttgagtccaggacttcaagaccagcctgggcaacaatgcaagaccctggtgtggtagcacatatctgtagtcctagccactcaggaggctgaggcaggaagaatgcttgagcccagaaatttgaggttacagttagctatgatcacaccactgtactctagcctaggcaacagagcaacaccctctctcttaaaagaaaaagaacagcccaggagtgatggctcacgtctgtaatcccagcactttgggaggccaaggcggacagatcacgagatcaggagatcaagaccatcctgggcaacagagcaagactccgtctcaaaaaaacaaagcaaacaaaaaagtaaatagatcaaagcgtcca

SEQ ID NO: 185887 - DNA, 667 bp, Homo sapiens
  misc_feature (500)..(500): n is a, c, g, or t
  misc_feature (504)..(504): n is a, c, g, or t
  misc_feature (512)..(512): n is a, c, g, or t
  misc_feature (516)..(516): n is a, c, g, or t
  misc_feature (546)..(546): n is a, c, g, or t
  misc_feature (555)..(555): n is a, c, g, or t
  misc_feature (572)..(572): n is a, c, g, or t
  misc_feature (595)..(595): n is a, c, g, or t
  misc_feature (597)..(597): n is a, c, g, or t
ttaaaagatccaaatctcttccatcactcctctgtcattcccataaccctcatctcaattagctcagctcatcatcacattttttcctatttctggtgtagtgcccacaacagtggtgcaggatattcaatggtataaacacactgctagtgtgttttctatttttactgttttttatataattttttttttttttgagatggagtctcactctgtcgcccaggctggagagcagtggcgcaatctcggctcactgcaagctctgccccccaggttcacaccattctcctgcctcagcctcccgagtagctgggactacaggcacccgccaccacgcctggctaattttttgcatctttaggagagacagggtttcaccgtgttagccaggatggtctcgatctcctgaccttgtgatccgcacgcctcggcctcccaaagtgctgggattacaggcattaaccaccgacttatcttattttttaaatggtagggcagtntgcncataggtntcantttttaatcaacttttttgagggataattngagacagtnaaaggggccccttttanctgttgtctgatttaaatatttncncggtccaggtcagcacattagttcgtctttatatagatgttagacacaagttcccatgctgtttctgttt

SEQ ID NO: 185888 - DNA, 218 bp, Homo sapiens
ctgagtgtggagccagcacctggatcaatagaacatttccagcattttggaagccccctcccagtcagtcactcaggagaactttgtcctgacttctaaccacacagattagtttaacctgtttatgtacttaatctaaataacatcatcacacactcccctgtgtcttgcttctttcactcaaaattatgtttgtgggatatattcatgtggtacgt

SEQ ID NO: 185889 - DNA, 310 bp, Homo sapiens
caataaatgtgaaactaaaaatgtgaaatttttaaaatgctgtctgaaatataaaggtatcctaccttaaaatagattttattttagaaacagctatcattttatagcacatgtggtgctacatctttttaatacctttatggtttatattgctactaagcaattaataagatgtcaaattacaggccttaatctgcttgaaagagactggtaaaggcatttcattttagtaaaaaaaaaatttaaatttattcaaaattcatcagcttacacataggaaaaaatacgaagctatctttcattttggatg

SEQ ID NO: 185890 - DNA, 187 bp, Homo sapiens
cctgaacttggaggatgagtgggaatttgggtgtttgggggctccaggaggtttccctggaagaagtaggactggcaggcaacctgggggtcagggggactttaactagttccttagtctcagctgggggtggcaggctgagagggatccattcagaatgcgctggggtcacagggctgggggccag

SEQ ID NO: 185891 - DNA, 230 bp, Homo sapiens
aactttgctcactacccccataaaccaaaatatcagtgacatatttggcttctctgtgtctcaattttgacagctaaaaatggatagtaattcataccacctagggttgagataaagtaagcatatgcagtgctcaggtgagggccaggcaaagaaaagatttttatctgactttgaaaatacagatctcatagctagagcattctttctactgcaatagtccctctccc

SEQ ID NO: 185892 - DNA, 183 bp, Homo sapiens
gaccgcagtactcgggggggatggaagcagaggtcaaggtcagaggagtgatgggggatggaagcagaggtcaaggtcggaggagtgatggggatgaaagcagaggtcaaggtcggaggagtgatgggggatggaagcagaggtcggagtgcagcactctgaggacggaggaagggccatgag

SEQ ID NO: 185893 - DNA, 417 bp, Homo sapiens
tctgaaacttggtcttaggaaagggcatatgagggactggcttgttttgtgcagacggtttagtaaggccctcttcatgaaccagcagcacaacacataggggatattctgaatttccacagcacttattatgctctgttcatctggaaatcaactatttgtgtagttgattttatgctgccactttgtaccattacttttcatttgttcatgctttatcttcttcactagatttaagttctctagggcaagaaactgcatcttacccttctttctacttgcaaaatttagcacactgcctcaacatgaaaaatgaccaacaagtactacagatggttcaagaactaggccaaataattattatttccactcattaaaatagtgtaaactgaaaaatacagtaaaagagggagaatt

SEQ ID NO: 185894 - DNA, 324 bp, Homo sapiens
tcaggactcttctccaggccaatagctggagggaggtgatggagacagatgggcagcctagcaatgacccccagagagaaggccttggacacaggacaggatgcacagaggtgccccatatgcccaaggggctggccaagtgcagggatgacaagcggtgaacacacagaccgcagccccagctactccacaaagcacccaccgcctccagccaggactggcctcatgagtctgtgcccccaactcctgaccgcagcactgaccagcgctgagggccggggccagacagctcaccaccactaccccacttcccgaggctcagca

SEQ ID NO: 185895 - DNA, 1458 bp, Homo sapiens
gagccgagattgtgccactgccctccagcctgggcaacaaagtgagactctatctcaaaacacaaacatacacacatacatacagacccacacacacatacagacacacacacacacgtctatttagcatctgtcccaggcagtgcttctcaatagcatgttaatagatgctaaaggacctttagttaggaggtcaactggtctacctctgtcacttagtagacaagaaggttgccctaaaatatacactaagacagtatgcattacaaaaaagccacaataaggacatagcttaggagaaatgttatgatctctcttcaccagtctccttatatgacactggttcaattcagaagtagaggtgaagatagttaatatcctaggaataaatgttaaatctcccttcccctttcctcacagtattatagtcaattctcataaggaaatggccctaagttacaacattaagcttttctattcacttctaataactgaaattccgcccaactgcctcctcacttgaattccatgtactttttttccaaataaattaaatgactttctctaagtcaaatgctattaaaattcttgttgttcctcaaactctgctttcttgtagtatcaggtttattgtgacttgaatgagacttatttgtaaatggatgtattttccattccatcttgctcttgcatacacacacatacactgaaattcagacttttctgctagctcttagaaaacaaaagcaatgtgtgattcatgtgtcacccactgtgggaagttggatgttgcattgcatttgtctctcagtcttaaaagtcaatatggcaaagtcattagcggcagagcccagaagatatccctgcccatgagctgtggagatctggacaagttactttacccaactccaagactcagtgaatgctcttatccgtaaaatggggacaatgataatatgtcttcctccctttgggtatttgatgattaaatgagaaaacacgtcacacagtcaattcagtgcttcgcgcacaataaaagcttaataaatactagttatgattatgtttagccaacatgtgttggcatctgacactaaataaatacttgtccaatggaaatgaccagaatttagtgcccctaacacttcactgtagtatttgccatatggataagcaatctttattatgctatttggatttagttccaaagctaaccccacctccttatattgaagccagctcctaggccacctgggtaacttttctggcatttcaatgaacacaccaatacaatacaagcataattagactttctggattttagatctattctcaagtatatattgtatagagaaccaagatgttcaaggactgtagagccagttataggtttggttttaaagcacttcatcttagactcatttcctttctggctgatgttagttaaaataatataag

SEQ ID NO: 185896 - DNA, 329 bp, Homo sapiens
attttctttagacattacatcaataaaatgccacagaaaatatttctaagatagactttaataagagaaattgcaacagtgggttttagatgcaagcaaatagagaaaatgaatatatattacacatacacacacacccacacacgcacacacatacacacacacccctacctctcttacacttagttcaatggtaaccatataaagggtttacgacacccctgccatccatttctccaatattgaatttcagctttattgtctcttctcccacctgcctgattcatttaaattgccaactgaagctgataaagttgtagcagaaacct

SEQ ID NO: 185897 - DNA, 616 bp, Homo sapiens
aaagtggagccaatagtcaaaaagccacagttgtgaagattaaatcgtgtaatagggatgtagcttctccgaggaacactttttcatttgctttctagttattagcagaagttgagacacaaaagagaaatgacaggctaaacattatatgggtacatgtactgttgcactaaaggcatatctactagtgttgtacaacagtgggtaggagatctaagaatgccaacagatggttttgaagaaaaggagaataacagcagctagactaacatcctgactgggagcattcattcattcagaagacaatgttgagtaccatatctctggagcctaatggcattactgtattctgatgtccagaggcacatcctcaatactaccgtttgctcatttcaggagtttcataggagattattgcatttatcacctgttgtgcccctgcccttcattctggctctgtgatcagaacacacctagaagccttctgtttcctaaatgtaacatgactattcatagtgtttcctgcacctttgtttatgctcctccatttgcttagaatgcttttctctctgccaggtaaactcctatttattctttcgtactgaattccagtgac

SEQ ID NO: 185898 - DNA, 211 bp, Homo sapiens
atctccctggaggggtggaggtggctgtcaggcaggcggggccacaccggcagcttagataaccccgagctatttcaggaagaaagcactaagaagataaacaggccagtggccagcagatggacagataacctgagcttatccaaggagaggcaggagggggccctttgggggcagggtccttcaagacaggaaggtgccaaagtgcgtc

SEQ ID NO: 185899 - DNA, 776 bp, Homo sapiens
taagtcaataatacatttttagttaaaggtgtatttatgatcagtttattgtacttgtgctataattttctttattattaaataaaattttgagacacttttaaaataataaaaaccaaaaagtggtattttaaactcagtttctaaatgatgattgactaaagttgtgtgtgtgtatgcagacatacgtaaatacacacatacatataggctatgatgatgacaactatttacttcaaattagatgccttctgtatgtatattgaccagaatacattgctcaagtgatttttaaatatttgtataatttttaaaaattaccatgagacgatttgagctgttgcaactaaaatatttattcagtgtagtagctatatgtagtgtggatttagctacttaatcgaaacattctttagagtccttcaaatatttatagtcagtttttcagttactaaatatgaggtggctactaaagagtaacaaaaagtagatggcatttactgccattggctctctgtgcatttttgcattctcattaaatcccatgccgatccagtattttaaagtatttcaaacatttcctctttttttccttcagaagcagtttttaaaaagtgaaagttacatagaaaatggtccatatgaacaagatagcaatttaaagtatagacttttcacttactgttaagtctgggttgaccaacttcagccatttggaacagcaactctttacttggaattaagcagaaaagacttttgagtagcaaacgactatc

SEQ ID NO: 185900 - DNA, 264 bp, Homo sapiens
cgtatctagggcagaaaacaaaccaacacatttaaaagaagtgaaaccatacacagtatactctctgtccatagtggagtcgaaccagaaatcaacaaaagagagacaacaggaaaatcttttctttttttttggaggcaggatcttactctatcgcccaggataaagtgcaggggcacgatgtgggctcactacaaccttggcctcccaggttcaagtgatcctcccacccgcctcccaggttcaagtgtgcaccaccacacc

SEQ ID NO: 185901 - DNA, 239 bp, Homo sapiens
caccaccatcgctgcatcattgccaccacctccataatcatcacctacatcaccgtcacctccaccgtcactgccatcacctccatcatcgtcgtcacctccgtcaccaccaccaccaccgccatcaccacctccctgtcccagcaaggccatatgtccactgagacaggcgctgcagccgagggggactcaggtgaagctgtctgaggaagaattcacacagagtccagttcagagca

SEQ ID NO: 185902 - DNA, 404 bp, Homo sapiens
tattgggaaagcccagcggaggaagagctcctgaggagtgagtggcgtagctatctgcttcatgtggggcgctcctgctctgcagtgtagagtattttttaggtggactaggagcaaatgcctgcctgatacaggcaacgtttgcacaaaaacccaaaggaagaaggctgctggtaggctaggggtggcaggtgggattgcccttgggctttaaagaaggctgagaaaacttacttccagagtgggaggcaggaggagtgagccttggaacaatagtggagtgtttgtggtggacggacgggagagaggaacacttgagggcatgaacttacttctgtctctttacttgaaaaagcaatccactgagctaagaccctaaaatacatcaacccagagggcttcct

SEQ ID NO: 185903 - DNA, 456 bp, Homo sapiens
catccatgttgtagcatgtgtcagtatttcattcaattttatagctaaatgatattccactgcatcgatatactgcattttgtttatccattcatcagttcatagacacttgggttgtttccatctttggctattatgaataatgctgctataaacattgatgtacaagtttttgtatgaacatgtttccagttcccctggctatacacataagggtgaaaatggtgggactattaatatccttttattagcattctaggataaatttctagaagtgaagttgcagggccaaagaatatacacattctaatttagaatccaattataattttaaggtttcactaattaggagtcaaaaaaatacttcatcttatgtcacctaatcaactatctctaacatataaaaggcttctaaaaatgttaagaaaaagactaacagcccaataaaaagattgg

SEQ ID NO: 185904 - DNA, 348 bp, Homo sapiens
caggcctggcagcatccagcataagctgactgaggagccctgggccttaagtgaacactggtggtaccctggcaataatcccctcttcatgggcctgtggtgctgatggacacaggagcaactcctctgcctgaagaaaggggaagaaagaatggtaatacagagtctggtaatacagagaattctggaccttatccaagaccaccaagatggtacctctataagtctagaagaactacagcattactgggttcggggtaccccctaatgcagatacgattacagtgaccaaagacatagattgcaacactctattccctttgaatacttggaataccttccaataag

SEQ ID NO: 185905 - DNA, 249 bp, Homo sapiens
ggagcgggtgagctcagaccttcctgagtcagcagggagtatgagtgagactctgtccttgtcttgcggcaggagtggtggggttgctaagtcagctgcccgctgttttatggggagtaggatgctctcgcccctgacattggttagttcttgcctgatttatgcatgaagtggctgggagctcagcagtgagcttctgcccagaagaatccacagggcatgttcagcaggcccgctgaagatgatgtt

SEQ ID NO: 185906 - DNA, 350 bp, Homo sapiens
gttgcagtgagctgagatcacgccactgcactctagcctgggtgccaaaaaaaaagaaaaaaaaaaaaaatatatatatatatatatatgattcagctattcagatattgtgtattatttattgacttaaaaggagtaagggaaaaaaaaggaagattcaagtgtaagtatgacgggtctgatacttttaaaaaatgtgcatatgcttacttagaaaaagctttgcatgattctattaacatatttagggtgtataaggtatataaaagttacttttaattacaaaatgcatctatttctgtagtgtttgaattttttgcaaaaaaatatattgatgttttacttgagtt

SEQ ID NO: 185907 - DNA, 446 bp, Homo sapiens
tgcggcttgcgctgcctgccgtgtggccttcggcagccagcttccctctctgagctaggagggatccgagaactgagaccaagcagtgcatggcatgggtccccaagagctgctgctgtggcgggtgggcacacacatcactgggtgagtgtgggactccagggtgccacccccagctccgtgactcgccagccccttgcccctggccgaggggcccacctctgagctgcctccctagcagtctggacagccgtggctggcacttggtgcttcctgaacagggccaaccttagaaagcaagtgatagggcaggtgcggtggtgcacacctgtaatcccagcactctgggaggctcgcttgaacccaggagtttaagaccagcctgggcaacatagcgagaccccatctctattaaaataatgataatgataataataaagaaaggg

SEQ ID NO: 185908 - DNA, 285 bp, Homo sapiens
gagattttcttaccagccatgatagagcctggaaggcaatggaataatctgttgagaattctgagggagatgactgtcaccctagttaacctgtctttccagaacaagggtaaaacaaaatgaatgtgtaagcatctccttgaagattagggaaagaagatcctgggaagtttctagcaagcagagactggtaaatgagaatcgacagtacaggacccattccagctattttcttaggtgtaatacactgatactatccttatgtaatgtgttgtgtgtatgtgt

SEQ ID NO: 185909 - DNA, 461 bp, Homo sapiens
taaaataatacttaatcttactgaaaaactttcatagtaaatatgaatagaatataagcacatttagtctagtaattcaaacaatggccctgtattttgtttttaaataacagatcttaattttcagggccccacctccattattactattttttttatttcaccgtggacctgaaggcaacccctcccattagttttgacaactttttattatgaaataattttcaaacttacagaaaactttcaagaatagtgtaaaagactcccttataactttcattcaggttattagtggttgacattttgcattatttgctttgttgttatttacatatgtattagtttttttcccttaatcgttcttaattactcccaagtaaattgcaggcatcctgtcactctgtccctaaatattaatacttcattgagtattcctaagaagaaagacaaatctcttacat

SEQ ID NO: 185910 - DNA, 762 bp, Homo sapiens
aaaaaagaatgcaatagaagtttgtcttaatgcctgttctgtgatgcacaactttcgtaagccaaaattttaaccttatgaacaatcagttctgtgctgcccttagcagagaaccataaattaaagataagcaatggttcagactttccagggccttgactcaggagtaactctgaaatcccaaccaaatatgtatttggttaagcaatttggcacatttttctattttgaggcattaaactataattacaagtcacttttatttcattccaaataaatgtccctaaagtagatagaactagaggtttcctttttttaaaaaaaggaaacaggaaaacaacaaacaaaaccaaaaagaacaaaagcaaaacaaaacttagtcaagctaacaaattgcatgtatggtgtgttttataatttaatcaatataaaaaattgagtgtgctagtgcctcaggaggactcagaggactcaaatactcaataggttatctggaggaatttctcattggagaaaaaaattaaagttcttttgaacaacccacataatcaagatagtaataatttaacctcaagtttttccttgattaaaaaatccctttgctattctgctccagtgtttgtaatagatggttcaacaagactggtgttttgttagttggaaaagtaagctgatatgaggggtggggagaggaagggcagaaatttattaacaatcagcaagtaaagaaaaacagcctgcaaattgtaatgaaaggaagaa

SEQ ID NO: 185911 - DNA, 785 bp, Homo sapiens
taacacttaccactttctccctccttctatagaatccctttcctattcttcgtgtctgtaattattgttcttttttttttcccactgtgcttaattccctctgagatctaggaaaataatgcccaaaggtgtaagtctcaacttttttaggtataactttagtgtgtttcatttggctctgatacaggcacgcatttcttagaagaagggacaagggaccgttattccccacccccatgtatgtgtgtggaaaccctgcttgagggaagaggaaggaagctactccgctgtgctgtgctatgtcctgccctgtttagaactcctctgagtggctctatgcttcctgagactacaactcccagcatgcttagcctcaggcctggctacacatgctcagtaactctcaaggtccacttctgttaactactagggatatctgaagaggaagggcagttggtgttgctaagggcaatgacctgagaccttcaggctgggtgagaccctgagctcagttagggcatgggccgggggttggtctgagctggatttgggttggaagtgggtggaaattagggagtttcttcttttgtaatggtgatgtcctcgtagaaacaagtggcggtgggggagatccatccatagctaggctgtagttccagtagtgtgttacatctcttgcagtgcctcagactctgcctctgggagagggatttttgctggactcaggcttcctgggtcatgactacccctgggttggcacagactggcctctagaatgggagctt

SEQ ID NO: 185912 - DNA, 395 bp, Homo sapiens
taacacttaccactttctccctccttctatagaatccctttcctattcttcgtgtctgtaattattgttcttttttttttcccactgtgcttaattccctctgagatctaggaaaataatgcccaaaggtgtaagtctcaacttttttaggtataactttagtgtgtttcatttggctctgatacaggcacgcatttcttagaagaagggacaagggaccgttattccccacccccatgtatgtgtgtggaaaccctgcttgagggaagaggaaggaagctactccgctgtgctgtgctatgtcctgccctgtttagaactcctctgagtggctctatgcttcctgagactacaactcccagcatgctctgaagagtgttgtactctatgtaatc

SEQ ID NO: 185913 - DNA, 890 bp, Homo sapiens
tcgtactgatcgtgatctttagataagccaggcttacctggcagataatcgagctcgagagccaaaatgacgaacacaaagggaaagaggagaggcacccgatatatgttctctaggccttttagaaaacatggagttgttcctttggccacatatatgcgaatctataagaaaggtgatattgtagacatcaagggaatgggtactgttcaaaaaggaatgccccacaagtgttaccatggcaaaactggaagagtctacaatgttacccagcatgctgttggcattgttgtaaacaaacaagttaagggcaagattcttgccaagagaattaatgtgcgtattgagcacattaagcactctaagagccgagatagcttcctgaaacgtgtgaaggaaaatgatcagaaaaagaaagaagccaaagagaaaggtacctgggttcaactaaagcgccagcctgctccacccagagaagcacactttgtgagaaccaatgggaaggagcctgagctgctggaacctattccctatgaattcatggcataataggtgttaaaaaaaaaaataaaggacctctgggctacaaaaaaagaaaaaaaaaaaaaaaagaaaaaaaaaaaaaaaaaaaaaaaaaaaaacaaagaaaaaaaaaagaaaaggagaccaaaaagagggggacccagaacgagagacacgcggggggcgcacaagcatgtgctgaagacacagagcgcgaaacaaaaggaggggacataacaaagacggagaaaaataaccgagacagaacgcgcgagagagaaaacaacgagcgggcacagaacaacagcgaaacatagacatgaagcagacggacacatgagggagaaaacacacacaagaaaacacaa

SEQ ID NO: 185914 - DNA, 572 bp, Homo sapiens
caaaaccccatgtctctcttctagtacttcgacgttcaggcctctcacatttgcctctaatcaaaatatggagtacaaccagcctactgtttcctagtagggaggtgacaaagtcttggggttctagagatgtatgtccctgtaattgacagagccctgctatgtctgtcaggtgtggtcttcaggtagaaattaaagtaacgttatgattggggtcagtgtcttcccaaagcattaacatgaaagcaagcatagtacttctaccacaaaccaggcctgaattcttattctgggtcctgtctggagccttcaccacgagctctgaccacaagctaagcatacaaatgaatgctgtaaaagaaatgatcttctatgcaatctaccacagaaacagaggcctcagagatttcactaaactctgaatatggtttatattgaaaagtctaaaataatctccctaattctggaaagagatctggtaaaaggagttaacagaaattaggagatgggcagggcagtgaggactagtgattcggatgctttgggaggcggtgtaccttgcatgtacctgt

SEQ ID NO: 185915 - DNA, 295 bp, Homo sapiens
ctgattgccgattgctgcttctgatctcagatttccagacaaagaagtgggcagccattgttgttataccttccaccattgtttcaaactgctcttcttttgacaagtgacttccaggggatttaaagggctggtactgtttcctttttcttttttgttttcaaattcttctcagttacacatggaacattttccaggatagatcgtgttttaggacacaaatttttgcctcaaatttaagaagagataccatacaaagtatcttctctgaccacaacaggatgaagttagactc

SEQ ID NO: 185916 - DNA, 290 bp, Homo sapiens
atttctctgggccttgatttcctctggtataaaacagaaattgcaacatctatcttgcagagctgtcttgaagattaacagaattatttagagttcgccattactctgacctagtgtgagtgcccagtgaatggcagttcttcttctcattaacaaaacaaagaaacaaagatgtccttaaagtgcccaagattcagccagatggtgaacactgagaggcctaactggaaggtgtggaggcctctcccaggcctgctgaagaggccagagcacgacaccccactctcttg

SEQ ID NO: 185917 - DNA, 220 bp, Homo sapiens
tccagatttgttggggacaagtaagagtagtttggtttttgtcttaggtatcatttattctgagatgctttttctaaacatcactcccaccaagggttgccagatatagcaagtagaggacaatatttggaacatacttctactaaaaaattattcattgttcatctaaaattcaaatttaactaggtatcttatattttatctgacagcctttctgggt

SEQ ID NO: 185918 - DNA, 688 bp, Homo sapiens
ggctccggccttggccagcccagaaaggggctgccacagtgcagcggtgggctgaacggctcctcaagtgccgccaaagtgagaacccaggcagaggaggcgccgagagcgagcgagggctgtgaggactgccagcacgttgtcacctctcaatatctttgatgagttccaaaatttttaaatattaaatatttataatactttaagatttatttgaaaatgttaatgaaacaaagtgtagaatctggatgcaattcaaaaatgcctcaaatattttatctcacaccacatatgacattagtaaaattatattcatgacctatacatcttaaaaaacattgaaacttgcttagttataatttagcaaaaaaaaatttttttaaaaacctgtgagatgggcatttagcaaaaaaaaaaaatcttgcttaattaattttgaccccttctaaaagttcttctcactcgtttatcacttataatttatatctaaatagttaaataatatatttcatttataaattggagagataattatcttagcaaatttctttaattacacaattgtatttatcttcagtcattgagagttatgtaagacttaacttcatatattagagaaaaaaaggagtatttacatcttaaattgtacaatataacttctttttttacccatgtgatgtagttatgt

SEQ ID NO: 185919 - DNA, 489 bp, Homo sapiens
ggtctagttcttaatagccttcttcctgacccttgagaagaagccattatacttcatttagcttctaggttatatcacattcaaatacagtcatgtcatagcatagctacttggttttccatgtgccctgccctgcattatttttgtgtattattatagtgcaaaatatttaagaattcctaagcttcttttcttattttagtctgagattgttatattcaggtaaattaacccctcacctaagagtgtcataattgattccgttgttccagattgtagatttgagtatcaggtagtaatttacatattacaggatcttttaagaattaattgttttaatgtggaagccatatgagataagaaattggaattttcagccttgattagttggctacagtcctgggcctgctttgttgcttggcacacatcaatccaactcttattctcattttatgtctgttagttgtgcatgtgcatatatactcatgg

SEQ ID NO: 185920 - DNA, 314 bp, Homo sapiens
cattcaaaagtgaattcttccctatttatttcacattcttagcttttatctctctaaatagactacgcactacttctataaatactattttgttattgttacctaaactatatactccagaataacactaagtttaccataatcaactataaatagctgtgatttgtcacaaaaatcacattgaatctaaaactggatgattgataaatctgataacagtacttcttatatcttcttattaatgcatgttaatatctaactattttacaggaaaaaaagggtatgcatgtgggtgtgtgtgtgtgtttgcgtgt

SEQ ID NO: 185921 - DNA, 239 bp, Homo sapiens
tagaagagaggaaagttaaaacgtaattgctgctggtaaatatgaagatattgcaagaggtatttagttattatgtgaatagatttgataaattatgtttgagtgcctctgcttactaaagaaattcatgaagaataaagggctacatctgtgtatactgtcctggttagttttttaaaacagacttaagaccgttcaaattatcttgctgaatcccttctaaattctaagaaggcaaa

SEQ ID NO: 185922 - DNA, 113 bp, Homo sapiens
agatcgcaccactgtactccagcctggtgacagaccaagactccatctcaatcaatcagtcaatcaattcattgctacactgagaagtaaactgatgcaaaaggaaaaacaac

SEQ ID NO: 185923 - DNA, 796 bp, Homo sapiens
caacacctaagaagtcgaaggccaggatactggagtcatcacagtgagctccctgatggctacaccccaggaccccaagggtcaaggggtcgggacggggcggtctgcgtctaagctcaggattgcgcaggtctcccctggcccacgggactcgccagcctttccagattctccatggcgggagcgggtgctggctcccatcctgccggataacttctccacgcccacgggctctcgcacggactctcaatcggtgcggcacagcccgatcgccccgtcttccccgagtccccaagtcttagcccagaagtactctctggtggccaaacaggaaagtgttgtccgcagggcgagcagaaggcttgccaagaagactgccgaagagccagctgcctctggccgcatcatctgtcacagttacctggagaggctcctgaatgttgaggtgccccagaaagttggttctgagcagaaggaaccccccgaggaggctgagcctgtggcggcagctgagccagaggtccctgagaaccaacggaaatacctcgatggcccccacaaattgaaccccggcagcattgcccacttagcacaccacaaagcgctgaatgacctgtcagccagcaagaccggggaaacaccctctggaagggctagcacagatggcactgaacgggaaccaagacagatgggccccatgagtagccaccgcatgcagtgccaaggcaggcacgcgcacattacaagtcacggtcgctgcgtgaactggccgaggcgccagaacctggcaggactg

SEQ ID NO: 185924 - DNA, 491 bp, Homo sapiens
caacacctaagaagtcgaaggccaggatactggagtcatcacagtgagctccctgatggctacaccccaggaccccaagggtcaaggggtcgggacggggcggtctgcgtctaagctcaggattgcgcaggtctcccctggcccacgggactcgccagcctttccagattctccatggcgggagcgggtgctggctcccatcctgccggataacttctccacgcccacgggctctcgcacggactctcaatcggtgcggcacagcccgatcgccccgtcttccccgagtccccaagtcttagcccagaagtactctctggtggccaaacaggaaagtgttgtccgcagggcgagcagaaggcttgccaagaagactgccgaagagccagctgcctctggccgcatcatctgtgagtctgggggcttggcagtggcgggtggtccttggtgccaggctcagatggaggctttctgagggatcatctagcaag

SEQ ID NO: 185925 - DNA, 436 bp, Homo sapiens
  misc_feature (357)..(357): n is a, c, g, or t
agttgaggtctgtgtgctgctgtcttgatttttatatagccactgtattgaattctcatattacttccagtaagacaaacttagttgattctcttaggcttccttggctgtctcacatttatcatttcatatgcaaataatcagttttgtctcttccttttcaatacttatattctttccttcctttcctttttctttttttttcttctttctcagggccttgttgtcacccaggctggagagcaatggtgtgatctagctcattgtaacctcaagctcctgggcttaagggatcctcccacttcagcctctgaagtctctcatatggtgtccgagaaatggggacaaatctcacanagggactaggctcaggagggctggaatattcagggaaggtttcaagcagaaagatgaacttgagttggcttttgagaga

SEQ ID NO: 185926 - DNA, 521 bp, Homo sapiens
ctggtggatacagtggtgaatgggactcagcccctgccctcaagaagtttccagtgtgtaaaaacaacccaaggagctgtgggatcccagatgagagggaattgaatctgcttgcagcggtcagggaaagttgggccttgggggatggtaggagttcagcagagatcctggcgggctggatggtctatgcagagataacaggtggtagaatcatcagggtgagtccatcagagcctaatgtggtgcagcctgccctggtgggaggtggccagactcctgggactccagaggcctcattccgcagaggcaaatgaacagggcagggcagggagggtctccccaaagatggggagatgctggccacctgtttcctagaggagctgaattcttaaggagagaagggcaggacacgagtcttggcacaaaatctgccattgtttgcctgccaccatcgccatgatgacagcattaggcagcccaggtccacctggaaggtctgcgcccaagcccctcctcaccta

SEQ ID NO: 185927 - DNA, 988 bp, Homo sapiens
gccaagtgaagtgtgtgcatttttgatagctgtgtacttctggtgactgtacagtttgaaatactattttttatcaagttttataaagatgcagaattttgttttacttttttttttttaaaggtatgttgttagcacacagaacacttcatgtgttttggggggaaggggcatatgtcactaatagaatgtctccaaagctggattgatgtggagaaaacacctttcccttctagttttgagagacttcctcttggctcccaggaggagggattccctgactttgacacacatggccaccttggcacaaaagccttgtggtatagaaaaacaaatttgtttttatgtcctcttctccctttccatctttcagcatagacttaactcccttaagcccagacatctgttgagacctgacccctagtcattggttaccagtgtgtcaggcaatctggactttccagtgatgccactgagatggcacctgtcaaaagagcagtggttccatttctagattgtggatcttcagataaattctgccattttcatttcacttcctgaaagtcagggtcggcttgtgaaaagttgttaaacaacatgctaaatgtgaaatgtcaaccctcactctaaactttccctgttcagagcatcagatgaagacttcatggggtttatagtggctttctgatttttggtagtccattgcagaagggagtttgaaagttgttgtatactgttaacgattgtctgcccacgtcctgcctgaaataccatgattgtttatggaaagtatctttaataaagctggatacagtttggcttgggaaaaaaaaaaaaaagggggggcgaaaaatcccggggggcagttacggttccgttttgggaagggccataggggggattaaagaggggggggttaaacgcgtgggggaagggagtggtctgggggccccggggggatgggacacccagtaggccgaaaaaggtg

SEQ ID NO: 185928 - DNA, 827 bp, Homo sapiens
tccaatgacacccccactgttgaattcacaatgtgatgtttgaagtaaatttggcgagggtggattttgctaagtgacactgccaaggacagcatgtgccagatgctgtgccaagcacttcaactgcaacacttaaaaggcttattacaaaaccccatggactagatgccccaatttttcccattgcacagatcaggaggctgaagctcggagaagttaagtgcattatccctggtcgcacaactaataaatgacccaaaaattgaacacaaaggtctttgagtgccacagtctttcctcttcacaggaataactctctgctaacttacagtgcctcccttcaacttttgatatccatccatccatccaaccatctatccatgcatccatccatccatcatctgcctatccttcattagagacagctagtcaagatcactattcccagagtgagactgtctagattgaaattctgaatcagctgcttgctagctgggaactcgtttaaattatatgacttctccatgcctcagtttctcatctgtagcatgagaataagaatattttattgggctgttgcatcaattagattgtctgcgtagatgtgctcaggatgatgcccagcatggagcgagtatgagctattactcatcttatgcagtggttcctccacaaatggtgactgaatgggagtgtggaggcaaaacaaggaacattccaggttgtggaaagagctgctgcgaagaaaacagctgaggcaaaaatgtgctcacgtgtgggtgtgtattgtgtagtgtgtgtatgtgtgtgctgtggtgggtgtttat

SEQ ID NO: 185929 - DNA, 1011 bp, Homo sapiens
tccaatgacacccccactgttgaattcacaatgtgatgtttgaagtaaatttggcgagggtggattttgctaagtgacactgccaaggacagcatgtgccagatgctgtgccaagcacttcaactgcaacacttaaaaggcttattacaaaaccccatggactagatgccccaatttttcccattgcacagatcaggaggctgaagctcggagaagttaagtgcattatccctggtcgcacaactaataaatgacccaaaaattgaacacaaaggtctttgagtgccacagtctttcctcttcacaggaataactctctgctaacttacagtgcctcccttcaacttttgatatccatccatccatccaaccatctatccatgcatccatccatccatcatctgcctatccttcattagagacagctagtcaagatcactattcccagagtgagactgtctagattgaaattctgaatcagctaggtggtccccctgaggcctgaggaccacattcctaattaagactcaatctgtgtgggaaggactagggctgcctggaagcacagctctccatttctgaatggcccttctgcagctgcaatcccctgcaaggctgcccccgtgatcagccacctcacgcggcaggggcgtgggacaggtaggccctctacgccgtatcatcagcccctgtccctctctgtcttcattttgaccttcttggttatttaatttttgtttctctccctctccttttcatgcctatttttgcccttaatatggagtgctcctctatatcaggaccgtggaattggtttctgtgatggggttccccaagtaccaaaaaagagatcataaagttactaagaagaggcaaatgtgtgattctagaatgtagggctttatgggaaaaaagaacgagggtggctgaagtccttgagtgcaaagataaatgccttcatatataaattaaattacattaaaaataatcttaaaatatatacatttctat

SEQ ID NO: 185930 - DNA, 530 bp, Homo sapiens
gtttgagctgccaggagtctttgtcctgccccaccagctctgtctcatctagatggggccttctgtccagtgctactgaacagaatgttctgcatgcctggccagtgcagagacctccttgcacccctgctccaaggctggctctgccactgacagatagactgacatttgcactgttctgagcccctgggggtgcagtatgcagagctaggccatctctgtcgtcctacaagaaccaggcagccctgagcaaggcttttaacatgcaaggtgtactccactagtcttaagatatcttgagccactgtcttgctgctcccaactcccaagccacgctgactttctttccctcgggactgaaacacctctgctgatccctgatccatatccctccccatgaaagaaatataatacataaaagagagccctctccactgagcacctcccttcctttgtagcacttacttcaactgacccttacagggatcgtgtaactagactatgaatgtcatgaaggctacgtcgtgtct

SEQ ID NO: 185931 - DNA, 450 bp, Homo sapiens
gttaaggctctggataaatactgccagcctgctttccaaggctgctctggtttcaaccctccccagcaacctaaggaaattcctctcactgcatccctcatcaaaacattcatttgatatgtgaaaatgatgtcttccatttgtagaaaatgaagttgtgctccccctcctttaggctagagtatctacacatgttatctggaattctgctgcacaagggatggatctcttcttcccatttattaattttttcaaccatttacttagatcagtacggactcatggatacttatgaggtataagtcaggtataccttgagttatatccagtactatgtcattgactttgttcctgaaatatttccagctttggtcactgagagctctttcagttggctcatgcgtccttttgacatccacccagcaggttttttttgtttgcttgtttgag

SEQ ID NO: 185932 - DNA, 268 bp, Homo sapiens
tgcaaagggatcaggttgaagggtttttaagcctatcagaataaatactaggtaagagacaaacgaatcaggagtttggcttcatagctaaaggaatggtggggaaatttgctacatgggaaggaagagagaaatggattttgttggttgtgggggcaaatggaagaaaataataagtttaatttaattttatttattaattaattcatttatttatttttttgagacccagtcttgctctgtcacccaggctggagtgaagtggcgc

SEQ ID NO: 185933 - DNA, 543 bp, Homo sapiens
cagtgctgtttggcatagaaatgcctcagtgtgatcctgactctctgagagcctggcatttcccaccatggtgcttgtgactatgctacttttgttttgttttgttttgttttgtcttagaacagatacaatctattaaggccttgcaaaagtaataaatctgctctaaagtcccctaattagatgaaaaaagaagcctggtgcagctgatctgtgtggagatgcacgactttataccttttaagtccagaggcctgagtgacaagagcaggaaagggagggaaactggttgtctgagaacgttttatgggccagctaaaacataaaagaggtcactggcatcaagtgcttgctttgcacataaaatacacagtacggttgttgcccacatgtttgataaaacgtggctattcactaacttggattttttccaaattaaatttctgaattcagaattagcaaccctgagcaatgtagaaagcgataaactcctttttaatgacaaaagtcatctgaaccttaagtgtccagtgcaacctgaag

SEQ ID NO: 185934 - DNA, 501 bp, Homo sapiens
gtagaggtgggggtgtctccgtattgcttagggtggtctcgaacttctgacctcaagcagtccttcggccttggcttcctgaagtgctagagttacaggcgtgagccacagcacctggcctacatattacatttaagtctgtgatgcattttgaatttttatgtcaagtgtgagatttaacttgaggttcctttttgtggggtggatagtatgttcgggtgttctggcacctatcttttctcattgaattgcttttgcacctttcttaaaaatcagttgagcatatttgtgtgagtctatttctaagttccccattgtgttagattgagctgtatgtgatctatatgtatgttcctctgtcagtcccactgtcttaagctgtagctgtttaagtctgaaattgggcagactcattcctcctactttatcctttattttcacaattgtttttagatattctaactcatttgtctttccatgtaaattttagaataaagtgat

SEQ ID NO: 185935 - DNA, 283 bp, Homo sapiens
aatgccaaacttccaacccagaaacatatcattattttccattacccttcttacagggtcagaggtaaatttattcctctgtgagatttgtttttgcacagttaagactagagatttctcctggcttgatattcatctagtatctctatgtctggatggtcctccaaggagccatggctttgttttatattgatgacatcacttccagtgtcctctagcatgtctctgccagaaggtgaaaacacaaacttcaaacaagatctcaaagatatgtgattaaaac

SEQ ID NO: 185936 - DNA, 483 bp, Homo sapiens
aaaactttgaggttgtagtgaggcatgctagcaccagtgcactccaacctaggcaacagaacaagatcctgtctcttacaaaaaataaaaaaatgtgtacatgattcccatgtatatgtgaaaacatttatctaggaatggagatgctcccagactatgcacattttaaactcctagaaaatgccccaaaactatcttccaaatgatgcatttattctctccctcgcagtctataaaagttgtcattgcatcacattctcactaaccattgatactgtcagatattttaaaatgtttgccattctggatataaaatgacacctcaactggatttccggattgctaatgaggtgagcatcttttccattgttggttgatcttctgggagtttcttttacgaagtggctattccagtctttcctcttttctctacttgcctatttgcctctttaaaagtcaatttgtagaaattctttatgcatt

SEQ ID NO: 185937 - DNA, 221 bp, Homo sapiens
agccaccgctcccggccaaacatccattttcaacgctcactcagcaaaacagaaagtattaaaaatttgaatttccagagcattctcacagtttagagggcactaatttattttaaatcaagactgggaagtccaggttgtacattagctataagaataaatcaactatcttaaaacaaaacaaaacacctacaacaatgatcaatactggatcccacttg

SEQ ID NO: 185938 - DNA, 523 bp, Homo sapiens
gcccagccatatttataactttttaacagctttgttgagacctaattcacattgccatataatttaccaatttaaagtttgcaaattgatggtttttagtatattcacagagttgtgcaactatctgttgtgcaaccacaatctaattttagaatactttcgtcaccccacaaagaaaccttgtatccattagcggtcatttcccatgtaccccactccttttcagcctatattgatatgaaatgtcagtctatagggactcttctggacatttcatatcaatggaatcatataataggtagtactttgtgagtgcctcctttcacttagtatgttttccaggttcatccatgttggtagcatttatcagtacttaatttctttttattgctaaataataatccattatatggatatactacattttatttattcatcagttgctgggcatttgaattgtttccagtttttagctattatgaataatgctgctgtgaacatttgttaccagtttttatgtgga

SEQ ID NO: 185939 - DNA, 288 bp, Homo sapiens
cagacgtcctgcaggcggctggcgagtgggagcctgctgcgcagccccctgaagaggaggcagatgccgacctggccgaggggccccctccctggacacctgcgctcccctcaagtgaggtgaccgtgaccgacatcaccgccaactccatcaccgtcaccttccgcgaggcccaggcagctgagggcttcttccgagaccgcagtgggaagttctgaatcaccgtttttactcttcttaaactgttttcttttgggcttggggtgggacttccagagatagggatgg

SEQ ID NO: 185940 - DNA, 680 bp, Homo sapiens
aagaaatactaaaaggagttccaaatcttaaaacaaaacctcaaaatacaccaaaacagaacctccttaaagcataaatcttacaggactgagaaaacagtaacacaaattaaaaaaccaaggtattcaggcaacaactagcatgatcaataaaacagtacctcacatccaaatgctaacactgaatgtaaatggcctataagcaccatctaaaaaatacagagtggaagaatggagaaaaatccaccaaccaagtatctgctgtcttcaagagacacacctaatgtataaggactgaaataaacttaaggtaaagtggcagaaaagatattccatacaaatggaaaccaacagcaggcaggaggaactattctgataccagactcaacagactttaaagccacaacagttaagaaagacaaagagcaacactatacgatgataaaagaatcactccaaaaggaaaaatatcacaatcctaactatatatgcacctaacgaggaaccccccaaatttataaaacaattcttacaggacataagaaatgagactgatgaaaacacaattatagtgacggacacaatactgcactgatagcactagacaggtcatcaagacagaaaggcaacaaagaaacaatgaccttaaactatatcctagaacaaaaggacttgacaga

SEQ ID NO: 185941 - DNA, 420 bp, Homo sapiens
tcataattttgcctagggttattggctctaaaagatatttcctcctattaaaaaaaaatgtttggttttatctagggtaaggtatgctaggtacgcagaggaaaattccagagctgtacgccaggaaccgaagtcactagctacatggtaaacagcaggaggaaggtggagccactctggagggttcagctttccaacctggaagaaatctttcctttcaatgcagggaaacagaatcaattacgtttgaccacagaaaaggacctcatgattagacaaaagttaaaaccaaactatcaagatgatcatgttctgagctactgtggggggaaaaaattgtgaggagagaaggttaggaaaaatgtgaaaaaaaacaaaattctctcctgtaagtgccagaattaaagagacggaaacagt

SEQ ID NO: 185942 - DNA, 404 bp, Homo sapiens
tcctgggttcaagcaattctcctgcctcagcctcctgagtagctgggattacaggtgtgcgctaccgcacccggctaatttttgtagttttagtagagacaggttttgccatgttggccaggctggtcttgaactcctgacctcaactgacccgccctcctcggcctctcaaggtgctgggattataggcatgagccactgcgcccagactacgatggtttttcttaacgagacattggaaagtagaagcaagacaattattttgagttaaagactcacttttataggaatgatctgtgattcttcatggttgaccagaatgtcttaaaggcacaggcgttttgcaaaggagacacgtgctcacttagactccacctaaatgcggcacagaggtccgagctgta

SEQ ID NO: 185943 - DNA, 149 bp, Homo sapiens
tccatctctccaaaaccaccaccaccaccctctcatgctcctgtgttcttctctagctactcttcattgccttggctgtaccattggtgtctattttcttactttccatgcacttatccattgacatttggttttgtctggccgggcac

SEQ ID NO: 185944 - DNA, 590 bp, Homo sapiens
cttattacacattaacatgaccagtcctttcaataactgttgtggtagtgataatttatacagcacaacaaatgggggcaacatgaatgaactgtaccaggtgaatatcagaatagctggataaaaagagtttaaggacatactgaaatttaacatctttatgcagttgcaagcagagtacagaatgttaaaataatatttaagcagctaggctatttatgggttttaatagtctctcttgcatgtcgtttccaagttggcaacagcaaaaccatggcaacaggaaattcttccctgcagtggagtttatgaatgcttttctgttttcatgactcaactccttatttaatttcctgtacagaaaatcagagagattactatagactgcaatacagatgtgctaatcccaagaccctctcaaagaaaaacaggtcacaggtgtctatggatgaatttaaagataaaatttaaaactgctttcacacagacacatagcaaaagtcaacacactctttgattagtcccagctaaccaaaataggcatttgagaatgttaactattttactgacaacttggggactggacatgg

SEQ ID NO: 185945 - DNA, 297 bp, Homo sapiens
tagctgggattataggcgtgtgccaccacacccggctactttttgtgtttttagtagagacgggatttcactgtgttggccaggctggtctcgaactcctgacctcaagttatcctcccacctcggccttcccaagtgctggaattacaggtgtgaaccaccgcgcctggcctatatttttattttattttattttatttgcgacggggtcttgctctgtcacccacgctggtgtgcagtggcatgattcacgtcttactgcagcctcaagttcctgcattcaatccatcctcttgc

SEQ ID NO: 185946 - DNA, 664 bp, Homo sapiens
aaactaaactcccctgaaaccccaagcatctctaattccaagagttaagtaacaagaaatggcataagaggggtgccaagggcttccccagtcccctcccaacttccctatatagtacagagcatcttgttctggccccttcatgacagaagggctaggctctgttccaccaccaagtcacaacaccaacgatcctagaattacaaagacattttatatggattttgaacagaatggagaggcagaggaacatctttgcatttagacataattatccatccctcttccactgatgagtcccttctttccaacttgacccgaccacacaagacccactctggagccctttattccttcccaatggtcccataataggaatggcacacagtgcctgccacatggggctgctaggttcatcctcctgtgctctggcctgatgagcttctgcttctcttctaacaaggaatctcccttacaccatgacccatacagggaaaagaccaaaagttccagagaacaaaaacaccatcaaggcagaaaggcaggaggtgaagtgaattctaggaatttctctaaaagctaatccttgaccaagaaggccccagctataaagaaggcaacgacgctccccactctcagctcacagttggagcctgggtagcaa

SEQ ID NO: 185947 - DNA, 547 bp, Homo sapiens
ggggagaaagaaaggggcatggcctgtttgtatccttctcacgtggctgcccaccaggtcctgggggagtgggagccagtgcaaggagggaagtccagtgagaatgacaaatggacgatgtcagacccaggggctgaggcccccacctgcagccgggcagcttctggagtggacaaggagcagcagggaaggttgcggcctggtgttctgggatccactgtctcatctcattctttggggcaccagaacttatccaaagacaagactcagtgtctctggcaacagcgggccagaggaataatgtgtttcagaggaggaagaaggggttgtaccccatggaaacagtatatagttttacagtagtgcgtctctctctaataactagttagcatgttcctgttaatggaaatactggtggtgtaagttcccctggatgttctcatcttcatgtaaatttgttcatttccttccttcctttcttccctacttctctcccttccctacttccctcccactctctttctctctctctttattctttccctcc

SEQ ID NO: 185948 - DNA, 386 bp, Homo sapiens
agatccccaacacaaaaccttcctccatctttgaattctcttctctgcagcagctatcctgaaaatcaacacaactgttggaaaagagggaatggaaggaaaagagctcctgggagtggctaactgctctgggtggactcacgacgcttagcctataaaatctatttgtctatatttgcattgccggtattcagcagaggggctgatagagtgctacgtaaggtctccattctgacgaaccgaatgaatgcttgcatgaatagatgaatggctgaagagccagaaaaccggagataggaaacattttttcggaaatgggtgaagaaggattctttaaacagcagagcagtaaacttggcattgctcagaggcctgtgttgggcttg

SEQ ID NO: 185949 - DNA, 571 bp, Homo sapiens
aggaaggacatttgcagtctgcagtcagagcggccgtttgtccctgaccttttcgatagggaatctctccatgtgaggacaggcagtgccgtgtcacagctatatgaggacaaaactaataagatttaaatcgttcccatggaaaccttagccaggtctcccctgtgtgctatcctggggggccttttgtgatggggatgcttaatagcatcccccactgttgagccaggagggtggacaggaggtggtgcatgacaaatcacgtgcatgaagagaccgagacccagctttgggatgtctgctccttgctgatgtcagaagctcctactgcacaggagaggtggggacagcagtgagacggaagggtccctagcaggcagcgctgcccttctggatctagcctcagagctatatcgggaggagagcaaagagcgggtgaggatttctcttcccgcgcagcgtgttgtttagtgcacacagcacttgcaccctcccgcagggctgggcagacatgggcctcctatctcatcagggacaaagctgggctcaccccacagcactcacagagggc

SEQ ID NO: 185950 - DNA, 1588 bp, Homo sapiens
ccatctgaaaaatcctgatctcaaaataggtaggtacaatgaattaaaaaatgttttggtttgacctcacttagctttgttttctccttgttaagatggctgataatgtttcccatttggttgtgatgtgtttagaatgagaagcaaagttgggtgtagtttttgtactcttttgaaaggccttgccactaggaatgaaaaaattagacttagaaaacacacattaaatagaagcagtttttctctagccatttgctcttgagtttgttttaaaataagtcaaagaatggagactgagatgatttgtgccaacaaatagatgtccttgttagtttttatgctgaaaacttgatttctaaaggtaggacactgtaagaacaaaggagaaattggacttcctaaaaaatgataacaaagcaatggactcagttcagctgtttgctttcagaaaagttctgttctcttaaagtaaggagagcatcattgtgttagtgaaattggataacgcaccttagaaagtgcctccccagtgatccaggataagttggaggctcttttgtgtgtgtgtggcactttttgttaagagggagaaagggcacaaatcagagccagaaagatttgcatctcgatgtattgttaaaatgcttttattttatgtaaatagtgtcaggtgaatcaagcaagcatattgttgtctagcatccttaggattacattaaaatcagcagattggcaagttatgattaggttagacttgacatatgcagaaattatgcttctgtatttttatattaaaagcaccatggtttttttgaatgaaataatgaaagcaagcttttaagacataacttttttaaaaaattaaaaatctgtctttggttagtttataaacatgaagcatatcctcctcttcttccccccaaaatttttgtttaagtcttaagaaagtctttagcaaggtatgaccagtacttaagtgcactggttgcataagccttctgtctccaggtaaaagtttgctaattgacagggtattattgttcagaatctttagagggagagaaatgaaaggcaacagtgaacagtgtttgctgctctgtacactcggacgaactgtggttgctactctgtacactcggacgaactgtggttgctgtcttcaaggagatgtgatccagtgggagagaaatatacctacctatttcaccatcgactcagactggtctcgaatttctgagtgccaagaactcgagtagctaggactacaagtgtgcaccaacatgtccagcctcacatgcttgattttaagtaacatttatatatattttataccagaattattccagattagaatgacagcattacatatttctatgtgacatgagttctaggagttttgtcacctgaatgtgctcactattcccctatttctggctatttagactgtttctaccttttctgagagaccaggttacagtaaacatctttaggcacaagcttggctcttcctttaaatcctttccttagattttcagaggtggactagcctgatacagattatgtacatttgatgaagttacctacctat

SEQ ID NO: 185951 - DNA, 575 bp, Homo sapiens
cgattgtgaaataggtaggtgtaataaggaagatccattatagagactatgaatccaagtaggtagttaaaccagcaatcttgtatcctagtaaccaaagcagaaagtttttcacttaaggaagcacctatttgtgccttacacagctaataggtcaaataagaaataaacttcgtagtcgtgacaggtacagttttcagtagagtggtggggttgaaaatctgtctttggttagtttataaacatgaagcatatcctcctcttcttccccccaaaatttttgtttaagtcttaagaaagtctttagcaaggtatgaccagtacttaagtgcactggttgcataagccttctgtctccaggtaaaagtttgctaattgacagggtattattgttcagaatctttagagggagagaaatgaaaggcaacagtgaacagtgtttgctgctctgtacactcggacgaactgtggttgctactctgtacactcggacgaactgtggttgctgtcttcaaggagatgtgatccagtgggagagaaatatacctacccaaataaataccatagaaaatgtg

SEQ ID NO: 185952 - DNA, 810 bp, Homo sapiens
tgagagggaaacaatgctgtaggtgtgggcatacagaatgggagctaagaaactgtccaacaaaggtagagaaatctgggaaataaatataaagaactgtggaaactgattagggcctgcaaacacacagctatgaccccttctcaaacctagaaaagggcagtacgtaagggaaaaaagctttaatccttaaaacatttttactttaaattcaagaagacagttcagcctatactatatgcagatcagtggtaattattatgcaaattatacagggcatttggattctgggcaaacagccaatgtggtcaacaatgcttcaaagtctatgcaccaaagtcatggaagggaaacatttggcaggagaatggaagtgggtgtcacagcttcctgaggagagtcaaagaaagtggaaagcttcatctctgggccagtcagttttgaattttttcaacccctccaagtcacataataataagcaagttaacactgtgcaaaaggaaaacacacaaaatcttttaaaatatgactcaaaatattttatacataaaacaaacaaaaagatgttaaatacttatataaaatggaactaaaaacaagacagcaccaggtattttttttcatgtatgttgataacaaataagaaagtccaactgccaaaaaacatggcacttcaatagctttctgtggcatagcaactgcaaggaaaggctttgtaaagaacaaatctggcccaagttgcttaatgtgaaacggatgtaatccttgactgtacaaagcccttttatgaagagttaaggagttctaggt

SEQ ID NO: 185953 - DNA, 232 bp, Homo sapiens
ggtcggtacacatgatgtgcactctctctctccctaacccgggctctcctatctggtcaaaacccactccaaactagacccatggccaaaatgtggaattcttatcaaggccatttttcaacttgggctaccttcccgccctctcccatctttctttccctgacaaatctcaggggctctcctgtactttatacactagtttggctggtggtggagcggtggagcacagtgt

SEQ ID NO: 185954 - DNA, 188 bp, Homo sapiens
catgcccttactcaaattttaaaagatactacatgaccataacctatgctacagttagaaattaactgatctcttctgaaatacctactttagagaaagtgggtaaacataatatttgccctggctttattggatagcttagcccaaattttaactggcagaacacttttctaaatggagagaagagc

SEQ ID NO: 185955 - DNA, 403 bp, Homo sapiens
ccatcctgctacagaaagatgtggaggtcagggagtaatgtggtctactttaaagattgggtttttccccccttaaacatttagaaataaaatatttgtaccacttcactggcagaaattcagtagcaatggtaagaatagagttaccttctgtgtctagtgttgcctttacagttgctttgtttcatagttttataaattgggctttctggtttccttggaaacccagttgtcgacattggttgctaaggagcagccttggctgcacaaagcataaggagctgcgagtctgctactgagtgacttcattcttggcagtaacaggcagtgggactcttaggacccgcttatggggggcctccatcttgattttcagcctgaaggattactatggctcttcctg

SEQ ID NO: 185956 - DNA, 427 bp, Homo sapiens
tttttactgccaggctgaggagtatgggttgaactctgcatgcagtggggagttactgagtgttttgcacagggagtgccctgagcagatgtgtttgcagatgcaagactggcagaagaaaggcttgtccatacgcaggaagacacctggaatgatactggcccttgtagctggcacctagggcattgaggtaaggacagtctttggttttcattaggtaacaggtggcattgtcatattactcagattattcaagataacaagctatatctgctttccctagacatttgcattcaaatgtgatcattcctttattcccaagccacggatattcaagttctagtacagtaaactgaggctctgccagatagacttatcctccttttatagctgtagttgagcaacttgggtgccccaaagctttatg

SEQ ID NO: 185957 - DNA, 429 bp, Homo sapiens
taaatacccatctatgtactgatgccttctaaatgtctatctccagtatggtcttttcctttaagctctagatccattgacaccctcaccatctctaaaaggcatttcaaactgaacacatctgatacagaacttttcatttccttcccaactttgcccacgccagcctgctcctccttcacgctttccacttagtatatgatcccactattcactcagtctctgaagcttaaaacctaggattcatccttgactactgtattctttacaatctactcctaatgcattagcaattcttgctagctctaccttcaaaatatattctgaatagactatttcttgccgtttcccctgcttcccctctaaatcaaaacccccattctttttactgtgtgtaactgccgagcctgctctcaaccagttctcctt

SEQ ID NO: 185958 - DNA, 358 bp, Homo sapiens
tacagagtgaatgtgttggaaccatgcatacttcactacctgtacgctaacactgtttccagagctctagaagccaaaacagcgcctgggtacaacatggattcttgccattgtgtttctgggctctttcagcatagctgtctgagctacacggttctggccaaactgatttacaaacacaacacagcattgcaaatcagtcacagtgcaagtctattcagggaaatttcatggattattctaatctagggacagtgttgggggttgttagcagagagctcccttagtctgaccagtcatgacgctgcttggggaaaaagcttccccggccctgcagcagcggccgtcctggacagac

SEQ ID NO: 185959 - DNA, 379 bp, Homo sapiens
aaaacaatattttcagaacaacagaataagagggaaaacaaatttattgcgaccttgtgtggataacaccagtaacttcagcttcctacccttgttcggaattctgcaatttttccagatttgtttatttttgatcattgtatccaaacacaacaaattttaaattatatgtcttatacactctaggggttattaagctagacaattctgtgattttccttctcaagttgtgtctgttactgatccttatagcttcttcgacagattttcataaatcagatttatatatagtcatataattcaggctacatttatgttcttattatcagtgaaattaatgtcaagttaaagctttcaatttttaaagaactggtctcaa

SEQ ID NO: 185960 - DNA, 341 bp, Homo sapiens
cagatgcccaccaccacacctggctaattttttgcagttttagtagagacagggtttcatcatgttggccaggctggtctgaaactcatgagctcaggtgatccacttgccttagcctcccaaagtgctgggattgcaggcatgagccacccaaccagtgagagatttatttcctataaagggttgtagcctgcagggttgtccttctgacaggctgggaagcatagcctccagccagaagccagaaacagactcttcaaggaggaggtaaagaaaatagcaatttatgctgactggaatggccaaatacatttatttaataagctccaggaggagtcatg

SEQ ID NO: 185961 - DNA, 569 bp, Homo sapiens
cagagtacagagtcacatggtttcccagaaagcaaggttcacaggacacatgcatatggacatgaacacaagaagagtctcgatcataaggctgggcctccaggaacctgaggaaagctgcccagccatgcctcatggagagtgaatgtttaaaaatcagaaggtcattcaagactgaggacatctccggaaccaggttttaaggctgtcctcttagcgggtgggttttgtccactcttcagctccaccgctgacattatcagactttttcctgtaggcaccagagtcacggggcctatgacaatgtttcagatcttgaaaatacattatgagtccaaaatatgaaacaagaactataaaaatcccattgatacacattttattagtatacccaaagttcattaatttaatatttgtgctgggtgtggtggctttacacctgtaatctcggtgctttgggaggccaaggttggaggactgcttgaagccaggagtttgagacctgcctgggcgacacagggagaccccacatctctacaaaaaataaagataaaaattagctgggcgca

SEQ ID NO: 185962 - DNA, 731 bp, Homo sapiens
acatacattgaggaatacatgttttaaatgtttttactgatagggaatatgatacaaaaaattttgaagaccactgttttgaagcccagtggaattgatagaaatagactctcagggctggaatagattttaaaggccttcaattcccctggcacccactctcccatctgatgcccaaaacccttggttgcactagattgcctccaggggtggggagctcactacctttccaggcaatccattttgtacagctctgggaatggtttcctgaacccagtgcctatctgtattctagctgcctctgagttcccgggggctgactgaactgctcctccccttactccactgtgtcagagccctgggatctcccaggggcccagtgccaggttgtgtgcagagtgggcctaaataatgtcccatgaatgagagggagtgggagatggggatgagaagggggattctgacaactctcatttggaggtatgttaacagctgagtgctgttgtccccctgggagtgtgttgatctgtgtaactctggatccgtatctattcgtttggatttatttgcatgggtttgtacatttgagtgtgtatgcatgcattgtgtgttttgctgtgtggctatatatgagtgtgtgtgtatgtctatgttgcaccgcaaatatccacgtgtgctgtgcatgtctttctctgtttttctgcatgcctgcgtgtccaggtgtatgtcac

SEQ ID NO: 185963 - DNA, 109 bp, Homo sapiens
atttgctcacctagctcctttcctttctattgtgtccagcgaagaccttatctcattatggatgtctcttccttccactttccttccccaggaaaaaaaatcattcttc

SEQ ID NO: 185964 - DNA, 280 bp, Homo sapiens
aaatgactgtgtagcttctctttcctaattagactctgaccaatacactatcatttgccaacaactcccaaagttttatcaatgactcagacctctaacctgaactccagctgcctccatgacatatccatttggatatttaatagacatttccaaagtgatgtgccaaacagaactcaggatcttccctctcaaaccaactgctcagcagttcttataatctcagttgatggcaattccatccataaagatgattagtcaaaatgcctcccacacacct

SEQ ID NO: 185965 - DNA, 372 bp, Homo sapiens
tgcacccagccaagaaattttaattgatcactaaaccagtacatattggttatcatatgttaaatcccatgtttattttctcagtagtagaagaaaaaagtgttcatacaaattaaaccaccatatgtaagatatattagaacttctagccaggtttttaaatctgcagtgttggatttcaagcattttattttgggatggtttgtgttagtttatgtagccaagaaaggtcgagtagtttaagtgggtgagctgtcatcctacatccctaggccacaagtcacaaagcatccgtgcttaccgatacactgttgtgtcatccacaaagcccagatctagaggtcttagttgtttgattatcttcctgctttt

SEQ ID NO: 185966 - DNA, 145 bp, Homo sapiens
tctcagaactgtttccaaatgcagacatgcacatcttttttctacctccttctcacaatacagcaaagaaaaatgtacacaaatatagtctttatggggaagacagtggcctgaataaacatacttggtcctgcctccctcacag

SEQ ID NO: 185967 - DNA, 396 bp, Homo sapiens
taaatgctttcctctagagaattttcaaccataagccatacatatcaatgaccctgaggtctatagatccacaagtgccctgcaaattaacaaggagaaacacaaaaccaccgtcagtatagttttaatgtggtacctgtaaagatgttgacaatctgtcaacactggaaattttcataaggtgtataatggcatctcttctcatcagaatattgtatttcccaagtaatttgggtaagtagtttaactttttttttagatataaagttaatttctcacattatttttacatctggaatcagaatgcagattccagttttcatcagctactgccagggtcagttccctttcagtggaagacactgtattacacattttattaaatagagcaatttg

SEQ ID NO: 185968 - DNA, 484 bp, Homo sapiens
aactctgcgcctaccggagactgcaggccctgcagccctgcagcagccaaggagaaggttcaagtccactgcatttggagagcgtcttaagtatccttgcaccggggacggccggtgaatctctggacagagctggtgctgagcgtgtgcgcagcccgcttgagcccacccctgggcggtttccagctgtggcaggggggccaaccccaggaatgggttgtcagctcccaccgcccctctctggccaattggtgactcctgcagatatccggagacaggccaggagggtgaagaaagccagggagagactggccaaggccttgcaggcagacaggctggccaggcgggcagaaatgctgacaggtggatgaagctcagtcttgggctttcggtccctttcttttaatgcccatcctcattcctactctgaattgtcacacttttcccttccccaccagttctttaataaaagtatttgaaaggc

SEQ ID NO: 185969 - DNA, 588 bp, Homo sapiens
gggtgctttcaaggtcatagaggtctaagaaggcctggaaaccagacaggtggtattccttagcagtaagcccaacctataactgcaccacccaccctccatgggtatccagctcacagtcactgccccgtcatgtctatgcacccatctgtccactcatctctgaacactgagacctcactgggatttatctatggcttagtagctacgaagggctgctaagtagaaggcatggctcttctgagatgcacttttcaactggagagtggaatggaagaaagggagaatgtgatgaaaaccaaacctttaaacgtgatgaaaaccaaacctaaaaggagaaagcacatacacagcacaggccgggaagcagggaagatgcagattgaagaccaagtttgctagacatgccgccaccactgcacctcttacagccttggtttcctcatctatttaacaaacacaaaatgctcactctggaccaggactattctaatgtgcgaggatactagcttcacagctgaaggcaggaaggcctaggaaggttaggaatcctgcacaaaatcatagctagtcaatggcagaaaaggg

SEQ ID NO: 185970 - DNA, 1336 bp, Homo sapiens
cgggcagggtagccagcggctgcatctgaggcggacgccgcagtgtagggcacaccctgagggtagcgagagacgtgacaggaccgagcagctgggggctgcagcctgctctgtccccaccgatcccagagagaggctgtgagtctggatctgggcgttcgcaccctgagagagggggtcaaagctcccctgcggccccgaggaagaagagcaaggttgaggacagcctcgggtcaccagagtagtttggaggcaggcctgcaggcgcgtccccgctcctcagctccaagctgacgtatctacacctgccggcgggcattaagatggctggttatgccactactcccagccccatgcagacccttcaggaggaagcggtgtgtgccatctgcttggattacttcaaggaccccgtgtccatcagctgtgggcacaacttctgccgagggtgtgtgacccagctgtggagtaaggaggacgaggaggaccagaacgaggaggaagatgaatgggaggaggaggaggacgaggaagcggtgggggccatggatggatgggacggctccattcgagaggtgttgtatcgggggaatgctgacgaagagttgttccaagaccaagatgacgatgaactctggctcggtgacagtggtataactaattgggacaacgtagactatatgtgggacgaggaggaagaagaagaggaagatcaggactattacctaggaggcttgagacctgacctgagaattgatgtctaccgagaagaagaaatactggaagcatacgatgaggacgaagatgaagagctgtatcctgacatccacccgcctccttccttgccccttccagggcagttcacctgcccccagtgccgaaagagctttacacgtcgcagctttcgtcccaacttgcagctagccaacatggtccagataattcgccagatgtgccccactccttatcggggaaaccggagtaatgatcagggcatgtgctttaaacaccaggaagccctgaaactcttctgtgaggtggacaaagaggccatctgtgtggtgtgccgagaatccaggagccacaaacagcacagcgtgctgcctttggaggaggtggtgcaggagtaccaggtgagagaaatgagggaatgtggggggatgaagggagtggaaaagtaactaggagagctgaggaatgagtagcattcctttcccacctcctcaggtacttagttgctaaacttctctttatttgatgagggagacacggtggagagagatggtcatatgggtaaaaaaggagacacaaaaccatgaagattggggcagattgg

SEQ ID NO: 185971 - DNA, 249 bp, Homo sapiens
aagtaggcgctggtagagtagaaggtctagtcttcagctgagtgttgtttggccaatagacagaacgctcctaagaggcatttagatttatcctggcttttcgctcccctgcttgtttgttgatttgcttgcttcaaactttacattagcgtgtccatttataataagtggcttagatcttaaccaaggagttttaatttggccatgccttcaataatgtagaactttccattcctgctgaccagaaaa

SEQ ID NO: 185972 - DNA, 255 bp, Homo sapiens
aaattatttctttattttccattgctttttcctgtcacatagccacctcacttcaagattatgctatacgtgatccaaagcataggaaattgagggaaacttgtaaattcactttgttgctctgacttcagtttgtatgtggttgtaggataataatataaaaatgacatgtgtttgccttcaaattccaagctgtgaattgtaattcctggcaggtatttcacttattccaaaagtggtagttcacaacctagc

SEQ ID NO: 185973 - DNA, 156 bp, Homo sapiens
ccttttgcacaaatgcttttcaaacctctgcttgcatcatatttgctaatgtctcaatggtcaaagcaaatctcagtctcatagccaccctcagactcaaggagttgagaaatagtctgtacctcttgatcagagaagctgcaaagaatttgtagt

SEQ ID NO: 185974 - DNA, 1036 bp, Homo sapiens
tggtgaccattccacccttccatctcactccctctaggatcctgattcaaacaatcgttcaactctacaaagatctccaatgatctccttttcaccatctcagcctcctccctggtgtcttctcctccctggcatctaccttatgatccacagcccatcgttatcagcactgccttccctttactactttgtgaaaactatgaccctcataaacccaactgcctgcctattccacacctagtgtgcgcagatgagcgcagctggacagagacacacaaccatgctgactgccctcacctcaaatccacacccctcaagggctcagcagccccatccatccctgcgcacatccactcttcgaaagcacgaacggatgctccaaagcgcctctcctcagaccttcaacacgccctcctacctccccactctagctccctgctacccaccgaggaaactgaggccaccaaggaagaactgacacaagactcctccacctgcccatccatctgccccagctgtggaggactccctgctcctccccctcagcaagcccacctctggcacgtggtcctggacaagacaagtttttcctctcatctgcatcaatgatgtttttccttcttaactagctcttttctgtaagtgcaatgaataaaaaacttagaataaaaaactttctctcaagcccacttggctcccatcaattatcatccaacttctgtttagcaaaacacagtcaaagtctgtcaatacagtggcctcaagtccgtgccccatctcagccaggcctgtgcctcctcctcaccagccccgccccaagtgcaggccacacccactgacccattggcagcagccctgccagcccgtggccacctgcttccttccccatcgaccgtcatcctccttcctccctctcggctcctttgccaggctctcctcctgcccccattcccacgtcgagtgccggggtcccagtccttggcctccctgacgggttctcctcctgcccctccccctcctgtgtcaagtgccctag

SEQ ID NO: 185975 - DNA, 395 bp, Homo sapiens
gttttatctcctataaaacacagctgccttgtgtgtatttttcttttattttactatgatgcttttaaaatgaccatgggttagtatggaaaatagtaatttttgcacgttaaaagtatgcattgtaaaagattgtctgatgtggatgatgagtagtgccacttccaattttatgtggccgtgatgaacttggcataagttctgaccagatctgagctattctaatggaacaaacaaggaaatacgtctcctctgttgttagtttcctataaattctctaaaattattctctgccctgttttgttttggtttttgttttttgtttttttcgaggcagagtcttgctttgttgcccactacactccagcctgggcgacagagcgagactccgtccc

SEQ ID NO: 185976 - DNA, 492 bp, Homo sapiens
aagtcgccagcggacatttgccagaaacaagtagattgtattcttaggcattgttgctaggaaaaatttagagtggaaatgtaattttttcttttgctgccagtggaggtgctggttcattctttgttgtatgcccagtagtagagatcttgctatcaaaagtgtaagtttctttgaaaggtttaactgaaggaagatgtagaattataaatagaattggctggaaaatttgtgataaaaaataattttaattagatctacaaagagggataaccagcaatcttgctctgctatagaagataaatagttggtacaaagaggaatttgaatttcctccataatatggaagaggatttagggtcttttttctttcatcttttttttttttttttttttttttttttggggacgggatctcactctgtggcccaggctgaagtgcaggggccaaatcatggctcactatgaccttgacctctcaggctcaagtga

SEQ ID NO: 185977 - DNA, 475 bp, Homo sapiens
tctaagaaatgaccaaagggtttcctgcaagtggctatacctgtttatactcgtctccctgatccttgccagcatttggtcagtctgttttgcaagggatggcaatggctcactgagcaagcattcatgatccaggaagaggaaaaatcattctcaataggacagggttattaaggacagggctctcagcttacaggagggctgctccttcttccttcatctggaggcttacacctcagctcaactgttgttcaactgggatacatttcatttatttctctctctctctcctctctctctcttttttttttctttttcttttttttggtagagactgggtcttgctacgttgcccaagctagtcttgaactcctcacctcaggtaatccacctgtctcggcctcccaaagtactgggattacaggcgtgagccatcacgcctggccgaggtcaagaatttgaaatctacctgggc

SEQ ID NO: 185978 - DNA, 585 bp, Homo sapiens
ttggcgtcttatatgggtgtgatttgaggcactgccaaacaactggaataggaatatcaaagatcactgatcaccataacagatactaatagtgaaaaagtttgacatattgcaagaattaccaaaaggcgacacagagacacgaaatgaacacatgctgttggaaaagtgatgctgacagacttggttgatgcagggttgctgcagaccttgaatttgtaaaatacaaaatctctgtgaagtgcagtagagcagagcacaatgaaatgagctatgcctgtacctgcttcatagggttgtgagagttgagtgaggtgatgggtaaagtgcccagcactctcctaaatgtcatagagtttatagaagaaaatgttgggtggtattttatgaggatgattggtgatggcctgagtaatcaaattgggccttgtggaagagatggcacttgaattgggccttgaaggatagcatgctttctctaggtggaactggagggaatttgtactttttccaggtggaggggactggtagatacaggcagagagcctgaaagtatgttaatgaagtggttggatgaaggggact

SEQ ID NO: 185979 - DNA, 175 bp, Homo sapiens
tgaccccccaaagcatctctcgtttgacgcccttttaatctccactgggaaggccctccttccacacacagcaccccagcaggaagacagctgtaggcagcaggtgggcagtcgtggtacctgctcctatttcctcatctttacccgaaagaggaccttgggcttccagccctag

SEQ ID NO: 185980 - DNA, 273 bp, Homo sapiens
gctcatcagcagggtaatggatgaacacgcttggttacagacatagcatggaatgctactcagcagtgaaaacaacaggctactgatacgcaccatgacatggatgaatctcatagatgttttattgagtgaaataaggcagacacaatagtgcctactatatatttccatttatatgaagttccagcacaagcaaaactaatttataatgataaaactcagattcttcgttgcctggaaccaggcatggtagaaagattgaataaaagggca

SEQ ID NO: 185981 - DNA, 271 bp, Homo sapiens
cacctcacccacaattttggatcactaaccccctctcattcaccctcaggtctcagaaatgatgtcaacgtgtgcggatcattcttcaccaactctaaccaaagggtgacatgcatgtttttcaggaactaatctaagaacttggttctcatattcaagacactgaactttaaacttaaaaagcaccacagcatatattttatgctatataacacccagtttttaaaaactctcagcgattctttcatctgaggttcagggcactctgttg

SEQ ID NO: 185982 - DNA, 370 bp, Homo sapiens
tcctgggctcaagtagtcctcccaactcagcctcctgagtagctgggactacgggcatgtgccaccacacttggctaatttttttttttattatttttatcttttgttgagatgaggtctcactgtgttgcccaggttggtcttgaattcctgagctcaagcgatcctcccacctcggattcccaaagtgttaggattacaggtgtgagccactatgcccagccaaagttcacattttaatggaggattcgttctgccatcttcttttggattttctttttgtcttacctttctatgttccttttcctctgctttctttcctttggatttttttctcattttactttttccctctcatctgctaaaagag

SEQ ID NO: 185983 - DNA, 183 bp, Homo sapiens
ctccccaacccccaacacccaacagagggcttagtttaacattgtcttactttcacagcatgtgagttacagctttttgtaatgaaaaccaataatcaattctaaaaaaaaatgacaacaggttcatcaagttcagggcttttgtcagtttccacctgtgttccctctgcctttgtgttggga

SEQ ID NO: 185984 - DNA, 251 bp, Homo sapiens
ctgcaacctccgcctcccaggttctcaaacagatttaacaatcctctgagaatggtactcatttatttggctaaaattcttcagggatttataaactacttgctaaaggagggcattagataatcaagtatttttaattttccatcttgttatactttttattttaaatgcctaaaaccatacagtattgtgtgatgtgtaattcctagtatacaagctacctagagtcaggctggttcagtaataaattt

SEQ ID NO: 185985 - DNA, 327 bp, Homo sapiens
aaagaaggtaaaactctggcttatatagcatctttaacaaaatacaataaacttatagagaaatgacaggacaaaggaaagcagttttagtcttccagggctgggaatcttggggaaggaaaatatatggaaagaaactaatgaagtaaggtttgtgtgcagattcctctggtgccacctctgggctagtaagatgggagagttgcctccagtaaaggaagttgtatcctgcctttaaacagaaaaggaggagggtagagagagtgtttcctgcctttgctgctgcttaattgccttcagctcaaaataatattcatgtcaaatagg

SEQ ID NO: 185986 - DNA, 216 bp, Homo sapiens
atagaggacccgctgatccgcttagtgagtggagtgatgagctcatgcatttctttcatttgtgtttaaacttaacaaaaaatacagttcaaacaagtttcaatattaggtttcctatcaaattagaatggttttatggcaatctaaacacaaggtgatgagctcttagagacaagctcatttgacaatagtgagaagtgacagtagcagcttagt

SEQ ID NO: 185987 - DNA, 189 bp, Homo sapiens
  misc_feature (155)..(155): n is a, c, g, or t
cctgtcttggaatttatgaaggaaaaaccgtaaaggaggtttagtttccctcatactctgactatagaggcagctactcttttacaaaattgtatctgattctgcacgtggtactactttttttgtctttttgtctgttagttatttctccaggngaaaaggcactaattttctaagacggcaagcggg

SEQ ID NO: 185988 - DNA, 201 bp, Homo sapiens
ttgagtgttaaagaattaccttttgtctatgtgtattttaaaaattaatcatccatttaaatgacaaagctctttttccgtggaagtgtgtggattagctctctgatagcaaaagtaataatataatttagggaatgtgggactagctgtcaagagtcctaatttttattccaattctgcctctcacatggccactcaata

SEQ ID NO: 185989 - DNA, 285 bp, Homo sapiens
cgacaagaacaaaaatctgtctcaaaaaaaaaaaggaaatttttttcaaactgaaaaaactttgtcctaggccttctgatcaattaaccataatcaaaagaaaacccagagacaggccaggcgcggtggctcacacctgtaatcccagtactttgggaggccgaggagggcaaatcatgaggtcaggagattgagaccacggtgaaactccgcctccactaaaaatacaaaaaaattagctgggcgtggtggcgggcgcctgtagtcccagctactcaggaggct

SEQ ID NO: 185990 - DNA, 321 bp, Homo sapiens
ttgcacattggctttctattccttgctcactcctcatgttcccttttgttttcttggattactttccttgacaaagtgctagctaaaatgacattgtttcaggccgcacattatgtgaaactatttgaagaaaatatgactgtctttttgcattttacagatgtcaatttagtcagcaacataattttaatttgaattaaagactaaaaaatgaggcataaactatactgaagaatttgttttaattccctgaaatttttatttttttttgcctttttctaagacagtctcttgctataataaagaaaaaatgcatgacta

SEQ ID NO: 185991 - DNA, 166 bp, Homo sapiens
cacatgcccctgcacacaagggtcacgctcttgcctactgacaaacataatccctgaacattaaggcacataaacatacctaagccagtgccaggcacccttgccccaaatttctcaaatgagactaccagatcagtttctgtcagactggagtggtgggcaagtt

SEQ ID NO: 185992 - DNA, 410 bp, Homo sapiens
aacgtagattggtgcagccactgtggaaaacggtatggaggtttcctacatagtccaaaactaaatatagaattaccatatctccaaaatatgatagaactgttataattccagaaattaaatctagaactacaatatgatccagcaatcccacttctggaaatatacccccaaggaaataaaatctccgctcctgtagctagctgctgtctcatgttaactgcagcattattcacaattgccaagatatggaaacaattaaagtgtcctttgatggatgaataaagaaattgtggtatataatgaaatattattcagccttaaaaaaggagatgctgccatttgtgacaacataggtgaatgtagaggatgttatgtgaggtgaaataaacaatacaaaaatactgcat

SEQ ID NO: 185993 - DNA, 736 bp, Homo sapiens
ttcttccttcaactctgccattttcccccatccaggctctaaatcctggtagagcacagacaaagcaatagaaacagggaaaccaagcaagccttgcagctactcgctcacacctccatatgtgcagatatgtgtatgcccttgcttccctgcacacatacccagggacatagctccagagagtggtggcatcttgctattgaggaaatggaaatgacaagtgagagaagacataaggaaggtaatgcaaagggaagagaacgaggaaaggtaagaaccctaaaagagcagaaaatcaaaaagagatttgagataaaaggctaggacgagggttggtgaaaaaaataacagatctcaaaggacatgaaaattacatggaagtcaagctttttaaagatcctaacaggttaaagcaatattctgattgtaacccaatgaaatcaaactggaggaaaacatatggaccagaaattgggtcctacaaaagcaactacatgcatgcaaactggggcaacatggcttagcagcattttgctaaaagagaattagggatttgagtcaactcggagctcagtatgagtcaccagggcaaggtggcctccagagatgctaatgcagtatcgacctcattttaaagggctctagacaaataggagcatgttcctggaggtcagtcaggctggggagaggactggagcccaggctccaaaaggtctggttggaggtgctggaacct

SEQ ID NO: 185994 - DNA, 177 bp, Homo sapiens
gcaggtggatgggagaatggagtcaggcaggtgtgtcaggtgtgcgggcaaactgttgggtgcctgtgaaggatactgccgatttgccacagtccccattcacctctcacctcctgacacctaggccagctgcctctgtggccatgtgtgcccagggcctctgtcatcctgacccac

SEQ ID NO: 185995 - DNA, 547 bp, Homo sapiens
ctaaaacgaacactgacctccctaagcaagtgccaaggtctcatccaataaagaaaaggtcatatggcttcctgagcgtcggaaataagggaagaagacacgtcttctctccattggaaattctctccttcaggatggatgaagaattgattacagcctttcaggaaagctgtgtctaaacaggaaactgacattaactaggagaattctggataataaattttttaaatgacaggttatctcagctgaagtatcacgtacattaaagagcctcaatgtgttttgaattttccttgcgtgttactaagctttctcttaggtaggccgtgactcacaggaaaggaaaggcacaatgaatgtacctcaccaaagagtgctttagctgtacatcaaagacatgcatacactgccctgagtgcataaaaatatatgcatgtgtgaattcaagatactgtcataattatttccctccttatttacaatgcccatttcaaagtttattaaagtgagtaagataatgtctttataatgaaggagtattatgtgc

SEQ ID NO: 185996 - DNA, 142 bp, Homo sapiens
tcaccagttagttaccaatgttactaaataaaatataacaccgagagagactttggaaataatattttttcagctcattttacagtcaagaaacctaaaccccacagaaattaagcaattttttaaagccacacagttaggt

SEQ ID NO: 185997 - DNA, 242 bp, Homo sapiens
aggatttcaacttacgaattttgcgagggacacaatcagttcataacagtagtcttttgtgtctgacttctatgactcagcatgtctatgtgatttatccatgccatggcatctatcagtagcttgttccttttaattgctgagtagaagtctattgtatgaatatatcaccgtttatccttttatctgttgatggactttgggctatttctagttttttactattatgaataaaactcctg

SEQ ID NO: 185998 - DNA, 495 bp, Homo sapiens
ctagactaaccaagaagagagaataaatttctccttccatatcttatttgaagaaatgaatctctgtaaataaaatcagaaatggaaaaggagatattacaactgataccacagaaatacaaaagatcatcagagactatatgacaaactggaaaacccagaggaaatggataaattcctagaaacatcgagtctaccaagattgaatggggaataactagaaaacctgaacagagcaataatgagtagcaagattgaatcagcaataaaaagtctctcaacaaggaaaagcccaagaccagatggattcacagctgaattctaccaaatatataaagaagaactaataccaatcctcctgaaaccattccaaaaaattaaggaggagggaattctccctaactcattctatcaggccagtgtcaccctgatatcaaaagcagacaaggacacatgcagaaaaatctacaggtcaatattcctgataatctagat

SEQ ID NO: 185999 - DNA, 416 bp, Homo sapiens
tgctgtctgcaatgagcatatctgataagcagccagctgttaaggctgattctaccttgacctcagtctcagcaactttgcctgtggctctgggttggagtctaggtccagcttccctggcggccactggcctctatggtgggcagcagcatcctaagagccttcctgccttacccctattgctgtttcaccagctgcttttagcacactactgcctcttccatcttacacctgtacttgtgctgttccttttaccaggaaggaagggtagaaatgaacatgggaacaccctgtcaggtgctttgacatactctctcaagcttgatgtatcaggtttgaggagtgcctctgacctgaagccttttttcagagcagaaatagcatgtgtattaaacccattggatggtcagaccctt

SEQ ID NO: 186000 - DNA, 249 bp, Homo sapiens
aataaggtggagtatggttaacaaaacgattccacatcagcaaatgctaacacagggctcctgggatcccatagagagagagtctatttccatttttatttcttaactcaaaaaataaaattaaactttactttctagaagaggacgatgagagaagatcgctgggtggccacgtgatggataagacatgcaggcctcccttgctggtccccactggcctcattaaggctgggactattatttctcaac

SEQ ID NO: 186001 - DNA, 444 bp, Homo sapiens
aattgtctcgatcctttgttttactcaaatggagcggacttcccatgtttatattctgtcctgtgctttgcgtttcccactccgaagctcgctgtcaggacacagagtgccgcacgcgtgtgctgtgagtctatgagcatggtcatgtggctgtacccagagaccctgaggaggaggtgtttttaacctcgtttctcttttcccgtgtttcaattttcagaaagcacgtttttcctccatgtgcatgcattacctattcccctaaataatcactgaaaaactgcacacagcacaaaaggatgtacagggacgagcaaatctctttcccacccgcctgccaggcccttcccagagatagcatcatcacccccggtttcttttctttctttcttgaaatatttgttcccccaagtgcccgcccctcccttttgtttttactcaaat

SEQ ID NO: 186002 - DNA, 272 bp, Homo sapiens
cagaatccaattacgtatccctctcttccatgtgcatatagtatcacaacctactaatctgatcaatttttttaaaaaaaagcttgttagtcatttcaaattagatacccctccacaagcactctatctattctttacccccatacatttttgttgagttagagatggtcacaaattctttgctaatcttcccattaagtggtagagtcaaattccccaccctctgaatttgggctggccttgtaacctgctttgacaagagaatgtggcag

SEQ ID NO: 186003 - DNA, 348 bp, Homo sapiens
atcagaaaaattgctctgtcatccaaggagatcacccagtttgacaataaatgtaaggtagacacaagctagcacataaaagaagatttgtatgctcctctaagaaacaaaatgaaccaagtgcacttggttcattttgtttcccatttgtctttaaatgaaatattcattacccaatatctgtgtgccttgttatgtttatgcaagtcactaaaaatactcacatacatatctgacatatgcatacagaaaacatgagacatcttcctccagttgctaaggatcacctcaaatttaatacaaaactcaattcatcatcatcttcctgacccttttatttcacccagg

SEQ ID NO: 186004 - DNA, 126 bp, Homo sapiens
gttggccatctgcctgcaatgtcccttatttccttttccatcaaacaaactcttactcatccttcaaggcctcaggatgtttccccactccagtattttgtcataaaaattttcaaacatacagca

SEQ ID NO: 186005 - DNA, 402 bp, Homo sapiens
aaggaattatttttcatttccagctctggctctaaataatgtgtctccagcagtgaaatgtaggccaagatagctctctgatatgtagctcctataaaggaacccacttctcagaagcattggaaaaggcaaattatgaaggttcataatacaatataataaaaattctttagtcatccactattacagatactaagccaaattttaaattcatactgtataacaaatttgaatttagaaataattcctctttattcttttcatttcaacccaaggttacttactgatatagttcagatatgtgtctccactcaaatctcatgttgaattgtaatccccaatattggagatagggcctggtgggaggtgactggatcatggaagtggatccttcatgaatgg

SEQ ID NO: 186006 - DNA, 277 bp, Homo sapiens
gccaggagctgcctcattagcgtaacaaagacactctcacttgggaaattccaagggtttttgaggctctgtgccaagaatcagaacaaagatcagatcgattattatatgtcatataatttaaatatgtccaaattattgttcagtaattcaattacacctcaatacagctattaaaaattttttttaattttattttttgagaaaggttctcactttgtcgcccaggctggactgcagtggtgtgatcagggattacaacagcctcaacctccct

SEQ ID NO: 186007 - DNA, 438 bp, Homo sapiens
gtccattatgctcatccctccttatgctcatcccctccttagtaaaaaggtcttaacacgcttatgtagacgccttatgctcatcccatccttatgctcatccctccttatgctcatccctccttatgctcatcccgtccttatgctcatccctccttatgctcatccctccttattcctccactgttgataatgtaatagttgatctaaatacagtagatatctgatctctctttcacagaaagtcactggggtgtgtgatgggaattgtaaagtaagtattggtgatggtttcaccataacaggtgatatgatatccactgtccacgtcatccaaaacctaagtttgtttggcttcagagttgcaggacattccaattattccacctttctcagcttcctacccttcgtgatccactccagccaacatgtaaggag

SEQ ID NO: 186008 - DNA, 190 bp, Homo sapiens
ttaatgcgtctgttgtggcatctctcaaatctgtactttgctatctctttgactacagagtcactaccttccgataagcccttctgctgtctccagaccgatccttctaaagcgtagatgtcattgtctttctctcattaaagctctttcatggctcctcattttccaggttccagctcatgtctcagga

SEQ ID NO: 186009 - DNA, 157 bp, Homo sapiens
atattgaattcattctactagacaaaagcccacacccacaagtctctttgatatatgctcttctttaacttgggcttctcctgggactgctgaggaataatatctttaggcttcttgggagatctgttgtttacctgaatggttgtctgaagcaaca

SEQ ID NO: 186010 - DNA, 821 bp, Homo sapiens
aagtggtttggagacagtaagaaagaaaagaagtacaagttaaatatctcatttgagccacgtcaattcaaaacaacacttagtctgggggctatccaggtagggatgtctggagtccagcatgaaatgtatacctggatctgaacagagaccacagctggggataaagatgttggtgtctacagctgaagctgtaaagtgagtgagatcactaaaagacaaaaaagatgaagaggaaataaaagagtggagcgcagagtggcgagggacaagtaacgtgaggccacgcaaaccgtatggagcagaagagggagagccagtagaggaaccaaagcagcttgtgctttggtcaaccaaggcaacttggctcaaggactgaaaaatgcactactgaggtcagcagagaatctaagggaagcagcctagcaagggcgatcaagaattctgtaggactggacccacttcagctgccaccacttaccttcaatggccctgctatgtctaattgtagcaggaccaaactagcagcccacacctgtggcctgggaatccctgcccagcactaaatgagcaaaccactggcattaagacaatgaaacaaatgtttaatcttcctctggcaatggcagtgactgaagatcccttaataaaaaagtttgtggccaggcgtggtagctcaggcctgtaatcccagcactatgggaggctaaggcaggcggatcacgaggtcaggagttcgagaacaacctggccaatatggtgaaaccccatctctactaaaaatacaaaaagtagctgggcgtggtgacgggtgcctgtaa

SEQ ID NO: 186011 - DNA, 283 bp, Homo sapiens
acgtagcccacctgccggagcacagagcgcccttttaaaatgcggctttgctatccaggccctgcatctaccgattgtccaaatgttgctggtagcaaaattaagtgtctcctccctcagtgacttcatgtgcacacagcgcatatgctcagtgcatagttttatggatacgtttgcttccctttactctaaacctaaagattacatggtgaaagtaaactccaagagtgagccttttagcccattcacctcttggcagagcgaaccattcaggtgggctagt

SEQ ID NO: 186012 - DNA, 171 bp, Homo sapiens
gaccctggcccgtcaagtcattgaattgtagagggtacctcatctttcctgaagcccatgagctataacagagtctggtcgtggtggacaaggcttcagggctgtgggatggcagtgggtattgatatgcctgtagcttttgactttgttgcacagctaacattgaccttg

SEQ ID NO: 186013 - DNA, 726 bp, Homo sapiens
tagaactagcttttgtactatcttctgcacagcataacttcagtctccctttactaattcaaggaaatctcagtgaacaaattgtataagggtagatgagctaaaagctcactgagtcattaatttgtcataactcatctaagtacaatgattaggcttgtgtaggtgtccctagtttctctttctaaatcatgtcttagtagggacagagcaataatggtggatcgtggcaacgggaaggaagatgatgtgtcagttatctattgctgtatgacagtcgcaaaaccttagtacttactacagaaacaatgatttgtcacattttgtgggttgtctggatggttgttttgcttatatggtgcaggctgagattactcatgcagcttcacagttcttttgcttatatggtgcaggctgaggttacacatgcagaggaaagatgggctctgttcctcattcgtatgcctggggccttggtgcgggttgtggcaatggcgtcttggttctccatgtgccgtctctccagcaggataacctgtagttttctcacagcatgacagctgggttccaggagaatcaaagcagaagctgctagaccaattaagaactaggcccaaaacttgcagtgtcacttctgccacgttctgttcctcagagtaaagtcacaacaccagcccaaagggaggagaaataaacagactccacctcctttgaagcagagagaca

SEQ ID NO: 186014 - DNA, 380 bp, Homo sapiens
caagtttttcttcttctccttcttccttcttcctcctttctccttcctcctcctccctcttccgcttcctcttctcctcctactcttcctcttcgtcctccttcctcttcttcttctccttctctttctccttctccttctccttctcctccttcttcttcttcttctccttctatatattgtaccttaacttcgtttttacccaccactttaaagtattttgttctatgacagcagctagagatcttaatacgttactccatttcatggctatacacagtttatttacccgttttcctagtaatgggactgtaatgttacttaaacctcatctcaaagacctaatataaattaaattctagcttcatttgaatctttca

SEQ ID NO: 186015 - DNA, 504 bp, Homo sapiens
aggacatgactctgtcacttgcccaaagatcagttaaaaggctgttataatgatgcagagaagtggagatctgctttgagtggctcagtctaggggagcagggaggcccaccgtgggcccagcagtcttccccatgtattaccagtcatatgaaagaacttagaaaagcatccacaatgtgtccttcaccatggatgccgtgtttgtgcacatgaattggagacgtaaaaaatgtaatgtttccttagttccactagttaaaaaaagaaagtattgcagagggaggatggatgctcgccagtgaaaatgccaggtgtcttccacaagagaaaggaattggagttgggatccagcaagttgctcaaaagggcttatgcaagggtgaaaagaagaatctggcctcataggtatctgaactgtcctagaagaagactgtcttaaagtaagatttgcctcgtgtctaccaagcgtatcttcaatgctcagcccagtgggtgaaagtaa

SEQ ID NO: 186016 - DNA, 489 bp, Homo sapiens
aaatcaggctgtcaccacctcttgcctacactggccactctgtatctagtctctcccatggcacctgctatgatctagcaggagagatcttccagatctcaggctaatcacagtcccccactcatgaacacctacttgctcagtgaagttcaaactccttagcatgactaataaggctctttttttcttaatctttgtgtgtgtgtgtgacaggaaggaaggaaggagttgaggaagagctagggatcaaggagagaaaaggcagactaatcagcttcttgacaaccagttttcccgctgcctttgaattcttttcatttcaggacacccctagggaccttttactccagatacacaaagtttccatcaacagcctctgtgcttacatgtgctcatctcttccacatttcaaagacaaatcaaatcaaattcaatgccttcccacagaagccttttctgacattctcagtgttggtggctgtgtcataa

SEQ ID NO: 186017 - DNA, 413 bp, Homo sapiens
cagccccgcccaccccagcccccgaccattggtggatggaagccccccaccattggctcccaggcttgctggctaggtgcgggtctaggcagcttcccagctcagtgggactggcctgctttggaacagcggcagtgcccaggaagcctgtgaactgggcctgccagggaagccatggtgagctggaagccagccaggtggggtcagggaaggcagggccatgcacaccacacccttcactgctgggcttctaagggcattggccagatgaacaagcacacgcagaactgaattggccctgatggcctgcaagggaggggggcccggggcctggggcgtcagctgggatatatgggggcagggagtctctgcatggccgatgtttgaattaaaatacagctttcccctgtatt

SEQ ID NO: 186018 - DNA, 370 bp, Homo sapiens
acctgctaccccacgagggcagcttgttttaagctgctttacgttctattaggttggtgtaaaagttaactgcattttttgccattaaaagtaatggcaaaggccaggcgcagtggctcatgcctgtaatcccagcacttgactctgtcttgaaaaaaataaaaataaaaaataaaaataaaaataatggcaaaaactgcaattacttttgcgtgaacttgatacctctgatgtatgggaccccctctaccaggacttgcaaaatggaatctgagagccctttgctgccccagtgcacacttgcttgagtgggtggatgctgtggctgctgagatggttcatagctcgtctgctagaggcgtggttggct

SEQ ID NO: 186019 - DNA, 147 bp, Homo sapiens
acaagttgaagcactttataatacagtaaaaatgttacacaattacttgagaagtcaaaattatacagagggaataaaataaatactaggtaaaatattcaccactgtcatttgaatattttaaattgacatattgaagtgacccac

SEQ ID NO: 186020 - DNA, 727 bp, Homo sapiens
ccaggctggagtgcagtggtatgatcttggctcactgcagcctccgcctcccaggttcaagcgattctcctgcctcagcctgctgagtagctgcgactacaggcgtgcgtcaccacacccagctaatttttgtatttttaatagggacatttttagtatttttagggttttaccatgttggccaggatggactcgatctcctgacctcatgatccacctgcctcagcctctcaaagtgctgggactacaggtgtgagccaccgtacccagcctcgaaggtattttttattttcctatatctgtttgtcagtgagtttcctttaatacagcagtgtgttggtatttttattttatttttatttcgagaccagttcctagatcctcagtattagagaagtcatttcctcttttgttcttgtgacattttcttctggtgtcctttaatactgcaatacatcaggcatctgaaatactaaacacttaaatgtttcagacacttcctaaggcctcagtgtcatctgcacgtagacatttggtttctgggcacttaagatctggggtcgataggcagtttaggactgctgcatgcactgcccaggcagctgctgggagcctgggtggaaacaataagaggagcatccagatagaggtagcaatgttttgaggaacaacattaatcataataataaaagaaagaagtagttgcttctgtttgagaagctgcctg

SEQ ID NO: 186021 - DNA, 122 bp, Homo sapiens
agtgtggagtcttaattagggagagtcaggttggcagaaatgagggaaaacaaaaagaaaaggcagataagctataaatctccctctgttcacggtccagaacacgcagccctccttcacaa

SEQ ID NO: 186022 - DNA, 234 bp, Homo sapiens
agagcgagcatatacaagcaagccctcacaaggaagagaatctgctggcacctccatctgggacttctagctcccagagctgtgagaaaataaagttctgttgtctaggccaccaagaccatggtattttgttatggcaggttaactagactcatgcaccgcctgtatcctccctgggatataaattccatgaaggtgtggcttgactgtcagcctggggctgtgtggcccatg

SEQ ID NO: 186023 - DNA, 1009 bp, Homo sapiens
aacctcatttctaatgatgtctatcacgtctcagcctttgactaagatcaagtgtagtatctgcgatgttctaccgtaatacttttcgttttgagacagagtctcactctgtcagccaggcttgagtgcagtagcacaatctcagctcactgcaaactctgcctcccagattccagcaattctcatgcctcagcctcctgagtagctgggattacagaagtgcaccaacatgcctggctaatttatgtattttcagtagagaggggtttcaccatgttggccaggctggtctcaaactcctggcctcatgtgatctgcccatttcagcctcccaaagtgctaggattacaggcatgagccaccatgcccggcctctaccgtaattcttttttggtagtcgtttttttgggaacgaagtttcactattgttgcccaggctggagtgcaatggctcgatctcagctcactgcaaccactgcctcccgggttcaagcgattctcctgcctcagcctcccaagtagctgggattacaggtgcccactaccacgcttgactttttttttattttttagtagagacagggtttcgctatgtggccatgttggtcttgaactcctgacctcaggcgatctgcccgccttggactcccaaagtgctcggattacaggcgtgagccaccgtgcctggctgaggtcttttttttttactctgagtgaggtgacaagctttgggaaggttttgagcagaagagtggcatagtctgatgaaatctggcttactttgacctctgtattgagaatgaatgacggctttggaggtagtgaaaaatggttataaaggatcctggatatattttgaggaatgagccagtgggattttttggatagattggttgtgagggaggccatcaaagatgattctcagatttgtgatgtaaagaatggacaacaggccttgcgtggttgctcacacctataatcccagcactttgggaggtcggtgagggtg

SEQ ID NO: 186024 - DNA, 540 bp, Homo sapiens
cagaggattccgctgcggctggtgagggaatgatattggagttaagacctgaatgatagggaactagccttgtgaagatctgagacagttaagtgttgcattagatgtctgaagccctactcttacagttttatttttacttataggagagccacttagaccctacttagatctgattttacatacaattctaataagcttgattatcactcgctgggcctatagcagatgaacagaaatgtattgaatgtatttaatgtaaaacaaggtaagaggcttccgagctgtgctgctgaacaggcatgttgacagcaaaaagtaacacaaccataagaaaagagcaagaaaaaaaattaagccaaatgccttttgtgttttaagaggcaggagaatcgcttgaacccaggaggcggaggttgcagtaaggagagatcacaccattgcgctccagcctgggtgacagagcgagactctgtctaaaaaaaaaaaaaaaattgaataatacccttttgtattagcagaattaaatgaaatatgtta

SEQ ID NO: 186025 - DNA, 518 bp, Homo sapiens
actgtgcctggctcgcctcctctgctacgcattcgtatgcataactaggatgcaattcgccgattcctcgtgctttatgcctcgtttcattaggctaccatttgtacagcatcctcctagtgcctggccgctcgttgaccactcttgtcattttacatattcctccgattcttcctccgaccaggcacagtatgaacgctggcggcatccactcaaaccgatccgaaagcatgcacgtttgagacttgtcgatgataaacacaggcctagacctggaaacccctctggcgggaggggtatttggacatttttaaattaaaattacagattggaagggatctagtacactacacctgggacaaatacttttttgtgaagtcagtaaagcctttgcgtgcaatatagcatctctatgcaatgcagcaactcctcgtctatcgctacagtaagaaaacagccacaggtcaggtgttgtggctcacacctgtaatcctagcactttgggaggctaaggtggg

SEQ ID NO: 186026 - DNA, 377 bp, Homo sapiens
tgcaaactcagacccagaagctactaggaagatctaatggcaggaaactaaataaaaacacagagcatccttctgatagagaaatgcttattgactctctaaagggacattggaggaacactcaggtggttgtgttataaggcagagtctgcttactaaactccaactcatctaaaaagacaaagctacctaattttgtgagttcagacaattttgtaacgaaaattaaagtatgcattctggtttttctagcaaatgaaataactccttctatatgggttgattctgcttagcataggtggtgttagccattatttgagaacagttgtttgaggaacagaagtgtcttctccactgtatcttcagtggcagctttc

SEQ ID NO: 186027 - DNA, 375 bp, Homo sapiens
attcagtgacaattgagaagttctgaataatggggtgaggaactgattgtcttgttctcggtaatgaacatcaggcttttaacagagtgcatagcagctgtcttttaggaaacaacacgccacaagtggacctcatgaccccaggcattctgtcactgtataagtgatataagtgcacctctagctggacagctcctcaggtcctcccagtctaaagtacaggatgtgaaagtaagacggttcaactcgcactttatctctgggggatggatccaacgagtccgggaaggagggtagaatctttatgttgcatctcataatcccaaggttgttttttgacattctaattattgtacatagttagcttttcaaaaa

SEQ ID NO: 186028 - DNA, 371 bp, Homo sapiens
cagttgcttacccaagcaggaagacctccacttaggttctcgagggtttgcctgtccatattctggtcaactgcaggggggaagccatgtcttctaagcctcaagatagttgtttacgtgcaactatcagaggtaaacacccatcatttacctctgttgggaggaagtcaaaagacagatggggaaagaaaccaaatttccctgtttaactccacctcctgtattttaactcatgagagcttcttgagaggtataaatttccttgttttcagctttcaggcttgtggctgattgtgtgaacttttggtgtgctctgggaaagaacaaagcagcattcattctcttcatctttggtaatccagttaatgcac

SEQ ID NO: 186029 - DNA, 348 bp, Homo sapiens
tatttcggcctatccttagcaaactaatgcagaaacagaaaaacaaatatcacatattctcccttataaatgggagctaaatgatgagaactcatggacccaaagcagggaagaacagatactggggcctacttgagggtggaaggtgggaggaggaaaaagatcagaaaaaaataacatattgggtatcaggcttagaacctgggtaacaaaaaactgtacaacaaacccccgtgacacgagtttgcttatatgacaaaccagcacatgtacccctgcaatctaaaatataagaaaaaacaaatctgttggctctagtatcaaaatatataatctaattacttctca

SEQ ID NO: 186030 - DNA, 222 bp, Homo sapiens
gtaaaaagttgcccattttattcatagaaaaatgttgatgtttaattcttatatagcattttattgtttgaatgtacctgaattaactactcccctgttgttggctttttgagccatttatacaaagaagctgtgagccattaatcaatgtaatattaaattatcaatgtaatatattaaaatacatgctgggcgcgatggctcacacctgtaatcctaaca

SEQ ID NO: 186031 - DNA, 514 bp, Homo sapiens
tagctgggactacatgcgcttgccaccacgcccagctaatttttgtattcttagtagagatggggtttcaccatgttggccaggatggacttgatctcttgacctcatgatctgcctgcctcggcttcccaaagtgctgggattataggtgtgagccaccgcacccagtcaaatttgtataatttttaacctgacacagagacaaggtagtttataaatggtgtgtttaaactatatgtgtggaaatctcaaccctgtaactggagacatctgataagtcttagacttactgataatttcatttttagaaggtagaggtggaaatttgactagttaattcatgctgagaactttgggtgaaactggctattttattctggggtttcatcctgatggaagttgtgcaagaccctcttgcacatgagatttttagaaaggtgtctcatgaagctcagagcaaagatggtattacctccaaggccagcagaactgtagaagagagtatggtttcatc

SEQ ID NO: 186032 - DNA, 994 bp, Homo sapiens
gcgagccctgaaccctgaaaggctcgcgatgcctctacacaagtatcccgtgtggctctggaagcggctgcagctgcgggagggcatctgttcccgcctgcccggccactacctgcgctccctggaggaggagcggacgcccactcccgtgcactataggcctcatggggccaagttcaagatcaaccccaagaacgggcagcgggagcgtgtggaggacgtgcccattcccatctactttccccccgaatcccagcgggggttgtggggcggcgagggctggatcctgggccaaatatatgccaacaacgacaagctctccaagaggctgaagaaagtgtggaagccacagctgtttgagcgagagttctacagtgagatcctggacaagaagttcacagtgactgtgaccatgcggaccctggacctcatcgatgaggcttatgggctcgacttttacatcctcaagaccccgaaggaggacctgtgctccaagtttgggatggacctgaagcgagggatgctgctgcggcttgcccggcaggacccccagctgcaccccgaggaccccgagcggcgggcagccatctacgacaagtacaaggaatttgccatcccagaggaggaggcagagtgggtgggcctcacgctggaggaggccattgagaagcagagacttttggaggagaaggaccctgtacccctgttcaagatctatgtggcggagctgatccagcagctgcagcagcaggcactgtcagagccggcggtggtgcagaagagagccagtggccagtgaccacacagctcctccatgcctgacaacagggccagctttcctgccagggcctttgcctgaggacacagatcccggggagctgtgagggcccgggggcaggggtggtcctggttcggtgcggccatgacttcagccgggcagttgggggtcccaggagctggcgccaaggcctcgttgccgttggggttcttgccg

SEQ ID NO: 186033 - DNA, 1084 bp, Homo sapiens
  misc_feature (589)..(589): n is a, c, g, or t
  misc_feature (608)..(609): n is a, c, g, or t
  misc_feature (612)..(612): n is a, c, g, or t
  misc_feature (620)..(621): n is a, c, g, or t
  misc_feature (626)..(626): n is a, c, g, or t
  misc_feature (629)..(630): n is a, c, g, or t
  misc_feature (633)..(633): n is a, c, g, or t
  misc_feature (641)..(641): n is a, c, g, or t
  misc_feature (1004)..(1004): n is a, c, g, or t
  misc_feature (1080)..(1080): n is a, c, g, or t
gcgagccctgaaccctgaaaggctcgcgatgcctctacacaagtatcccgtgtggctctggaagcggctgcagctgcgggaatgggcattcgtgtttcacacggtctccgtggctcacgggagcttaacgtaaacacgtttgagcgaacatacccgccgtggggaacgggagaacggggaacgtccgtggagcggtcccccaaactttcccccccggtttgtccagccttaattataggcctcatggggccaagttcaagatcaaccccaagaacgggcagcgggagcgtgtggaggacgtgcccattcccatctactttccccccgaatcccagcgggggttgtggggcggcgagggctggatcctgggccaaatatatgccaacaacgacaagctctccaagaggctgaagaaagtgtggaagccacagctgtttgagcgagagttctacagtgagatcctggacaagaagttcacagtgactgtgaccatgcggaccctggacctcatcgatgaggcttatgggctcgacttttacatcctcaagtatttttaataccctgaaggagtacttttttttcaattttnggatggactttaagtgagnnatnttttttcnnttttnccnntantacccctngttttaccccgaggaccccgagcggcgggcagccatctacgacaagtacaaggaatttgccatcccagaggaggaggcagagtgggtgggcctcacgctggaggaggccattgagaagcagagacttttggaggagaaggaccctgtacccctgttcaagatctatgtggcggagctgatccagcagctgcagcagcaggcactgtcagagccggcggtggtgcagaagagagccagtggccagtgaccacacagctcctccatgcctgacaacagggccagctttcctgccagggcctttgcctgaggacacagatcccggggagctgtgagggccaccggtgggcagtgggtggatcctgntttcgtgtgctgcccatgcaccttccagcccggggccaggcttggcaagaggaatcacccatggaagagcctgggnccga

SEQ ID NO: 186034 - DNA, 1073 bp, Homo sapiens
gcgagccctgaaccctgaaaggctcgcgatgcctctacacaagtatcccgtgtggctctggaagcggctgcagctgcgggaatgggcattcgtgtttcacacggtctccgtggctcacgggagcttaacgtaaacacgtttgagcgaacatacccgccgtggggaacgggagaacggggaacgtccgtggagcggtcccccaaactttcccccccggtttgtccagccttaattataggcctcatggggccaagttcaagatcaaccccaagaacgggcagcgggagcgtgtggaggacgtgcccattcccatctactttccccccgaatcccagcgggggttgtggggcggcgagggctggatcctgggccaaatatatgccaacaacgacaagctctccaagaggctgaagaaagtgtggaagccacagctgtttgagcgagagttctacagtgagatcctggacaagaagttcacagtgactgtgaccatgcggaccctggacctcatcgatgaggcttatgggctcgacttttacatcctcaagaccccgaaggaggacctgtgctccaagtttgggatggacctgaagcgagggatgctgctgcggcttgcccggcaggacccccagctgcaccccgaggaccccgagcggcgggcagccatctacgacaagtacaaggaatttgccatcccagaggaggaggcagagtgggtgggcctcacgctggaggaggccattgagaagcagagacttttggaggagaaggaccctgtacccctgttcaagatctatgtggcggagctgatccagcagctgcagcagcaggcactgtcagagccggcggtggtgcagaagagagccagtggccagtgaccacacagctcctccatgcctgacaacagggccagctttcctgccagggcctttgcctgaggacacagatcccggggagctgtgagggcccgggggcaggggtggtcctggttcggtgcggccatgacttcagccgggcagttgggggtcccaggagctggcgccaaggcctcgttgccgttggggttcttgccg

SEQ ID NO: 186035 - DNA, 515 bp, Homo sapiens
cagtcatcttgagacggatcaagtcctcggaagagctgagcgacctctggtgccccctggtggcccacagggaaactactcatgactcaccttctggagcagccagggaaaacctacctgactagccagccacctgccttgctaagcggtgcccacctcacaaacatgggtgctttgccagagaaggacccctggggtccatagctcatgaagtccaaacatatctatacattcccagcaagcacctctggcttcccacatcgggggccaccttgatccaaagcagggctggcgagggtctcaacttgcaggacctgctcagacatgaccatcatctgaggaaccctgggcaggcagaacctgcaggtgtcagaggctcaactcctccatctaaccagtcaggctcccagagtccccggaagagcctgcgcagctgaagcagactgctcctagttggagagtggtcactggggaaaaggacttgggccatccaccttccaatacctgctgcctgt

SEQ ID NO: 186036 - DNA, 480 bp, Homo sapiens
cagtcatcttgagacggatcaagtcctcggaagagctgagcgacctctggtgccccctggtggcccacagggaaactactcatgactcaccttctggagcagccagggaaaacctacctgactagccagccacctgccttgctaagcggtgcccacctcacaaacatgggtgctttgccagagaaggacccctggggtccatagctcatgaagtccaaacatatctatacattcccagcaagcacctctggcttcccacatcgggggccaccttgatccaaagcagggctggcgagggtctcaacttgcaggacctgctcagacatgaccatcatctgaggggctttggtaagaaactgatggctgggcgcggtggctcacacctgtaatcccagcactttgggaggccaaggagggcggatcacgaggtcaagagatcgagaccatcctggctaacatggtgaaaccccatctctacta

SEQ ID NO: 186037 - DNA, 338 bp, Homo sapiens
tgtaaatctaaaactgttctaaaaagtcaagtctatttaaaaaacactgatgcccaggccctgcccccatgcatttagatttaatttctgggatgtgacctgggtatctaagttttgaaaatctccctgagtgagttatttccatttccagaagaagaaatctaggttccaactggtggggctgcatctggaatctggatccttcatcacaccctgaagtcttaaacttgctttttccataactcatgtctgccacagggtgctaggatggattctattcaaaggagggatgaggctgggtgcggtacctcatgcctgtaataccagcactttgggag

SEQ ID NO: 186038 - DNA, 266 bp, Homo sapiens
atggggtgggtcaggattggcagcagaaggtggcagcggggcacagctttctgccccccagcagccccacagtcaggccaggagatgctgcagaataaggccaaggtagaattcaatctgcaagacagagacctgaggtctggtttcttacatgcaccggcttgtgaccttaggcaagtcactgaaccaccccttctctacctgcactgtgagccaacaacccttcacacggttgtttagagcatacatagtagagaagaggctct

SEQ ID NO: 186039 - DNA, 567 bp, Homo sapiens
ctggtctcaaactcctggcctcaggtgatccacccgcctcggcctcccaaggtgttgtgattacaagcatgagccatggtgccggcgggctgatttttttaatttttagtagagacaaagtctcactatattgcctaggttggtctcgaactgctgagctcaagcaatctgccggccatgttctctcaaagtgctgggattgcaggcttgagcccctgcacccagcctgtaagatattttaaaatccacacttggccaagcgtggtggctcacacatataatcccagcactttgggaggccaaggtgggcggatcacaaggtcaggagttcgagaccagcctggccaatatggtgaaatcccatctctactaaaaatacaaaaactagccaggcgtgttggcttacacttatagtcccagctactcaggtggctgaggcaggagaatcacttgaaccaggaggcggagtttgcagtgagctgagatcacagcactgcacaccagcctcggcaacagagtgagactccgtctgaaaaaaaaaaaatccacgctgttttatatttctaa

SEQ ID NO: 186040 - DNA, 710 bp, Homo sapiens
tagtgacttgacagggcggctgctattgcataaagaatgcctttgcaaccgttatctttttctaaagatgctgcctcttataacaacacagtatagaattttcttttgtttgcattggaatttgaatacatctactttttcttgtgaatgatggaagagtcgaatgaacctgtgggttctcgaaattaactctgggaagtgagagggtggaagggaaacagtgacgactcacaggagacacactggttgaacctgtgatcttgccagggccatttgtgtgaagtcacctgaatctcggtgtttttcctctggatcagctgcctggatggttttgtcaaactttcagatccttccatcctccacccccatcaatgtgtgactttgcataactgagaaagctactaaacacagaattaagtttcttttattgtttttctctactaagggaatttgattctctaggatgacttgcacttcatgtgggaaagacacagctggatgcccaactgatatccattcccccctccttttctgtaactgaacccattttgtttaattcaccactatgtccagttaagtgctagatttcccagaatcccttgcagctgggaggtggttcagtgacagtagtcctggctgatgagatgtaaatagctggatgccccgttccccaaagctcttaaaaggggaagcctctgtgagcttgcctg

SEQ ID NO: 186041 - DNA, 391 bp, Homo sapiens
gcacagtggccctgtgaggcaggcttgttgttatccccattcacagacaggcagatgtgtgactaaccctatcttacaggcaaggaaatggtggcaggatggagctaaataactcactgaaggtcacacagctagtccagaatctactctgaatggtgactgctgctagcatcagcgttgccacttctggcagttggagaatcagaaaatacgttatgaggaaaaggacaggcagctttggctttgaaagaggagcagcctctccccagtggagagaagggtgtcgcaataccaggaacaaacataggggggcaggcccacagagacccgggctgagccagggaggtactggagcagagggcatagggcagtgctggagacaaagctaaag

SEQ ID NO: 186042 - DNA, 310 bp, Homo sapiens
gatttgcctcccaactcaaatgtttatggggtacctggggtgccctgtggctagaatcccagaggaccatggtgagagtcatacagttccttcacccactccttccccaggagcctttcagggccaggaactagccctagcatttgagtaccccacggatggttcacagcttcctacctcttcagcttcagtgtctgcattgcatctccgtctactcctagcattttcgttatgaaaatctattcaaattatgttgtttactcaaaatttatatctttcaagaaatttgtccattttcatctaacttgtt

SEQ ID NO: 186043 - DNA, 971 bp, Homo sapiens
caggcgtggtgacacacacctgtagtcccagctactctagaggctgaggtgggaggatcacttgagcccaggagtctgaggcttcagtgagttatgattgtgccactgcgctccaggctgggtgtgcctggaattcaaaattcaaaaaaattgaatttttttcaattctgtaaaaaagagaaaaacccctgaaatcttatttcaatgttcgctcaatgtgtatttttttaatcccacttgcagggagtgaggaggccaacgggggcactccccagagcaggatttccagggaaacccgccttcctcccattcatctgcatcgcatgaaaagcctcataaggagcaaagcagagaggccccagggaggaaggcacacgggcatttctactctggggaagaaggcaaaggccggctctggtctcaggaagaagcagagacggctgccaaggagtgttagaagcacccgcgatgtgcaggctgccggcaaaaaagaggacgctccccaggacctggctctggcggtgtgcctgtcagtgttcatcacattccttgtcgccttcagcctgggggctttcacaaggccttatgttgacagactgtggcaaaaaaagtgccagagcaaaagccctggcctggacaacgcgtattcaaacgagggcttctacgatgacatggaagctgcggggcacacaccacacccagagacccatctgcgccaagtatttcctcatctaagcctctacgagaaccagacccctttgtgggtgacacagccacacccacacgccaccgtaattcttgatagtactctgggaaggagcagaaaggatcctggcagttcgcagagcccaggacagtgcggggacaacaccggggcaggaagtggaaatgatggtgcagtctattccattctccagagacatccacatgccggtaaccgtgaactaatgtcagcagcgcaggaccacatc

SEQ ID NO: 186044 - DNA, 263 bp, Homo sapiens
agagagaatagaagccagttaaacagtagaggtgggagtgaaaaaggattaaataagaacgataaagccaaagttgaaaagtgattaaagaaggatggtaatgaaagctggatagagggtggggcatgagcaatgttttatgtgcctaccatcctctatccagtaatctaggcatggaacactgaaaccagaccaaccagtcagatgctgcaggtagggaggtgggatgggaattgtcactatccaatcactgttgtaactgg

SEQ ID NO: 186045 - DNA, 452 bp, Homo sapiens
gctttggctccttcccacagcttggcacagccacacggccatcatttaataacagtactgaacagagtgagaaaatgatgcctggaaaagcccagggactcaacaacttacaccacgactgagaggccccagacttccaacactactgtagctatagttctccctatagcccacactcacaggaaagctataaatgagctttaaaataagaaagtattaccctagataggcagcaagggatcccacagaaccagcactcctttgtaatcttatgaaagactctcacaaagtcaattccctaactgggcaagtgtgaaatttgaagatgatggctgaaactacacgagtggactttagagctctgtagcagcttccactcagctacacacacaactgacacaagcttacaagaaatcaattaaagcaggaccaccttcagcttggtaatatta

SEQ ID NO: 186046 - DNA, 241 bp, Homo sapiens
ttagaagacccagatttgtgactgtcatgtgaggtgagagcagtgttgtgggactgagcccttaacctgcagggtctgcactaaccgtgggcagttagtgtcagaatttagttaaatagtaggacatccagtcaatgtatggggacaattgcagaattcgctggcgtggaaaaaaaccccacatatttagtgtcagaaatgaagtgttacagccaggtgtggtggcttatgcctggaatcc

SEQ ID NO: 186047 - DNA, 573 bp, Homo sapiens
aatgacaaagaggcaggctctatctttctggaaatctgacttatctgccccttgatctagggaccaaataactcttcagagctgggtaggtgtctttctatcaacagcgttgatttggaagttgcatggtattgtgattaaaaacataggtggggcttgggaggggagccccggtcagtcctaacaccacccttaggtacatcactaacatcaagcaacgcaactcccataggaccaaaggcaagtacagggctttccacacaaggggtacttactaggtgttttgctgaatcactaaatgtgtgaacgaatccaggtctttgtcatggagggacttaggatctaactggagaagaggacatgatagaaacaagacaggatatgatgcagctttgttatttcccatgatgaacacatggattagaaagcagatgctactatcattctcgctgatatattttcactcattatgttagattttaacatgttagatttgatgatatctggaaggcaatgtgaacacagaatcagaagaaagaatatgtggctctaacacatagcacaataagacca

SEQ ID NO: 186048 - DNA, 310 bp, Homo sapiens
ccatcaaagctcatttcttagcattctacttggaaaacaagaaggactgagctactgtaaatcaagtggtcagaggaaggtgacatttgaagagacctgaataaagaaagagagcaggttactcaaaggaaggaacaagtgggctctgaagtaagaatacagttgagatgtttgaaaatcatcaggaaggctggtgagactgggccaaaggagaagggaattgagcactgagaggtaagcaaaggccagactggcagggccctgcaggccatggtaaggagtttgcattttactctaattgtcatgagaa

SEQ ID NO: 186049 - DNA, 317 bp, Homo sapiens
tgtcgtgtgaggcctgaatgtagtgaggtgtgtgtgaagcaacctctttcctgactcattctcctctatttaaaaaaaaaaaaaaagtaggtcagaaagcaaggacgaaaactgcagaggctgaggagacggacgtttttggagaaagccatgtacatcaaaaaggttcaaagactgaggaaagcctcatgatccgggggtaatttactacccagaagccaaatgcattcaatgacttggcattcctctaaaaatcagagggtgtctgttttattttatttttttattttttattttttttgagacggagtctcgct

SEQ ID NO: 186050 - DNA, 724 bp, Homo sapiens
ccattttgttactagccaggtgaagagaacacaggagcatgtacgtgctttttctcagtaattggatatgttagacacggattatgttttcgctgggaccttgtagttaaaagaaagcaaaaagctgatctgaatgttcaatatttcccttttctcaagagcacatgaagttggtattgaaatgtgagttgcctgcctcttatttccatcgtttgaaatcagactgaaatcctgcatgtgggaccctcattctgtgacctctgtctgtgtatccaccaggcttccttgccagccctctttctgactcacaaatggcagtgggtgtgagtgcccaggaatacttagagtggtaaatacaggatttgggaaatttatctgcagaatgtcagccctcagtaggaaagtagtgctgtccaatggaaggcctggtcaaatgccttttggttggatgtttcaagctggtgtggcatagccggagattcccagtcctcaggagtgtggtagggtaggctctgtcctaccaggaatgcatttggattttagagatagttgagaagtagtttcttttggaataacatttaagacacgtttgggttctgggacatcctccttcctcatttttcccctgggagtcattgtggctggttgggcctatgggcctgcaggctgtgtttgatgtggtgagctccccttttccaaaggatgaacctacctgccttgagat

SEQ ID NO: 186051 - DNA, 556 bp, Homo sapiens
tgaaagtgagtgcttccttaaattttgcaccctagtcatgtctcttgcctcgtcttagtctcagtcctacagttcaccatccatcgtttcagtacctactcccattttctaggatcccactgacctcaggttcccagcattgaatgcagagatagggcaggcccctccttgtctgagctgctgctgtactctcgggtgcctaatgctaagccaactcttttgactcataaatagtctgctgtcacctaaaccaccaggtttttgtcacatgagcagcatacaaaccaggtcttctctatcctatccttctctgctgattttgaacctccagagtcctttaaaggggacactcaaaagcctaaggagtcacagccatagaagaactgggtcaaggagatgggggaagagacaacagggtcacagagatgggggagttagggagatagagatcagagagatgagatcagagataaaacctacagacaggattggagcgatgaagtcaaagggatggagacatcgaggaaataagagtagggtcagggaggaaggccaa

SEQ ID NO: 186052 - DNA, 209 bp, Homo sapiens
cagtcactcttccacatttctaagcgaaatgtcaacactcatactcaatatgacactactagaatgtgaagcccaaatttcattttaaatctctaattacctaccaaggaagctcatttccccaaacaattctgtgaactccaatgccagactatccaagtttctggggacttaacagtatctgtgcctttcacatgtaggagtcctct

SEQ ID NO: 186053 - DNA, 228 bp, Homo sapiens
agagaagaggatgtaagcagagaacgggggctaggattgagacctgggtcatctgatacggggaagctgggaaggaaaggaggaaccagcaaagaaaactgcaagtggggaatccagtagggctggagaaaaatcaagcagaacaagttatacctgaagaaaatgctccaaggaaagagtattcaagccagcagtgcagtgttaattttttttttttttttttttaag

SEQ ID NO: 186054 - DNA, 960 bp, Homo sapiens
tcctctttgctcctggcaacaagtatagtacatcctttcagagaagaaatcctcctcaaaggggtgaattcaccatgtgactttccgtctaacactcagatgagatcacaaagtgagagggaaaaaacacttttgactttcagtgggtggaagggaaagaagttatctaggacagcagtccccaacctttttggtaccagggaccagttttgtggaagacaatttttccacggaccgaggcggggaggaggatggtttggggatgattcaagcacattatgtttattgtgcacttaatttttattattgttacactgtaatatgtaatgaaataattacacaactcaccataatgtagaatcagtgggagtcctgagcttgttttcctacaactggacggccccatctggggtgatgggagacagtgacagatcatctaggcattagattctcataaggagctcgcaacctgtatccctcgcatgtgcagttcacaatagggcttacgcttctttgagaatctaataccgctgctgatctgatgggaggtggagctcaggcggtaatgtgagtgatggggagcagctgtaaatacagatgaagcttcgctcactgccactcacctcctgccgtgcaacccagttaataacaggccacggaccagtacaggcatatggcctggggtgtggggacccctgatctaggaggatatagtcaatgaccatattttttccaaacttaacatttaaattgttaggacatttgttctgaaaagaatgcctgtgccattttaagatataagaactgggggaagccttttataacaagtccaggttaagtagtatatacaaatctgaagatgtgtacagaagtgcttcagctgggtatgccatacatgtgcaattctggccaaatagtcccattcagtgaaccaattattttccaatcacaatactcact

SEQ ID NO: 186055 - DNA, 431 bp, Homo sapiens
ggtcttgctatgttgcccaggctggtctcgaaatcctaggctcaacggatcatcccacctcggcctcccaaaatgctgggatttacaggcatgagctactgcacctggcctctgctagatcttttgatgctcaagtcttccaagcatgaacttgcacaggctgccaagggagccatagctgctgcctttttagcttgtgttatgcaaaagattttattttatccttttaaaaattcccttgcaaatgacctttgtaacatcccctaaaatcacacgcatgtgcctttacccatcacctatatccagatttgcagccacactcagggccagaccagcaggtgtgctgttgaaagcagctggctaggagccagctctacagcatcccaaatcagcaatagtcccagaggatcggtggtccctttgttcccacc

SEQ ID NO: 186056 - DNA, 436 bp, Homo sapiens
cttcttccaggaaaagattaaaagcttcctcacagacaatttagctgcaggattaatacatggagagctggtttggggtgggctgcagcctcagaccccttctcagagtacctgcttttcacccctacccacagggtaaactagctcttgcccagacagcttcagaatctgctctgttgatctaagcaaataaaatgcagaagccaaggaaaaggatgtcattccacagcctccgggcttccttccttcatctgaaggtcaagtaataattcagccaaaatgtgaaactctttatgcaggacttacagtcaaaggcaggcaggctgggagggctaaggaaagcagttacaggccagcagctctcaaaggtgagacaggcccaggcctcacctattgtgaagagtctgattttaaaataaaaatgaatgccaaaagc

SEQ ID NO: 186057 - DNA, 496 bp, Homo sapiens
ttttataagcatgttgaattaaattttaaaaaaggaaatccaagaagtctacagtgtgcaacttttataacttcaaaaacaagcagtattaaataataaattgtttatgaatacatacatatctggtaagatattttaaaaagcaagtaaatgaaaaatacaaaatttagaatagtggttatgctatcctaaattgggtagaggaaattggaagaaacatataagtggcttaacagaattgatagtgttctatctcttcagatgagtgatagatttactttatgctttatactttacatatatattacatacattcttttatatatatatccagcattataaatgagttttaaagaaatttattgccaagtgtggtggctcacccctgtaatcctagcactttgggagaccgacgcgggaggatcacgaggtcaggagttccagaccagcctggccaacacagtgaaactctgtctctactaaaaatacaaaaatt

SEQ ID NO: 186058 - DNA, 690 bp, Homo sapiens
gtatgcttattttaacgtgaaaggtccagagagctctgaaacagtatttgcaaattatgtatctgctattgctaggaagaggttgggtacgtaaagtctaatgatttaatcccttcagccaagatacctgaggttaagactgacaaagtatcttgaacttgtttaagtcatgctccttcctgtagggagtttgtcttaatgtgttcgcaagattggtagatcattattttgttttggggtggagaagagatgcctttgtaattgctttcgggaatttgatgagctagacgctgggacggggctcccccaagtgagggccccgggagaggagcatcctcatttgtaaatatacggcatgattttcgttcctaaccctgacccagtaactgcatgtgaaacaacattgttctagcgagctaagtgttagtttgtgctcaaaaataaactttctagaatctgcacgtgaacaacttgttcagacataagtgaactgactacaaactgtaggatattcagtgcctgagcatgttaaggaataggccgtgcttccaacaattaatatacaaatcaaccatgtgcctgtcagtgtaatattttcttttattaaaaagggagttaaattggctgttatctccttcatagaaaacatttcttccacacttttgcctaaaaacttcattttccaaagga

SEQ ID NO: 186059 - DNA, 492 bp, Homo sapiens
tcgtagtccaacagttaaatacattcatttgatataaaatgcatatttctgtaattgcttaaatgagtagtttctagtgccaagtaaaataaagaatacttattttaaatcaataatgaaaaccatggtttgagttttttggcttagaaataaatatatatggccatgtttgatttgtaaactcatcaaattaatgtggttcattcacttttcagttaacattccagtttaggattctgtgtaccactgttggaaactgagactaccagatattaccaagttgggggtggaaggtaggagggatcaccgagatgaaagctccctccctccccactccctacctttctcaaaataaatctgtcttctcaaagagagctgtgaccttggaactctgttatgtacaattcaatcagatgaaagtgttcttgggttcggaggatggtttcagaaattattttctacttggacctgtgccttagtctacttggactg

SEQ ID NO: 186060 - DNA, 451 bp, Homo sapiens
attaactgatattcaaaagaatttgatgttttagtttcataactttgtcaggttacatcttcatacttattaaacatgattagttcttgtaaaggaaacttcgtatgtgttgagatttggaaataggtgaaatgctaaatttaaagaaatatgggccagtcgtggtagctcacacctgtaatcccagcactttgggaggccgaggcagtcggatcgcttgaggtgaggagttcaagatcagcttagccaatgtggtaaaaccccgtctctactaaaaacacaaaaattagccgggcatggtggcaactgcctgtaatctcagttactggggaggcggaggcaggagaatcacttgaacctgggaggcagaggttgcagtgagccgagattgctctactgtactccagcctgggcaacagagtgaggctgtgtctcaaaaaagaaaaaatta

SEQ ID NO: 186061 - DNA, 209 bp, Homo sapiens
actcagaaggcaagtggtgatggcgccactgcactcctacctcagcaacagagtaagactctgtcccaaaaaaaaggaaagaaaaaagaaaaagaaatatggaggttaaagccaaaatgtgtaggttggttctctttgcctcttttaccacccatgccattacgctaagtactcttcctgtggacaaaaaggcttcctgtgctgctccc

SEQ ID NO: 186062 - DNA, 235 bp, Homo sapiens
  misc_feature (5)..(5): n is a, c, g, or t
  misc_feature (33)..(33): n is a, c, g, or t
cacanggaaagaaacgtggacccgaaagcaggntgatattataccacaaagcttgactgtcacccctgctccaagatccctctaggaattgactctaagagttcttcagactctcctgcctccagtcccctgaggggttaacacatattcccatgagcacacctggctgcttccctctgccagtgattctcaacccccatgccacgctcaggtcacagccccgggtaagaattac

SEQ ID NO: 186063 - DNA, 328 bp, Homo sapiens
cttgatttcttcccttggcacgcagtgcctaaaatattatactatctgaccctttacacatttctagaccaatgatacttaatcctggtaatctatcagaattacctaatgtgcttattaaaaatacagattcccaggtctccaaacaaatccacccaatcaaaatcttagcaagttccgagagaagtgattctgatgtagccagccctcgcattacttcaaatctggatatatattttactcaaaactagatttcgtattaatttcatcttttaggatcaattacacaaaatctgtttttaaagtctaaaaatgccaagataagaaa

SEQ ID NO: 186064 - DNA, 289 bp, Homo sapiens
tctttctctggcaagctgcagccatttctcaaatgcctgttgattctcactcattcatatgtaagaacaaggcaataggaagcttagggatggttgatgaatgagtttctctgtaggtacaatgggctggaatctggacattttgctttgggtcccctactgccagcatgcagagtgctttcctcagggatgtccacatttacactcaccctagctgccccaactttctccatttattcaatttctttgtaagaagactccatgttgctcttgtttttttcttgcggtt

SEQ ID NO: 186065 - DNA, 144 bp, Homo sapiens
accctattttcttaatccatgaaatgggaataataatactcacccaatttaccttacacagtcgtgaggattcattgtaatgggctttgtaaaaatataaagtgctatataaacataagggtgttaatctcctgtctttggtga

SEQ ID NO: 186066 - DNA, 261 bp, Homo sapiens
ctggcaaacaagtttttaaaacccagttttattttttacatatatgagtaaaggcattttagcaaattctgtctctttatttatttatgagcatgctcattcgataaacctgttgagtgcttcctgctccagataacgtgccagggatacaactgtggccacagcagaaatgatctctttctttatgaaaattacagcggagaaagggagatttcccttatctccgccgcccttgtctctaatacattttaaaatgggagg

SEQ ID NO: 186067 - DNA, 156 bp, Homo sapiens
taactccccactggacaccctgccctgggtacccaggtgtcccctccccaactttctgttctgagatgctttcactgtcccattttatgtccaccccaactgcacagttttgaaggctaaagaaattccgtcttagttattatttcactgtattaa

SEQ ID NO: 186068 - DNA, 174 bp, Homo sapiens
tctagagtatacccaggtagactaaccccgtagggtaatatgcttatccccacttttgtaaatggtggggggaggcaaggcttagagatcatttcacttgccttaggctggtgcttctcagttactggggactcttgttaaaatggagattttgattcagttaggtctacctgg

SEQ ID NO: 186069 - DNA, 378 bp, Homo sapiens
gtcgcccaggctggagtgcagtggtgcgatcttggcactgcaacctctgcctcctgggttcaagcatttctcctgcctcagcctctggagtagctggattacaagcgcacaccaccacacctggctaatttttgtgtttttggtagagatggggtttcaccatgttggacaggttggtctcgaactcctgacctcaggtgatccactggccttggcctcccaaagtgctaggattacaggtgtgagccactgcacctggtcatgttgtcaaccttctgtcagatacccgagttcccaccaagcgttgattcacttctccgtgacagacaaattctctactttttgaggttgtcagtttgattattcaaatcttcagac

SEQ ID NO: 186070 - DNA, 491 bp, Homo sapiens
ttctctccttctgtagacatcgtgcctccatactgaaggaccagcacagggccacagaaagctccacacttacaacatcttatgcgtaacccacaaaagacttcctctctcccatcctccatttgtaatatcctggctgcggggcgagagcgggggagttttcattggcctgatttggaccaaatggcattttcttgttcaatcattccatctagaatggtggggtactatgatagctaagcccagggtatacgcccacatctgtagccagggaggtagagtattatgactgtcaaacccattaaaaccacatggagtgtggaagatcaaatctccttgctgtggtctgaatgtttgtgtcttcctaaaattcttacgttgaaacctaatccagggccgggtgcggtggctcacgcctatgatcccaacactttgggaggccgaggcaggcagatcacttgaggtcaggggttcaagaccagcctggccaa

SEQ ID NO: 186071 - DNA, 182 bp, Homo sapiens
ttctgaggaaggaactcagataaaacaattttaagtttcaatctttaagaccagaagtgtcaatttctctatttatccaaaaaaaattgtctactggactattggttcagtttcatgtccctctttgtgtctaataatattttctgtcttaaagtctgtcttgtctgatattaacatagcca

SEQ ID NO: 186072 - DNA, 384 bp, Homo sapiens
ctacaggtgcccgccaccacacctggctaatttttttttgtatttttagtagggacggagtattccctctcttgactgatgtttcagcagtatgtggacagattcttttttaaggtaaatgaccagggcttgtaatatgagtgtcacttaggcaacaggacatttcaatgaaatggtgatggaaataggttctttttgtagattgtgagctcttgggagcatggattttgctaaatatactgatttttaaatttttttgacatctagcatggtgcatttcacataggagtttttcaagaagtactcatttcacaggcatcttgaatgatagatgtttggtaagaactgcgcaagacagtgtactaatcactcattctcattcag

SEQ ID NO: 186073 - DNA, 107 bp, Homo sapiens
ttctaacccttcctcaactaatgccacgaagatgaataagctctcaatcagcctttgagtcatgtgccccctgtaccctctgcctccacttctggaccttcaattag

SEQ ID NO: 186074 - DNA, 125 bp, Homo sapiens
tcttccacccaactcaaaaaacacccccaaaccaaaaccaactctgctggactttctgggatggttgatgacctactgagatctgatttcccagagcaggaggtgggaagtgcttgatccagcaa

SEQ ID NO: 186075 - DNA, 245 bp, Homo sapiens
tgagagcactgaggacacggcagatggactcgaaagtcagagaatatggggcgtatctcagatgtgaccgcagcgagcgcgcagcctgagttttggtagaatcgtgagccctgaacagagtttactgcccacttgtgctggaggagaagctcccgaacaactagagagattgtggttcccaaagagcagcctccaggcctgatgcctcctccatgaccggtgtctgtccgtccctccctccctcc

SEQ ID NO: 186076 - DNA, 309 bp, Homo sapiens
tataagtcagtgtctaattgttctataatacagcagtgatttgattaggcttgtgatggatagaattcattttcacttagtcagaaaatctttctaaatagaggagaattagaaggcaaaaggcaatttgataggtgtgctagtgggaagtaacttcaaatctcagggagccatattaattatagagaaagcagtgccagagaagttgataggctgctagatgggagtgaacagagcaggttaaggatcaagagcattaataaactgatggagtattaataatttcataatctttattgtgttgggtga

SEQ ID NO: 186077 - DNA, 347 bp, Homo sapiens
ggactagagttgcacagctggtatcaggcagagtgcggattagaatccagacagtctagcttcagaccgaggccctgaatcactaggctacatccaatagtttatgcgaacatgtaacctaattgagacacttctacatataatgcaagatagcatatggttagtcaagtagtagaattctgagaagagaaaatctgactggactcattaggtaaacataagtggtggaaatggacatttaactgggccttgaaaggtgggtagtatttaaacagtgcagttacttaataagtgtccacaatatgcctggcattgtgctaaaatacaaggtaaattgtatgtggctg

SEQ ID NO: 186078 - DNA, 156 bp, Homo sapiens
atcgacatttgatggattaggacattagggtgcagattaactaagtagctcccacagagtcacatagggaatgggtgacacctccaagatctgaatcccagaaactctggctttggggatagatgctctgagttggcactgcaatgggtgtgcttt

SEQ ID NO: 186079 - DNA, 342 bp, Homo sapiens
acctcctccccacgaagcttccttgaccgaccagaagaaagcagatggcttctttagctgcaccctaatttcacataaaatttcatgaaaatgcctccactcttcatcccaattgtgcacttgcactcaatcttctacctggcatagtgcctagtacgtaaaagacactcagtaaatatttgctcttatttactgagtgttcactacgacctgtcactctttcatagcattcagcataattgcaaataattgttagcgtagttatttgcttaatgactgtcttctttactagactgttagcatctcaaggccagaattggattctgtctcattcacagctta

SEQ ID NO: 186080 - DNA, 634 bp, Homo sapiens
tttttagtagtgacggagttttgccatgttggccaggctggtctcaaacccctgacctccagtgatacacccaccttggcctcccataccataattctttctattcctccatctcaacaaactatctctttaaactgacatttaccctaagcctggaatacaataaccgctcatctttcagttcacacttcaaatgtcgtttcctcaatgaagccttcctttaattcccttctcctatccctgacccccaaatagattcagtgcccagatatacatttccatgctactccacacttccttgccacagcaatttctacagtatattgaagcttgttgttcaccccctgttggcatgtaagctctgtaacattaagaaaaaccatgtttgtcttgctcactattgaattcccaaggtctaaacatatgggcctgaccctcacaccctcatttgatttctaaaattgggcttacatatatcaaattaaggcagggctcatatgcattgcaacattcagttaaaatactctcttccatcgttataaattccttcatatgaatataaaatgttctgataaccaaaacaaacaagaaaaagtgaaaaaattgcaatttgtttctacactgccttcagttt

SEQ ID NO: 186081 - DNA, 269 bp, Homo sapiens
tttaataagccatttaaaactattaacctatgggccagaggagctagtgttttaagtcagttaaatgtttattttgtcatttgtccagggtcttaaaaactgatttaataactgaacttttaggaaacgattatctttatttctttgtcttcagataagtgtgtttttagagttcatatagcttttattctaaatgtcaaattttatttcaacatcaaacatttaaacaatttagacattatttttctaaatgaagcaaaaatttattt

SEQ ID NO: 186082 - DNA, 511 bp, Homo sapiens
gcagaaaggtatattgaagtcctaatctccagtacctcagacagtgaccatatgtgaaaacagtgttgttgcagatgtaattaattgagatgaggtcatagtagaggagggtgggaacctactccactatgactggtgttctcagaagaaggcagcgccacgcagggagcacacatgtgatgataaaggcagaaactggagtgatgcagctgcaagccagggaatgccagagatgacagcaacccactagcgctaggaagaggcaaagaagcatccccctacagggttcagagagagcatggcccttgtccatatcattatttcagacttctgccctccagaaccatgagacaatgaatttctgttgcatattaaatgtcaagtaatattgctgagtgcgagagtgattcctgttacggagctatgttggaaagcacgtggcaagtgcttagtgcggtgccagacacaaaaggtatttggcaaatgcttattcctttctcttcacttatct

SEQ ID NO: 186083 - DNA, 350 bp, Homo sapiens
gagaaagagcccatagcacatgagatggctgtatggaatgagggagagagaagagtctggaaagtccctggtttctagttggacaacctggtgatgatgctacttactatgacagggacacaaaagcggaaggtagagatgcgggcaggggatggggaactgcaattagataagattgctttaagcttcatgcagctgtgagatctccaagccacggtgcccagggccagtcagagctggcccctgacactcaggaacatgcagtcctgggcatcacccacttcagtagagctgtggagtctaggtcccctctgccaagctggcagaagctatgaccatatacaccaaat

SEQ ID NO: 186084 - DNA, 920 bp, Homo sapiens
caatgggtgcctgaaactgatgatagtaccgaatccaatataccaaaatgaagcattggtaaaaacatttcataaataaaatgggtgtcaaccacactttctgattacattgccagaagacgagcaaatgtttttgtgagcacatgggttttttgctctgtatactacacctggttttattatatgcccgagagtgttgctacatagcagaagagttagcttgtcctttcatgtttaatgccatggtacctcctttgtacttttataaatagtatgtacttccctcacctggacataattctcaatatctgaaaaattcaataatgttatcatagcaaattcagaaacaacttcagtatctactaataagggaatggttaaatcaaaccacaaataaggaggagactactgttgttacagaaatagtcttcaagaaacaatagcatttcctagaagttataaaatttttactggttccagactgatcctaatatcaggtatgattatttcctttggagtaagaaaaaaaattttttaaggctgaaatttttgcacaaaagtcttagattaaatatggtatatgatttgggacacaaggaaaagcctataatttaaaatcttggcttcttatcacaagtccaatgtataaaagttccacccttctccatagttcatgaaaactccaaaaagctattaacatcaattactcgagaatgaaattatataagccctcaatttagaataaaatgagattcatgtctaatattatttatccttattataaaaggaatgaaatatttggaactaactgtaagcaaagcataatttacaaaatccccaaattcctatatcaattcttatactcctatcatgtggagtatgcaactaaaataccaatttaatcctagcaaatgaagaaa

SEQ ID NO: 186085 - DNA, 525 bp, Homo sapiens
agtttgaagcagggagaacagttctgtgcttggggtacccaggaaggagagttgggtagctgaagtgaggaggccatcaaacagcctttacctgcttttgaaatttgccgaaagcagccctcatcatgcctggcaagaggcatccaggagagcattcagaattcacagtgctgcctcagcagaaaagttttataatttccttgagtcaagatcagaattataggcagcagcatttcttcctttgcaaaagacttctcaggtctgtatttaagtgcatctgttttaaaaattctgttctaaaggctgatgtctttcactgagagtgattcctcttggggccagctctatggagctgacctcctggctccttggccttaggaactgtagcacacccctgggaaatgctggagtgcagtcagcccaccgcccagtggtgcaggagctcggaagggggatcctaagccctaggcttccttgctctgtgccactgacatgctgggttatgctggacagatcactttctat

SEQ ID NO: 186086 - DNA, 358 bp, Homo sapiens
tatccccttatgtatacccatagtctagtacaaacctggctaatcaataactatctgtttagaaagtgaatgaacgaatgattgggagtgcctgcaagacctatatgttttaagtaatttagaatgaacataaagatcttgtatgtttctggaacattctactcaaaattggtgatatacttgttttctggaatcttattcaattaagcagtaattttccttttttaaaaaaaaaatcttacctcacagcatttgagggatataatacttcttcatcaataatataattgatgcaaaagaggaaaaggcattgagaccatctcaggtctttcttacaaatctctccccagttgaaaat

SEQ ID NO: 186087 - DNA, 644 bp, Homo sapiens
cacttgtaatttctggggttttttaatagtagccattctagtgggtgtgcagtggtatctcattatagttttgatttacattttcttatgagtagtgatgttgagtatcttttcatgctcttattagccatttgtatatcttctttggagaatatctcctcagctcttttgcccacttcattaaattgagaggtttgtttttgctgttgagttttagaacttctctatatattctggatattaatcccttatcagatataggatttgcaaatattttctctcattctgtggggtgcctttttactccgttgatagtgtctttgtacaaaaatttttaatgttcacgaagtccaagttgtctactttttgttttgttgcctgtgcctttggtctttgtgttagtccatttagcattgctataaaggaatacctgaggctggtaatttataaagaaaagaggtttaattggcttatggttctgcaggctgtacaagaaacatggtgccagcacctgcttctggcgagagcctcaggaagcttccaatcacggcagaaggtgaagcgggagtaggtgtctcatatgatgagacagggagcaagagaaaggaggttccagtctccttttaacaaccagatcttgcatg

SEQ ID NO: 186088 - DNA, 911 bp, Homo sapiens
ccaaaactgtaactggacgtccatcttgggtgacaagaggagaatgtcaggccacacggagctagagacttggtgggaacatttgtcggggagagggaggggacaatggagctcacttagactcacactgggcttgctgacttagaggtatccaggagcagctggatttaggggccagagttcaagaagagggcctgggctgggaaagggggcttgggaattatcccaccgagtggccccgggaccaggcagtggtggggacatgcgagggagaagtttccatggccagttaggacgaacaggccgcacggcgtggatgaagaggccaaagacggcgagatgggtggccttgaagggtatcacctgatgagggatggggggaccgaacaacgcagctcaagaccctgcccaggaaggcacaggaccccgctgaagagcagcagagactcaatcactgaggctcaagcacaaggcttttctcatttcagatacacaccactcagggcctttttctagattttggcaccacagaaaccaaacctcagaacaaccaacttagtcaggctaacgcattcctggctgtctgaacaacctgaggggaaacgcttcttgtatccaattctgagacattcaaaactatcatttcaagctggcttgaatctgattgggaaaaggaagactgaatttctgccgctgacgcttccagaccaacagaggttccctgtacctgggagttctggatattcacaggcaactcacacaggagccggaggtaatagaatttatttgtcatgaggtagaattgaaggggcctttctttctttttttctttagaaacagactcactctgtcccctgggctggagcgtagtcacaggatcatgctaactgcagcctcaaccacccgaccca

SEQ ID NO: 186089 - DNA, 253 bp, Homo sapiens
aaaaaaaaagtgcctcctcccggtgagacgggctgcccagaggctctgtgtgagaggagtgtctgctgtgctggcctcctcagccacagcctgggtttgccattccgctcattactgcctttagtaattgtatcatgtcattcccatcactcacaggaaaagaaacaatgaaaaaaataattgtattgtgaatgtttgctcgattgattgggtatgtgtgagtctctggcaataaaccatatttaagcattgc

SEQ ID NO: 186090 - DNA, 287 bp, Homo sapiens
atcatgcccagcccacattagtttactttgtactttacagtatatccatgttttaataaaaatagctaatgcttcaatagcactgaatgtatgtcaggttctagtctaaatactttacatagattctcaaacccataaggcttgaggaaactgagacccaaaaaggttaagtaacttgctaatgtcatacagccagtaggtgatggggctaggaagtctggctccagagaacgtgttcttaatgactgcgatttgatgttgaaaattctgccttacaggccgggcgc

SEQ ID NO: 186091 - DNA, 140 bp, Homo sapiens
ggttatacaagtttgagcactacttttctcaatcctctctaatctccatcccaaatgccaaaccccaaactaccaaattccaaagacaagataagtcaaaggaatatctccagattttcagtagatagtagtggtaaaag

SEQ ID NO: 186092 - DNA, 746 bp, Homo sapiens
agttttattattatatgttagcagctctggtaagaaactcagagaattaagtgagaatggtagattaaaatgaggctttaggataatgtgattgctccccatacatgtgtaattgacagttgtgtgaggtgagctcaatttaaaggaagactagcctaagctggtcagtaccaggaggattttgccccagtttgcttccgtccaagtgtgtgtccctcagcacagcatctcttgggcttcctcatttcctgtttatgataatagagtactcacccccatccttgagggatacattccaagacctccggtagttgtctgaaaccacagataatactgaaccccatttgtattacgtgcaaacttttttccttcataatttcatggatagatttgttcttactgtagatcttagcaaccttgttatttgatattgttttcttattaagaatttttaccttttcacgtaaaagaagccctttatggcttttctttggcatatccaaattgcagcatcagtactcttgagctttggggccatattaagccaaataaaagtggcttgtgttcacttttatccgtgatcacatccgcaacagttgatgtgatcagcaagacagctaccaagtgacttaacgggcaggtggcctagatggcacggagaagctggacaaagggatggtcatgggacagagcgggatgtcactcagtttcatcatgtttctcagaacggcgggcagtttaaagct

SEQ ID NO: 186093 - DNA, 703 bp, Homo sapiens
tcccaaagtgctgggatgatgggtgtgggccaccatgcccagccaagaatatttatttctaaaaaaatatgctctcccactattctggaaacctatggctctcttcatctttggtagatactacagtttatttagccaaaatcattctcctcttcctccttattaatagaaccccaattttttggaaggggaaaattgccccaaaagactacatttctcaacctttctttagtttcgctcttgttgcccaggctagagtgcaatggcgcgatctcggcttaccataacctccgcctcccgggttcaagcgattctcctgcctcagcctcccgagtagctgggattacagttgtgtaccacaatgcccagctaatttttgtgggtttttttgtagaaataagtcttgttttgttgcccgggctggtctcaaactcctagcttcaaatgatcctgggacgctgacttttattgaatcctttttctgcatctattgagatgatcatatggtttttgtttttaagtctgttgctgtgatgtatcatatttattgacttgcatatgttaaaccatcccagcatccctgggatgaaacccacttgatcatggtgtattgaatagggtgtattatttttctgatatgctgttggattcagtttactagtctttcattgaggatttttgcgtctgtgtcaccagaaatatc

SEQ ID NO: 186094 - DNA, 611 bp, Homo sapiens
ctacagctccattactataattaaccatcatgctacttctatttcagagttactgatgactttattgtacaattagtgctgttctgcttttcttcactctccttgaactccataacagtagatgttattaaactctttttctacccgaaatattattcttcctttctcacttatatactatacctccttgtttttctgacttaacctggtttcttttgctgccactcccttagatataggcattttccaagacttggtccttggtctgcccttctttcacagtgtgttcctttcagagctcatcttttttcctggcttcaactatcaccagcaacagtaccaccagagccagctctcccctccaatctttgtgtccctgtcagtggcaccacctttttataggcacaaaccaccatgtatggcaataagttcatatacttcctagttcttagaatcacttcagtagttttggagaggcaagatgcatgaaagaagatatagtctacatgtcttattaaccaaaagtaaaattaagaaatcaccaaggcacattattttaatcaatttttaaagcttgtttaataaatacataagagttcaagaccagcttg

SEQ ID NO: 186095 - DNA, 617 bp, Homo sapiens
tacctttatctggaacatcagaatggccaaaaaaagagccaatttcaatttactttttcgtttagtggagtaccctagtaactatgtttcactctgactaaagagaaataggaagtttaatcataatgatactcagaccttcataataatcattttgttcacacgtattcctggatcttttattaggggtcacatttccattttcagagaaagaaatcacagcacagaagcgaagatgatacagtggcccagactttgccaccttattacgtgctcaaaccattggatcccactttagatggagtcaaaattacagggaacacagtgcacgcttgataagtatgctccaagaaacttctcagaagtgctgggaaagaaatatctcacaggacctccaaaaggctttgtaagagaaaagatcaggaaagtcatactgaagaaagactctgttaatctgttttcttttgactggaaatgttggcatgttttcatttttacaaagtcctaatagtcacaacgccatatactcaagtcacattttggcctaattagttataggattagagctgtgtgaaataaaatagcaagcaagaatgtctattctagtgcctttttca

SEQ ID NO: 186096 - DNA, 557 bp, Homo sapiens
tgcactccctctccaaaagacagatcctagtgaagtgaagcacagctttcaagggggtggggagaagaaaagccaggactccttccgtgtggaagtgtgctaggggaaggggtcttctctctgacatgtctctctttttcagtcctctgctcaaaaacccttgagtgtcttcttggttcctttttatttcggtatgtacttttcaggccgagcctgatgataataccctaataaataaccctctctgctccatcgccaaccatccctccacctccaacatgtgctggcttgtttgtttgaactacttaaaagtctctaaaactgtcttggctgccctgccacttccctctactttctaatcatttatggcatgcctactctaggccaggactgtgccttcaaggagctcacagtctaggatagataggtaagagcaaatcattccagtacttaatgatacgtgttgtggtacaagtgggagagttagcagctcagcctggggttgcagtgtagagttctggactgcctgagagaaggaaacagtttaggcctgaggt

SEQ ID NO: 186097 - DNA, 840 bp, Homo sapiens
ccattctcggcccataccatcttgaggttacaaaatgaatggggactcagagcatggccaaaaacagattatagtggtaagcaggttttagtggcaagacaccttatgggagggggaaaagatgaggcctggctagcataagtggtcttgttaggtagatgaaatctcacaggtagcagccctcagaaagaattgatggtaaatacttcttttcgacctttaaaggtgtcagagcctcagttaattgttcctaaatctaaagagaagccccacataagtgaagattttatccactgatgcaaatctctcccaccaaagacagctttgcagggctacttctgtttgcaaggccctttgaacagctgtctcaaaatatgtcaaagaaggatattttaaggtgaaatatttttatttctttcactaacgtgtataaatacttcattccttttttattgccaaataatatgcacggacataggacattttatttataaagtcatcggtgctgggtaaggtgtcagagccccgcgtcgaatagtggttgactcgccgctcgcaatggctcacacctgtaatcccagcactttgggaggccaaggcaggtggatcacctgaggtcaggatttccaaagttccagaccagcctggccaacatggtgaaaacccgtctctactaaacatacaaaaattacccaggtgtggtggtgcgtggctgtaatcccagctactcgggaggcggagacaggagaatcgcttgaacccgggaggtggaggttgcagtgggccgagatcgtgccattgcactccagcctgggccacaagagtgaaactcagtctcaa

SEQ ID NO: 186098 - DNA, 199 bp, Homo sapiens
actgctgcctattatattatgccccaaactccacaggtcagtattccaaggctctccattaactggccttatctaatcatcatcataggggccctgtcttccccactccattccagaaacatcccactaattaattaccctgaattagctagcttcttgctactgcaaatagcctaaggtacctcctttgttcttaagc

SEQ ID NO: 186099 - DNA, 331 bp, Homo sapiens
tggaactcagtaagcaaggaggagaatggtgagaaatgaaactggggagaaaaggagtttggcatttactctgcatgagatgggaactgatcctggggttcctccccctcttagttatccagttcttggtactcaaacatccattcccctttaaggagataatggctgtctctaaagaaacttttctggaccatctgaagcagagaaatgagctggctcacatattgtaaatcacattctggctcttgtgtcaaaaaggacaaggctggaagcagggaggtcgacaaggaggcaatttacactaacccaggcaagttaagacggcaagcgg

SEQ ID NO: 186100 - DNA, 984 bp, Homo sapiens
  misc_feature (984)..(984): n is a, c, g, or t
tcctccggaagtgcggatcccagcggtggtcgtgtagctgagcaggcctggggcttggttctatgtccctgtggctatgtttccagtgtcctctgggtgtttccaagagcaacaagaaacgaataaatctctgatgaagagataccatttgacattttagagatggctgcatgcaaactcttaaaacatttgaatggagattcactcttgttgcccaggctggagtgcaatggcacaatttcggctctccacaatctctgcctcccagattcaagctattctcctgcctctgtctcccaaggagctgggattacaggctggtgtgcaatggtgcgacttctgctcactacacttccaccttccgggattcaagccattctcctgcctcagcctccggagtagctgggactacaggcatgtgccaccatgcccggctaattttgtatttttagtagaggcagggattcaccacattggtcaggctggtctcgaactcctggcctcaagtgatctgcccgcctctgcctcccaaagtgctgggaatacaggcatgagcaaccgcacccggcctggattaattgaaaattttcttctgtagattgtaatatattactattgttatctattttattgccccaattttctcaaatttggctatggaagtttattcaaagtggatctgtttccctttcacattttccccatttgtgagccatttcttacttcctaacatgacaaaatatttcaactaatctgtatgtcctggcccatctgatatcaatatgtcccaggacctggtcttatgggatgggtccctgtacggttgagtgttagccttgttaggcttacattgttgttttcccctttcttgtttttcatccggccttaaaagtgtggttgtcccaccaagaattgccctgggcaaaaaaaagggttgggacatacaagtggtgtctaaacaaactacgggaaggatattaatgn

SEQ ID NO: 186101 - DNA, 973 bp, Homo sapiens
  misc_feature (973)..(973): n is a, c, g, or t
tcctccggaagtgcggatcccagcggtggtcgtgtagctgagcaggcctggggcttggttctatgtccctgtggctatgtttccagtgtcctctgggtgtttccaagagcaacaagaaacgaataaatctctgatgaatggagattcactcttgttgcccaggctggagtgcaatggcacaatttcggctctccacaatctctgcctcccagattcaagctattctcctgcctctgtctcccaaggagctgggattacagatgaaagcaccattatcaagtaagaagagcacaagtcaagccactgctggtgtgcaatggtgcgacttctgctcactacacttccaccttccgggattcaagccattctcctgcctcagcctccggagtagctgggactacaggcatgtgccaccatgcccggctaattttgtatttttagtagaggcagggattcaccacattggtcaggctggtctcgaactcctggcctcaagtgatctgcccgcctctgcctcccaaagtgctgggaatacaggcatgagcaaccgcacccggcctggattaattgaaaattttcttctgtagattgtaatatattactattgttatctattttattgccccaattttctcaaatttggctatggaagtttattcaaagtggatctgtttccctttcacattttccccatttgtgagccatttcttacttcctaacatgacaaaatatttcaactaatctgtatgtcctggcccatctgatatcaatatgtcccaggacctggtcttatgggatgggtccctgtacggttgagtgttagccttgttaggcttacattgttgttttcccctttcttgtttttcatccggccttaaaagtgtggttgtcccaccaagaattgccctgggcaaaaaaaagggttgggacatacaagtggtgtctaaacaaactacgggaaggatattaatgn

SEQ ID NO: 186102 - DNA, 639 bp, Homo sapiens
ctagacgatccccctgatatgctggacatagattatgaaaaggaacgaatgtgtttctgggaatgagaggtagactagatgtcaaattacagaagttggatgacagattgctaaaccttatatatggagtaagggagaggtggaagttaaaactagctcttgggttttaaacctgagggacttggggatttattgcattagtcttaatgcacataggaaaataatgaggatgagctagtatatgtggacagatgatggtttatggttgactgactttgaattgccagtgaaacattcatttggtgctatgtagggggtaattggcaatgtgggagtgaaagttgagggagtggggtggctagagagttgaagaatatggatttgtacttaagttgcatgcgtagaggtggtagatgaagccatggaagtggatgaagttgtcatgggaaaatgtgcaggtaggtgtgtgtgtgcagtaagtagaggtggttagggagctgaacgtagtttattttaaaagaaccactttattacaatttcatatgctcattatttaaaaaaatctttgggtacagaggtgtatccaaaaaaaaatcttactacctagagaaactgtcataagaaccagaattatcaggg

SEQ ID NO: 186103 - DNA, 509 bp, Homo sapiens
taagcagcagccagctggtcagagatacccatggcatgaaaaaagagtgcccttgcactggagggcgaggggtgaatactgttattgcagcagctcggaccccaggcctgctcctacactcagagcctccaaggcagagctggcttcgtggaggtgtgatctgggcagtggcctagggtcccaggtttagaagggtccctgcagctgatttaatgctcttctgtcaggggtttcatcaataatttatgaatgagagagtcttcattttcattttgcagtggatcctgcaaattatgtagctagctatgcccaagacctgagggtttggggccactgagctaaataaacagaagtactcaagaagaaatctagtagagctgaatttctgatggatatcttcttaaagacagaaagcaaatcccaaatggaaagccaggccattgtttgtctccaggtcccctctctctgctacatctttggcttcttggtggtacccccacaggctggaa

SEQ ID NO: 186104 - DNA, 388 bp, Homo sapiens
aattctgctctcacacactctgcaaggccttagtcttctaacttagctcctctaacttttgctttttgtttgtttttcatttggaaatgtacatgaaaatagtaccaatcttacaaggttgttatggagattaattgaaaatgcaaggaaagtatatagtgtggtgcctggcatatggaaagcccttgataaatgctcgttgtttagcattattattgtaaaatggggataataataccttccttacaaaattgtcatgagagtaaaaggaggtattttgtatgaaaatctctagatcagtctcctgcacatagtaggcccacaatacttgtttttacaaattagccagtgattctgaaggctttttattgttttgaaagttgtgaca

SEQ ID NO: 186105 - DNA, 373 bp, Homo sapiens
gaggtaatatgagaggaatgttgcggtgatggcacagttctgtatgttgattgtcgtggaagctacacaaaactatacatgtgataaaattgcatagaaacacacacacacaagtatatgtataactggtaaaatctgaataacctctgtggattgtaccaatgtcaattttctgatactaatattgtaccatagttaggcaagatgttaacattggggaagggtgagtgaagggaatacaattctttgcaacttcctttaaatctataattatttccaaataaagcttttaaaattaaccataagaaaacaagcaacccaatattttgaatggacgagaatataaacagaaaatttaccacagaagttagat

SEQ ID NO: 186106 - DNA, 697 bp, Homo sapiens
tttagatgttaggtgatgtagtcgtgttggatgctctggatttcagccagctaggtaggacctcagacaaatcacataagtggttttctgcttcactgtctctatcacgatcaatgagaacagtcccacctacccctgtctccttggggccactgtgaagccactgccaagagtctaaaaatcacagttctttctctgatgtgtccagtaacatcttctacagagctttcacatctattaacaccaaattcttccccctcagtaaagttgaaagtaaagaacaaagattttaagttcagtgacaagctaagtgacaaaggggactcataagcccacttgaatagggcaatttccacttcacaagcaaagcacatactttcacatgtcggaattcaaaccactctcacagatcttcaagctatttcactagagtcttagggtgcaactctcttaacaagcaaccccattgctggcatctctgaggcagcaattcaaaccccaaattggcctgttttccctgacagactgctgggatacagattcctggccaacagcagaaaagctggcagctcactgcctcttccagagttggcttggccagggcaatgccagaacaattggtctcattgccttcaacatgggtacgactcgaatctacgcttcttgttttttataaaaaaaaaaacaaaggagcgcg

SEQ ID NO: 186107 - DNA, 232 bp, Homo sapiens
gggagctctgaatcatgaaagacatggagaagtgaggagaaggcagtcccttttatatgtctgtgtaaggaaggagatggagggtaggtggtcaagggcaaaggaaacactaggatgagaaaatggaaattacaggtgggcaagagtggcatccctaaaggatgtacttgatgagattatgtccagaagctgttgagatcatctgcagaaggcattgccaccgatgcttgag

SEQ ID NO: 186108 - DNA, 484 bp, Homo sapiens
aaaaaatattctaaaggatccttattgataaaaattggaatatagacagtaaattattgtattgatgttaaatttcactgaactgtggtgatgcgagaaaatatccttgttcttaggtaatacccactgaagtatttgggggcaaaggggcatgatggctgccactttcagttcagttaatataccaaaaaaaaactatgcttttattgtttttttgttttttgttttttgagacaaggccacgctctgtcgcccaggctggagtgcagtggcgcaatcatggctcactgcagcctcaatctcgctggctcaagcgaccctcccacctcagcctcttgagtagctgggactacagttacacatcaccacagctggctaattttgtttatttttttgcagagacgaggtctcactatgttgcccaggctggtctcaaacttctgggcttaagtgattatcctgccttggcttcccaaagtaccgg

SEQ ID NO: 186109 - DNA, 541 bp, Homo sapiens
agttggtaggcaaggaggaactgcagaagatttttaagaaataaagtgaaaatctgtgcacaggaaagactgataagggaaataaagaggcaagaaaccacttgggatcctaatcatgagctgaaaatgaattaatgagggactaaattagggttaaggcaatgaaaatataaagtaaacaaaagcagaaaatataaagtaaacaaaagcagaaaataagatatttcaaagaaaaatctgtaagactaagcaactaattagatataaaaaagaatgagtccaaggtaattcagggtcagaagaagaatgaatggtcaaactgctaacagaattttgaatatgggaagagcttatttaggaggagaagaaggtaatgtgcccagtttgtaattttcttttcaacaagtcagtaagtagggacctggaatttagggaaacgtaaaggctcaggttatggatttgaggttcatctgcctagaggcctgaagccttgggaatacagagctcagtgagggaatgcatagaactccttctcttacag

SEQ ID NO: 186110 - DNA, 990 bp, Homo sapiens
atctcaagaggcaaaccccactccgtagaccctgcctcgaatcctgcatcagtcgcccatacaaggccagctttgctttgggggtgttacagggcaacagccaagggtgggcttggaaggggttgaaagctgttggagagctcacagaagggcagcagagtgctgagaaggaggtgagctttagagtcaggtagacctgggttcaaagccagatgtcacctctttgggctgcatgggtttgggaaagttgcttaacctctcagtgcctcagtttcctcatctgtcaagggtgtgggccatgatgaggatcataaataaaagcagcaagtactgagcatggtagctggggcatcttaagtgcccagcagcagtgcttgtcatctgcctttccccaccttctccatgccttcaaagtcaggctgttgaatgaggaaatcgttcagatgtcgaactgccagctgtggagtgcgagaggccaaggaagggtcgggagggcctccagctgcagagggctggacagaggcagtgagccagtcaggatgatttatactagctgccacaacaaacaaacccccaaatctcaggggctcctcccagcaaaggttcatttctttctcacgcatcatctggttaggtcatcagctcttctgggtcctccctgggtgactcagggatcctggctgctcctgtggccccaccatctggagtgtgttgtcccatggtcagtgccacagaggaagagagggatgaaggaggcacagaagcttttaagtgcttgacccagaagcaacactcatcacttcctctcgcagtccatggccagtggggaggctgggaaaggcagaggagcatctggaatattaggtgagcacaccagtaaggctccctgcgtacattcccatccctcgagccccaggttaaaaacatcacgtggcaggctcatctctggtgctgattagacagccgtgagcgtggcttgtcttagggatt

SEQ ID NO: 186111 - DNA, 1551 bp, Homo sapiens
  misc_feature (1001)..(1001): n is a, c, g, or t
  misc_feature (1203)..(1203): n is a, c, g, or t
  misc_feature (1371)..(1371): n is a, c, g, or t
  misc_feature (1535)..(1535): n is a, c, g, or t
agagtccaaagctagaaagcaaaattcttttaaatctgaggtggtcccaggagttttttgaccaccagtgatacggaatgaaatgtgtgcaacactgtggatttacaggtaggaacacagaggaggtggtaatttgccccatttttcaatgttttgtcttaattccaagagcatggaccttgcaacagctgtttggacctgatagaggaacacaattcccaacacatgctgtcccccaccaaaatgacctacctgagcaattataggctttgagtaaggagcaaggactgtgaacttgatatacccgctgtccacagcactcttacctactcacagaaatgaccccactgaacaaactgatggctacacgtttaagatgcaaactgaaaacatcttttagaccatgtttaaacctccatagtttgttctttttgttcttaagaagtcattctaggctgggctcggtggctcacgcctataatcccagtactttgggaggccgaggctggcgaattacctgaggtcaggagttcaagaccagcctggccaacatagggaaaccctgtctctactaaaaatataaaaattagatgggtgtggtggtgcatgcgtgtaatcccagttacttgggaggctaaggcagaattgcttgaacttgcgaggcagaggttgtggtgagccgagatcataccactgcactccagcctgggcaacagagtgagactccatctcaaaaaaaccccccaaaggccaggcgcagtggctcatgcctgtaatcccagcactttgggaggctgaggtgggtggatcacgaggtcatgagatcgagactatcctggctaacacagtgaaaccctgtctctactaaaaatacaaaaaattagccggacgtggtggtgggtgcctgtggtcccagctactcgggaggctgagcttgcagtgagccaagactgcgccactgcactccagcctgggcaacagagcgagactctgtctcaaanaacaacaacaacaacaaaaccccaaaaaacagaagtgtttctatggctgggcccagtggctcacgcttgtaatcccagcactttgggaggccgaggtgggtggatcatctgaggtcaggagttcaagaccagcctggccaacatggtaaaacccagtctctactaaaaatataaaaattagccaggtgtggtggtgggtgcngggcatggtagctacaggtttaagatgcaaactgaaaacatctttcagaccatgtttaagcctccatagtttgttctgtttgttcttgcttaagaagtcattctagaggccgggcgcggtggatcacgaggtcaggagatcgagaccatcctgggtaacatggtgaanccccatctctactaaaaatacaaaagctaaattagccagacatggtggcgggcgcctgtagtcccagctactcggaaggctgaggtgggagaatggcgtgaacccgggaggcggagcttgcaatgagctgaaatcgcgccactgcactccagcctgtgtgacanagcgagactccatctc

SEQ ID NO: 186112 - DNA, 328 bp, Homo sapiens
tttcagttccacggaaaatagccctaatgaccatattagaatctccagacatcctcatttaaaaactgagtctgacctcaagtggccagttaacaatgacttctcaaagacttctgagcaaatgttggtttggacttaatatcaatgtgttattcccaaggaggaatctcccttagtcgagtcagcatctgccattgtagccaccgtcccacttcttaagtgaactggggtagtttttaacttcagtttccccttctatcaagtagggataatcatgataataattacgtttgaaaaagcctcatacaccgtaaagcacaaatccaag

SEQ ID NO: 186113 - DNA, 383 bp, Homo sapiens
gctgggattgtggctttgaaacgatccctaagagaggaggttgctttgtgtgccaagtcccgctgtgccacctgcccccacagttcatacaaccagtctggtttgcgggaaccacccatcttccagctggggggtctggaggcttggtaggcagagggtgcccatgagcctggccccagtgagagccccgggcccggagtctcaagcagagttgctttccgagcagaaacactgcatgtgccagctgtgttttgtggctgggacccctctcaggagggagagaggatagggactccggtgtggatgcccccttaccaatggctgtgattcgccacagccacgagcacagtgccactgagtcccgtgggtggctatgggcggcc

SEQ ID NO: 186114 - DNA, 237 bp, Homo sapiens
tctctctcccctgcccttcccgtgggcaggacgcagagctcctccagggttccttctaggccctcttctctctctacaacctttcctgggtgacctcatttgctcacctgattcttacaccacatgctggagctgcccataacctcagcagcagcacagagctcttccccgagtacccagcagcctctctgacacctccaccgggaggtccttcaaccgcagtcctttcaaagctga

SEQ ID NO: 186115 - DNA, 226 bp, Homo sapiens
ggctacaatggatgtcctcataaagccgcataataataaaaacaagactctttcagaatcattaataaggaaacacggccaggtgcaaaggctcacacctgtaatcccagcactctgggaggccaaggcaggaggagtacttgtggccacgagttcaagaccagcctgggcaacacagcaagaccctgtctctaccaaaacaattgagaaattaggcaggcatggt

SEQ ID NO: 186116 - DNA, 328 bp, Homo sapiens
aagatggataacactcaacagatatttcttctatgtcctgaatgggaagaagctgtgtaagtgcttactaccttttaagcaccaagaacaaagatctcatattcttcattatctgttaaggaatttaggtaaaaatggtatgtcaagactctctgatggctaacttgggtacagaacttagatgtcaaggcttcagttgcctcccaagtcagagaagcataggataggcttcctgttaagatcataaaagtcttacataaccagaactctgacctcctgagtagacagatatacccagattagcagttatcctgtagctgctgggaca

SEQ ID NO: 186117 - DNA, 364 bp, Homo sapiens
tcatgggatgccacactttcctttcaacctcacaaaaatcctgctttctgcaacagagattacagttcagtaacaagcaaaatgtaaaatgtgacaatgttctcattggtcattgataagcattcactaattagattatagccagtaagaaagagacaaggttgggggcgggggcaagcaaagaggggtatagagagagaaagagaaaaatgagaaataaaagaaaaagttatctttactaagttctctgttttaaagtaacaaggacaaggaccaaagtttaagaagaagaaaaacataaatttttattatactgaaaggaatacttacagttatttaaataaagatatagaaagttgaccaa

SEQ ID NO: 186118 - DNA, 532 bp, Homo sapiens
aaaataaataaaaagcaatggaaatttggaggaagaagtagtgaatcagcctctctcttccatgtgctgtattttattggaatatgagtaagtataagggtaatatgagaaatgggggggggggttctagtcaccaaaatggcatctgactctccaaatgcagcaatgctcactccagtgggttgcttcactgtgactcaagatctgtcaaatgaggacataagggaatttgaataaagccaagatacactcctaaaataaaccaaatcttccaatagacctaacagaagatgtaacaagaatcaagaagctaacctactcaacataaattgattctaaaatactttttaaaatgaattattgctaatgcaaaaattcaggaaagaagtctaggaatttgttttcctaatggcacattccatttatctgttggtagaggtcactaaaatacattactaggtgtctatgtatccctcccctgttctccttttataaccttattcttcaaaaataaaaggtaattaagtgaaag

SEQ ID NO: 186119 - DNA, 352 bp, Homo sapiens
ttgtgcctcagcctctcgagtagctgggactacaggcgtgcaccaccatgcctggctaatttttatatttttagtagagacagaggttcaccatgttggctaggatgttctcaaactcctggcctcaagcaatctgcctgtcttggcttcccaaagtgctgggattacaggtgtgagccatcgcacccagcctccatgttatatattgattatataaagataaatagttttggctccttagctctttgagctaatcttaggcacagccatatctcagagttattgtggatttggtttcagatcaccacgataaagagagccacacaaattttttgatttttcagtgcatata

SEQ ID NO: 186120 - DNA, 421 bp, Homo sapiens
catagggaaattattttaaaagcttctgttgcacagaagagtaactaattatacgggacaagtaaatggaccacatattttactcaggtggtttggctgcctgatcagaattcaggtcagatttacttgcttccaaagaacttataggtagtatctagcatcacagaaaaatgaagcattacctaaaaattcagatggtccaatgatccacaggtatctcttgggttgctgatcttaatctgtttgatcaatttttgcagtaccttgggagcttttcaaacactgaatgtcatctactttatttgattaagtaaagactcggagtgcagggataatggcttaaaagcctgttgtgctgccataatgctgagtccagtggctctcccacagctgatgtgagctgaatcatgaactcatgatt

SEQ ID NO: 186121 - DNA, 832 bp, Homo sapiens
gtgacagggaaaagcagggtgcaggacagcgatgcttcccaaagccacctgcagggttggtgctggaagttaccagatggcaccaggctggccgtgggctcacaatgacctctcttcctagctggaacttccagggtccctgttggaaaggaagtgtccagaggacacagcagctgagcaaggggcccacctctggttccctccatcttttactctgcatttctataccttcactctggagggctgggtgggaggacatggcttccttttagtcttctggtagaagcatggatgcaaacaccttccttgagtttccatgagcatagctgccacaggctgacctttccaaaagacattactaaatataaaaggagaacaaaagaaagctaaagatagggcgtgcaaagaataaaaacagcctggctcacaaagaacaagttactggtttgtttccaaagctttcggaccctgccctgttattccccttccaggagataaccacctccaaggccagcagacgtctgcaggccctttcgccaggctctctggcctcctagtgctggcttgtccactgtctaggttgtcttgtaggacccatgccaccaggaatcctctccagactacttgaccaccctgcagtcagatctctgttctgccctcttctctacccagggctcttggctgtggtggcggagggagggatgcctgtttccctaggtctcccaggtgattggcacctatgtgactggaccttttaggagtgcagccttgttccatgtaggccttgtaatatgacctacctcttgccatgctgctcaggccagtttagccc

SEQ ID NO: 186122 - DNA, 564 bp, Homo sapiens
ggaggctctcatagggctggggattcggagaaggattccctgagaaagtgaaatgtatttggagtttgatggatcaactggatgttccctaggcaaagggcagactgggaatggaggtggacagcaaacattccaagcagaagaaaaactgcatctgtaaagacctgtggcaggtccctttagaatgtgttctggccaaggaggttcatcatgttcagtgcccttgaggaaggcgggttctgaatttcccagataccagatagatgagatcccactgccaggggcccatgagcagaaggggtttgagagggatgggagactttccaaggcaaattctaacaaattacaaataatctggagaggagaaagagaggcacctaaataaatcagtttagagttttagaatgacttgtccaaagttggaagggggtcaggtaaccaaggaggaacagtgcagagcagctggaatacatcagaagggggtcaggaatgccaaaggacctgatgagctaaggcttctggaaaatgctaatcagccacaagggcctttaaaactgtctgcag

SEQ ID NO: 186123 - DNA, 509 bp, Homo sapiens
gagacatactggtctgtaatttccttaaaatgtatttgtctgattctggtatcccagtaatgctggcatcatgagccttgtaaaaaattccttccacttcaatatttttaaaagcatataaaattgatattattttttccttaacttgtataattcaccagtgaaactatccggacctagagttttctttttaagtagacttttactacaatttttatttctttagcatataaaaagctactcagggctaggcatgatagctcatgtctgtaaccctaccacttcaggccaaagcaagaggatcacttgagcccaggagttggagaccagtcagtacaacatggtgaaaccttatctctacaaacattaaaaataaaaaaattagctcgggggtggtggcacatgcttgtagtcccacctattcaggaggccgatgtgggagggtcacttgagcccaggaggtcaaggctgcactttagtcttggcgactgagtgagatcctgtctttt

SEQ ID NO: 186124 - DNA, 635 bp, Homo sapiens
cgtgagccaccgcacccagctgcagctcaccatttcactgatggtgatggccagtttactgatgcacagctttaatggttactatgttatattacattatgccaaattatgctgctttgggttacaacgtgtgatgttacatagtgtcatatacatgtttactgtctacctcattttaccagaatgtagccacctggaacagtgcttagcacaaaacacctgtggaatgtttagtgacagaaattgttaggaagtttattaaaaccaaaatcttccctgtagctttaaaccacacataatgtcatttccacaagccagcccctcaaatgtctgacacagaatccatgcccttctcatgcttcttctttgccaaaatgctaattagacccatcagaaccatgcagcaactgttcgaatatagatctgttgcgtttacatgtatttgttcattgtttattgcttctctcctctcatggtgcttacacctcctgagagcaggggccatgtctgttgtattctgctttgtttcccaagacctagagtagtctgagtgtctaaatgtgtgtttggttgaacgcatgcctgagtgtacaggtgcactaatagaaactgaactgattggctctattaagtct

SEQ ID NO: 186125 - DNA, 407 bp, Homo sapiens
tgcatggacagctgtgtggagggatagaagaatccagtttttaaaccagatggctgagctatttcattaagtcaccccagaagtcttcaactaacagtatcttaactggtgaactcctgtgactgatacaggaaaattttacttcgtaacaaagtatgataattcctttgtgcaggaaggaggttttgtggaaatgatgttgattcactgcacactgtacaggagggtgtctctttgacaccaccaaccttaaatagtaggaaagccatcacagtgggttgggtggttggattgctttattgcaactaataaagggtcagttgtgcagttgttaactatctttcacttccctcagaactgtatctcctagcccagtgccctataggtcaaaaatgccagtttgttgt

SEQ ID NO: 186126 - DNA, 681 bp, Homo sapiens
ctcataaaagggaggagaaagagtgcaaaaatgataaggaaagggcaaaaagcatattcaataattcagtaggtaaattcttactagaaaataagcatattactttgagaatacacagactagttcaaataatactttaatgtttatcatgcattcttattgaaattatctaagtcaagaagagaccattttagcgtattgattttaacatcagaatttgttaaaatttttttatgaatcagaaagctgaatgcagaagatattagtgtgtttaaactgttaaaaataaactacaaaatttacacagatcagaatttctccaggtaaaagtaaagctatcaaaatactgaaattaccctgaggtaactatatcactgtgtattgtaagtagattagaactacactctgacacattatcatctttggtaaatttattaaataagcacaaaactgattagccagaaatgagtgccatgcaatggctggaagcaactaataaaccgaacgcaccttagtgagcacagatttatagacagcccagcatgaagttgccaatgattgcttctagtagtctaataagaaaagtaagatttcattgagagtttctgtacctgtctctgtttgttaaacccagagtcacacagctttaaggaaggaataaaacacagtgaaggacaagag

SEQ ID NO: 186127 - DNA, 1316 bp, Homo sapiens
ctcctgcctcctgcaaggtggagggtggggcttggccaggagtgaccagactacagagtgaggggtgtgcttgtgggggtgaagggttggggtgagaactgagcccgagtcgaactcatcctcctctgccctgatgcactgtgcaacttgggggagtcactgtccctctctgggcctcgctttccccatcttcgataggacttggctctgcctggccactcctcctccaatgggggaattcctgggcttgcctctgtcttggctccagctcaggtgtcagtctcagccctgtcccagccaggaacaatgggccaggcagggccagtcaccccctgtccctgggggctccacccacggccctggactattttcagcccttgcagatggagtcagaagaggattttccactcccagtacaatgactgccctggaccattgtccagcagtgacgcgggggacctgcctgccccaaaatatctcctgcccctagtttccaagcctctttgccctgctcctcacctcctggccctgctccttacctccccaccctgatgtcatttcctggggctcttaactcctgaaggccattgtgaaacatcacgtgagactcctgggagacacaaccagttggaatgagttttccctcctggcagggaccccagggattgtttggctgcttagtgggactggtggcccagagagggctgtgccttacccagtcacacagcagtcagtgtgaagcttaggtgtaagcccagggctctttggctgctcccactgcctcagccaacttcattagctccagtctgtggctcctggactggagctacagtggtgagagctcaccactgagcttcctgggatgggcacctgggatagcagcccaagtggtgtgggtggagaggtgcagctcatgctctgaccttggagtgagcccagtgcaggggcctgaccttaaaccctttctccccactgagtcccatttttaccaaatgtggctgttaggaactgaatgtttgtgtcccccgccccacaaatccatatgtcaaaatcccaactgccaaggtgatggtattagaaggtggggcctttgggaagtaaccaggtcctaagggtgcagccctcatgaatgggtttagtgcccttacagaatggaccccagagagctcctcaccctctttccaccatgtgaggataatgagaagttggcagtctgcaacctggaagaggtccctcaccagatcccaaccatgctggcaccccgatcttagacttccagtcttcagaatggtgagaaataaatgtctcttgtttct

SEQ ID NO: 186128 - DNA, 641 bp, Homo sapiens
aaacagcagcagcagcaaatcaccatttgccatttcaactaaaatgattaattcaggctatgatcatcaatggataaaatcacttgataaaaaggactttacaaatgaaggaaccaggctgtcattacctgaacccagtgatcacatcagccttactaaacataggagagccagagccagacatcctgtttctccagatgggaggcaatacacagtttacagtaacacctaaagagccaaaaaacttgaacctaaatctagtcaaggcatttaaagctaacttccatttaacaaaataatgaaaacaacgaacagattaaataagaggtttcctgactctcggccagtgaataaatctttccactataccactactaacctctctgaccctcaggacaaatagaagctgcaaccttaagactgattttcctttttctgagacggagtcttgctctgtcgcccaggctggagtgcagtggcgcgatctcgcctcactgcaagctctgcctcctgggttcaagccattctcctgcctcagcctcccgagtagctgggactacatgcgcccaccactgtgcccagctaattttttgtatttttagtagagatgggtttcaccgtggtctcgatctcgtgacctc

SEQ ID NO: 186129 - DNA, 441 bp, Homo sapiens
tcacacaaccccctactcaggccactggtatctgctctggattattgctcagcatctatgttagtgtcaccggcagcgaatccgtatcttacgggtctgcagcaacctcaattcttgcctcctcagaagaaagaattcaactgaggggcataaggcagaaggagagaacaaggcaagttttagagcaggagtgaaagttgattaaaaagctttagagcaggaacacaaggaaggaaagtacacttggaagaggcccaagcaggtaacttgaaggacaagtgcagggtttgaccttttgacttgggcttgtatatgttggcatgcttccggggtcttgtgtcccttctcccgattcatcccttggggcgggctgtctgcacgcacagtggcctgccagcagttgggagtggagcgtgtgctatgtgtttcctggagctgtat

SEQ ID NO: 186130 - DNA, 250 bp, Homo sapiens
taaaactaaggcttagagaaaataagtaacttacaatctgacaactagtaagtagatatcagaacgtaaatacaagtgagtctgactccaaagtgtgtttaaaccactctgaaatacactcattccttctctctttctcttagagatgtcttgaaggtttgcttgaatagttatgctgtaatagtttatgctgtaatagtttatgctgtaatagtttatgctgtaatagtttatgctgtaatagtttatg

SEQ ID NO: 186131 - DNA, 367 bp, Homo sapiens
ctcctaccaccacacttatgctcctaatagcatctgcatctacacattctgccttcctgcccattaccatagatgaactatctatactcctatctacagccagtaccttctcttatgccacctagatccatcccctttgatctattctaggacgtgctctagcaatttcccttctgtttcctatatcagttcttttctctctctggattacttccatcagtattcaaacatggagttatttccccctttgtaaaatatcctctcctgacagttattgcaccatttctctattcctcctttgcagcaaaactctttgagaaaattgtttgacgctctgttgccaattcctctcctctcattctcttaa

SEQ ID NO: 186132 - DNA, 290 bp, Homo sapiens
gatttgttcttaactgagtgctagatgtccctcttagttcaaacattaacaaggcagacctgattaaataatgtctatctccaaaggtgtattttctgactgttggatatagaaggatctgagcatcattctcatcctaaataaagtatggagtattggtaccgtgactctgactttgcacagtgagtgatcccttagggaaatgagacatctgtgtggaagtgatatgccagtattcaaaaattgtagcatgcattacttattcaaaaaatgaccttgcaaccaggtag

SEQ ID NO: 186133 - DNA, 583 bp, Homo sapiens
ggagagacaggcaggcttatatacagaatgacaattttcttccacaagcactaacctttggggaaaccgttgtcaaggtaggaaaacctaaacttaattgacgaattgttggatgttcgatgtggacacatctgagagttaaaaactccaggaagacccagacagagaagggtccccacacttctgtgagtttgacacctagcttgaccaggttctcacagtgaatgttggagaaaaatctcctcatgcttccagaaagggaaggtgaaaaggaaccatcttgaagtacaccagagctttctgttcttcttaacaaggtctttcctcaagggcaaatatttcacctaagctactggtgttttgttttcttgttttgttttgttttgttttgttttttgttttcagagcctaacctgcctggaggaaggaaattacccacctctggccatcctgtccccaagtaagggtggtgatgggagggagggctgagaagctcttgtgaaggtcacagcccagaggctaaggctccctaaaggactcagacctaatcacagggctatagaacctttccccttcccacaca

SEQ ID NO: 186134 - DNA, 224 bp, Homo sapiens
cataagatatttggcagagctgtttcagactaaaaacactttaactctcccactggcccatatgaagaccaacctcctgccacatgcatgttttttgaaggtgatgtaagaccaactgcaggaaagggtgtcactaaagaagaaaaagaagggggggaagctcagagatgaataaaccttgaaatgaaaatctggctggcaaagaatgcgtctgtatgtaagca

SEQ ID NO: 186135 - DNA, 134 bp, Homo sapiens
tccccacccaccgtgtaccccactcaccccaaaggcacctgcatgtcccctaagaatctgtagcctgcatgtcccctaagaatgtttactcttcatttactcacacggaagcaccaggaagagcagcaaaaggc

SEQ ID NO: 186136 - DNA, 235 bp, Homo sapiens
cgtccggaatggttacggattcatccacaggaatgacgccaaggaagatgtctttgttcaccagacagctattaaaagaagcccaggaagtttctgcgcagcgttggagatgaggagactgtggaatttgatgtcgtggaaggagagaagggtgcagaagccgctaatgtaactgggcccggggaggtgcccgtgaagggcagctgttatgcccccaacctacgtaagtttcgcc

SEQ ID NO: 186137 - DNA, 848 bp, Homo sapiens
cacccgattctcctgcctcagcctccctagtagtgggattataggtgcctgccactgcactcagctaattttggtgtttttcgtagagatggggttcaccatcttggccaggctggtcttgaactcctgggctcaagcaatcttcccgcgtcggcctttcaaagtgctgggattataggagtgagccgttgtgcctggccaaaagtgtagtttaaataattggaattttttcaaagttattggaagagatattaaaaaagaaagaaaaatatttggaattttagtagctgtgcattgttctaacaaagttataatttgcctaattgtgtattgtttgatttatagggtattaccagtttttgactcatttacttagttagttgtgtaaacaatacagcagtaaactctttacttccaaagctgtttgcattgtgtgtgggctgagattacttccccaaactaaattcccagaagtgagactgtgaggtcaaagcatacatgattaaacatacatgatttatggttcttgataaaactctgataatttatgttcagataattatagtagaattacagatagaattatcaatagatttacagacttatagatagatttccaaatgtcactgaaatgatcaacatgggtgtggaattagcttatctgagatgtgggtaattcagagttgataacacatatattcctccataagaactactgtaaatgtactcttatcagcaacttttgaacattgagtcaagttattgaagaaaagagttttagaggttgtttggtgtagctgcagcctttgagtacgtctgggcttttccacagcgattaccactaatca

SEQ ID NO: 186138 - DNA, 367 bp, Homo sapiens
aagatagctgcatttctttttggggaataaaatacagataggatctaaataagtaaacatcaatgtgtcatttaactgaactaaataacttttttcttatacaaattaaatcacaaaagcattgcgatgtcatcattttgatattccataaaaatggaaaataggtcatcagtctgaaacaaacaaaagtgatttacagctaggaattactatttttaaaacaaaattccaaaaaatcttacttgatattcatatgattctacaaagattttttataccatttagaatttttttttttttttttgggaccggggtttccttttggcccccgggggggggggctaacaaaaagggtgaaaacgtaggg

SEQ ID NO: 186139 - DNA, 638 bp, Homo sapiens
ggaaaataaatctttttccagtatgttctgtcagtttcttgggtttagagacatctcttctatgatcctttttttctctactgactgcttgtaccactattactctagaattctatctttttaaattcactgcccttctgcgttgagttctttgtttcttggattccttgccttcctgtttcttggtttggttcttcttgatattggtggcatgtgagaaaggatgaatgagaattaaattttgtgagttctggtatatttttcaaccactatattgattctttggcagggcatggaattctacattaaaaatatttttcctcagaattttaaaattatgatctctgtcttatagtattgtttagaactccaaagccattttcattcctggtctttggtttataccctgtctttgcatattggagccttttagggtattttctttgttcccagtgtcctagaacctaataaaaatatatgtaaatgtaaatcatcttttttttatactacataccaagtggacccattaaatatggagactcatttctttcaggtctgggaagttgcccttaatgctactttttagaacaatctgtattttctgttttctttgaaaaatttcaaacatagagaaaaaa

SEQ ID NO: 186140 - DNA, 573 bp, Homo sapiens
ttaattgttgaagatttcccctgtaaagttatagtctaaaattgcaatgttagtctacgatgcttctatcattaaaactatactttctccccaagaatttttacacttctttaattgacccacagcattttcctgatgaagtaatactaaactaaaaccttgaatgcgtataccctctacatcgctcaggctttagataactgggggttagtaatcaatcaccttcatgttttttggcctaggctctgtacatttcagtagtttattcaaagggaatcattcttttcctgagtacaagaaatagtgaatctgactcctcactgaccaaacccctgaccaatgtggcagagtcccctgaacacttctggggtggccatgggtacataccacttaggaggagcatcaaggtccactctctgtacccttaagaagtagcttggcatggtggcgccattctgagcccaggccctccttgggactgagataagatatgacttcagcctgaggccatttctcacacttgaaaaagtaagacactcctatccccatcccattccagctacccagcctcca

SEQ ID NO: 186141 - DNA, 529 bp, Homo sapiens
aaaacagaccacattattacaagcatcaccatttaccttgctgatggtgaaatcacataaaaatgaacgggagacaaatctaaggtatgacttttagccctttaatattcattttgcagactgttcacaaccaagttttaatctcgaattgctttcctttgccacccagcaagcttctgagttgcttccttacgctgttctttggaatgtgccccgggaatgtaaactcattttaatattggcctaagtaaaataggattataaaggcaaatctgtggctcaagttcccataatgcatttcaaaagcaagttaaattattttgggattatcctgtttgggataacattattcctttctactagcatagttaatcaagaattgacaaatgtattttgtgaagtaaacatgaaattacacaattatttgtcactttttattaagttaccaaacattcacttaatgctggtgtaggtgttataggaaagcaatggcaatatgaatcaaattttagtagaggctctgtcattt

SEQ ID NO: 186142 - DNA, 444 bp, Homo sapiens
tgcctattctggacatattacataaatgaaatcatacaatatgtgatcctttgtgactggcttctttcactgggcacagtgttttcaaggttcatccatgctgtagcatgtaacagttactttaaaatctgcccttttccagccaggcatggtggctcacatctgcagcctcagcactttaggaggccaaggggggcagatcacttgaggtcaggagatcgagaccagtctggccaacatggtgaaaccctgtctctactaaaaatacaaaaattagccaggtgtggtggcgtgtgcctgtaattccagctactcaggtggctgagacaggagaatcgcttgaacctgggaggtggagagtgcagtcagccgagatcacgccactgcactccagcctgggcgacagagtgacagactctgtctcaaaaaaaaaacaaaacaaaa

SEQ ID NO: 186143 - DNA, 356 bp, Homo sapiens
tcccaaaatgctgggattacaggcatgagccactgtgcccggcctggaatgtttttttggcaactttacctccctgggtaatttactgacctgcagcccagtttaaatgtctctcctagctctgtctctgggcagcctctcccctgcctcaaaaggttctacctctgccaaaccataaattccctgaagactgagaacatctgactggcgcagtccccagggtctaggccagggcctgacatgtggcaggtgctcagtaaatgagctgaaactgatgatgtaatacaaaataatgcttagtagacaagatgggcaagtatctcagactaataatacccactgctgggagtgtccgc

SEQ ID NO: 186144 - DNA, 348 bp, Homo sapiens
tgaaaatagtaacagggaatactgcgatgatggatagctttgttaatgtcttatgaaattttcatgaacaatctgtcaatcataatattatgattgacagattgccccacaagtaacagctacataaaaacagttgtaaaattgtccttggttttacaatgataaatgaaaaacattaaaattctctaattgaacaaggtatgcaaggatttttatattgttttttgctaaaactatgacagcaaaataacatcctggagtataaagataagagctgaatgagcaggccactaggggacaaagggagtcttttcacagaaccaatgcttcttttgcccaccccatctc

SEQ ID NO: 186145 - DNA, 299 bp, Homo sapiens
ccttgccatgttttcaacacacatctaaagcctgaattgagagtataatttttctgtagatacatcaccttgaggaattttataaacttcagtttcctcatctgagaaatgaggtagttggattagatgaactggctcatcaagtgagtataaggagccttccaaatttaagaattattaacatttcccggaagactaaccaggcaatttttcttctttaggtttgactttctgagatgtcatggcttagtattctttaagcaaattctggaatgttcttgtccctttggaataattgt

SEQ ID NO: 186146 - DNA, 810 bp, Homo sapiens
gtctgaggctgatgacctgttcttccttcttttccttcccctttcaaggtgccatttctgcatgttgtttccagactccgcacaggaacgcaaggcacctctttagatatcggattggactgtaaatcccctgaaaacctacatcttcattatttttgtgtcctcttattttcatgtagtgaccgtatgtcctcattaaaaaactcaggccaggcatggtggctcacgcctgtaatctcagtgctttggaaggacaagtgggaggatcttttgaactcaggagtttgatatcagcctgggcaacataacaagaccccatctctacaaaaaattaaaaaggttagccagctgtggtggcacatacccatagtttcagctactcaggaggctgaggtgggaggatcacttgagcccaggaagtcacggttacagtgagctatgatcatgtcagtgcactccagcctgggtgacagagcgagaccccgtctctgaaaaaagaatcctagagtattttggcactgtgcattatatgcattatacttagctgctgaataaaggtgtgataactgagtaatagtggatgccaccgatattaaatgtgatgtactagaggtaatcctcagagtcagggactgtggcagccctgggagtgggatagtactgggctgtgctctctgagactgagctggggtagagtgatgatctctcacattgtctgttctcattcttctgctgctgaaaagctgctcttagtcttctgagcatttcttccctctacccacttggatctgctgactcaagcaggcacct

SEQ ID NO: 186147 - DNA, 403 bp, Homo sapiens
agtgagcatgctacccagcctgggaaactgctttttccatggatctttgcaatccacagatcagaagatcccactcatgagaccacaccaccagggccttgggtgccaactacagagccatgcagattctcaacagccactcagctggagtctgcctaaaaagttggggagggttgtcatcatcactgtggctgcctgctgcctaaaccctctgagttccctgggggagggggagcagtcatcactgtggttgctggctgcctaagacaactgagcttcccaagagaggggcagtcatcatcactgcagctgcctgctgcctgaggaaactgagctccccaagaagggacagcagccatcactgtggctgctagctgcctaagacactgaactcctggggagg

SEQ ID NO: 186148 - DNA, 358 bp, Homo sapiens
ccaagcagaggaaatggagaagaacagaaatgggctggccctgggtctgggctgacccctgatatcagggtgaagtcctgaccctgaactgagctctgatctcacactcaaccccagccctgggctgagccctagcactgattgtaccccaagtcgggctgagctcccacttctcactgaaccccaactccaaccaacccctgatcccaggctgaacttgatcttgaactgaacttcaacctggatctgtctggtggaaacacagacagggcaggggtggtgaggacgggggctctccagatctgtccccctccccatctccagcccccctcagcaggcagaatactggacctctatc

SEQ ID NO: 186149 - DNA, 330 bp, Homo sapiens
aatcgagctcggcaccatttgtcgagagaaattagaagactgaatataaagttaagaaattacgggataattttcaaagaaaaattagtttagatagtaccttgaaagttaggtggctaatttctctcggaccaatgcattggtccgagagaaattaggaactttccaggtttgatttgaaacccccaccacagaatttgtttttcctccctgagagattgatgggttactgttttgggattaaagcctttgggggctttctctggtggagaaatagttcagacaaaaggtagtggatccattagatggctaatttctctcggaccaatg

SEQ ID NO: 186150 - DNA, 611 bp, Homo sapiens
ggcattccattttatgtgaattacacctcaattcaaaagtttaaaaatgaataacaggattatatagttttaaaattaagaaaaatttctaaacaacttgttgattaaagagtaaattttgttggaaatacagaactgaaaatatgcatgaaaactggtatgtggctaaagtggtatttagaaggctttacgtgccgtatcagaaaagaagaaagggcagccaggtgttgtggcacgtacctgtaatcccagctacatgggaggctgaggcaggaggattgcttaagcccagggagtttgagtttgggaccagcttggacagcatagcaagatcctgtctctaaaaaaaaaaaaaaaaaaaacccagggacagtggctcatgcctataatcccagcactttgggaggctgaggtctgaggtggtaggattgcttgaggccaggaggagttcaagaccagcctgggcaacatagtaagaccctgtctctacacaaaataaaaaaattagccaaatgcagtggcacatgcctgtaaccccagccacttgggaggctgaggtgggagaattgcttgagcccaagaggtcgaagctgcagtgagctatgatcata

SEQ ID NO: 186151 - DNA, 266 bp, Homo sapiens
tgctgggattacaggcgtgagccaccacacccagccctctggggtctcttttctaagggcactaattccattcaagagggctctgtcctaatgacctaatcacccaccaaaggccctgtgtctgttgtaccaaaccctgttaacttccatagggaaggcagcaggtttaagaggccaaagaagagacctagagccagcaaacaagacacagggttttattaggggcttacatacacggaagagagtccagtggtggtgggctggac

SEQ ID NO: 186152 - DNA, 326 bp, Homo sapiens
gactgctggggacgatggcttccagctaacttaatagagaaactcaagcagtttccttctaaacacacatgtcctggttgacatgtccagtagagactatcacaggtctttggaacattcttttgagagaaacctatttaggtccttggtctgtctttcaatcaggttgtttgatttttgctattgagttgttggaattccttatgtattcagatatttgccccttctgccatgtaggttttgcaaatattttctctcattttctgggttatcttttcactcggttgattgtttcctttgctgtgcagatgctttagcgttaaatg

SEQ ID NO: 186153 - DNA, 562 bp, Homo sapiens
  misc_feature (75)..(75): n is a, c, g, or t
tgcgagagtacgtaacatgtcatagctgtaccagtgtcaaaacccctggccgactgccggtcctgaattggaaanacacctgaaaaatccacaatgattagtaaagaaaaatataagaattaacagaccctttaaatttgttttaaatatttgaagatttaaaaagtgtttaaagtttgtaattcctagtaggaaaacattatctgaatgaataccctaatggcaaaccactgtaaaatgcttcagctgcatttgggggagaggggtagggattatcttcaaagcaccccagctctcttgatgagaaggtcagaggtacgttggtttgtattattgcgacatccataaggtgatctaggttgcttttccttcagcagggctttatttatcagaagggcattatgcttgacctccaaatttggctgacaatttactgatgagattcataacctttgggttgctctggtattttgacatatttgctgggttctgagccacatcctggaaggccaccataacttctggatcctgcatggctgcaagagcctctggatcactaaga

SEQ ID NO: 186154 - DNA, 197 bp, Homo sapiens
ggaagaagttcatttacattttctaccatgtaaaaaactacttaggataatactgtttgaagctatttgatttatgaaggtattattagtctgataccaaaaccaggcaatgataatataggaaaactaagccagtgtctcttataaaatagatacagaagtggggcatagtggcacataacctatagtctcagtta

SEQ ID NO: 186155 - DNA, 572 bp, Homo sapiens
acatttgccacactgacctgttctaacagttatttgtgtatgtgggtcacaagctgggcctgtgctgtcagctctgggtttgagtcctggtttcatcactaactatgactgttgttattccacatctcaacttcaggttcttctgcgaagtggttagaagccatcagtggagcacctcctttttggtacagtacctagcatatcatggatgcttagtaaatagttcctcctaagaactcgtgcccctgacatgtgaacatacatgcatggaggtacacaagtgtgctgggctcaagcccctgttgggggccccacatcagatttatgtttcttttcttctctgcagctagtgcagcattttgcatgtacaggtagtagtgtttgttgaaggtggggacaggtggtgttgtggtctcctcctccagggcagcccccctctggctccagctcttggcctgtgagcagccagagtggcttctcttgtccatttgctgcctgggccctccaaggatcactggagacacctttccctggctcatcccagtgggctgggacctgcggaaatcatctga

SEQ ID NO: 186156 - DNA, 473 bp, Homo sapiens
ttgtaagtatatcgtcaagaagctgttactgttggttactggccactttttaaaaaactgtctgcagacaatttcattcctgaggtagacagatacttctcacactattttcttgaaatgcagacagtgtttgttcctataaaaaattttcttagttatttctaaagtacatttaactcagcaattaaagttgaaggtataacattgaaacattgaaatctagtactaaaaatataagtgaagattgataattaaaatacattacagcatgagaaaaattaagaaattagggattgagatttttctcttttctaatgaaaagataatgaagccaattactaaacagactagttttcagttttatgctaactaaaatgtaataaatactcacttttattggcaatgttattttaattacattaaacttgcttgcttttaaacagatgtttgtatgttataattcaagcagagtt

SEQ ID NO: 186157 - DNA, 172 bp, Homo sapiens
ccaagtagctcctcctccccctcaacacctggtatgattcatgactgatttgggtagctgtaatttttctaatgtcagttagaagggaaagaatttaaatttactacatgccaatcatattccaaagccatacttagtattaaaaccacagaaggagtcatttacatttaac

SEQ ID NO: 186158 - DNA, 289 bp, Homo sapiens
gtagtttatttgggagatagtcccaggaaacagaagtgagacagtgaggagaataagacaagaaagagagaaaagccaataaatcttactgtgttggttgctgctgagaataactggaactcaatgctacttgcaaacttcgaagtttatagaatgtgcctcagaataatcttgctaaagaactcgagactggtctgtttacataaacactactgtttagcatggtttgagtgttgtccccatggttattaaccctccgcacttctgagctgcaccttgcatctactga

SEQ ID NO: 186159 - DNA, 396 bp, Homo sapiens
cttatttcttattaattaggtgaccttgagcgagttaactttcctgactgtgcttcagtttcctatcaataaaataagaataaaaagaaaacctacctcataggtattatgaggattaattaagtacatatttataaaggacttgggataaacttggcacacagcaaatgtattaaagtatttgctaaataagtgacaatatcacattccacagcttataaatatgaaatctaattcagttttaacattttcagtaaatgaatgtgcaaaacactaacgaaaaatacatcttaactacttctcatcttaaataacaaagtcagactctcccctctcctccagtcagaaatcacccaaaagaaacaaagagagtaagaaacataactggaaatatga

SEQ ID NO: 186160 - DNA, 1263 bp, Homo sapiens
caatgtatgggagtgcctgcttcctcatcccttgccaacccaggtgttatcaaaaggacatcaaattgattttgtattccagtacaaactcttggctcatagtgtttagtttcatcattattctcaagctcatcaggttcatctgaccgatatttatgaagggcctactctgtaaaaagggaacaggttgctaaacaaagagaacaaaacacaccaatgaaatgagcaaaagcttctgaaattcagcagagaggaagactgatttcaacttgaaagaaatctccctggaggaggcaagctccgacctacctagatcctgaaggacatgtcaactttggacagagaaaggagtcccagaaaggaggtgagaacaagtagtgtgttggaacaggaaagcatagggtatggtccgtggcacagcagtgtgaggagaggaagagaatgctcaagtggcagctcgaagagtgactgccctggcaaggcctgagctagggaagaatcagtcagtgatctgagaattgggatttccactttaggcattagctaagtgatcatgagaaatactagcttacctgggcctcaggaggttagccctgaaaccaaaatttctgtagctgcagaactgtgtgttcaaagtaaatcttacagtcaagactaacgacaagcaagcacaactgcgctgggagagggaacaggaaggaactcagccccttattctagttgctccatcctgataacctgagggaggagggggcaagaaactcttaggattatgtgaagcacagtctaaatgcaaggaggcctaggtagctaaggttcccttcagctcgaaaaactactccaattcaatgtcagatggtacacctgtaccttcatttctattctgcttgcctatgattcatttattaacaggaattcactgagtacccactacatttcagacagtgttataggatctggggagacatgggctaaggttgcaaagactcttccctctcaggtttaatttctacttggaagggagagagaaaaatgaagaaataaacgtataatgtgtcagagcaacgagtgtaagaggaaaaagtgtaatgactgttccactcatcaaaactctacacatcctcatgtcaggagtctttccttcagccttttcagctttgcattcttacagatcatctgttctcttctctgaaatcctacagcactttggaccacgctgtaagcctctgccacttgttaactacttcattgtactgggcttct

SEQ ID NO: 186161 - DNA, 372 bp, Homo sapiens
gtccccccattcatatattaaatccctaacccccagtaccttagaagatgactatatttggagataagggttgaaagaggtgattaagttaaaatgaagccatcagtgtggcccctaatccaatctgactcgtgtccttataagaagaggaaatttgaacacacaaagagagaccagggatgtctgtgctcacagaggaaataccatgtgaagatacatgaagaagacagccatctataagccaaggagagaggtctcaggagaaaaccaacctgccaactccttgattttggacttctagcgtccagaactatgagaggataaatttctgttaagtcatcccatatttgatattgtgttaggcagccctag

SEQ ID NO: 186162 - DNA, 225 bp, Homo sapiens
caattatctatttaatttattatagtaagtgtggatacaaagataaaaggtgggccttattgtctagtagaaagaaaataaatggaatgttgtatcttcatatatatttttcaaaatcggtatgtatgaggaactgtgagcacaaagaggggaggacgacctagctctgttgggtgacagtggcagagactttgagaaaggaacaaggaagactacagagaagat

SEQ ID NO: 186163 - DNA, 311 bp, Homo sapiens
ctataattactacatagtattgataaatatttgttgagtgaaaaaattgatataaaaacaagaggggctaccatgtgtaagtcacattatgtgtgttactatgtgtaagtcatattatattttgtgtactactgtatatgcaagtcgcactgtgtttttccagtagtttgttttatacatattggtgattttcatatcttaaaagatggccctgaaggttctttgtcaaaagaatagaaaacaagtatcctcataaaagtgaaaaataatgacttccattcatgcatatgatctcattttatctttacaat

SEQ ID NO: 186164 - DNA, 637 bp, Homo sapiens
agtggtcattttgtctcacagtatattcattcttcctgagcaacttcacccatgaactgccattatcaactaccattatcacttatacatgacttcccaattgtcctcaaccccagacatttgagttccaaatccatatatccactagcctaacagactataacactttttcgtgtggttgtctcacaagcatctcaatctcagcatgcccaagtgagatagtagtatctttcactctcatccccaaaatgcttttactgttgcatttgctaccatggtttctggcaataccatctctccactcaaccaatcaagaaacctaagaatagtctagaatcccccttctgtctcattcccacacatatgtcttcttaattctacatatttaacatctcttttgtttgtctccttatgctgctatctaagttcaggatctcattatatcactggatcatcaaaaagggccagttctggccaggtgcggtggctcacacctgtaatcccagcacttcgggaggctgaggcaggcggatcacttgaggtcaggagttcgagaccagcctggccaacatggtgaaacctcgtctctactaaaaatataaaaattagccaggtgtggtggcacgcgcctgtaatc

SEQ ID NO: 186165 - DNA, 699 bp, Homo sapiens
caagagaaaaatctggaaattctttgtagacctggagacatgggtgctctcatgcagaggaaagtaaatctatcccagccctttgtcactgaccttgggaaatgttgcttgagctgttgagtcctggctcctgtgcaaaagcaaaactccctggggaaatactttatatcccttctacatactaggaactagagattactggagatttttaaaatgttagttttttgcagattgttccagtgaagtcaaatatggccatgttctctttttgatgaggctggacaatctcacttacagagattgtgacatccttgttattaagtatgtttcaagacagcagaaggttaagccatttaatgttattacaatggggaagtgacatccaagatgtaatgaggtacaagattgtggtggttgggtgaccctttgctttcagaaatgcggtgagtgctcaggattatggtgtggaaatccaactatgccacaggcctatgcacatgaattaattttatgcaggtgtcagggctttaaaaaaaatcaaataaatcatagcacttactggaaaccctgtgtgaatttaaacatatgatacatgacatgtttatttcctttcccaagtgagcatgttttaaggaccattcccacaggcatacgtaaacacagaccttagcagtgttttgaaattgaaatgaagttcca

SEQ ID NO: 186166 - DNA, 148 bp, Homo sapiens
agggaaatgtctttgatttaatgaaaaacctaaactaaaaaatgtatggaagagctgtttaaaaaggaggatggacaggacctggggattgttgggtaggagggtgaggaaggagaaagctggcatgatttgcagacttactgacttg

SEQ ID NO: 186167 - DNA, 471 bp, Homo sapiens
ccttaataccccatcttctttctcaattcaaatataaacaagaattaaataagctaaaagattaatttaaaataagaatagaatatgtgccttttcaaagcttggtgaatatgtatttgtatctttttaaaaaggaagagtcctggcactctttgaaatgctgagcaggactggagccgtacacactggcaaagggaagaagacagatcatacctggcacggcagacagagctttaagtaaaaattggttgatgatggttataggtttggtataaatttgaacataccagctggagtccatcttgaataaccgaatttcatctaggagttagacaagatgaaaagttactgaaatggaaaggtgaagattgttgactttggaaatcagattgcagaagtatgtagaatgaaatattttgttgaaaatgcatatataaaaatatgtgtatttgggatgggggaaaagactag

SEQ ID NO: 186168 - DNA, 326 bp, Homo sapiens
aaacactttaaagcactgagaaaaataactatcaaggtagaattctacactcagttaaatcatacttcaagaatgaaacaaaattaaaagacatttgaacatcaaagatctaagcattaccaatacacattcactgaaagaactattaaattatgtactttaagaagtagttaactgaatcccaaaagaaagagtaggatgaaagtaggaatggtgaggaatgaaagtgacaaagacttaggtaaatcaaaagaaacattgactgtgtgaaataataatgatggccaactttgaggagggctgtaaacaatcggtttccaatatat

SEQ ID NO: 186169 - DNA, 763 bp, Homo sapiens
tgctcatacaaagcctgtttggtggtctcttcacatggacatgtgtgacatttggtgctgtgacttgaattgggggaccgcacttgggagatcagtcccgtgtcctcctgctctttgctctgtgagaaagatccacctacgacctctggccctcagaccaatcagcccaaggaatatctcaccaattttaaatctggaccccactggaaattgaactgtccaactggcccaaggctctgactgacttcttcccagatcttctcagcttagcggctgaagactgacactgcgtgatcacctcggaagcctcctggaccatcacagatgcttctggtaactcttactgcggaggataagtccaaccccttcttaatcaatatggaggctacccactccacattaccttcaagggcttgtttctcttgcctccataactgttgtgggtattgacggccagtcttctaaacctcttaaaattccccaaatctggtgccaacttggacaatattcttttatgcactcctttttagttatccccacctgcccagtccccttattaggctgagatattttaacaaaattatctgttttcctgactattcctaggctacagccatacctcattgctgcccttttccccagttcaaagcctccttcacatcctccccttgtatctccccaccttaacccacaagtatgggacacctctactccctccttgatgacgaatcatgcaccccttaccatcccattaaaacctaat

SEQ ID NO: 186170 - DNA, 194 bp, Homo sapiens
ctttcagatgtattcatttagtttatttttaagttgacagagaaattgtatttcataatgtttttgtcttttctgaaatatttagttactgaattttcatcaacgtgtttaaaacaagaatttaagtatagcttattgatttatctaagcctttgatttggaaccaggttgaggattgccgatgaaataagtaa

SEQ ID NO: 186171 - DNA, 346 bp, Homo sapiens
  misc_feature (15)..(15): n is a, c, g, or t
ggtcgtctctagcangatcccccggagacacttacgcattagaattggtgaagtcagtagttaaacattcacatgttaatgagtgtgtggaaagacaataaaccataaaaaaaaaaaaacaaaaacattgttaacaaacttaaaaagcaagcgtttggtttaaaacctcaaaaaaaaaagattgagaaaaaaaattcatagctctagaacccattacgattacattacttttctcttttgtcttcctgattttggctctaaaatttttttcccttacgcattttcaagtgtttatttgattttgattttcacattcgtcctaattcttctttctttctttcttttt

SEQ ID NO: 186172 - DNA, 251 bp, Homo sapiens
gttttgaaaccagtctttctcctgacggcatcatggcagtagcattctagatatcacatctgtgcacgacaacatcaagaaggagtatctatttctgggtctcctgtttaggggcaaggaaacctttcctagacatccctcaccttatttcatgtctctttggccagaacagggccagatgttaaaactctacaccagtggagtacaggattagtttagattaagtaaaagatgtcgcccaagctaggata

SEQ ID NO: 186173 - DNA, 466 bp, Homo sapiens
tgggaactcctcaggactttgccaaataggtggcactgacctgatcagaagaaagaaggtgtttcagatattccatattgtaaataaatgtccctgactattggtttacctttagtggctaaaaaaaaaagcattgtctcctgaaaccccaatttgggataatttctgggaggcactaggagagtctcttctctgagaaattgatggctaatttggagactgaaggaatcaagtggctggttagttacatttcttcctgtgtaaaagctccatgacagtgctgctgttacatttgtttcaacaactaaaccatgtgccttgattccacaggcaatggagaactttctctctgtgccaagaactgtgggtaaagagaaaagcaagactgacaaacataagtggattttcagtgaaattagacttttaaaccccctggtctttccaagttcataaccctttaggaggc

SEQ ID NO: 186174 - DNA, 475 bp, Homo sapiens
  misc_feature (153)..(153): n is a, c, g, or t
ggggaccggacgacggcgaagcccgaaccgcggcggcgctgggagatagatatcgtgtcacgagaccagaaccagcggcagtgccaggaatcgtgggggacatgcagtggctggcgctgccaacaaaggagaagcacaggaaggctgagttcncggccaccggggagctttgcattgtcaggccgtccagcctcctccccagacgcctcccgggcgcgggaacagcccgggctgtgcagagctcagctgcgtggtggcccctgtggtcccggggtcttcgagttaagggctgagctgaccccatcgatgcacattgactggaagaaggaggatttggggaaatggatactttgctgtcaacttctcgtgtctcccagtttgctgccgagttgagtttgggtttctgagtgtgtcccttgggtgaggatgtctgtctctgtgataataaagcacatccaggacattttgtaatgaa

SEQ ID NO: 186175 - DNA, 207 bp, Homo sapiens
attcctcgtggggcaagtactaatgacaggtcaggagaatcaggaaggtgaggctggggagtcctctgagccttcaagaaattagcgaaagaacaactctatgggagttaatagatccctttctcggccgggcgcggtggctcacgaccttttttttttatttgtgaagtggattacactctttgggcccagggtaaaaatgtctcc

SEQ ID NO: 186176 - DNA, 138 bp, Homo sapiens
ctgggcctggagaggccgactggaggaagtccagggcctggagaggatgcaaagcagcaaacactaggcctggaaaggctgccctgaggcatgggcttggcctacagaggccactggcaggagctgggcccgcagagg

SEQ ID NO: 186177 - DNA, 309 bp, Homo sapiens
ggttggaagtagtataggttccttatgtgactacattgtgttcgcattttctttatccttattgatttttgtctggtttttctatcagttactgagagatgtatgataaaatctcccactatgattgtggatttttctatgaattttctataagtttttctgttcttttctactttaattgcattatggtcagaagacatattctgtatgatttaaattctttaaaatgtattgcaatttactctatgagccagtatatggtcagattttaagtatgctctgtgatttcagctgctgttggaagtagta

SEQ ID NO: 186178 - DNA, 183 bp, Homo sapiens
ctagtttaagggcagtgggggtgatcctggcactccccatcttccctgaaagtgacagagcagctcagagcagacaaagccatcaggcagaggagcgcaggtgctggcagtggagcgtccctctggtgtgccctggagtggttgaggtgtcgcaatgcagcctcaaaaagaaagagggtgtag

SEQ ID NO: 186179 - DNA, 578 bp, Homo sapiens
aggtaattctgatgcatgctaatgattgaaagcccttgccctagcaatataccaaagttaaaattacgtctgaactgaaactacagcttcaacgagtttagctactaccctgaaaaaaagttcagttgaaacataagtcctctagccttacccaactagaattaaaaacaaacaataaaaagcacaaagaaactcgaagttaagtgaaacgcctggaacgactgccaatgattttcaagtgttgacttcaaaaaaactcaatatgccttacggtgcttacatctgcttaagggcgcattgttaaaaggcactcgattggccgggcgcagtggctcacgcctgtaatcccagcattttgggaggccgaggcgggtggatcacgaggtcaggacatcgagaccatcctggctaacatggtgaaaccccatctctactaaaaatacaaaaaattagccaggcatggtggcaggcgcctgtagtcccattaagaaaatcagaagtggccaggcacggtggcttacgcctgtaatcccagcactttgggaggccgaggcgggcggatcacgaggtcaggagat

SEQ ID NO: 186180 - DNA, 632 bp, Homo sapiens
ttttcccaagccatcttagagagatctttcgtgacattttccttagtataattgaatctgagacacttaaatgaccagctgtgggaaatgaggcttctttgaatgccaagtggctgagaacaggtgagaataaagctagcttgacttaattgtctgtaaatatgtacttcttctaagtggtctagcacagtggctgtaaccttaatcagaacttcaatggaaagtcatacggaaatgtttcctccttgatttttctcactttgtagaatgggaatattcatctccaaagtaaagctgagttgctaaaatgagatttaacaagaatatctggaaacatcctggaactgggataagaatagatgaaagtccaatgtttttatgtagtttgtatttctgagtatgggatatgaagcccatattatagacctagctactaataccagcctccacctgggtcccaactccctcaacctgctttagattagatactggccaggtgatgaaatctccatttttaagatcgcatcctggatttcatcattgggtaatatcacatgtaaaggcagctgctgaaacatttgttaagcatagttttccatcttaagtatttatttttttcattaaaatttgtg

SEQ ID NO: 186181 - DNA, 738 bp, Homo sapiens
ttcgtcagacctgtgcttgttttctttctactcagccccatcttggctttgcccccccgggcaccactgcacccaggagacaaaccctgtattgttttcatagacctaataaatgacatcgctccccacctcctgccactaactcactagccctcccatccccccaggatcatctaaagtgtcccttgtgctaagcggctccctctgctatgaaagaacaggcgagagagaaacctgtctgtctgaaggggcctcccccctccacatgttatcaggtgaagattccacccggagagaggcagcatcataggtggccaatttaaacagtcccagcctcttcctctggctcaggtctagaattgaagggaacatactaaggtggcgattaacagtgctgatgataaaacagaaggatgttcagtaagtttttcaaaacacatctttcatcaagaaggtttctcctcaccccttgaaaaagtcaacgatgaaagggatagaaaagggggtagccatttatgcctagggttccattattggaacgctaagcatgtaggtgttatttatatcctactgctcaaggtcatcaccaaggcctgatttttgaaattcaaaaaaatggcagcctcaggcataaatgggttaagccaggaaagactgaatttttcccactggtcaagttgatgaggttcttcagatgtgctctgggaggggattgctggcgcacgaggaaggctgatc

SEQ ID NO: 186182 - DNA, 131 bp, Homo sapiens
ccaccctacctgccaacctctccacccgcctgggccagactatcccgctgccctttgcttactggaaccagcagcagtggcggctggggtccctgcccagtggggacagcactgaaacggggggctgccag

SEQ ID NO: 186183 - DNA, 422 bp, Homo sapiens
atgctcagcttccgctgggggtgttggcacggcccagcgccctccccactcccagggaccttcccacctcgagcctgtagcactttcacttccccaggtacccagcccctgcccccagcacctgggtgctccctggtccagaacaggctgcagactctgagaggcacaaaaacaagtggggaagggggagacagagaaaagaagacaggctgggcacagtggctcacgcccataatcccagcactttaggaggccaaggcaggaggatcacttgagcccagaaatttgagaccagcctaggcaacacagtgagactcccatctctacaaaaaatgaagaaaattagccaggcatggtggtgtgcacctgtagtcccagctacttgggaggctgaggtgcaaggattgctcgagcctgggaag

SEQ ID NO: 186184 - DNA, 444 bp, Homo sapiens
tgtcacaactgggatggtgctattgacatctagtgggtagaagccggggatactgctaaacattctacagtgcacaagagagtcccccacaacaaagaactgtgcaatccaaaatgtcagtggtatggaggttgaaaaactctagcctaggcaattgacccaacaaggaaggggccctataagtcttagcttaggcctcaagtctgaggcccagtagggggagactaaggagggacagactaggcagatgaatatccccaagtcctgcttcccagccccctctgaggcataccccctaattaggctggggagggaggcaggtgctgggtcagctgttgagtgggagggggacagctggggcctgtgtctgggtgaggaacattattgtcccaggagggggagaatcctggcctcattgccaagggaggctgtgaatggggtgag

SEQ ID NO: 186185 - DNA, 587 bp, Homo sapiens
cacaaaattcaaaatttatggggggcggaaagacagagaactagtaacctgggcaagaaaaaagagaggaaaaagctctttctcatcaaatttccttatgcattggctaattccttccctctgatttgtcaatttaccttccatttcaaaacaagcttccttagccattgtgtaacatctagatttggagcgactgtcgggaatgctttggtgaagagggctgctgcacttgacaaacaactccgtctctgaaagtctaaccaaaagacccaattcacagtgaacggtcacctgccactcactaggaacaggctggcttgacgaaatggaagaatcaacattgtcacacattgtgaaataatttcccatatagttcagttgcatttgcctggccagacaaccatgaaaggttgcattttgtttctagggtcatttctcagttcatttaataggtgggtagagtgaagtctagtggccttggccaggtgagttcatgggaagttaggaaaaaacagcctgtggattctgctcaagcttgaaaatcctaacacacctcacgagactattctgaatcctcaattttaaat

SEQ ID NO: 186186 - DNA, 728 bp, Homo sapiens
ctccggccttttgagcaattggtcctctgggacctaattactacccaagggccccacctccaaatcccatcacattgggattagggtctccgtgtatgaatttgcagggggatacaaatatttagtccactgcactctctatactgccaaggcagaggtgtcgcccagtggggaagggcacaggcctcggaaccaagatgtccagcatggaatcctggcccatccttcttccagctctgcgttcttgggcaataatataacatccctgggctgcagtttccttgtctataaaatgaggataagaactgtcacttctgggttgccatgaatattaagttagtgagtactcacaatgtcagaaccatgcctctgcacatagtaaactttctagaaagcactaagaaggtggcgacaaagttcttttgatggcaaataacagaaactaaacatagcagaaattaagaggggcattgttggaaggatgctgggtttttcctgggatggaagagatgtacagccaggcttgagttggaaagaatgaggccactcccgggacccagcaggaggaattcctggaccctccctagcaagggtccttataacttggagtccatctactccctgggggtctggcagagtgacatgaatttggatgaggaaaatgacagctttattttaacaaacctctgagtgaaatttacctttcactcgatgaattacaggcaaaa

SEQ ID NO: 186187 - DNA, 222 bp, Homo sapiens
ttagacaaataaaacatttctgattttagcacagaggtttatgcagcatattttaaaaagtgattagctatatttctatggctatggataaggtaatagattttatcaatgaatgaaactgacagcaagatgattagtgtacagaagagtttttaaaaacacacttttcctccacatcacgttttcttttttctttttcttttttctttttttttttttttt

SEQ ID NO: 186188 - DNA, 318 bp, Homo sapiens
tttcccgtctgcgaaaaagttaacgcatgcatagcgctgagcacggtgcctgtcacaaactacgctctgaagaaacgtgagtcgtgcccggtcgtgttaaaaccagcaacacaagagggattcgtgttcgttgtgactttcctgtccaacttcctgagtagctactggatttcttggtgctgcttttctgggggagggtctgctctgactggtgggcacagctcacagttaggctcaggcgcaccccagtgtggccacagacggggtactgtaagctgcccttgggttcaaggcctccagagctgttttgagctaaaa

SEQ ID NO: 186189 - DNA, 307 bp, Homo sapiens
ctttattccaatctgagtagagagcagagaccttgagccatcatggaatgcagaagctgaaagtacctggggagttcagtaaattttgactattttcctcagttgaggaaaatttacctactaactggcatgatgtaactacttaagcagaggagagttaccgcttagctatacataagaacatgcttttctggctggacgccgtggttcatgcctgtaatcccagtactttgggaggccaaggcgggcggatcatgaggtcaggagatcgagaccatcctgtctagcacggtgaaaccccgtctgt

SEQ ID NO: 186190 - DNA, 175 bp, Homo sapiens
aagctgtgtggtccttctcaccaaaacctggctgtggcaaagctgaacagaatgaacagaagttttgagtcattatgggaaggggaggggcaaaccatccctagggagtttggaacaaagtgctttaagcagcacccaagcactgggtagcagggtgggaggacataaggggtca

SEQ ID NO: 186191 - DNA, 1413 bp, Homo sapiens
ggttgagatatagaagaacaagagttgctctttttccttaaggtctctcctcccacccctgaccttagctcaccagcatgggagaatactatttgactccttgtactctgagacgtggatttcaagatatagcattccaacttcaacggcagcaagaaaagaagcaacagaaggagaagacatcatagcaaacagggatgcatgctgcatttcctaatactcaaacccggaaacgagacttcactcaaggtgaagggagggcaggtcaccacctggtagcactagccctaaattaaggaatgcagaatgtttgtgggattgcccatcataaaaattacaaaatgagtaaggaatgcaggcacagctggccaggtgggtttgtcacaaccatggcagccctttgccccacagccagtacacagaactggtctctccaattccgattgcatatcttctggcacctctgttcctctccctcagctgcccaggatttttctggttctgaccatgttacttcctcttttaaacctgttagcatttcacgactgcctacaggcaacggtctaaatggtcggaaggcccaagcttagcatccgagaccctgacctacctccagccacttcctcctcctctccacttcactggactccccatctccacccagacacctctgttctcccctctgtgtgcctttgcttatgctgtcccctgtgttcctagtgtgtctctggctatcttttaagcttccctccccaacctcattagttctgtggagcccctggaatagagctgacttctccttccctgctgctcccaggctgctcagaactttctggaaagggatgattatctgagttccagcctcaccccagcccccggactctgagtccctcatgtctgcctcccttctttctctctgaccacacagctggtacatagtcagtacagacgcagtcagtgagtggagcacggggcttctctccaggattcctgcccctttgtttatccctagtctcaggactccctactcctggtcttctgcctaaatctgtgcctcttggaagtgaagcctccgttcccagtggggccaggtcctgacccttgggaacttgcaggatccctcccttgggcctctccccgaagcttccagctcaatgctgaccagagcacaggctgcctgtgacagtccttggggtgacctcccttatcaggaaaaatgcagaaaacctattaataccttagccttgtgattgttaatggtcacaaaactcctttagggtcctttggactcagcacctttatggtctcactttgaattttgaacctcccacctccccccatcccccagagtaaggcaaatggtcttctgattgttcctgcagagggaaggctccacaggtaagcacacgatgg

SEQ ID NO: 186192 - DNA, 170 bp, Homo sapiens
gtacagagtgagaagagcagaagacagaggctaaaacacaagaacagctttcataaaggggcaaggaaagaaaagaaacccatataggaagcagaaaaaaagccaagatggaaaaaaaccaggagaggtggatcccacaaaaatggagaaaggaaaatatttcaagaagg

SEQ ID NO: 186193 - DNA, 264 bp, Homo sapiens
tactctttttttttttgtctgtagatatcataggctataccttgacctagtttttactgtgaaaattgagaagtttgaactgagtgaaataagtgttaaaatcaaattttgtttggagataatttagatattttaactcaaatatttaaaacacgtttattttaaacctgattaaaactgatttatggagtttttaaagagggagaataacaaaatctttttctgattcattgatcagtataaaaaagcactgctatagttgaa

SEQ ID NO: 186194 - DNA, 157 bp, Homo sapiens
gcacctggctgaggatttcttaagatatcaaaaatacttcccattaaagaaaagactgataaatttgactaaattaaaactaataagttgtgttcatcaattgataccataaagagagcaaaaaggcaaaccacagagtagaagaagatatctgcaa

SEQ ID NO: 186195 - DNA, 410 bp, Homo sapiens
ctgcctcagcctcctgagtagctgggactacaggtgcccaccaccatgcccgactaattttttgtatttttagtagagaaggggtttcaccatgttagccaggatgggctcaatctcctgacctcgtgatccactcgcctcggcctcccaaagtgctgggattacaggcgtgagccaccgcgcccagccttgtttttttaatttttaaagaaaagactcgagtaagtcaggctctcagggaccctgcctgagtccccagtggaaatggttcgtcttagggctgcatcatttgccccagccaacttcttaccaactggagggtctcaaggtgggcccccagaaggtcctgcagggctgggagcccagaggacaaatatggctaatggaatccagcctggactcttacatct

SEQ ID NO: 186196 - DNA, 524 bp, Homo sapiens
atcagaatatgcatctatctctgtgagcagagggatgactttgaatagaatgggaggcagatttgccctgagcagttcccagcttgaaggggcccaagatattttcctttcacaccatcctcagaggaaaccagaaggactattacagggttaaaatcagctgtttatgcttcctataattcttgaacatccacaagtatgagatggctgcagagtcaccagaggtacgtgagccctttagtctgataaacatgccaagagtaccataagaattcacaggtaggatgttttttcagttaatgataataaaaaataagagaacaggtttgcactttgaagaatgtggatttgcaaaggtaagggggaaaacatttagataaatgacaataagcactgaggcaaagaaatattggttatgtttgaggaaggctaagtattaaaaaaaaggtaggtgaagaggagtagtaagaatttcattctttaaaatgcaacagatgtttatgctgctttggttgtatttttag

SEQ ID NO: 186197 - DNA, 272 bp, Homo sapiens
aaactttaaaaatgtctgaatatacatgagggcaagagcctttctttacatcacatagcttcatgttgaatttgaacaccttagtatcatgtatctagtgtgaactcggtttattcaaataaaaggaattttttatttggttttgtgagacagcataatataatttacttggcttcaaggacataaatattccatcacagattaagaagaaaaatgagaagagatgctgaaatgtaagtcccacttcatcttgtttctggctaacctatttg

SEQ ID NO: 186198 - DNA, 139 bp, Homo sapiens
accgcacccagccaagagatcgctttttactgcaatacacaatttattggagagaggaactactcatgtggagatgattagcgtcacagggcattttaagtggatagtcacacttgagctcaccacactagcaacagga

SEQ ID NO: 186199 - DNA, 217 bp, Homo sapiens
agaccaaatgtgaaaaagcagtgagtcctgtggaacattgggatatgtgacatagggaggactggaggggacttggcctctgggggcctctgtttctccaatgagagacaatttgagctgttatctgaacagtcagtcaatactaatcaacttttttaaatgcacacatcttttaacccaacagttctacttttaggagcttattcaacagttacac

SEQ ID NO: 186200 - DNA, 265 bp, Homo sapiens
ggaggtccctcccagagggggttaagcgaaatgccaagagttggatgcatctgacctactgtgcctgtgcacagtccctctctaggacacataccgtgggctcagaaggccgtagcatgtggcaccagctgtctttacagtctgcagtggctgctggttggacagaggtcatgggagcccctctctgctgattggagagccctccctgccgattggagacccctccccactatcaaggactccgtcagtgctgaccatgctgcag

SEQ ID NO: 186201 - DNA, 375 bp, Homo sapiens
agaaaaagtaacagcataaagggaatgaggatatgtgctttaggattcagagaggggaatttcatagcattggtgtggccagtgggatttaaattgagttttgagggatgggtacatttcagattgagaattccaaagactgtgaggtagcaaaaggaagagggagttgatgaagaagggagaaatatttaataaatcatgtttttttcacaactaaaagttgtatactatattttttatagtgttcagcatgatttgatatatgtatacactgaatggttaaatcaagctatttaacatgcattacctcacatacttatttttgcgtggtgagaacacttaaaatctgtcttagcaattttcaaatatacagta

SEQ ID NO: 186202 - DNA, 292 bp, Homo sapiens
aaccgtgtgtctgagaatgaatgtgtttatatcacagtgctggaatagttatgttttaagacttggaaataatgttatgtcagagtgcaatgcatatttacaaagtcccatgcttaataatcagaatgcagggatgtgtatatgtacagccaatacaaatgggataaaatctacatcaacaataacaagtttttaaaaacctacaccaggccccaaataaccatgggctgctgttcatgccagttgtttggaccgagcttctttacctaggcatctcctagacactctcatc

SEQ ID NO: 186203 - DNA, 544 bp, Homo sapiens
tgttcaataaataaacttcgatggaggtgagtagggaaagtgcgcagacctatacatcatgcaggctatatagtcctctcacgtggttttaaaaacacatactctattggagaaagctgtgaacaaaatagtcaagttcaataacgtcttcacattcttcacatacaattggcctgttatcatgctttaactacccttgtttaatacttcaagatactaaaaaactcttcaagatgtttgtgacctgtcctttgaatttagctgaaaatcaaacagaaataaaccttttcagaagcagtttttactttcaaccattttggcattcaagcagcacatttcacctttacagtcatacacatcatgcatacatcatgttttgacaggcctgcaatttatagataaaagttgacatttagaagtaaatataaggagttcaagtgatttgtctgctttggcctccaaaagtgctgaggttacaggtatgagccatcatgcccagccaaaaatttcttcttatagtcaatgtggtgagcaaacatccagc

SEQ ID NO: 186204 - DNA, 287 bp, Homo sapiens
taatgatgaaataataggacatccatacgcaaagaaaagaaagaaaacaaaatgattctagacataaacctcatacccttaacaaaaagtaactcaaaatggatcacagacctaaatttaatatataagactaaaaaacatctagaagaaaacataagagaatatctacatctagatcaccctgaatgatctcacgctttcatcactgaccaaacctgtaattacatctcagtcctttctcctgaatctgaggcctatttctctatctacctaatatatttaatctt

SEQ ID NO: 186205 - DNA, 447 bp, Homo sapiens
taccctctcccatcttggggactctgagttgctctgaggcaggcaggtagcctgtaatatgctcttcaatcaaacacttttattccagggactctcctcaagtgagaacctccccctatcttgcgagggtcagtgatgtccaaggtttgcagcacaagaaaaatactcacagaccatgcctcaaggttttaagtcaaggtctctaaatttcttatgggcaagattctggttgttccaagatgcccaggcagaaataatgtttccaagagaaccaaagagctgcttccaaaacatacatactgccacagatggaaaagacccttccagttcatgcttacagacatgcagcaattaacagccactctctggagaaaatgttaggatacaaccagtaatatacattcactactaggcttttgagaaataagctatgaaaatgccaacctg

SEQ ID NO: 186206 - DNA, 583 bp, Homo sapiens
aggacagttagagaaggggaaagtgtgaccaggctgtctgatcctgttaatgtcgctaccagtgaccagccatcttggttgaggggttttccaggacttgggacttgcattgctaaagctaggaaattccctggccaatggggacaagttgatcccctgttcactacacacagtatccatgtgatgtcattgactgcactcagtaccaggacacaaagaggaatgcccactcgagttactctcagtccagcggggaagctagatgaatagatgatggtgtccttcacctatagcttgaggagtgctctgagagagggggacagtggtcgggtggaccagcgggggcacctgtctggacagcaggctccctgaactgaaacctgaagcccgggaagcagttctccaggtgaagggctttggaaatgggaggaagctcagtcaggaagcttggtcctggtcctgctctgctgtgatcccactcccaggccccaggcgtgttcttttcttgcagactttagattccctcacctataaaatcagggagttggaccagatacccagaactatcaagggggtaccgagc

SEQ ID NO: 186207 - DNA, 849 bp, Homo sapiens
aggacagttagagaaggggaaagtgtgaccaggctgtctgatcctgttaatgtcgctaccagtgaccagccatcttggttgaggggttttccaggacttgggacttgcattgctaaagctaggaaattccctggccaatggggacaagttgatcccctgttcactacacacagtatccatgtgatgtcattgactgcactcagtaccaggacacaaagaggaatgcccactcgagttactctcagtccagcggggaagctagatgaatagatgatggtgtccttcacctatagcttgaggagtgctctgagagagggggacagtggtcgggtggaccagcgggggcacctgtctggacagcaggctccctgaactgaaacctgaagcccgggaagcagttctccaggtgaagggctttggaaatgggaggaagctcagtcaggaagcttggtcctggtcctgctctgctgtgatcccactcccaggccccaggcgtgttcttttcttgcagactttagattccctcacctataaaatcagggagttggaccagatacccagaaataatattctctatctctgcaaatgtcacattttcaagtaaatagtgacatacctttaaaagtgatacatccttacactggggaagtatttgataatcagttctccattgcttcagaaacatcatttttatcttgctcatctattagtgagctcctgtccatgtctccacttaaaaaagggtggggctggagccaggcacagtggctcacacctgtaatcacagcgcttcgggcggctgaggttggcagatcttttgagtccaggagttcaataccagcctggccg

SEQ ID NO: 186208 - DNA, 383 bp, Homo sapiens
gagaagttggcacaaaggagttatgggacaaaaggtccaagataggcagaaaagaaaatgttgccagttgatggggaagaaaggaagtcagagggctcagacactgtgggggacagaacatctccatgtgcactctcatctcttgtagtcagcaacaggtttccacagggaaggccctacatcatctgctaccctgaaagatctggaggtaagaggctctgggcagaggtgcagtgacccttcgggtcaaccctccaacctcctcctccaggtgggactgggtgcccctctgccagctgagacagcccacacaccccagccctaatgattgttctctctacctctccccccactcctgctccacctcctcctctctgcatgca

SEQ ID NO: 186209 - DNA, 416 bp, Homo sapiens
ggaaggcagtggacaaggctggccatcaggccccagaagaggccctgagcagttagtgatattgcttgtgttgggtgccctgggtaggctgagggctgaggggtagtgtgcaagggggatggaggcagcttgcctgctcgattatttccttactggagcagcccatgcgaccagttgcactgccagggtcctatgcaagattcatcagaaatggagtcttagctggcagaatgtggccatgttcctgatgtggctgctgtggcctggcttcccccaaagtggtgtgggcgctgagggttccccatggctctgttgcctgggctttgtgctgcagccttaatgcagagggagtgtagtggcacatggagagcagaagccactcgtagcccagagcccctctcactaggagaggccag

SEQ ID NO: 186210 - DNA, 1072 bp, Homo sapiens
  misc_feature (9)..(9): n is a, c, g, or t
  misc_feature (11)..(11): n is a, c, g, or t
  misc_feature (17)..(17): n is a, c, g, or t
  misc_feature (1058)..(1058): n is a, c, g, or t
cacattatntnagatanaaataaacaggttgttgggggtagaaaagtttggatatcagatcagaaaagtttggatatctcagctcagagccacgatgagagtggggagggagcccgcgcttctcaagctcaaatgcctaggagtcctttggagatggcgttcagatgcagattcttgttccatagatctggctggagcccaaagttctgcagctggcgggctgattcagaaaacatgagttggtgcttttcctctttttgccgccgtactccattgagagtcttagtcatggagggaaacccgaaaaccaccggtgtccgggacagatactctgacgcattctcccggaacaccctggggactgcgagaaagcccctgctggctcactcgtttgctgggatcagttcccatcaggcatgcggctgtgcttcttggtatcgatttgcttcttggtcccatggcttctgcagcccacgtcgggagggcaaggtgtggtgcagcctgagagaagcatgctcctttgcaggaaggagagggaggcgcacaggcgggccttttggagcagaggaggcagaggagtccaagctgggtgcagttcctctgctgcagccctgagctgggcagacaggacacttcgctggcctttcctggcctcatacttgtcactcggtgacactgcgaccagtgtgagcaaacgttcagaaagcacatttaaacactgttacttaaaattgcaacttcacagggccagtattctttttaccatgttccaaatgaggaaaccggggtgctgaatgattaagtgacttatccaagaccacagggcttgcaaatggcaagtgggaggattgtttgagcccaggaatctgagaccagcctgagcaacatgatgagaccccatctctacaaaaaattaaaacattagctgggtgtggtggcgcatacctgtggttccagctacttgggaggctcaggcaggaggattgcttgagcccagtaggtcgaggctgcagtgagctgtgattgtgccactgcactccagcctgggccacagaacnagacttcatctcag

SEQ ID NO: 186211 - DNA, 368 bp, Homo sapiens
ctgttacggatttctagctttatgccattgggatgcaaaaattttctttctataattcaattctctaatatttgttaagatctgttttgtggcctaacatatgacatatactggagaatgttccacccacatttcagaagaacaggtacacttctgctgttggataggatgttctgggtatatctgttagatccagttgctccaaagtgtgattcaaatctaatgtttcttaatttattatctttctaaatgatctttccatggttgaaattggagtattgaggtctcctactattatagtattgcagtatatttttctcatgagattatttaataattgctttatgaatttaggtcttgtgaccttg

SEQ ID NO: 186212 - DNA, 663 bp, Homo sapiens
caacaaaggcaggaaagccagtgagtcccaaatgaatggtcatgacccttggggtggagatggagaaaacattgaggagtggggtaacaggaagaaacttcctagaggaggccagacttcaccagagatgttatttggatttgggaagagtgaaggagcctttcaattgaggagaagggcttgagcagaggcacagaagtagaaaatcttatggtatgtttgtgggcttgagcaggtgtgttttttgtgcagtctcagaaataaaaccctaaaggcaggctgggaccctgctgaagaggatcctgaattctaagccaagggatgggcaaagatggtcacagaaggctttgaaatagagaagtgacatggtaatagtgctgctttggggagatgaatatgtcagccatgtgcagagtagtgcagagtgagaagaggtgaggctggaagctggagaacacttaggaaacaagcacagtactcctgagagaaggtggtaagtgtctgtctagggaggtaaccatggaatggaaagaaagctataaaaagaattatgggtgattccaaatatatgacattttgaactaggcaaaactgtgtagacagtaaaaggatcggtggttactggggttaggaaggaggaaaggatgaataggcagaacacag

SEQ ID NO: 186213 - DNA, 305 bp, Homo sapiens
ccattgccaagtgtgtgacatatcatgtggtcttctccttcagaggccagatacagaatgcaccattacccagtagagagctcctggagaagtttctgttccaggtgcccaaagagcatagtgttcattccagtgtgcaactacttcaaactgacagggctcatggctctaggaagcagtcccaaatctttatcttcacatactatgggctacttccatgcctccgtaactgatatgtcctttcagtagcagccaagcttgttgtgcggccctaaacacacatgcatgagaggtcgggagcggtg

SEQ ID NO: 186214 - DNA, 162 bp, Homo sapiens
tggtggtggtgaaatgatgaatgcagttggtggtgatgacctattaatgatagtagcaaagacaatgttgttgatggagatgacaacattgatggaagtggtgatggaagagttcgttgttggtgttgatggtgatgacagtggcaattgaggtagtgatgg

SEQ ID NO: 186215 - DNA, 315 bp, Homo sapiens
ggaaaaaaaaacaacttatataaacgaagagctatattatgtacatggatttgaaaactcaatattcttaagacattaattctccccaaattgattcataagttcaatgcaatcccaaccaaactctcaatggatttttgaggatatcaaaaagttgattctataatcaatattaaaggaaaaggaactagaatagctaaaggtcaggaggtatgtgggtgtgagaaaaactaacactgctaaacgtcaatttcttcaaatataaaatgtggataacataacctatgatcttttaaggatgttgtaagaattaga

SEQ ID NO: 186216 - DNA, 318 bp, Homo sapiens
cacatcagcccggcctctgcccttccctgcttctgcccctctccaccggcctccatcaccactactgcccaggaccagtccacatcaaccatggggagacaggacatagctgggggcaactgctgaagagaaggaccagtgcatttggcctccactttctctctctccctttatcctccctttccttttcatggaaccagaggcacactcatgttgccccttacttcaccttccctgacctccactcacctccaattcacaaatcacgtcagacttcagctggctgtgttgtgcggaaggcagcggagacagagctag

SEQ ID NO: 186217 - DNA, 297 bp, Homo sapiens
ttagccgtacctaaagcaaggccgaccccaggatttgctctctgacccagtagttctgtgcctcctcccaggacagcagtgggctcagcatggtcttctttgtcatcagcttcaggcacaggcgttttcaggaaacaatcaccttgctccacactcagagttttggtcatggtgcacccccacatgctcccttgtccctgtgctcagtaaaccgctttttaaaaacgaaaatgaaaaacacagaaacagcacaggtagaaaataccatcatatgttttcactgaaggcaaaaaaaga

SEQ ID NO: 186218 - DNA, 276 bp, Homo sapiens
agtgtttgctgccacagggaaggtggtcctgtcctctgctcccagtgttataaaatgtgtcctgctacattaagtgcccatgtccactctgattccagggataaggatacaactaagctaattttcaaaaggggagtgtagttcataggatcgcacttgctaacacagtggagcttcactattggcagaacaacagttttcaaacagatcagctattgagaggaggtgattatactcacagcctcctaattttatcaaaggcctatcagccacagt

SEQ ID NO: 186219 - DNA, 287 bp, Homo sapiens
  misc_feature (12)..(12): n is a, c, g, or t
ggatccccacangaggcgatgatgtgaggaagctgaattttattctctgaccaagagaaagtcgccaaagaaatttaagcaagagagtatggtaacatttatgttttaggtgaaacgaaaaagggcaagaagtgaggtcaggtgatcaggtgataagagtaacggtagaaatgaaaagagaacatacttgaaatatattattgagataaagttaacaaaactgagtgggcagcctcaaaaaattaaaagtagaactaccatatgtcttagtccattcctgctgctat

SEQ ID NO: 186220 - DNA, 513 bp, Homo sapiens
actaaggtctggtgaactccaaagccgacatccttctactgggaagagcaacttctctgcctttacttctctccctgtgagagctaaacctgagatgatgccactctatgctgggtgcatagctgccctgtggttgtgggttctctgtgcaaggcaggtctcacccatccccagggcagaacctcgggggtccccgaaagcacctgagatctggcccgcaggtgtcagtgaaacaagtcctggtctgggtccaggagcctcctgaaactcagcctggcttctgatctgccattggccccttcgtgggctaccaggcaggggtttaaacgaggtgagggtgccagtctttgttggggtgcatggttggttttgctctcggggtttgtcttttcccctgcaccatttgtgaaggtctttcgcagccttgaatctttccagaggcggcaggtgtactcatctcttccacctggtggctccccacctccctctgcaaaccactccccacaagaggag

SEQ ID NO: 186221 - DNA, 387 bp, Homo sapiens
aagcaaggggcagaaggctacagagtatggggccactgacatactgctttaagactttcagaataaacgtctgaaggttatgatgccagtgtgtctgcaggaaacttggttaggtgtctgggggaagactgcctctgctctgagcgcacgcagagaagggatgaggacttcagtccaccagcagaatcagagcactgccatctctgcctgcctgaacagaccacacccaaaaattaaaatgcagggtgaattcacggctcaccagctttctgacctggaggttcagaggatccctggggaagcatccgcatgggcacaggtgggaggacctgctcaacgtgggcgctattctgcatcgttttttcttactctgtatgggggatctcg

SEQ ID NO: 186222 - DNA, 166 bp, Homo sapiens
gttgaccttcctctataggtttgctgtggggaggagtaaaacaatcctaaccacttgaataggatttattattcaatgataaaatcttaccataggaattctgtatggaggacataaagttaaggacacagctatagcttagtaagctaatcagcaaagcctttgt

SEQ ID NO: 186223 - DNA, 345 bp, Homo sapiens
ataatgacctacaatggatatatcgggatcgcattttcttttcttggtggggctgtctatgaagtactagtctaaatgcaattgattgcatatagactcaggattttacggacttttaaagtcatttagaccaattatccattagattcatggctcatctctctcctcactcccattttccacggagtcttataggtagttagtgggggagctggagttagaatccagttatcactactcctacttaattctaccctgacttctctaatcacagaaaacagtgcccttgccttctgagcacttgcttttttactggggaagcgagatacacctataccaattaaa

SEQ ID NO: 186224 - DNA, 799 bp, Homo sapiens
aataataataataaaccacatcacacccaccacaaaccagctgtcagtgtgaaaataaagccaaatagcttaacatttctaaagactagctggggccaggcatgatgggtcaggcctggaatcccagcacttagggaggccaaggcgagaggatcacttgaggtcaggagttcaagaccagcctggccaacatggtgaaaccctgtctctactaaaaatacaaaaataagccaggtgttgtggcgggctcccataatcctgtaatctacttgggaggctgaggtgggagaatcgcttgaacccaggaggcggaggttgcatgaactgagatcgtgcactccagcctaggcaacggagcaagactgtctaaaagacagtcttgtcttttagctggagaatcctgccaggaaaagaccctcagccgccaagtgctctgctcactcgaagctggaagatgcggctctagagacgcatcaggaccaagccacgactcccaacttggagaaatcaacggggaaagagacggagacaaagaagaaccatctcactgggagaggcgatgctgtttgacacatcgtccctgtacctcccaaagccactgtcctcccacacctgggcaacagtggcctcaaccccaggcccagccctcctgcaggaaggaagaggactgaatggagggcgtggcaggatgaaaggacgtggcctcctcaaacccattggtaaagggcctctggggccacctggctaagaggggctggcagaccaggaagtggcctcctcccgggagttgagccagagc

SEQ ID NO: 186225 - DNA, 383 bp, Homo sapiens
caatatgacacttcaggaatatctaattcttttacagtttatttgggctatattagcaaactttaaatacagatgctgtcttgatacaacaagcagatgcatctgagacagggcactgtaaagtaggatatttttgtagagggccagagggttgatctgcatcatccttagcaaatggaatttgaaaccatatggctgaatgaagaaagactgttggcaaaaaatcagtagcgcataaagcagcagtggaaaatgaccacaggatgggaagtatgagcagtgtgtttcagagggttgggtgactggactatgcatgggatggccttctcaaagcgggtggacaaccccaacggccagtccctccgtacctttccattttgcac

SEQ ID NO: 186226 - DNA, 486 bp, Homo sapiens
ctgacctcccgcctccctcctacaaggatgcccgtgatgaccttgggccacccagatgaccaggatggtccccacctggaggccccttgctcagtcccatctgcacaggccctactgccgtgggagaggcacatagcaggctccggggaccaggacgggggtgcctcccaggacctctttcccaggctgagcgtttcatagcaggctccggggaccaggatgggggtacctcccagggcctctttcccgggctgcatgtttctttcctagtccgactcctgtcttctaacactggttttggtgtcttttgttacacaactgctttaacttcttatgtaactgaagacgtccatcttgtcctttttgggattagaatttggggtagaaagtcttttcctccaccggaattatacaactattccatttttcttcttttaaactttttttgcaatttagcggatttatctgcacagaatttattgtgtc

SEQ ID NO: 186227 - DNA, 177 bp, Homo sapiens
aaacagctctgttggaataatgcagcgcctgagagatggggtataatatggttaaatgcttttacagttccccattaaagtaagtggatggaaattcataaaatattgatagcatttgaaatgtgttcattcatagctctgcccagaatctcaagtggtgaaccacgacgacgacga

SEQ ID NO: 186228 - DNA, 273 bp, Homo sapiens
ttacaaagggcttagttgagagtgcacgatttgtgagtcctcttcaacttggtgtttaaggagagcgggggtgagctcagtgaatgcggtttagcaggagagcatttgaatcccacagaggagccagcctatgccctagttctaaggcgcctctggtcctgtgtgaccgcgcccgggaggcaacagctctgagctcagtttcctcctcagcaaaatgtagccaatgacggcgttgtgaagcgtgaatgagatcaggtctatgaacgtcacttt

SEQ ID NO: 186229 - DNA, 550 bp, Homo sapiens
acattaaaaggattctctcccatgatcaaatgggatttatccctgagatacacaaaagactcaacatacacaaatcaataaatgtggtacatcacattaacaaaatgaagtataaaaaccatgtgatcatgtcactagatgcaggaaaagcatttgataaaattcaacattcttttattataaaaagccaccaaattatgtatagaaggaatgtgcctcatcacaataaaaaccatgtaagagaagcctacagctaataatatactcaatggtgaaaaagctgaaagctttttctcttaaaatctgaaacaaggtaaggatgcccattctcaccacttctattcagatagcactagaattcctttccagagcagacagccaagagaaagaaataaaaggcacacaaataggaaaggaagaagtaacattgtgaatgtttgctgacaacacaatgttatatgtagaaaactctacagactccaccaaagagctatttgaactaataaagttgcaggatacaaaatcaacacagagagcagtagcacttctg

SEQ ID NO: 186230 - DNA, 471 bp, Homo sapiens
tcctgcttatggagtaaacatatgctgtgtacacaataacataaactatatagtattgaatttaaatcacatttcttacaaatatatataaatttctgaggaatagaactaattccatgtgcagcatctatctgctgacaagtgtgagagtttcctgatgaaatgacctgctcgtcacttccatggatataggtctacaactttgttggcttgaaggctcctcatcctcacacgactggaggtaaatgtacgtaagtaattcaggaaattcttaaccaaatttactcatgtataatgttccagaaaatttgccacatcaaagaaatgttataaaatacataaatattgtctttatcagtggctcattgacaaaatagatcttcactctggattcctaagtcttatattaaaaaattaatgtgagatatctttgtaaattttctttacacaaaggttcatcacaaccataaa

SEQ ID NO: 186231 - DNA, 234 bp, Homo sapiens
tgactcagaggatcccgtcaatttctacacgatggtctgagaatatatttagggatttgtgagttaatcaacctttgggagtctggctgtttttaacaacatatggatgtctgggctgtagattggcagttctctgtgctgttgtctggggaggaagaggagaggatgttgtgtctgatgtacaggcttgtcctgcagaacagggcttcttgctggctgaacccagtgtatttg

SEQ ID NO: 186232 - DNA, 317 bp, Homo sapiens
taaattaagttctttagtgatctgtcttacatgggtaaggcacaaagaggagtgagttaaatatctgtgcagtcatcattttgtccttggtatttgagtggaaactagtggggaattcctacatatgtacttgtgcaggacatggttatgcacatcatacttgctatttcctggttctagatatcagcattaggtaaagtagtgccctgtaaggcagtaacttctgtatctggttgtgtacctccttctgtcaccaatcttgcatacccatgataaggagccgggttattaaatccaacttggtttcaaatcgtttt

SEQ ID NO: 186233 - DNA, 165 bp, Homo sapiens
cctaaagcccttggaacttagacatcctgtgatttcacagaatccacaccattttttcgtccctccaaagcttgagccaaaaccatcaatttaaaaaaaaaaaaaaaaaaaccctcttcctcacctccgtaggcttagcacatggcagtgttacacagaagtttt

SEQ ID NO: 186234 - DNA, 362 bp, Homo sapiens
ctcgattttaaggattagctaaattcatgtgaccattattatgtcttccatttgctaaaattgagtcccctaaatatagcctggtacagagaaggcacaccaagacagaactcgtaattgaggagagttttgagaatgcagttgtatagtttggtaattgggaacagaaaccttggaacaaacaggttaaatgccagctccattgcttactgtgtaactccgggccaattgctaactatccctaattctcaatttcctcatttttagaattggaatattaataatcctgtttatagggctttcaagatcaacattaaataggatagttgtgtaaaacctttaatgcaatgcctgcctccagt

SEQ ID NO: 186235 - DNA, 279 bp, Homo sapiens
ctcaccttcctcattctagtaatggaactaatccctaactggtgggataggggtacaaggattccatgaggtgatgtgcacccagtgcactgtaggtactcactccaagttatttctattccttttccaccttgaccagggctgagaccctcttccatcccatagctccctcctctgagtgttattagctgtgaacccaggtccctaaatggcctaaaggtcctaggtgtttgtgaacagtaaagaaatagtctttactttaccttgacctcatgctgt

SEQ ID NO: 186236 - DNA, 492 bp, Homo sapiens
agtgtgccaccaccccaactaatttttactttttatggagatggagtcataccatgttgcccaggctggcctcacactcctgggctcaatcagttctcccacctcggcctctcaaaatgccgaaattgcaggtgtttgccattgcacccagcgaatgcccaccttttatagagattccttttctggctttatccttacctttaagctgccaccaatcagcatctctgttcacagggtcagaggatggggtcatctgtccagaatgtgggtaatgcagtgccctgatgaagtaccatcattgtttccttcttgtagttgtgattagtatataacttggaacttctctagtgtggccttgaaaagcctttcatgtcttaaaagagggtttttttgtcagtctgttttactttcaacctgatcaaaattctttagaatttatcatcatccagtgacatctactcgctttgcaacagtgctgttgtttcattttat

SEQ ID NO: 186237 - DNA, 584 bp, Homo sapiens
ataccaaggagcacaattgctggatcatatggtaagagcttatttatttttttgagagactaccaagctgccttccaaagtggatgtaccattttgcattcccaccagcagtgaatgagagttcctgctgctccatattcttacaaacatgtagtattgtcaaatgttttggattttaaaaccaaaatccattttcatagatgtgtagtggtatcccgttttaatttgcaattacctaatgacttgatgttctgtgtcttttcagatgcttatttgccgtactgtttatcttctttggtgaggtgtctcttcaggtcttttgcccatttttaatctggttgttatttttcttgttgagtttaagaattctctgtcctttgtcagatctatcttttgcaaatattttctcctagtctgtggcttatcctctgattctcttggcattgtctttcacagagtagacattttatattttaatgaagtccagactatcaattatgttctcatggatcatgcctttgatgttatatctaaaaagttctcgccatacccaaagtcatctagattttctcctgttatcttct

SEQ ID NO: 186238 - DNA, 558 bp, Homo sapiens
tttttttttgagatagagtctcactctgtcacccaggctggagtacagtggtacaatctcaactcactacaatctccgcctcccaggctcaagcaattctcgtgtctcagcctcccaagttgctgggactatggacgtgcaccaccttgcccgactaatttttgtatttttgatagagtcagagtttcaccatgttggcaggctggtctcgaactcctggcctcaagtgatccacctgccttggcctcccaaagtgctgggattacaggtgtgagccaccacactcagccagcccccttactttccttggagaccatatactgtggcttgtgccaaagtggtacagcatggatttccagctcccctatctacttgctgcgggaccctagatatagctttctgtgcctatttcctcaattgcataggaatagcacctatcgcatagggtagctgtgaagatgacgtgagttaacataatatttagagcagtgcttggtacctaataagctctatataagtgtttgctattatattattattatcactgccaccaccgct

SEQ ID NO: 186239 - DNA, 618 bp, Homo sapiens
aagtggagtttagagggaaactgtacacaaaatacctaaatctgaaaattacaattcagtttaatagcatttagtgctcacctacaaatgcattcattacattttactaactaaagaggattcaaaaatgtgcatctttaggaagctcattattagggaggcaagatttatatatataacacaagacaaaaaattcaaacatgacagaccataataaataaatacatggttcagaaggtaaatgctacatgataaagttcaatttttggcatatttagacagttcgttagcagctgataactagctttataaaaccagagatttccacattgatttccggattactttgaaacaattgtaattaatcttgatctttgcagaaaataaactccttaggggctattaattgatgctcacatctcaaaagagggaagaactctaattttatcctataggaaagagtatgcccatgtggaggtatttttaccttgaagaattgtacacctttattatatgtctcagcatgtgataatggtaagaaagtttgtaggtctataaaaaacaaatgtatctgtccacaatatctttgtaagagagagggcaatgggaaggacagca

SEQ ID NO: 186240 - DNA, 683 bp, Homo sapiens
  misc_feature (614)..(614): n is a, c, g, or t
aactctatgaacactgagtctcatttctatatctgaaaacttagtacatgaatatcttccttggggaattaccatgatgtctgaaagaacatattctagtcaggagctagcatatggtaggtgctcagttcattcattcattcagcaaatattcattaagagcctcctctgtgccagacactgttccaggcactgagaatacagtagacaacaaaaccacaaaaatccctgccattaagtagcttatatgttttgggggagagagaaaataaacatgataaatatgtaaatagtgtgtaagggagtgattagtgctaagaagaaaactaaaccaggaaaggaaaacataaaatgttggcggaggctaggtgtggtggctcacacctataatcctagcactttgggaggctgcagctggaggattgcttgagcccaagaatttgaaaccagcctgggcaacataggcagaaccctgtatctacaacaaataattttttaaaaattcttgattggtgtatttgttttcctgagacttctataactaattgctacaagcatgctagcttaaattaacagatttattctgttggttcccaaagtcattggtggcaggnttggttccttctggaggatctgagggagagagaatcttcccgtgactcaggtggtgtgggggatctcta

SEQ ID NO: 186241 - DNA, 309 bp, Homo sapiens
ccgcagattgaaatgtgtttgagattgaagaagcatttcaagagggaaaatcaagggtgtggccaagtgaccatttgataaggagattgggatgaattaaatgaaaccagaggctactcatcaggataataaaagaatgatcccaaaggcacttggaagagcctctgtactgcccctccaatcacaggcccagagtgccaaggcctgggggaagaaaataggttgccaaaagagaatgagaggataaaaagggaaaccaggagaatggaaaatgattggtcaaccgtgctgagaactgctaaatggcca

SEQ ID NO: 186242 - DNA, 189 bp, Homo sapiens
catgtttttcttcccacgtttcctgatcctatttcaaagcatatgcaaagtctccctgcaaggaagtccaggatgtagccaaaagttccaaacccacatcctaccctgctgttcatctgtcctgagaacttggacaacctcctgaactctaagcctcagtttcctctgctgtaagatgggataacatga

SEQ ID NO: 186243 - DNA, 167 bp, Homo sapiens
tgatgtgggaggatttcttctttcattgttgggtgactaatacaacaatctttatttatatattagtcatgggattctgtgagtattttaggaaagaatagggacctttcattcaacacccaaagtctctgtttttaaactcttcagaaggccctgggaggaaaaca

SEQ ID NO: 186244 - DNA, 159 bp, Homo sapiens
ctgtctgtttctctctctctctctctctctctctctctctctgtctctgtctttctctgtctgtccctttctctgtctgtctgcctctctctttctctttctgtgtctctctgtctctctctctgtgcctatcttctgtcttactctctttctctgcct

SEQ ID NO: 186245 - DNA, 614 bp, Homo sapiens
cgcccatttaaagcatagagttcaacagcttttagtcaattcacagagttgtgcaacattaccatgattaattttaaaacgttttcaccacccccaaaagaaattccacacccattaacagtcattcctcattttcctccaaagcccccaggtatctagatacctactaatctgctttctgtctctatagatttgcctattctagactttcatagaaatggaatcctacaatatgtagtaggaagattttaaataatagattccatttcatcagtaggtataagactataaagattttctattcttcttgtatctattttgataagttgcatttttcaataattttgtcaatttcctctaagttgtcaatattattggcataaagttgtaaataatattttatgtttttaatttctgtataatgttttgtgatgtcctcttttacattcatgatattgatcattcatatttatcttcttttttcctggtctttttttttctttttttgagacagggtaccattctgtcacccaggctggagtgcagttgcgcaatctcagctcactgcaatctccaccgctcagggtcaaatgattctcccacctcaacctcct

SEQ ID NO: 186246 - DNA, 736 bp, Homo sapiens
  misc_feature (475)..(475): n is a, c, g, or t
tttaaatttagcaagacctgggttcaaatcttgactccaggacacactggtttgaacaagtttgacttcatgaataaacgaaggattgtgctgagaatagatgagatgacatacatcatagttctggtttggtgtctgacacataatagaccaccaggaaattataggtgttaatagacagaaaaatattttcatcttacatggcttatattaaaaaacaagatttcaagaagatggttggctcctgtcttaatgttcagaaaggcagaggctttgctctcgtttccctgagtcccatctgtgctatccaggagccactttggatactttagatatttggtgatcacaacacagaagtttttaaatttaccaattataacaattcagtccaacaagagtgaaactcagtcctcaataaataaataaataaataaagcaaattctcatgaagcaaatggtaataatcttaatttantggaagggccacaagaaagggggaaaagaacaactaaaaaaaaactttttctaccaacattaacttgtcctaacaatcaacttatttttgctttaatggttcctcctcttctcaaatggggctatgaaaagcttaattaaattaagataatgagctgatggcttctgcctaaatatctttaaattcaaagtacagtgtttttgtatttccttaaaattatagcttttagcaaagtattaactggataaccctgtggaagta

SEQ ID NO: 186247 - DNA, 246 bp, Homo sapiens
gagaggcattccttgctgtctggccaaaaatatatcaacatcgtttattgtgactgttgcatattttatgataggagtagacactgtagaccacaaagtgtcctatctgatacacagggatcctcagggcaccacctcgcactttctttttgttttttgaggtatactcccatgtatacctaaatccatgcatacttaagtcctgtagttggccctgcagaacctgtgtatacgaaaagttggttt

SEQ ID NO: 186248 - DNA, 427 bp, Homo sapiens
gctaggaaaagttaagttcacaactgctttgcaactaacatatggtggatctcagactcaatccccaagttattttctctacttatttgcatatagattccttagcctaaagtcacgatccagcagactgggctcagctttggcctcatcctatcattccccacccctgtgagctggtagtctgagttttattaatcaacaaagcgttttgcctttgtccatgcactcctgttgcctagaaagctctctgttctctccgtgtgaaaacctaagtctttcaaagctgaactcataaactgcttttgtcagcataatctctctaaacccaatttcccagatcatttgtttttttaaaatatgagaaacttcccagttcagtttctgatcacaaactctgttgctgatgtccttccttccttcagcactt

SEQ ID NO: 186249 - DNA, 508 bp, Homo sapiens
cgctaacaaagatgaaaaggcaacccttcaaaggatctacctgagaccaccctgggtggtgggaacacaaactattcccagccctgtgcaactgatgtccaagaagtgcttggccttctcctttttggtggttctcctcccagccttgaggtgcttcctcttggccacgtgcagaccaggatgcagccaacgcctcaagggggcccttctgcagatctctagagctctctctctaacctgctccctcctctcctatgttttcctccacaaattctagctgtcttgtcctccccaatttctcctgtatcatcactttagtgaagccagtgggttctgtttgacttctctcttcctgccctgaaacatggaaactgcctctcgagacaaactaaggctgtttgtgtcagaaaggttttattgtaatgcgtccacgtccattcacttacatacttaggatgaaagcaggcacagagcatagcagagtagttgtgacattaacagcatccgg

SEQ ID NO: 186250 - DNA, 443 bp, Homo sapiens
gttcacagagaccccctttcacttccatttgatttttttcctttcatccagctccatcttatacatgcatgaaacaagtcttattgataaggctttctcagtttatcacagccttttttacatttcctttcccccatagccattatcttggatccagatattggagaacctctatattgcccagacattttctttttcctttctcctccacaaattctttttataaaagctagttatctttaaaaatgcacatgtaactgtctctctctctcagcttccagtgatttgtaattacccttttgagaaagtcgagcgctctcagcatggcttagaatatcttcccagtttgaccgctgccttccccagcctcatctcccatgtctctctttctttgtgctccagttacattcctatgtcagtttctcagaaactccattctcttt

SEQ ID NO: 186251 - DNA, 441 bp, Homo sapiens
cattcattgcccacctcagctacctgtagcccccacctccttaccataggagatgacatcttcccagtttttccaggcgagcaacttcgagtagctgaccgccctctttacaaacaggatggaggctacgcatgtgttttctctgtggggcaaggccagattaagcaaagaaaacacagcagctccttccccctccccccaggaaaaaccctgtccggtcaatagcagaactaaagagctggtgcacactttcacttcccactcgagtgcctgaggacccggcttctcctaggcgtccagcaaagcccagacttaaaggtggcaggtgctgtcctctcaccctgcttcgggtgaggacgggtctccaactgagctccaatgaacaagacgaggctgggctggctccaggaggcaatttctggctgggaggtggggaagaaa

SEQ ID NO: 186252 - DNA, 173 bp, Homo sapiens
gacaggctgcgctggggtcagggtggaagcccgcggggccagcggcgttgagggaaggttctccggaagcagccgctgttctggcttggcgcaagtgcgtgtggacgacagcaggatttcctgcccagggacatctggataagaggcccaaggtccccaggagcccccaggtg

SEQ ID NO: 186253 - DNA, 280 bp, Homo sapiens
ccaaggagaagcagcctatggaccgctgaaggccagagacagacagcagggctcaccagacattctccagaaagtgccaggcggtaactgttttaggatttgcagttcatagtctctctgtcactactactcacctctatcattctagcacaaaagcagctacagacatgagtaaaccaatgagagtggctatgttccagtaacactttcaatcttattagatgccaaaattggaattttacatagttttcatgtatcacaaaatagtttcttctttggg

SEQ ID NO: 186254 - DNA, 406 bp, Homo sapiens
acctcccattgcctcaaaggctgaccttcagctgttatcccccaccatctctgaccctgcctcttccctcccaaagctcccatgaccccagtgcttacttctggatgaccctattgatttctattatatgtttatgtgttgtatcttgaggaaagggatgtgctttctactgtctttgaatcaccatccccgcaatgagagaaaatctctcattgcgctcggggttgagtcgcttgaggatctgggccaacacgttcactgtctgctcgctgctcagccctgtcttcttggtctggaactttttcagcaggtccttagtggtcatgggcttccgtgtcaggtagcggcgcacggcatcctcagtcacctgcacgtcgcctctgttgggtgttgtcttgcctgatgg

SEQ ID NO: 186255 - DNA, 457 bp, Homo sapiens
gctgctctgaggtacgaagctgaaggagaaaataaacatgaatgatttctagctgatgggtttttaacacatggaatccttgcttaggtggtacatgtcctgccattagacaaatgctttaatagagacagcaaggtatcagaactacaaaaattgagctaaacttgatctcacagaccaattagtgtgacaagataaaaatcagaaatgagtaaaggagtattgcagaaaaatcaatctggcaacagtatacaggatgcataggactgagaagcaacattgtaagagtataagtgggaaataatttaaaagttgactattttatagtcatggtcaagaagaggagctattttgaataaaaaaactaaagatatgaagtaacccaacatatgtctgaatgaaccaaccgtcagtcttttttttaaagatggagtctccttcaggacgggtagagtgc

SEQ ID NO: 186256 - DNA, 323 bp, Homo sapiens
aagttctcctccaccattgaactgcttttgctgctttgtcaaaaactaattggccatatatgtgggcatatttctgggttctctattctgctacattgatctatgtgtctatctttctaccagtaccacattgtcttgattgctgtaactatatagtcagccttaatatcagccagcgattcctcccactttaatctttgtcaaaaattgagcaaggcctttcactttccatattagttttggaataagcttgtctatgtctacagagaaacttgttttctttctttctcaaaacttgagattttgataggaattttgttaaa

SEQ ID NO: 186257 - DNA, 524 bp, Homo sapiens
taggaaaaggtaaggtttatggaataagtgggtcttaaagctgtggacaaatgtaaataaatagaatgggccagggagggcatttcaatgtgggaaccatgaaaacagaagaagacaggacagggttcagatcagtgggcagtaaaagtctacataagcgaggaactggaagaaaaatgtggacaaataaaatgggttcagattatatgtggccttgaatgccaatccctgtagcttggatttggtcctataaataagtagtcactcaagagggctctgggatgcagggagaccttgtgaaagtgaagtgcagggaagatgaggtaagcaggacctactcatgagattccggtggccaaaaggcaggaggtagggaaaccagtgtggaaactagtacagggttttcacacatcaaaccatggttatttaacattgtcttaaaaatttgtaatgcatgggagttctcagacttatttctaaatagcaagtggtggaagaagagagtaggtagaagagttccaggc

SEQ ID NO: 186258 - DNA, 145 bp, Homo sapiens
tctgtcccctcatcactgtgtacccttatcttttcccagagcataaatgaacataagagggagaattcctcacgtagctacagggaacctcacagaatccagtaggagttatggggctggatatgggagttgttagaagcagaga

SEQ ID NO: 186259 - DNA, 366 bp, Homo sapiens
gcctgagcatacgggcacatgcaagccgcttcctcctcctgcctccctgtaccaaatgtcccgcctgggaggcagaatgcagtttacagaccttgaaaccaagtgcaaagtgtctacaattagaggagaggaaagcattgaggaggaaataataaatcaagtattgaagatctcaacaacttagagaacaagataccagtcttaagtgaaaagaacacatttggcattaagtatctcaggaaacatgtccttcaggtccattgactcagaaacatctctattttcaaagaggcatttagtcagctccttccctcatctaactcaatttcctacttccctccatcatagaccatgcgttctttggtt

SEQ ID NO: 186260 - DNA, 307 bp, Homo sapiens
agatgctgtaagtaagaaactggctcgtcaaccaaaagagaagtcatctgacaataacaagttggcacttttcctttacccccagtttctaataggttatcttggcaatgtggctggggacagcttcttgcagcaccacttccagggggtatataaactgccactccaaatccattgcccacatcttcctcaggtcagagaaacaatttgggctgagtgtctacttcctctgcatagccatgctcaggtaagatgatcccagctcgaagtcaggggaaagtcctaattagtctataagctaatcagg

SEQ ID NO: 186261 - DNA, 374 bp, Homo sapiens
tgggcaataagagtgaaactccgtcaaaaaaaaagggtacctctaggacttggggtgcaagagcggctacgatcaggatggcttagtaaagggggattcctatcccctccttatcctccctgagcgaccacccctcccccacaccagcaaaagtccagaggtttatttcccagaattcaggcagctgactgcaaagacccctgccttcaactccaagttgactccaagaagactggcagccagaccctcccttgctccctgggtaacttctctgggaatcaggtcagttcctaaagatactgacatccaaggatcaaggatcactcccattcatgggtctcaagggcaatgaacccctcctctcttactgtcag

SEQ ID NO: 186262 - DNA, 375 bp, Homo sapiens
ccgtatttcctcacaaaagcagagtagggagtgacaaattataggatgagggcccaatggtaggtacacaaaatttaatttcaaaattgtataatttttccttagaacaactacgttatggaaataattttttcatgagacttctgtattttactggataaatttttattctatatcacaatggaatgaagttgaaaaggcttataatattgcatcatccacatttggtcagatattcaaaagaatcataaagagagacaattaatatgagagcttgatcttgctaaagttttcattaaagacctatacactgagtggaagcagaaagatagttcctttaaaaatattgggaatgaaatatttatgctttccagt

SEQ ID NO: 186263 - DNA, 128 bp, Homo sapiens
agtaagcctctcctgttggtgacataatgcttgatttctctccctcatggcatcactgtccacccgttgcacacatcagaatttcagaatcagccttaattcttagttttttctcactcttcctccat

SEQ ID NO: 186264 - DNA, 269 bp, Homo sapiens
tccatgatgctaaaaattattccttcactatgaaccattttcaaacacagcattcattaattgcttgttttttaagggttagttttttaagcataatttattatcgaatgactagagagggcattagtgttctacttcaccttttctaaatgttttaattaaaaatctaccaatatggccaggcttggtgcctcacacctgtaatcccagcagtttgggaggctgaggcgggtggatcacctgagttcaggagttcgagatcagcctgg

SEQ ID NO: 186265 - DNA, 618 bp, Homo sapiens
gccaagaggaaataaaaacattttaaatttaggtttaatatgtaaatactctgagatgtttaggtagtgattttttaagtttatactctagtgagtaaccatatttttgcttactgaaatatcttggattatttagttattttctgcattttgatgttttattacttactaaatagtataaacatggactacctttctaaggaatcattttactagattattagggttatccctaattaacatttgtatttagatcacttgggcacttgctactgctatcaaccaaatggcattggcaatctaacagttacttatgtaggatcaaactgcgatagtgcattgtgttaaaatgtcatgttagtataaatcatgcatatcatagaatattatgttgctatgaattaggaaaaatcatttaattatggaaaagaacacactgaattaccaggataggaaaacctatcttaaataaagacttaactttttttttatacttaaagctcctttttcttcttaaagcttctcttttatgtctctggaaaagctcccttgagtgatgaaattgctgtttgacctttttgtttttgtttcttctaagtccatatattctgtgtcgtg

SEQ ID NO: 186266 - DNA, 656 bp, Homo sapiens
ccctctagctaccaggttcctcagggagtggttgacactccataaaagctgcatttacagctttgacttcattaaactagcaggattgctttatttgccttctaaattttcaggacttttatttaaaatgtttcatcctaaacagaataaaatggaaataaaaggtgcagccttcatcgcatcttataattatttggaaaagcaatctaggatgtcctagagcaaagcttttgttcgcacttccaaaaatgtcccttctgggcagccccttcatgctggctgccgtcagggctaccagtagattgttctttttactccagttttaaacacacagttctcattctcaacctaatgatcagaagcatgtttttcccaggagcacaattaaccagtcacccctctttaccttgaagtttcctcatttctgtaattggaccaaggctgttctcctccaaagtccggcttagctaggaacaccttctcaagctcaggtgccacaaaaggcacagggaatgctgagataagcagaattggctcatgtcctcaaggagcctgcagtctataagcagatatttgtaatatagcatcagaaatgttaagtcacagcttttatagaagtacattggagaagtccctggaccagactgagaaggtaa

SEQ ID NO: 186267 - DNA, 381 bp, Homo sapiens
ggttttatggaatcctggagccccttgcccactctccctcgttttgtcccatctctgcagaatgtctgtagtttgggggcagatccaggactagcgtgacaacagagacgggcagacagacaaacacagccccaaacagggcagccaacagagtcattgcgaataacggtgaaaagagactgcagcccccagcaaataaatatgtgccctttccatttcagatctggagatgtggcctaagaggagaagacagagacttaaagagagcattttgttgagcagacttagatttaccatgcagttgaaactttttgtaagcctggtttgtggaaaaagcaggaaggaaaggaggccagccacttatctggtgtgtttaggaca

SEQ ID NO: 186268 - DNA, 275 bp, Homo sapiens
gggagagcaggggtggtagcaggataagtagaggtgaaattggggagggcatttatgaagaatggagactttttcctctggatacttctggctgacctagagggacttttgagaaaaaagagagattggttgggaatcctaccaggtaatctcatttctcctctttctcggtttcaagaacagctgaagtatccttagaaataaagggtcagcccctctgggcctgagcattccaatcaacctttattgagttctcctttaggataggccccaaa

SEQ ID NO: 186269 - DNA, 620 bp, Homo sapiens
  misc_feature (50)..(50): n is a, c, g, or t
taacgatacatgcaggacctctttcggcttggagaagcggaaattctgtngccagaattccatggctctttaaagctaatcttcactcttttacagctctcagaaggaactctcacgtctggcctttctctgttgtctgttctgctccctgatcttcggcttaagttggggcaatagttccaagaggtttagctgggaccattcagatctgtgtcttatagctgcttcttccaagattacaattcaaagtcccagatgcctccccctgcagaggagaggaaacatctgggctggagctgcacggagagagcccagctgtgtgggacatccctcagggtaggagcctgtgagctgagagctcttcattgcagatgtggttctaaccatcggggtctgggtctcacccatgaggcttcgacaggccccaggcatgtgtgtgcagggaatctgaacagtcagcctgcaggaaagaggctctggggagttatatgtggctggtgtggtggcaagtagagtttgtatggacaccgaaccaaaatagagaaatgcgaaggcagctagacagaaagtgggtggggggaagcattccaaggaacagacctctgcagcaaggagcttgg

SEQ ID NO: 186270 - DNA, 596 bp, Homo sapiens
  misc_feature (50)..(50): n is a, c, g, or t
taacgatacatgcaggacctctttcggcttggagaagcggaaattctgtngccagaattccatggctctttaaagctaatcttcactcttttacagctctcagaaggaactctcacgtctggcctttctctgttgtctgttctgctccctgatcttcggcttaagttggggcaatagttccaagaggtttagctgggaccattcagatctgtgtcttatagctgcttcttccaagattacaattcaaagtcccagatgcctccccctgcagaggagaggaaacatctgggctggagctgcacggagagagcccagctgtgtgggacatccctcagggtaggagcctgtgagctgagagctcttcattgcagatgtggttctaaccatcggggtctgggtctcacccatgaggcttcgacaggccccaggcatgtgtgtgcagggaatctgaacagtcagcctgcaggaaagaggctctggggagttatatgtggctggtgtggtggcaagtagagtagttggcaggcgttagtagttcgcaggagataaatggttcccgtttgaatccttatgctaggtttatacggtagcacagt

SEQ ID NO: 186271 - DNA, 823 bp, Homo sapiens
aatagcataaatattgagttaacctctggaagcaggctttgactttgatattgacctgaccacttaactctctggagactttgacaagtgacatcaatgtctgtctctgtgtttcctgatttatatccacagatagaaagccatctccagatcctagggccattttcaagattcagtgagataaggtgaagcatttgaatgttctccataaatgtcagctgcttttattattactagcattattttttgttttcattattattattaacatagacccgtctaagggcagaaagaaatctgaccaagaatggagtgaaagtcggctgtgaaggttaggactccctgaaaacaaaaaagaaaagtggtaacatcactctgtatccaagggcatggataaggatgattcagaatttttttataacattgatgttaatatacatagagaaatacacacacacacacacgtatatatgtccatggacatcaaaatgaggtataggttaggaagttaccctggaagttagaattgagataattactttgattagcaaaggtttatgttagaaatatgagtggttgaaggcagcgcctttcaccttgatgcctgttgtgtttagcactggatagaaaattgctatttttactgatgactactttaatgcttggttcattcatatgaaataatctttcttttctcctttaataataatgatctctcctgatttcaagttgaaaatgtattaatttaagataacttatgaagcaatgacatatggaagaggagatgggaaattgtttctcaatgggaaagtgtttataaatg

SEQ ID NO: 186272 - DNA, 382 bp, Homo sapiens
tgacagtggccttttcacagccttatggagagagatgctgagagggaagtggtacataaacaaaaagagcaaggaacgaagataatgatcaagttcgaggatgacatataaacctctagatccagctgtgcctgaagccaccacatcaacattgtagaatactgttttgtgaaccaatgtgttcctttttctttctccttccttcctttctttttcttctctccttccttccttcccccttccctctccctcttctccttccttccttccccctttccgttcccttccctctccttccttccttcctctctctttctttcttcctgtgttcccttttctcttttctccctccttccttccttcctttttttctctttttttt

SEQ ID NO: 186273 - DNA, 748 bp, Homo sapiens
tgacctcaagtgatccacccacctcggcctctcaaagtactgggattacaggcgtgagccaccacacccagctcttcctttcttttctccctttcttccttccatccctttctccttttctccctttcttccttccttctttctcttcccctcttccctccttccccttttcttccctccataccccaggaaaaataacttgattggcagtgtagaagaaggggtaggggaggatagaggtgacctctaggcagatggtgcagccaaccctaaggaggattaagaacctgaagagtttggtttgggatgtgccagccttggggaccagtaggacacacagggacagttgtccttgaggcagctgggtccccaggctgaagctcagaggagaagcctgggctgcaaagtaaggcctgggtactggccacatgttgggagcagtggaggtgactccgcctgggatcccaaagacagatgctgagtcagggtttgggtgcaagtcatttattgggaggggttcccaggcagcgcagtgaggaggtcgggaggcagggaagggcctttactgagtgggttgctgctatgggcaactgggactcagtcctgctggcaattctcagaggaatggtggggagcacacctcagaattgtcccagaagcgggaagaaggctggggtatttgtctaccacctcctacccttctttcattgaaggctgttcttagggtcctaactgcttggcacttctg

SEQ ID NO: 186274 - DNA, 367 bp, Homo sapiens
gtggacgaggcgtgaagaggaaggcactgttgatgtagtttgggcaatggatgatgaggcttggactcgggtctgctggtggggatgcacagaaatagatgggctcataatgtactttggagatagcattgacataacttgatgataaactgcaaaaacagaagacagggtaagggagaaggaaaggccaagtcttgagttttttatttgggcccctaggctagtggtagagccatggtctaaaatgaaaaaatctgggggagtaactgattcatgggcaaggaaatggaaggttctattcttaccttgtcatttgccaaaactggcattgtgactaaaaataaagaacacaaaactagaagctcta

SEQ ID NO: 186275 - DNA, 282 bp, Homo sapiens
cccaagctctaaaaagtacagccatatgtgtgataagtgcttagttaagatgaaaaaggcattaaatttgtgagtggaaatcaaacagaaatgtgttctgattgaaagcaattgggtcaatgctacccaagtttcaggcatccactgcgggtcttaaacacatctcctgcagataagggagggctattatataacgtttctttcttttttctttaattataaagcattctccttttttaatataaaaattggccacatatatcactttaggtataaagatat

SEQ ID NO: 186276 - DNA, 370 bp, Homo sapiens
ctttttccttctcaggagaggagttgggggcttctctctttgcatgtcttcctgtcaagtattacctattatgattctggtgaagagcggactgtcttgcatctaaaggtaatgaagaccatctacttcagaagtcttgttaagttctgcgctaaaacatttatctcccatttctgttatacctgtaaaggggagcaaagaatttgtgtcttcagagagaagtccactatcctagtcctttcagcccccttgaggtttggtgcaggcctgcctgggagttccacaaatgggagtgtgctctagggccccctgcctgaaccagtggccagcgactccctttggagagaatatcccggaagaagaaaatgat

SEQ ID NO: 186277 - DNA, 358 bp, Homo sapiens
acataccacatatctgattatattatactattttgtgttctataaaatagaagtgatggtccaaaacagactaatacactaaaaaataagctatgataaagttaatttcttcttcagtcctccaaaaacttcactgctcaagaaactgggtatatttctaatcttttaaacttgttaacatttaattgggattagtagtggaagctgatagtctataaaaataactgattaaactgtgctaagtggctttattatattgtgtttagtttgatactcattttctcttaaatatcttaaaaataactgcttcaattctttaatctccattactataacatacatatttcttttttttttt

SEQ ID NO: 186278 - DNA, 232 bp, Homo sapiens
tgggggaaatgggcaccccccattctacaggctggagatggggttgcttctattttcaaacagctcctcccatccccatgcctttttcccaaggtcataagccctgagcggaagaagaaagctgagaggagtctgacgggtgaacggcagctttcagtggtggcattcagccctttgttgtctctgacttttccagccacagcccacattcccaataacatggcccagctcc

SEQ ID NO: 186279 - DNA, 145 bp, Homo sapiens
agaaaaaagttactcataatccctcttctgtgaataactgctattattatttgtccttttagcttttttagcacatctaatatgcatataatgatatatttaatatatctttttatgttacaaacgtggtgtcatactatacata

SEQ ID NO: 186280 - DNA, 303 bp, Homo sapiens
cacagtgaatactgactacagaatattgataatttgaatagctaagtgttgaacacagaacagtgggattttgcacctaccctaaaatgaaacatctgtgacctgttattggtgaggttatcacaaaggctaagtacctccaacctaaaagtaataggaactaaagtttactttaatgggtgtgatgcagtggtagagttgtgactgatatttggttactatctggttcttccactgacttcaatttagttaatggtaactgagtgactcgagacattctttatgcctaagttgttaacacct

SEQ ID NO: 186281 - DNA, 201 bp, Homo sapiens
aagctttggtcagcagaggaaacaaattttatttccacatttgtcagtcgccttacaagtaatccttttttcccccagaagtaagagaagtctaactttttttcccatgtaacaaggtttgtttgccctctgccactaactctctagtacagtgtttctccacgtgtgatccctgaccaagcttagcatcatttgggagct

SEQ ID NO: 186282 - DNA, 423 bp, Homo sapiens
ccatctcttgaaaaaaaaaaattagccgggcgtggtggtgggcgcctgtagtctcagctgctcaagcggctgaggcaggagaatcgcttgaatccgggaggcggaggtcgcagtgagccaatatcacaccattgcactccagcctagatgacagagcgagactctccaaaaataaaataaaaataaaattttccatgatcccaaaggatagagtatgaaaagaagaaaactagtaactttccagtggggaaacctagcaagcctacctcagccaagagatcaaggtcagcatcatcagttatcactgtcaataatttatcagtcttgttggtatcctatactcctgataagattcacagaagatggctggacgaggtggcttacgcctgtaatcccagcactctgggaggcagaggcgggcag

SEQ ID NO: 186283 - DNA, 392 bp, Homo sapiens
gaagcacctatgttgcactgtcgccaggtaattcgttctgaggaaacttctgggaggtattttgtggcagtagactcagcattggtgtggtcattgactgactgagggggcagggtagaggggcaggagaccatgcacactgtggcactgagcctgcagcaaggagaaaggctgtgccactgacagagaggatcaggaagatcatacttcccagagcagccttccaccagaaataaaggtccaggccctggagttattatgcgcctctcgttgcctcccactgcatcatccctttttgccacatccccatcttggctcctatatcatggctcagctcccagccaaattgactcctgatgcattgcatttgtgcctccaaatcgtttcccttg

SEQ ID NO: 186284 - DNA, 485 bp, Homo sapiens
gcgtgaggcaccgcgcccggcctcctcctcccgttttcaaagtcaccagcgtagcatcctgattcaagatcacattgtcttcttttttttttgtagccaaatctccctctgcctctctcccctggtgacgacaatggctggggtcttgacttgccaaggtaactcgttggggagcagagagtgggatccgcagtgttctggtggctgttgggatctgggcgcgaggaaggagagtggctctcatgattctctgcattctcagtgcagcgtggcccgtactggtcacctgggtatagctttactgaatttcgcagatctggaaacggagaagggactggatctccaaacttggactgccttggactgaccctggcctggaaggtgtgggctcaggactccgagctcaagtcagtctgttcccccaacccctaacccactgcatccgggtgaggagttgggcccgagcgccacagcgcagatagggt

SEQ ID NO: 186285 - DNA, 733 bp, Homo sapiens
agtcacccatggggacggcgaacacccactgcctccagaagattcccagcactctgccagcaaagccatgtggaaaatgctggggcagaggactggggtgcgtgagggtggcgtagagcccaggggtgggttcgtgggaaggtgtgtccacttgtagatttggtggcattgccagatcacacgccccatgggcagtgtggagagacctcccctgccccgcgtgccctccacagctcctgctcctcggcctgaggtgtggatgctggtgtcgcaggtaaactggcgtttctttcacggtcatcgaagcaagagtgcttggtatgcctggaggccgactgcgtttctttttttgggaactcctggagtttcctgctgcccctttgttttaaggaaaaactctcacaccgtgtttctcctcctcccaccacaacagttgtccacacagaaggtgggtgtgaagggtcttccccatgcaccacgcaggggtcgctgctgccttctaattcagttccaacagtatggacccggggtagcgtccgatcgcacgggttgagggctccgtccccaaaactgccctctgacacataccggtaaactgtctgagcctctggaactgaccagttgacttcaagttggggttcccacaaccccgtttgctggcgtggctcacagtgctcagggaaacatgacgtcagcattctcccccggggagtgggggaccctctcaggagag

SEQ ID NO: 186286 - DNA, 695 bp, Homo sapiens
cactgtactccagcctgtgcaaaagagcgagactccgtctcaaaaaaaaaaaaaaaaaaaaaaagagagactcactttaaatccaaatgttgctggtgaaaggatagaaaaagatattccatgcaaatagtaatgaaaagggatcggggtggctattctactatcagacaaaaagagttacagaattgcaggaagaaatagacagttctacaataaaagttggaagctttaatatcccactatcaataatggatagaaaaataaagaaactttacatgataaaccaactagatttaacagacatttatagaacactctacccaataacaatagcatacattttctcaaatgtagatgggatgttttccaggatagactatatgttaagccacaaattagtgtcaatagattttaaaagatatacaaagtatgttcttattgcaaccacaacaggataaagttagaaatcagtaacagaaggaaaattggagaatccacaaatttgtgcaattaaccatatactcttagtcaaccaaagggtaaataaagaaattacaagagaaatttaaaaatacttaaagatgattgacaatgaaaacacacataccaaaatttatgggacagtgaaaacagtgctaaaggagaaatttatagctttaaatatatacattaaaaaataagaaaaatctcaaatc

SEQ ID NO: 186287 - DNA, 234 bp, Homo sapiens
agtcttaaatctttggggtttgaatgaaggttttacataaagaaatatttcaaaaaataaatttagaatgtcaaacccatgcaaacatgtcttacttgaacagcaagccaggacatgggaatgaaattggtgtgagacggttttgcgctccttagactcacagtacagaaacgggtaacatccagcaatgctggtgtgtcatcaatctcagcccagtcccactgccttaatttg

SEQ ID NO: 186288 - DNA, 1215 bp, Homo sapiens
  misc_feature (1017)..(1017): n is a, c, g, or t
tgagaggagatggcagcttttcttggtggaggtttctgttacaagaatctaagagtcttatgaagatagggctaaataaaaccaggatacgaaccacaggggagaaccgccaaaagaagggtagtaaatgaatggttctgtcaagtcacctctctgtcattcttcaaaggccaacttaaagccagcactgccacaaaagccatccaggactaaggttagcgaacggtgacccttgtttggtccacgatgcactaacagactcttccccttgttgcttcttactgctactggaatggaagctttgggagggcaggtgtgccatcttttccagcctgccaggcagtctggtgcatactcgtctttctcctccataccggctgtcactgccttccttctggccccagacctttcagttgtctcctctctgatcttccttcctccattttgtccccacccccaacacaacttggaatgattctttgcagataaaaatgtgatcttgttactctctgtctcacaccacagtaccacagtgtagcatgaaccacagcttcttgtcacctgcaaggccctttactgcctacctttctagtatcatctccacattatgttccaaccacataatgaacttttttctcaggaggacatggtctcgctctgtggccaaggctagagtaatctcagctactcggaaggctgaggcaggagaatcagttgaactcaggaggtgcaggttgcaatgagccgagattgtgccactgcactccagcctgggcaacacagcaagactctgtctcaaaaacaagcaagcaatcctgaagctcagtgtgcctgttggcgagattggagcgaggtagcaagggccagaccagaaagggctttggggggtcacgatgaggagtgcgcaagctatcttgttgccaccggggaattcatggcaaagagtgaagtttctctctgcctaatacacctccagggtctcgcgatcactgttgagagatccacgatgtgacccgntgaggactccctcatcgctggtcttaaggtttcgcatctcatcgctgtacccctgcctggacctccctcccactacgcggtccttgcaacacccccttccggccttcctctcccacacccccgccactgcacttttccttgcctctcactcccgacctctctgtccccaatcttcgcccgatggccccttcactcctt

SEQ ID NO: 186289 - DNA, 1481 bp, Homo sapiens
ctcctcctcctccctctaatgcctgtaactcacatccgaggctgggcgaggaatccggaggggagattttcctcatgctcacggttgttggaaactggaagagtgagaggaaggaggaaggggatttgtggcgctctctacctactacaagactgacaaggggagggggcacctaaatttgcatcttttcttcgtggtgattgagaactgcaggttcaaaccgatcccactgagcactggcgattgattataaaaaaaaatcgacactgggagaagggaggctctgtcttcggctgtcagactcaatctcggaggtggtattgggtgtctaagctgctggattgcttttcgcccaaatcaatgtggtttctttggaacattttcagcaaaggaacgcatatgctgcagtgtctttgtggcaagagtcttaagaaaaacaagaacccaactgatttcaggtttctacttctacatctccagccctgaatactcatggaatatcgctgtacctatgacagagtgaatgctgaaacttggaagccaactgacaagatgccagggatggcatggcaaggaagagagagccttcatggcaattttgaatacctgatctcttgctttcatcatcttgtctaggggaagaacacggagcctggtagttgggaggtgagaggcaggaatggataccagagatggacagacagtggggtggtgagaagggagctgcaatttgctaatccttgtagtactacctgtcaatcatcttgctttccttaatcatcgatcctggagagactttgaggaaagggctggtggagttgcgcagatgtgatcttcatttcagccttatgaatacataccaaggtctctttaaatctgtggttcctgcacaaagtgctgtgacttcaggctaatagagaggtccagatgtcacatgtgccaattagaaagaaatgaggaccatggctatggcccactgtgttcagaagacacgcccaagccacccattggcattcattgtgtctaatacttgacctgtcctgctgtttattatgtggggtggctccatattttaaaaactgtattcataaaaagatatttctcatcctgctgagtctcaggcccattgttgtaggtgaggtggtttcttttgtttgatatataacgttttgctgactttcgacttgggaattgcaaaggcttacccaaaaccctgaaggaaaagctaagaattcatacttattaagcacttggtaggtgtctgacactgtagtagatatatgcgagagcccagaacaagctgatgtccatgtacgtatctttaaaaaatataatgatctagtcttatctgtggaaactgcttcagatactgatcttactctttcctgttacatcagaaattctggaaggtaatatcctgaaagatttatcctcaagaataacaatacattaaaatcttctgctttgaaaatgctttgaaa

SEQ ID NO: 186290 - DNA, 541 bp, Homo sapiens
tgctctggggaaagccagctgccatcaggtggggacactagaggagccccagggagctcccatatggcaaggaactgagacctgctgccaacacccaggaccaatttgccatccatgagagtgggccgtctcgaaagtgggagaatgtggtcagtgtttcagccagtgcttgctgctgaggcaggagagaataattgtgtaaagagggggctcccgcagtgcaggacaggaagccaccatgtgagcaccacatccacgtgcaggtcgcaggcttcatcatgtcctgaataccatgccttagcattttatttagatgagatcatgtgactggatccctcatgatgagatgagtgcccccaaaagaagacaccagagagcttgcttctcattccacacgcatgctccaaagaaaggccatggcagagcacagagagaaggagagctcccaccagaacctggcaaagtgtgctgctggcatgcttgtctcataattctgccctccaggactgtgagaaaataagtttctgttgcttaaaccacc

SEQ ID NO: 186291 - DNA, 439 bp, Homo sapiens
acaggtgtggcaactccttcccagtggaggaagcgactgttccaagagccagttttggaattgtaggcacaaacacaggagaatgtggtcagtgtttcagccagtgcttgctgctgaggcaggagagaataattgtgtaaagagggggctcccgcagtgcaggacaggaagccaccatgtgagcaccacatccacgtgcaggtcgcaggcttcatcatgtcctgaataccatgccttagcattttatggaaactgaatagtggaagagctgccttttagctggtgttacgcagaaagaaatgcaaaagtgaaaactagcaagatgtatgggaattcagatttctgtggtattttgattacatcatcaaaatgtggccagaaatttatatactaaaaattatgataatatggaaagaaatattaaggtgcaacaatagtt

SEQ ID NO: 186292 - DNA, 432 bp, Homo sapiens
ctcctcctcctccctctaatgcctgtaactcacatccgaggctgggcgaggaatccggaggggagattttcctcatgctcacggttgttggaaactggaagagtgagaggaaggaggaaggggatttgtggcgctctctacctactacaagactgacaaggggagggggcacctaaatttgcatcttttcttcgtggtgattgagaactgcaggttcaaaccgatcccactgagcactggcgattgattataaaaaaaaatcgacactgggagaagggaggctctgtcttcggctgtcagactcaatctcggaggtggtattggtgtgtgagtgtgtgtggtggtgtttttttttctttttttttcttttttctttctttctttcctctttttttttttttccttctctcctaggggctacacaatggcagt

SEQ ID NO: 186293 - DNA, 1396 bp, Homo sapiens
attttttctccaaccctttggtaataatccggtggtgatcgaggggggataaatcattcaccctggccgaaaacaaacaatcactgagaagtctcaaagaaatataccacgtgaggggaaaaaactgggagaagatccggaatattatcgtttttcctatggtaaaaccggtgcccctcttcaggagaactgatttcaaattattattatgcaaccacaaggatctcttctttctcagggtgtctaagctgctggattgcttttcgcccaaatcaatgtggtttctttggaacattttcagcaaaggaacgcatatgctgcagtgtctttgtggcaagagtcttaagaaaaacaagaacccaactgatttcaggtttctacttctacatctccagccctgaatactcatggaatatcgctgtacctatgacagagtgaatgctgaaacttggaagccaactgacaagatgccagggatggcatggcaaggaagagagagccttcatggcaattttgaatacctgatctcttgctttcatcatcttgtctaggggaagaacacggagcctggtagttgggaggtgagaggcaggaatggataccagagatggacagacagtggggtggtgagaagggagctgcaatttgctaatccttgtagtactacctgtcaatcatcttgctttccttaatcatcgatcctggagagactttgaggaaagggctggtggagttgcgcagatgtgatcttcatttcagccttatgaatacataccaaggtctctttaaatctgtggttcctgcacaaagtgctgtgacttcaggctaatagagaggtccagatgtcacatgtgccaattagaaagaaatgaggaccatggctatggcccactgtgttcagaagacacgcccaagccacccattggcattcattgtgtctaatacttgacctgtcctgctgtttattatgtggggtggctccatattttaaaaactgtattcataaaaagatatttctcatcctgctgagtctcaggcccattgttgtaggtgaggtggtttcttttgtttgatatataacgttttgctgactttcgacttgggaattgcaaaggcttacccaaaaccctgaaggaaaagctaagaattcatacttattaagcacttggtaggtgtctgacactgtagtagatatatgcgagagcccagaacaagctgatgtccatgtacgtatctttaaaaaatataatgatctagtcttatctgtggaaactgcttcagatactgatcttactctttcctgttacatcagaaattctggaaggtaatatcctgaaagatttatcctcaagaataacaatacattaaaatcttctgctttgaaaatgctttgaaa

SEQ ID NO: 186294 - DNA, 1339 bp, Homo sapiens
tgctctggggaaagccagctgccatcaggtggggacactagaggagccccagggagctcccatatggcaaggaactgagacctgctgccaacacccaggaccaatttgccatccatgagagtgggccgtctcgaaagtgggagaatgtggtcagtgtttcagccagtgcttgctgctgaggcaggagagaataattgtgtaaagagggggctcccgcagtgcaggacaggaagccaccatgtgagcaccacatccacgtgcaggtcgcaggcttcatcatgtcctgaataccatgccttagcattttatatttcaggtttctacttctacatctccagccctgaatactcatggaatatcgctgtacctatgacagagtgaatgctgaaacttggaagccaactgacaagatgccagggatggcatggcaaggaagagagagccttcatggcaattttgaatacctgatctcttgctttcatcatcttgtctaggggaagaacacggagcctggtagttgggaggtgagaggcaggaatggataccagagatggacagacagtggggtggtgagaagggagctgcaatttgctaatccttgtagtactacctgtcaatcatcttgctttccttaatcatcgatcctggagagactttgaggaaagggctggtggagttgcgcagatgtgatcttcatttcagccttatgaatacataccaaggtctctttaaatctgtggttcctgcacaaagtgctgtgacttcaggctaatagagaggtccagatgtcacatgtgccaattagaaagaaatgaggaccatggctatggcccactgtgttcagaagacacgcccaagccacccattggcattcattgtgtctaatacttgacctgtcctgctgtttattatgtggggtggctccatattttaaaaactgtattcataaaaagatatttctcatcctgctgagtctcaggcccattgttgtaggtgaggtggtttcttttgtttgatatataacgttttgctgactttcgacttgggaattgcaaaggcttacccaaaaccctgaaggaaaagctaagaattcatacttattaagcacttggtaggtgtctgacactgtagtagatatatgcgagagcccagaacaagctgatgtccatgtacgtatctttaaaaaatataatgatctagtcttatctgtggaaactgcttcagatactgatcttactctttcctgttacatcagaaattctggaaggtaatatcctgaaagatttatcctcaagaataacaatacattaaaatcttctgctttgaaaatgctttgaaa

SEQ ID NO: 186295 - DNA, 300 bp, Homo sapiens
atgtggtcagtgtttcagccagtgcttgctgctgaggcaggagagaataattgtgtaaagagggggctcccgcagtgcaggacaggaagccaccatgtgagcaccacatccacgtgcaggtcgcaggcttcatcatgtcctgaataccatgccttagcattttatgtgagtaatcttagatcattcatcaaagaacaggttatgtttacaaatataatggttttaaggaatattataattcagcatcttgaccactggtactggtacgacatgttataatatactgtgcttttaagtatt

SEQ ID NO: 186296 - DNA, 877 bp, Homo sapiens
tgctctggggaaagccagctgccatcaggtggggacactagaggagccccagggagctcccatatggcaaggaactgagacctgctgccaacacccaggaccaatttgccatccatgagagtgggccgtctcgaaagtgggagaatgtggtcagtgtttcagccagtgcttgctgctgaggcaggagagaataattgtgtaaagagggggctcccgcagtgcaggacaggaagccaccatgtgagcaccacatccacgtgcaggtcgcaggcttcatcatgtcctgaataccatgccttagcattttatatttcaggtttctacttctacatctccagccctgaatactcatggaatatcgctgtacctatgacaggttgcatgatttttccccctctgtgcactcaatttgtgtattattgtatcatatgacattctgaatcaagtgctgctagtaccaagctgctatcatcagctgatgccaaaaatattcgttataactcttctcagcatgcaagtgagagcacttcaaatcacacagacagaatttccagccattgttcttttcttctttgcttattatacagcaacaagaatcaaaacaaaaggggatttattagaaaataatgcttcagtaaaatgttataaaacatgaggtttattgtttgtgaagatagagtgaaattcagtaccacattatagataccacctcagaggcctattttccccttcttttctcttttcccaaatgtttttcaagtggcatctttttttcagtctttgattacattaaggtgcaaactatttatccatctggaaataagcaatactggtcaacagagaaccaggaaatgaaaagtgcagccggccatatgcc

SEQ ID NO: 186297 - DNA, 259 bp, Homo sapiens
atcgcataatcggggatgcagaaatgaagatctacaaagaccacttttagtgaaacagtgagcagaggagcttcaggtctgcagaaaatgagcctggaaaccctcaaacaatcagggcacacgtcccttctctccatgcttgtctgctccattcttccaattgcagacaatttatcaggtaacttgctgtcaggatggtccaggtgtataagcttcaaatccaactgaggtttccggttccagggatggaatcagatgg

SEQ ID NO: 186298 - DNA, 424 bp, Homo sapiens
tgcaggataggagaaaagccccgggtcacgcaggaggtcacaggcagagctggactagaatccatgcctctccatgcctcatctggagcgccatgtgtgctgtgtgatcttcgtgtcatttccctcatgggaatggccccaaatgcttttcattgattaagatgagcagaacagaactacaaattttgccattcagacgtggtccaatattggccatttcatgtggttccacctaatcttggttcatttcatcctcaaaacaactccatgacgatcagtctctagacgaagagaccgggatacagggcagggcaattaacctgctcaagctcacccagcaaggaaacgaaggagctagggtgtgaatcccactccttgggtccagggccaatgctcctgacttagactttactacaacttatta

SEQ ID NO: 186299 - DNA, 232 bp, Homo sapiens
cacatgattgtaaatgattgacagaaagatcttcagcaaaatattccacccaagatacgtgggagatattgagatccaagcaataagccatatttgaaaggcattatagttttcaaaagctgtagcgcaatcattcttaaggccagttaccttctccccacatctctgggatcctgtttgaagggagttctaacaaggcctgtgttcgagcagcccagcatcccttactcct

SEQ ID NO: 186300 - DNA, 385 bp, Homo sapiens
ttacaattccccatacagagtaattctcccactataatttagccttcttatttatgatgttcatctgaaattcataccattgcttaatagaatacctcaaaatctctttctgataaattcagtggctccacatttgagcatgaaaagcagcagaaataatcaaagtatattttaaaactgaagacaactaaactgtcagtttaaaggaacacttgttatcaaacttctatcttacaaacatttaggctccacctaaaaatctagagcaaagaccaaaacattgttttgacagagtctaagaagaatgtgaggaacaaagaagcaagagaaaacatgaaaaactaaaattgatatctctctggctccctctgtttgggggatctcg

SEQ ID NO: 186301 - DNA, 337 bp, Homo sapiens
tggcagtgagtgtttacttgtttttaatagtgtataaatttaactctggtcacttgttttgtcagcttcatttcttatctcagctcaaccaaaagaacttaaatgacatcatcagtcattgttctgtgaccattaaaatgtctaggttaattccagaaaaactgtcaactaaagatacttttagaaaattcctcttccagattttcttgattcattcattcaacaaagacttcttaagtgcttaataagtgtcgtgcaacacacaaagtcttagggacaccatggtggccaagatgagctcagtttgtggatctcaaactgggaaaagacagacatg

SEQ ID NO: 186302 - DNA, 484 bp, Homo sapiens
cacacaattcacatgcccacgcccatgatccctagccccccattcagacacagtcctgtgttgcactctgacatattccggcacacaggcaccgtctctttcacactcctccttgtgcccacccatgtgtacatgtgtgtgcagatgcttatgctctgtacacgcatacatgtatgtacacacgtgtgttctcgtgtgcatactcttatgcaccctcagcacactcatgttcacatgttccattgtacagccctgtactacatcctgtgtgcatccgctttaatgtacactcatgttcacgtgttctattgcacagccctgtactatatcctgtgtacatcctctttaatgcactcttaatgttcacatgttctctgcatagccctttattacatcctgtttgcatccgccttaatgcacatttatgttcacatgtgctattgcaaggtcctgtactacatcctgtgagcaccctctttaatgc

SEQ ID NO: 186303 - DNA, 867 bp, Homo sapiens
aagagctcctgaaggaagcactaaacatggaaaggaacaaccagtaccagccactgcaaaaacaggccaaatggtgaaacaccatcgacactatgaagaaactgcattaacgaacgggcaaaattaccggttagcatcataatgacagaatcaaattcacatgtaacagactgggtgtagtggttcatgcctgtaattccagcacttcgggaggttgaggcaggtggatcatttgaggtcaggagtttgagaaataaacaaaaatatctgacaaaccctatagaacatgtgctgtatatctccaaataagtgcttttgtttttaaccacaaaaatcaatggcaatgttcttacctgacagcttcaccactgagcacatcaaaactaggagcactgcaatttaacttgtgctacctctcagatccaggtaatggaccttaatatgtgcccctcagctttctgtactgtttagcaactaggatatttgagaaaaattaaaaactacctataatatattcccctgaaatatctttatgcatggtgaggactcagttatacattttcctctgggaaagtagacaaatagttattccaaaggtggcctaaagacctcctttatgttactaataggttgacactggccagaaaatactattttgatctaagttaaggcattcacaaaacaatacagcaaaaaataaagaaagatacagatatgtatggatatagacattacaactgaaaagtatcagtggcagaactgaaaagttgaaatatttttttcttttttttgagacagggtcttgctctgtcaccattgcactccagtggggaacaagagcgaaactctctcaaaaacaaatgtaaa

SEQ ID NO: 186304 - DNA, 195 bp, Homo sapiens
acgtctaaattcatcattgacttaaaacaaaaaaacaaccccagaagtataatgctatgcccatagttctttgttcagagaacaagacagggagctggagcttgaggatgagtgctgaggggagggaggggtgccctcttgagtagcagccataaaaagcaagggatcctctatatttttgccttaagagtagtg

SEQ ID NO: 186305 - DNA, 311 bp, Homo sapiens
gatgcacaactccattacatgcacgcacacactcaaacacacatacatctttgaagaacatgtagataaatatatactatcaggaaagagtttactaattcactcaacaaaaatgtactggctatcaactaagggccaatctatctgtatctcatttctttatctctaaaataaggacaataatctcttttcagaaagctactgaaaggttggataataaatgtcaggtactgatatggtttggctctgtgtccccgtccaaatttcatcttggattgtaatccccatgtgtgcaggaagtgacctggtgg

SEQ ID NO: 186306 - DNA, 125 bp, Homo sapiens
ttgggagttgagtagaaaactcagggagcctttctggtattgacagcattgaaccctgggaacagtgatatttaaggattgggttttataataggaggattctagggaggaagctaagcctagaa

SEQ ID NO: 186307 - DNA, 315 bp, Homo sapiens
gcaattttgaggggtaggaccttgaaattggaagaaccttgtgcataacgcctgtctcttctcagtgcttccacatcaattgttttggagcacctggaatttttaatgactctatatgtaatgacttcagtttgaaggacttacctgtaaattaactattattatttgcagatttttttaataacaaataatttaagttctaaaaatacttatttggtgctccagttaacaaaaatagccagcatcattgattcaattaataaataactaccaattcagaagtctttacaaggtcgctgtgtgaagtaaccaatt

SEQ ID NO: 186308 - DNA, 593 bp, Homo sapiens
cctttcttcacgtgcaaagctattattgatgttctagtctgttctatctcattccttagagaatcattttagcaggattttaggagggggcctagcgttcacatactaacaaaaaaaaaattagtgttattctttcatcttaaaacccactaacagttccctgttacccaagggagcaagtgtggctctacagcacgatgcatgttcttttctcatctggccattactctgtccacagcttcatcacccatcagtcttccagggctcctgaccctatgaaacatttccccaccaactgcaattgtgcccagaggcacaagtacaacatgtcgtctcttccctttaggtcatggtgcaatttcctctgcctagaaaacctttccttcccaatttcatctggaaaactattgtagcccctttcaatgctttctgaagcaagaatatgaaatgaaaaagatgagatgtaaatcaatacaaaacgcctaccctgtctttgaaaccctgtgcagtgccactcctccagggcgctcctaaccccatccctcagtcatccttcccagccgtgctgtgttgtgcacgacagcatggccagc

SEQ ID NO: 186309 - DNA, 266 bp, Homo sapiens
taccacattgctgggcaacatcacgagcaggcacaagaggtaggcagagatgattaaaacccatcatccaaggaacaaagaatttagggcaatagttctcaatcaccacacatatcggaaatacctggggaatagagcctgggacttggcttagacctacactggaatcagtatctggctctgaaccacatggttttgttaccactccccatcacccccagccctgccaccatgccttgtatgtgtacacactgaatgtgtacatg

SEQ ID NO: 186310 - DNA, 343 bp, Homo sapiens
ggaaacattaggaatttctaaattcatctaactctaactaatctgttttttttccaataattacagcattcttttagtaaagtaacaaaaatatgtaagttcatcagcaaagctatttaacagaagtcagtactcagtatgttgtgaatgatgttgctttttgctattgtgtaaatgctttgaaaaaagtaagcatcgtgttgtccttttaaattgtcttacttgaagctgaattcaatttgtgtagatttatacacacaaattttatatagtatcttatgttccttatttaatgcagaagataaatattatctgtacaatgaggaactaaatggttcctagg

SEQ ID NO: 186311 - DNA, 378 bp, Homo sapiens
gtattttggttttttctgagacagagtttcgctcttgttgctaaggctggagcgcaatggcgcaatctcggctcactgcaacctccatctcctgggtttaagcgattctcctgtctcagcctcctgagtagctgggattacagacgcatgccaccacacccagctaatttttgtatttttagtagagacggggtttcatcatattggtcaggctggtctcaaactcctgacctcaggtgatccaccagtcttggtctcccaaagtgctgggattacaggtgtgagccactgggcccagcctggtcaatgttttttatatttacccacatacacatatttgccacattctttgcagtttattctccattgtgttccagg

SEQ ID NO: 186312 - DNA, 344 bp, Homo sapiens
ctagtgcctcacagtttttcctcacagttttccttacttacctgaccttctattggtagcttccatcacaaattattccttcctttctcatcccataacattacgttccctgccttgttatatgcagatcccacttcatttgtcactctataaatgacttcggataatcctatcttttttcatgttttccctgtggtcattttgtgtctctatgatccctctttagagctctagatccatatatgcagcagctcatcagatttatttacttaaatgtcccatggatacttcaccatatggaccaaactaaattcatccatcccaccatgcacaccaaaaactgg

SEQ ID NO: 186313 - DNA, 261 bp, Homo sapiens
atctgccttgtgttggtgctgctttgggaaaattaacaaaaaggggacatgttctatgctggggagaggtcagaagctgccagaaacaagaacaaagcttaggaacagacagaggctgccttggactctttcagagccactgtagaaggtgctgggcctagagtacccaggtggtaccctgaactcactcacatccactgcaatgcatcagcacacccggtgcttttaccatacttctcagggaaagagtgtctctgggag

SEQ ID NO: 186314 - DNA, 579 bp, Homo sapiens
gattgctgacaaaatagagaagtccagaaggggaaatggtttggacgggaagaggaggggtccagctgtcaacgttttgagcaacaggtcccaggaggactttcagctggggccgtcattcagctagaaatccagggctaggtttcaggagagggccagagatgtctagcatggtagtggggcacagtgacactgtgacgctggagggtcagggtcggagcggaggagcttcccagggagtgcagacagcggggaccaggaggtgcgggaagaagagtcaggaggagagtcagggtgcacttggagaagagagctgagctcctcagtggggtatttgagggagtgaggactcaaggctagagattagactgttgggaaatcatcagcggtcttgggatggcctgtttgtgccctgtggtgggaacacaatgtgaggagttgaggagagagtgggtggtgagaagtggggctgctggtgtagcctggtcttaaaggactaagggaaggactgtgtgtcagtggtgtgtgtgtgtgtatatatacacatatgtgaatatatgagtggcgtgtgtgtgtgtg

SEQ ID NO: 186315 - DNA, 524 bp, Homo sapiens
gacctggccctgccccgccaccagccttctccttccagccacacttgttagcccatttctcacataggccaagtcagttcattcccacctccgggccctgtgctggcctctgccatgcatcccctcctgcctcagagagtctccaggaccacgcaatctaaagccatgcccagccctctggagcaggggccgggaagctggggccgtgcctcccaacctccatttttccaagtgatatcaatgaagctttctttgaacacagccaggcccctctgttcactcggtgttaatgggcacttttgcccactgtggcagagctgaacagttgtgacagagactggccagaagcattcaccatccatccccgacagaaacagttcacccggtgttaacgggcacttttgcccactgtggcagagctgagcagttgtgacagagactggccagaagcattcaccatccatccctcacagaaacagttgccaaccctgccctgaacacagtccctgtgtagagggccctgc

SEQ ID NO: 186316 - DNA, 659 bp, Homo sapiens
taatttctgagagtctaaacattctttgtatgtttactttttattgcataggcagtaaatttttatatctttgctttacttttatcaagcaatatatgaacagcattttctaaattaatggaaataaaatatttaaaacaaaaagtcaagaacgttctagtgatgccttttcactattccagaggctcacctctcatctgcagcatagactcagctttttattttcatatttccatatatctgaataacatatactgttatcttttgattcctcaattttggaaaagaatattgactttctgtgatggtagataagtatctagatctttgatgtcattctttctacttttattttcccattatacttctacagttatattaaattttagtaaagtcaatattgaatgcctatactatcatgtttgctcaaatattactcatagctgaacactttagtgtgctgcaattatgtctctttaatactttttggtttagctaatacttgccttgttttataatttagtcaatatctttgcacccagtgaaaattgatggatgtattaattttttaggtcagccataacaatgttacctcaaactaggtggcttaaaataacagaaatgtattgtctcacagttctggaggccagaaattcaaa

SEQ ID NO: 186317 - DNA, 488 bp, Homo sapiens
tgctcattatgctcacagggcttttgaaaagagaacaaaataaagatttcaagtcttagcaatgtgctgcccagccaacatttttctgagttatactgtgtcttaaatttctaattatatcattctccccattccccaatagcttgtttcctgtgggacgagccccttttccacagatgtgggtctgacatttgcatcattccagttggcaagccacatgttggtagacagtgttctgggcatgatctggaggacaggatgagtgctttgttttctctttgttatgccatactcagcagctttggtcattatttgtagtgtccacattaagcttcttagggagaaaacaaatccttgttgaagaaacattttttaatagtgctattattttgaaccatgaaaatgcatttaaagcagtaatgtctcaaatgctactgtcagagcagactctttacaggaatgagttcatttcccccagatatggtaaa

SEQ ID NO: 186318 - DNA, 412 bp, Homo sapiens
ttacagcctattcaatttttattgcttagtctatttcatggttagctgagggttttaattattagttattaaagtttttaaggtttaaagaccaaatgattcataaaacatagggaatatttcctgccaccaccccatctaaaactagagacaccatttaaaggttaaagtactctctttccaaaacagatcagtatagtgtcttgtagagagagtaggtgattattcaatcttcactggtaatgattatttgaaacaacagccctggcatgtggaatataatcttctcgcgaggagaagcagggcagctgtggcacgacctccagcaccagacaggtcttgggttcaaggatctgctctgggcctaccagctttgagcaagtaacaggctctcgctccacctccacatgct

SEQ ID NO: 186319 - DNA, 237 bp, Homo sapiens
tatttgaaagcaatctaacaaccacatggatctgtgcaaaggaataaatgttgccaagacaaattacaaagaaaaacattctgaatgcgagttttctttgtcatattttggctcgaagtcttttcacatttttcagacaattctttggaaattctgagtagcaaatattttttctctatcacttttcatctttataactgcagctgcatgcctgcagttcagctctcctggacaact

SEQ ID NO: 186320 - DNA, 566 bp, Homo sapiens
accagccaaggagcccaccatgccaggccacatagccacttctgcctggaagagggcagaagaaattggggcagtgctcctactacgcccaccacagcccagatgaacctgtatagatagccccagctcctaagaggaggtggctcacctggtggacccccaagagcacctgcctgatgtcctcaaatgtggtgtgtctgtgagcagtagtgagctctacctctgcatccttccgtgaaccctttggtagggcacaaatgagcacctctctggaaggcatcatgctaggcgttagggatatggaaacgtatggcacattccctgcccccaagaagcttacaacatgggggaagagagtctgtatatataaatgcctagcactgggccttacacatagcaggttcacaaagaaataggaacagtaggtaacagatgccaaatgatactgcacaagacctacccatcccctgtgaataagggctgccccatcgtccttccctggacagctccctcgacctcatccagccctgcctctctgctccccctgctgcatcagggcagtctcc

SEQ ID NO: 186321 - DNA, 284 bp, Homo sapiens
gaaagacagagagagaaagaaagaaagagcaagcgagagagagagaaaagaaagaaagaaaagaaaaagtaaaagaaaaatggattcatggtacaggaaagagtggatactgaggctcagggaaggcttcatggggaaagaggtcatggaggtaatatggagctaatatgtatacaaaacacttacttagtctagaaccttgtagctcgataaatggctgtgtttagcatctggtggaacacattgtccttaattttactgtgtgatattgtgcagtttaaaat

SEQ ID NO: 186322 - DNA, 283 bp, Homo sapiens
cttgtgcaacttcctccattagcctaaatacttctgtcttagtcagctcagactgtgcaacttttataaacaacatcgattcattgcttacagttctggaggttgggaagtccaaggtcaaggcactggcagattcggtgtgtactgagtgccattcctcatggatggcacctcctagctctgtcctcacatagcagaagggacaaagaagctccctcggacctcttttgtgagggcactgatatggttggaggtccccttcaaactgcatgatgaaatgcaa

SEQ ID NO: 186323 - DNA, 144 bp, Homo sapiens
gagagcgtttgggaacttgggagtaattaggtgtgactggagcattgttgggacaggataggtattagaaataaagacaaattggtgagcaggggccactaattggtgaggtgggaggattgcttgagcctgggaagtgaaggt

SEQ ID NO: 186324 - DNA, 317 bp, Homo sapiens
caaagcagggtcaggagatgcaaacaaactgatgtgggggttccaagtgaggtggaattccagacaggggccgggaagacttcgtggaaagggagaatctgaggtgggttttctaggatgggtaaagttcattagaggaagagaagtgcaacagaggaagttcggtgagaggtagagggaaggcgttctgatcatgaaggaaacactagaaaaggtatggagatagaaaaagataaggcctgattttttaacctaccacttaaaaaaaatccttgaaaagagatttttaaaacgaatacttggtgctgacaaaggtg

SEQ ID NO: 186325 - DNA, 374 bp, Homo sapiens
ataaatacatctttcaaatgcagaaagttaacctaggattcctttggttacttgcctagatgtatttgagagcagaactgcattatacaaagcaaactagttaataacacactggtagaaaggcttgtcagaaagaactttgtactgggccagtatatgacagggtatagtgaagcacaaataactacaatccagaggcattacataatttcaagccaatgttaaagatggtatatctatattagaacatataaatattttggttcctgaattaaaaaaaaaagatcagaggagatcagagagtaaacagttctaatcaaactcagactgcagtgcttaatagtgttaagtaaaatagagattgctttggattc

SEQ ID NO: 186326 - DNA, 233 bp, Homo sapiens
agcaggtgcggctgtccgggagaggaagggtacccggcaaacagcgagatgaggaatgaaccttttaaaaggacgcgctaatcaagcatccagacaacctcagctaatccttgaacttggaagtgcaaccgttccccaggcagggcaggaaaagggcagaagcacggcgggtgcggggcactcttttgagtgctcatcagccaacttgcacatttcctgtgacgctttctagt

SEQ ID NO: 186327 - DNA, 149 bp, Homo sapiens
catggagccgagcagatttcccagatgaggctttcaaatcagggcttgtgctcaagcacaagggagacagtggaggtgaggcacagggtcctctgactggctctgcaggaagcagcagggggaagctggtaggtgtttttttattaggc

SEQ ID NO: 186328 - DNA, 346 bp, Homo sapiens
ccatggccctgacctatcacctgctacagacccttaactatttcagggtctttgggcagtaattacctgtgataaagggtggactaaatgaagacgttaattttttccctaaaagatcgtgttaaattagcgtgcagtgtcttctgcaccaccaacttagcttctcataaactgtttaaataaatgatctacacctactgctctctctatcactacccagtgttcataaactgctcattttcttccattcttttaaaggtggggcttaaatgttaccaacaaaaaacatcaacaccatggcctttgctcactctcacagaaacttttcacaaaattcgggaactgc

SEQ ID NO: 186329 - DNA, 378 bp, Homo sapiens
caaaaaagaaaagaaaagaatacacgggtgcttttggaggagcgttctatgccaatccagcccatgtttcaacatttttccagaatggaccagagggccttgagggaaacacgcaataaatagctcccagatcaagattttaacaaaggacataaggaaagaaaactgaaaaacagactaactggttaaagtacattttgatgtttagttaaaaggccactgacatatttaccaagtacacactgaaacaatcaaacttaagtttaggtaccaaaggttttcaataaataacaaagactagaaagcatgcagacattgatatgaactggatgcaactaatttaaaacagcaactattttgaaattgttttttaaaaaa

SEQ ID NO: 186330 - DNA, 269 bp, Homo sapiens
tcacactatctggatagtctgccatgtgtccaactttgaaaatcgtcttcctctacgtagcaatcttcatcttcacttcaaagcctaaatcagatattatctctttccagatgccttcgttgaactcccactccatacaaccttcccccaacaaggctgcattaggtacttctaacttaattcctcataacaccctatgctttaggtcagagtttatcaacctcatcacttttgacattttggggtcagataattcttgatgtgagggg

SEQ ID NO: 186331 - DNA, 482 bp, Homo sapiens
tctaaccatgtgaggtaagtcactaaggtatagcagcatgaactcacagagggactaaattaacatgggtccagatgtggagtctaattggcatgttgaatgatcttgtactatatcgcacgttagggggatcctctcaagagtcgatcctggagcacatagctcatgcatgggaaatggagcagttcaaatcagttggtatgccagaagcagagaaccctgatccttactggagttgactaggacaccttctctttattagttaaaggtatggctaaatttaaataactaatagaggtcagacacgacttacttagtttctgagagtagttgttaactgtccttttcccaagggaaataagctaagctgaattacttaaaccacactttttccgtttcttaaaatgatttccatttccctgccctaggaaaagtaggcggctgcagagaggttgtgacagaattataaagctatttgagtt

SEQ ID NO: 186332 - DNA, 290 bp, Homo sapiens
aggagttccagaccagcctggccaacatggtgaaacaccgtctctagtaaaaatagaaaaatgagctgggcgtggtggcgggcacctataatcccagctaactcaggaggctgaagcacaagaatcgcttgaacccaggaggcagaggttgcattgagccgagattgtgccactgcactccagcttgggtgatatagcgagactcagtctcaaaaacaaaacaaaacaatcttcatatgtacccatatcctttctcaatcctgatttttttttaatgttacctttttccc

SEQ ID NO: 186333 - DNA, 335 bp, Homo sapiens
aattatacttgtaattcaatttaatgattttcattgaatttcttatttttccatttctgattgatctagcactatcatccatgtttatgcatattatttaaaattgtgctctgtattttatataatttacacattaatctcattttatattgttccataaccccaaatgtgacagactttggatagtatgttttccttttgataaatgtgcccatactgcttgacttgtgcaaatgtaagccgagtttttcataaccagtttctaggatttaattaccatatttctaccttttaaattgtccactgattgcaagatacatcaatgagttaaatgc

SEQ ID NO: 186334 - DNA, 643 bp, Homo sapiens
ctgatctagaggattccaatatatcggcctatccatcagatcccagatcaaatccagtaccccaggatagccatgaagggctgttccagcatgatcctgtgtagcaggcccggcagcaacaacaggtctacattgctgcagaaaggtccaggggctctgagaagggagtgtgagccaagatgagatcctgatttaacgcgggtatggcttgggagcttagagaagattgaggcttggataaaggtgaacaatagaagaaaaaagaaaggcaatgagaaaagccaaggaaagcaagagtcatggtccaaatgtgaagtacacaaagcaattgatagaatgtaagaatagcaagtctgtttgaccttaatgctaggaacagtttcttttgaggctgagggcttctgatactgctcccagacagaaaaaggaaaatcagaatacagtttggttcagcactgagtaatacttatttggctatgtaaaagaatagatgactgaattgtggttaaaagtcaaaatgtaagtggtaataggtcctgtaagtgtaaaggtgtagctggtagatagcaagacatggagaaactaagaggaaagtttggaaggaagaatccaaatgctcatagctttgtctcactaactaggg

SEQ ID NO: 186335 - DNA, 523 bp, Homo sapiens
aaatggtaccatagacattacggatgacacaattgagcaacagctttcactgtttaacaagcagtgtctctggaacactgggttagtgctgtcggatgttgactgaaaagtcagtggtttgagcccatccagtcatattaatgtttctagctgatgtgaccttccatctgaagagtctcttccttggaccaaatatctcttaaagcttctcttcttcttgtctcttgtctattttctaaggtgcctctttgttgcttggggcaaaaaaagtccattttaaatccacacccaacaaacatctacccttacgtatcctggtttttagggttttgagtttgttgtttgttttctcagcttctcatatttggaatactggaaattcctaaagtggaaaatgacagaacgtgaatcacagctatggtgaagccacaggctctggatgaaaaacctaatctgccagggtttgaggttaaacacatgaatcttctctgccttccctgtacactttcaaatgggctaaatc

SEQ ID NO: 186336 - DNA, 330 bp, Homo sapiens
  misc_feature (156)..(156): n is a, c, g, or t
  misc_feature (322)..(322): n is a, c, g, or t
tccaggctgtaccctcctctcctccagggtgtaccctcctctcctccagggtgtaccctcctctcctgaatcacccctcctcaacctccaggcttccacctgaaccgcagagaggccctcccacccagcaggagccacatctccgctgctgttctnagctcctggcgccctgctttcttgggggcccgaccaccccctggaattatacgggttacacaggtatgcgtgtgatgacttgtttcctctgcacccagcacggcaccttcgtcaatgtttactgaatgtttaggttacaagaaagaggggattaacgatccacatngtaggcct

SEQ ID NO: 186337 - DNA, 256 bp, Homo sapiens
  misc_feature (211)..(211): n is a, c, g, or t
ccgagttccagaccagcctgggaaacgcaaagcgaccccacctccacaaaagtgggttttctttaagtttttgactagtccgcaattcacagaattgacattttggcagatgaagattgcaagtaaggaaactaacggtatctcagatttgttctttagcaatttgctaaacctctcctctgacttttttgcccagtggccaacgcccgantgtctgttttcaggagccccaggtcaagccttgtcccttcctcct

SEQ ID NO: 186338 - DNA, 235 bp, Homo sapiens
gtctaggtggaaaagatttagtcataaaatggtgcagatctgcccaaggccttgggagctcagccctcacagcactgtgccatggatatgggacaagaattcaaaaatgatgattttggagctgtagcattaactgactggcctgctgggttttggacacttatgtatcctatgagtcatccattgcctgtacaatcattgtaccttggaagtagtaaacttgctttataactca

SEQ ID NO: 186339 - DNA, 337 bp, Homo sapiens
ctgagggttctattattgctgacttttttttaatggagaaacaatcagaaaggttaattaactcacccacaatcctaagcaggtaagtcctgcagaaatacagaatccaatacagtctttacgacttcgaaatcttactcattaaagcgtacaaatgggccgggcacagtggctcacacctgtaatcccagcactttgggaggccgaggcaggcagaccacttcaggtcaggagttcaagaccagcctggccagcatggtgaaaccccgtctctaccaaaaataaaaaaaatcagccaggtatggtggcatgtgcctgtaatcccagctattcggga

SEQ ID NO: 186340 - DNA, 427 bp, Homo sapiens
aaggaatggtaatatatgaaggcggaaaacccaaatgtttcttctttgagagtcatgactaccttctggtgtggagaaataccaaagcatatacatacataatgctgctgatgaaaataaaataatgaaactcagattcatttaaggtcaagcaaacatataaatcagcaactggcataggaaacaatgcttttccacaaaggaagagtgatgttagtgaaaatggcagagaagggaccgcagaaaactgtctctactgttaacactgatcaaaatcagctttttaaaaactagaaataaaaccatacttgcagcaatccagagagcatttatgcaagaaaaccaggtgattattggtaagaatgttgagcctggcagcattttaacatgtcctactcctaaattccaaccccttcccctccaggcg

SEQ ID NO: 186341 - DNA, 287 bp, Homo sapiens
tgttgcgattacaggcatgagccaccgcctagtctgaccctgtgttctacatgcaaatgggaatcatcataacaatacctacctcctggagttgttagctaaagaaagtgcttagactgctgcttggcacacagtaattgctcaacaaattaaggtattgctttaagtacaagcgtgtttatgagctaaaaaaataaattaacatagaaactagtgaggaagtcagtcttagagctggatgaatagccagaaacttcataaagaagttcagaagataatagataatc

SEQ ID NO: 186342 - DNA, 543 bp, Homo sapiens
tggtttttacatttttgaatggcaggaaaaaacatctaaagaatactaattcgcaacatgaaaattacatgaaattcaaattttggtattcataaataaagttttattagaacacagccacacttatttaactatcatctatggctgtttctttgctacaggggcagaactgagtagttgagacagagattgtatggctgcaaagcctgaggttttattatctgtctctttataaataaaagtttgccagcccctggtattgattattctgcttcttcaattttacaagataatcctaaatagtaggcaaaaatggctagcctttttgacaaatttaattgtggtaaactgtgctaataatattttcttcatttgctttttgtcacattctttaatctgattctttaatggtcacttttttgtttgttttccttcaatgtgttgtttaacttaataaatgatacttcatcaatctgtgtagagttttgttaccacattgatcaaatgtaactgtaaatgaaatcatccttattgatgaaaacc

SEQ ID NO: 186343 - DNA, 206 bp, Homo sapiens
ggcctgcctttatccccctcctctacttgcagctaaaatctattcattcaggttcctgtgtttcatcactttttttaactttgtgcctctgtgttctctttacaaaaattttcagtgttaaccgtatataactttcgtaataagcaaaaaacaaaagtgctctttttcaataacaaaaatttcacccacacccacagaggcccaag

SEQ ID NO: 186344 - DNA, 372 bp, Homo sapiens
ccacgccaatcagcccctgcagagtctgtgctgagcccggcttgtcaggcacactagggctgggacagatagaaataagcggataggagctacagccccgccacactgctccttccagtggtcactaatcctagttaaaccggaacgggcctcccgtcgtccagtgtcaatgggaagcaaaggagcctcgggctgatggattcgggactggcattggcagaggggcttcatcagaaagccctgagagggaggagggcggggtggcaccgtggtcccgttggtggagacagggatcatgtcaactgatttgctgattgagcttcagatcctaggagaaccttccacagaatcacatcagtgcagcagctgggc

SEQ ID NO: 186345 - DNA, 903 bp, Homo sapiens
gaagagcgggatgatatattcaagtgctgaaaggaaaaaaacaaaacataacaaaaactgtcaaccaagaatacacagcaaagctcttctacagaaggaaaagagaaaaggacttttgcagagacacacacacacaaagtcaagagttcattactctcagaagtgtcttacaagaaatgctaaaggaagttctttgggctgaaagaaaaggatgttaattagtaacacagaaacataagaaagtttgaaactcactagtaaaagtaagtacaaaaagtttaagtcaaaagtaagtacaaaagtaagtcaaattttaaaactgtggtggtagtgtttaagtaacatttattacagtggttaaaacaaactattaaaaatagttaaagctgcaataattcattaagggttacacaatataaaaagcatcaaaaacataaagtgtgggtgggtaaaaatgttgaatttttgtgtgtgatcacggttaagttgtattcaagttaaaaaaacttgctgcaactataagatattttatgtcagcctcctggtaaccacaaagcaaaaacctgtactagatatacagaagatacaaagtaaggaatcaaaccatgccactatagaaaattgcctaatcacaaaggaagacggaaagagaaggaaggaacaaaggaaaacaaagctagaaagaatgaactaaatggctgtagtcaggaaacaaagccagaaaagaatgaactaaatgactgtagtcagtcttacctggcaacaattaccttaaatgtaaataaattaaactattcaatcagaagacatagtgtgacttaatggattataaaaaccagacccagctctgtgctacacacagggagctcgcttcacttataaggacacacatagactgaaagc

SEQ ID NO: 186346 - DNA, 621 bp, Homo sapiens
tgttggtacataattatatctgtttatggagtacatgagatattttgatatgggcatgtagtgcataataatcacataatggagaatgggatatccatcccctcaatcctttgtgttgcaaacaatctaattatacttatcgctacattttaaagtgtacctttttaaaatgtaagctaatttcttcacttatgacatgttgattgattgctatatattttctcaatctatctcagaataaaatatttcacttctcttgatggctcatttctcttatcatggtatattcacttattttttaatacaagtaaaagtatagaaacatttcattatttaaactcattttgcaatttgacaagattaaggtacagttgtaaaactcctcaactaccttcattatgtattaccaggtcccattttgtccctttttgtgtacatccatagaagattcttttttccaccactgtttttgtttttcttgaattctcttcaaacagactgtattagtccattcttgcattgctataaagaaataccagagactgggtaatttttagagaaaataagtttcattggctcacggttgtgcaggctgtacaggaatcatggtgctgacatctg

SEQ ID NO: 186347 - DNA, 524 bp, Homo sapiens
gtgggaggctgaggagggtggatcatgaggtcaggagatcgagaccatcctggctaacacagtgaaaccccatctctactaaaaatacaaaaaaaaaattagctaggcatggtggtgggcgcctgtagtcctagctactcgggaggctgaggcaggagaatgacgtcaacctgggagcggagcttgcagtgagctgagatcacgccactggactccagcctaggcaacacagaccgaccttgctttaaaaacaaaaaagaacaacaaaaacatgagctgaggccaggagtggtggctcacacctataatctcagcactttgggaggccaaggtagccagatcacttgagcctggaggttgaggttgcagtgacctaagatcgtgctactgcactccagcctggatgataaagtgagaccctgtttcacaaagaaaaagaaaaagagttaaaaaaatccaggcatgaacaggaagggatgagcatggaataaaaccaggatgctgcctccgtaccaccagttctt

SEQ ID NO: 186348 - DNA, 190 bp, Homo sapiens
gatgggagggaggatagaacctgtcccaagatgagactttattttcccaaggagatgtgtacatgaggcaggtcttttccctgtctgcatgtcccagatctgagatttatgcacaagagtaggatctcagaagccttctgcagttgggcagtctcagagcacagtgatgactggattccagggagtctct

SEQ ID NO: 186349 - DNA, 199 bp, Homo sapiens
aaggaggctaggactgaataagtgagcttgtatgagtaatacttggcattgacctcttccccactgtatccacgcagtccccatgtccagtagcaggcctctcagatcgtgagggtctggctgctcttttctgcctccactgcctcttcccctttccttcttagcacagcagccagcatctccattctcattctgctct

SEQ ID NO: 186350 - DNA, 316 bp, Homo sapiens
cagtcagctatgactgactcactgtagtctagcctgggcaaaagagcaagcccctgtctctaaaactgaaaaagctatttacagatataatcaagttcggatgagatcacactggatattaaagagggcactaaattcaatgacgactgatgtctacataaggagagggagatttggggacaaacagacacatacagaggagaaaggtcatgtgaagccaaagacttgagttatgctgccataagccaaggaatgcaggaagccaacaaaagctggaagaggcaaaggattctcccctagaggcttcacagggagt

SEQ ID NO: 186351 - DNA, 187 bp, Homo sapiens
taaaaattcctttctgattaggtaaatcagagtcactttctatcatttgcaaccaagaattctggtttcttttacagcattttcccataattttgtttttagtgagggctggtgaaaccatgctcttttgtgagctccctttaatatttgaactttatgatttcttacctaccactgtgaacaactg

SEQ ID NO: 186352 - DNA, 845 bp, Homo sapiens
cttctctgttcgaaacttgaaactccaccttcaggagcgaatccacgcggaggtcaccagtgtggaagtgctttaagctgtgacgagggagttcctgcagctcagggagccagtagtgagaaaccccacgaatgcacgaagtgtgggaaagccttgtgctgcagatcggacctcagggtacatcacggggtccacgcgggggagaagtcctctgcgtgcagtgaacgggggagtggtttcagggagaagctttgccctgacaaacagggaactcacacaaaggagaaacccgctagagacagcagaagtggtaaaacgatcttccggaagacacgcctgtgtgtcccgggcacagttcacgccggagcgaagccttacaagtgttgggagtgtgagaaaacctcccacaagtcgcgcctcatcgagcaccttcgctcccacacgggggagaagccctgcggctgcagggaatgcggaaaggcctttttccagaagtcacacctcatcctgcgtcagaggactcacacgggggagaagccctgcgactgcgcggagtgcgggaaagctgctcccaggactcctgcctcctgacccacaggcggactcgcggggaagaaaccgtacgagtgctccgactgcgggaagacctcccggaaggcgaacctcatccgccaccacgggatccacacgagggagaagctgcatgggtgaagagaccgtgggatcgtcacaaagtcacatcacgaggtcgccgaacctctaggagggacatcgccagggaaacagccctcaaccaaaactacgacgccaccctaggcagaggtcccatatcggggtgaaattcg

SEQ ID NO: 186353 - DNA, 868 bp, Homo sapiens
cttctctgttcgaaacttgaaactccaccttcaggagcgaatccacgcggaggtcaccagtgtggaagtgctttaagctgtgacgagggagttcctgcagctcagggagccagtagtgagaaaccccacgaatgcacgaagtgtgggaaagccttgtgctgcagatcggacctcagggtacatcacggggtccacgcgggggagaagtcctctgcgtgcagtgaacgggggagtggtttcagggagaagctttgccctgacaaacagggaactcacacaaaggagaaacccgctagagacagcagaagtggtaaaacgatcttccggaagacacgcctgtgtgtcccgggcacagttcacgccggagcgtgagccactttagccaggatatacttaattataaagacaactgtggatatgaagtttttttttcttttgagatgaagttttactcttgttgcccaggctatgggaagaaatgaaatcattacgactaacagatctaaaaagcgtgagaacatcccagagggacgcaggggtgtgttccaagtgtgctacagacagataatttttatttttgtgttgcactggtgaacagaacataattgtgaatctgtagacatacataccataatatatagaagatctatggatactttctatgctaaattatacccttctgtgtttgtgatatagaactggaataagatgaatatattattaaagcagagaggcccactgcagcagcacataccatttcttctgtttgtcatcacgtattacagagcccctgaacttggaagctaacaatttcatgacatctgataactcacagtcaactagtttataagttatatttttggctggg

SEQ ID NO: 186354 - DNA, 634 bp, Homo sapiens
gttagatgattgtaatcaactataggtaggctaacataagtgttctgagcatgtttaaggtaggctaggctaagtaagctatgatgttctttaggttaggtgtactaaatgcgttttcagcttgtgatagtttcaacttagatgggtttatcggaatgtaaccccatcataaactgaggaccatctgtatcaggtgaagtatgatctatttatctgctaggtaaagtgagcaatatctgctaggtgaagtaagcaatgttttagacctaaatgaacaaatgagctattacattggaataagatgggcatctacccaagagttttgaaagcatttatataacattatgaaactgttgtcaaatatatgcatcgtgtcattacaaagggtactgtgccagaggactggccagatgccagtgtgatgtcaacaaacctgggaaccctgagaaatgcatatggggactgggccctctatagtaggcaagctagaggaggctctcataaaggatacgttcttttttttttttgagacagagtcttgctctgtcgccaagactggagtgcagtggcgcgatctcacttcactgcaacctccaactcctgggatcaagcgattctcccacctcagcctcct

SEQ ID NO: 186355 - DNA, 386 bp, Homo sapiens
cctgggactgcggttccttgtcctgcccctgctggttctgggtgagctcttgattttggactactcacatttttccatcaatgttctgtgacctctgagaggtcacaggggaaaaataatacaggatgaagaaacccttccttagctcaggggaaaatatcctgagaatgggtatcaatttccctgcccaaatttttacaggagccaaactctgtacaaagcacatcgaagcctaaacacatggaggattccaggagacactaggtctgggcagttctctcctgtgtccccagcaaggcagggtaggcacgaggtggggagggagcagtggcaaggggccttgggaaggctaagctatggagaagaatgggaggtgcaggggagca

SEQ ID NO: 186356 - DNA, 657 bp, Homo sapiens
gtacctcaacattaggcttcctggaaaaaagtaatcgattttcagagattccgctggtattaccatctttaaatgaaaacagagttgcctgtgtcagctgtaactgctggcaagaatcctgatatggtttgtctgtactgacttctaaatgttaatatcagcacatgcagtgagaactacagcaggaacttagatgcaggtcggttaggatagggtggctggtaaaattgcagtccttccatggcattacaggttccagtaaagtaattcctcctatatctctagatctgtactctatatatagaaacagcagtgccaaaaggtgagattcttttctgttttatataatgttgttttgatacagcaagcttgttctctcagaattaagacgtgcactcaaaaagatactcttgaatgtttaagatctcttttcttccctttaagtctccccaaaccacggaagctttccagcttcggattcctcagaatctgtacagtagttaagtgtggtgggaagattctcctttccttttcaaagccaagttcttgcctttctagtctgatagaataaacacacaagcagattcagattttttctttcatttcatttcattttctcccacttctcacagagatagctgtaggcactaactttag

SEQ ID NO: 186357 - DNA, 144 bp, Homo sapiens
cttcacatctagcacatctattcagttcacagtttgggtgcgagtaattagtaattagcttattctaattccacttaatcttaacacctaatcatctttaattgcacaggattgaatagaatgacagagaagaaaaaatggtga

SEQ ID NO: 186358 - DNA, 427 bp, Homo sapiens
tgagtgttgttacaagcttcattatcattttcataactgtctaatattttagagttggcactttgattacttagtgcatgatccctttggcttacgcacttttatctcgttttataaattataacagaggcagcctgattcttaggccatccaatggagcaggaaattatcttcactacttcgaacactaggggactgctgagagcacaaatgagagtgttttaaattgacttagtggctgggtgaccttggacagtcagcttaactcatgtccttagtgcttcatcaataaaatgacagtgataatgaaaatgcctaaaaacagggaactttgagggcccttttcggttgtgagaggttccataattttatctttcctaccaggataatctcatgtaaaataatggaggtaaatcaaatggctgaa

SEQ ID NO: 186359 - DNA, 224 bp, Homo sapiens
gagattgcgccactgcactccagcctgggccacggagactctgtctcaaaaaaacaaacaaaaacgaacaaccaaaacccacctaattgtccttttattaaagacaaaacaaaaatggttcgagttaaaaatgttacattaaaaggtttttttttgttttttttttgtttgtttttgaaacagggtcttactgtgttgcgcaggctagagtgcagtggtataat

SEQ ID NO: 186360 - DNA, 126 bp, Homo sapiens
aagctttacaataaaattcattgcttctaaaataactagctatgggaatgtgggcaatttatttaaacttagatgtctgtggttccttaacaagcagaatagtaatgaattaattaagggtatgcc

SEQ ID NO: 186361 - DNA, 198 bp, Homo sapiens
tcaacatatagctcctgtacatattttgttagatttatacctaaatatttaaaaaattttggagctattataaatggcattaacttcttttgttcccaattgttaattgctaatatatagaaatggcatatagaaattgatttctgtggctgggagcggtagcttatgcctgtaatcccagtactttgggaggccgaa

SEQ ID NO: 186362 - DNA, 408 bp, Homo sapiens
cacgatgcggcacctgttctggggccacttccctggccaccggccctgacccaaggctctctacagtccccagagtttggatgagaacttgaagaggacttgctgcttcaggggcctgcagtaggcatctccccttttcccaaagctcagcttctgagactgggggatcccaggccatgggctcccaagcccctggaaaagtgagaggggttggaaatggggtgattctgggagtcaaagtccagcagatgagggtcccccaaagtaagtgctgcacggggcacacctcgctgggcgggtctcggccctggtgcagggcaacttgctagcattcctgcccatgccagtcctggggagacagcgcctgccccaactctcagacagcatttaatttccttctctgctcag

SEQ ID NO: 186363 - DNA, 676 bp, Homo sapiens
gaacctttcagaataattacataaccaagataggcaactaaccagagatgactactgcggggcaagcaattttacaatataacacttttcaagaaagcacaaggacctcttttcagcatctaaaattttcacagacttctttctgtatagaatagaatagaatagaatagaatagaatagaatagaatagaatagaatagaatagaatagaatagaatagaagagtagaatagaacaatagaatctgttgattgagaaaatacaggccaggcatggtagctcattcctgtaatcctatcaccttgggaagcagaagagggaggactgcttgaggtgaggcattcaagaccagcctgggaagcatagcgagatcccgtctctacaaaaaattgaaaaattagccaggtatggtggcacatgcctatagtcctagctactcgggaggctgaggcaggaggatcgcctgagcccaggaatccaagtatgcagtgagcagcgatcatgccactgcactccagcctgggcagcagagtgcaaccctgtctcaaacaaacaaaaagtacacaatgaaataagtatgaattcaatactgctttaaaatgcatttgtatattatccataataacaatggttcttaaaatttgggaagatagtctcacaagatgtacaaagcata

SEQ ID NO: 186364 - DNA, 768 bp, Homo sapiens
tgctgggattaatcttaacaaagtagtacattttccccacttgataggaattaatataattttaaactctagatggagaagataggctcctattctaaagaatataaacaaggactgttgagagggaaaaacaagtgctgtgtgaggaatgctatacaaaactgtctacctcaaaaatgaggaaaacaaaatgcattgcaaacagcttctcactatttttcttcatgttgcttcacatatctgttttttgttgccattgtctttcatcatcacccttccaggtgtcccttcctgaagttcagtcagcttcagccccagtcttgcagtatttctattcccaccttggcctattatgaacaatctttgggctactgtcttttgacagaggatacttttaatgaagcagcttagatttctatagagggtagcggaggaaaagataaggatgaggctgcttctggaataattgtcatgggaatgaaagggctgttgaaagattagaggccagtgtgcctgggtacaaggactggggtcataattatactttgtcttttactagtgccttttgtccaagtcactgaaagggcttaataaaattctggtctgaataatattattctttgctctttggaatttactggaggtggcagtgaggctctgaaaaaaatatgaatgttttatagtggcataaaaggaagtgagttagataccctgattccttgttaaggaaagatgagtctggtgaaagctggtgctgttaggtgaaac

SEQ ID NO: 186365 - DNA, 659 bp, Homo sapiens
ggtgaaaagaaaatcagaaaatagtagcagcatggaagtgaatgaaaagtccatttccagtgaaaaggagaagttccacagttttaaatactacagaggtcaagtagcaaatttcaccactggaaaagagacattatatatggcagcaaaaacacccttgttgtcttctttgactctcccaaagtaggtcatgtattcttcctttatttttacttgatgattatttgtctgtttcctccattagaatgtaacccccaagaggaccaagactgtttttttgttttgttttattgtggtgaaatatacgtaacataaaacttaccagttttaccatttttaagtttacagtttaatggcattaagtacatttacattgttgtataactatcaccaccattcatctctagaactttcttcctcttccaaaactgaaactctgtatccattaaataattactccccatttccctctggcaacgctgcttccactttctgtctatgaacttgactatgctaggaacctcaaataagtagaatcatatagtagttgtccttttgtgtcgtattttacttagcatagttatcaaggttcatccatattatagcatgtgtcagagttcctcccttttaaaggatgaatatttcagccttttatggat

SEQ ID NO: 186366 - DNA, 414 bp, Homo sapiens
tgagtgaaatataccacatgttgaatttgctggcatcagcaccttctgccgatttaacttatgggcagatgatagcaggcccaacacccaatactacttgcccatatccttgctttcatttcataaagcaagaataaaagagagtcagtatcaatatcaaaataaataccactagtaatattgatgatgttacttttaccaccaataataatagcagttatcaattaccgaatgcttacaatgggccaagcactgtgctaaacaccttacgtattatatctcatttattctcaaaacaatagccacactgattcttttaaaagagatgtcagatcttgctttcacctcctcaaaacccttcagtggctcccattttactgagtgccacaggcgaagtccctttcacagtctgca

SEQ ID NO: 186367 - DNA, 373 bp, Homo sapiens
tagctgggattacaagcacccaccaccacacctggctaatttttgtgtttttagtagagaaggggtttcaccatcttggccaggctggtcttgaactgctgatcttgtgatccacccgcctcggcctcccaaagtgctgggattacaggcgtgagccaccgcgcccggcctatgttgagtttctttaataaagaatttccatagtccctctgcatctgatttagtaactaaaagtccttatgataagtgagtttgcactcatagaatctgtgacaatatggggaaaagaaactgggggatttggataaaaaaacataagaaatctcttagagatttacttcatgtagatttccaccaacagagagcactgtca

SEQ ID NO: 186368 - DNA, 234 bp, Homo sapiens
attaccattcaataatattagggatattattaatattagggatcatatataatttaatattatcagaagtatcttcccattgagtaccaagactactttggggaatgaaattcgtcagactaaaaatgtgtaatttgagtaatgggagagattattaagtcaaactaacagtttctagtaagaggttggttatgctatggtttaccattgtccaacggaccaagtgtttgtttt

SEQ ID NO: 186369 - DNA, 194 bp, Homo sapiens
aggtgttctttgccgagagtgaataatcaatctcttctccgtgtcctctccttttagctgagcctttgcttcagagtagctccttgtatctccttttggttgagtaactcctttccaaatagctccatttggtaggagactttgttttttgctttcttgactctctgcttcaccttaattaaaattaccccagc

SEQ ID NO: 186370 - DNA, 485 bp, Homo sapiens
gcaccaccactccccacgtcagacctgcttagcagatttcccacgtgccgtaaaacaggtatcaatcactgataagtggaataacaaactgagacttgtaatgttcttaataggatagatcataggccaatttaaataggatgcaatttagttggaacaaatgcaaagcctgcacttggggttagaaaccatcactacaactattttggttgttttctaacctaggacttgttagcattttgtatataaaaggcatagcattttgttagccacaaggataggccatagtgggatatggcttccaaaacgtcaatgtcctagtgtgcgttaggacagacgaggggtctggaagggatgacaggagtaacagggttctgcatccaggtcctggccagctacagagaattccagtggatttggaccaggcagatcaggcttctgaaaagtgagttgtttgaagactgttgtaggaactgaggattctc

SEQ ID NO: 186371 - DNA, 761 bp, Homo sapiens
tcagataaagatggctcactctgtctagactgcttgtaccaaaaatagggctcatgtggaatacctgctttcctttgtggaggctggaattttgttatatgctacagagagggtgcctacgtggccaacttccaataaaaactgtggacactgagtccctaatacatttctctggtagacaatacttcatatatattttcacagctcatttctgggggactaattaaatgcatcctgtgtgaccccactggaagaggacatttggaatcttgtacctggttttctccagacttcgcctcattcaccatttccctgtgctcattttgccttgcatccttttgctgtgataaatctcagccatgagtgtgaccgtatgctgagtcttatgagtcttccttgcaaaccaccaaacctgggttggcgtttcagtgcctgacacagttgtattcctaagacatagttgggaccagacctcaagaaaatagccaacaaatactgggtgaatgaacgaaagaggccatatgcagtcagcccccctctctctgggttctacatatgtagatttaactaatgacagattaaaagcattcgaacaaacggagggtggtatctgtactgaaaatgtaccaactgcttttttttgtcattattccttaaacaatccaacataaccactatttatatcgtgtttatattgtattaggtattataagtaatctagagatgatttaaagtgtacaggagcatcacatacattatat

SEQ ID NO: 186372 - DNA, 335 bp, Homo sapiens
aaacctatgtttatgctcaatctcatccttggtatttttttttctatttctcctaagtacctcatcatgtttaacattaaaatttgtttcatttcttttgagttagatttaactttattattccaatagttaaccaagtgtccatttttatttatcagtcttgcctctagagacctgaaatgttaacttttcgcataaactcattcttttttttaaagtttctcttctttttaaacatttatatacagtgaaatgcacaaatctaacacatgcaggagctgatttgtgacaaatgcatacatctctctaacccatgctactgcctttttaaactt

SEQ ID NO: 186373 - DNA, 398 bp, Homo sapiens
cgagctcggttccctgaatgcagcctgctgagttgctcgggtttctctgctttctggatcacagaggcattatggagacttaaacaaatcaggtgttcatctagtttacaatgctactgtgtctgcgaggaaaactttgccaaacaaggtttttacaaacaaaagctagaatagacacaatttcaccttcaaataaaaggacaggctgacatgaagtttaaacttaaattgccaaaggaaggaagctcacaattaaggtagctgttcctagcacttagtagtctaaggccaacagcatacaagcataacaaaccaacagtccccatgtggacagacaacactgagatttctgatacaattagtttccttttcacgaaagagtcagattcataattaaa

SEQ ID NO: 186374 - DNA, 493 bp, Homo sapiens
gatgccaagatctgagagaggcagttcctgtcttaaagttgctcacagtttaatggtgatgcccctgtatgaacaaacaggtataaccacgcccgaggttaaagtagaggtagttgagttgagcacagccaaacctgcaaggaagggatggagctgtgtcacagaaagctttaaagaagtttaaagagtcagttctttaaagatgacgtatgagctaaatctcagttaagattttgactgatgagaaaagggttcagacagtggggaaaagatgggctaggcaaggaaatcgctctgtgaatgaacacacagaggcttcaaaagacccttttggggaagagcaagcaaggcatggcaggagagaagaaggggaaggaagaatgaaactggggagggggcactggcccacagtgggtggaagagctgcctctgcattagggaattggactttgtcctctgatggggcaccagggtggatgtgccccagaaggca

SEQ ID NO: 186375 - DNA, 424 bp, Homo sapiens
ataaatgtttaaatattttctgctttcaaatttattcatcatttttctccttttcacttctttcttcttctcttttttaaatttttatttatttatttgggagacaggtattgctctctcccccaggctggagtgtagtgacatgctcatagctcactgcagtatcccaggctcaagtgatcctcccacctcagcctcccacatgactgggaccacaggcacacaccaccacgcctggctaatttttgtatttgtagagatgagaccttgctatgttgcccagggtagtcttgaactcctgggctcaagcgatcctcctgcctcggcctcccaaactgctgggattgcaggcaggagcccctgcgcctgcccagctcacttttaattttttttggagagacagggtctcattgcattgcccagg

SEQ ID NO: 186376 - DNA, 190 bp, Homo sapiens
ttaagatttttaatgaaggagtggtgtgaatgggatgatcactctggctgctctgtggagaacagactgtttggcggggagaatggaagcaggaacacccgtcaggaagtgactgcatgcatgccagtgagagatcaccatggtttggtctgaggtgaagagaggcacacagatttgagagcaaatttgg

SEQ ID NO: 186377 - DNA, 358 bp, Homo sapiens
caccacactaccggaatcgaaatatactactaagctatagtacaaaaacagcaacataaaaacagacacatagaccaatggaacagaatagagaacccagaaataaaaccacacatttgcaaccaactcatttttgacaaaagcaccaagaacataccttgaagaaaggacagtcttcaatacaaggtgctgggaagactagatatccatatgcacaggaataaaactagagtcctatttctcaccatatagaaaagtcaaatcaaaatagattaaggatgtgaagttttggatgtctatatttgaaggaggtgaaagaagagcaggaaagggggccagtaaatgagaaaccgattag

SEQ ID NO: 186378 - DNA, 291 bp, Homo sapiens
ttttcagccagtttaggtagattcttagattattgatgtgagatctgtccttttttataataagaacatttaaccctatacattcctccctaagcatggctttttctgcatcctccaatttgtatgttgtcttttcatgtttgttcagttcaaaacacttagtaatttcccttgaaatgtttcattcaacccataaattattgagaatttgttattttccaaacatttagagaacattttcctgctatctttttgtaattaatttgaagttaaattccattttgcccagga

SEQ ID NO: 186379 - DNA, 188 bp, Homo sapiens
gcatactgtccagcatatgttaagtactctaaatgatgcgtggggatagtggtgtcctatcgtatgtagcacaaaagtgggtgccaagtcacagtgttgttcaagaccctgttcaagtcatttggacaaatttaatgatgctggtgaagctcccaatcaactcacagatgcctatttaacctctgctg

SEQ ID NO: 186380 - DNA, 266 bp, Homo sapiens
tgctcactgctcattcctctcatttttcccctgagtcttgctctccctccagggacatggctccatcctgctggtttgccatagttcctcatggtcatcctggaaattcatctggaaggcccgtgtgtttgaaggtccacaaggtgccgtacctacaagacagacacactgtgtattgctgtgcttacacggtcttcgtctctgtatctgcttgccaaagaccctcttgccattggaggtgaggaagacacgagcagggtgagggg

SEQ ID NO: 186381 - DNA, 406 bp, Homo sapiens
ccaacatggcagaggctgcagtccgtcttcccttcaaaaacttggaatgatttcaaatcataggcaccttcacttaaccctagcttccattcatcagcaaacacatcggatcgatgctacgctaacctatcgggttctctctccgcgcgttcaggttaaatgaatacctgacgaaagggcccacgtttcaaggcagtgacatttgatagctgagaggaaaagtggctttaatgaaaagcaacctttggaattcctgcttgtgagaaatccaattcagctttttgtgctgccagcaagaaatgatcagtagcaccagtgtttatgattttgtttgtctcaaatgtgcggcctaaaggaaccagagctacaaacctaaaagactagaaagtgggcaagtgctcacact

SEQ ID NO: 186382 - DNA, 960 bp, Homo sapiens
actggagtgcactggcctgatcatagctcactgcagcctcaaactcctgggttcaagccatcctcccacctcagccttctgagtcactggtgcagctttctcagagaccctgctacctttctgacagaccccaaggtgcagatggaaggggactaggtgtcctaggaaggcccaggcatccagacccccagctccatgttttcccctcacccaagggtcttggatgcatccttgcacaccttggtacattcaagtcatgatgagtgtaggggatgagggagaaccacaggagcaagggcttctcacaatctcaagccttgcctctgctgatgtgcccagcttcaatgcccaccagtatactgactgatactctgctcccaccagaccatatcgtttcacacatcctagcctttacaaatactggcctctgcctagaatgctcatttagtatttgggtgctgaagacacaaaatggtggggaaaacaagcaacatctctgccctgaagagcttaaacgctttctttctctgtttggcaaactcctatgcatccttcaaaacccagctcagttgtcacctcctcctgaaagcagcccaattgccctgctttggatcctgttaaagcaccctcccgcaaccctgtcttactgtgatgtcaggagctggccagtgtttttgcagggagggttggagaaggaagcataaccagttctaaactctcctctcctctgctgaatcatgcccattgcttcctgagtggcacagaaaggggaacagatgcactttctaaaccagggagctctccaaggaggcttcagactgatatgccctgattgcagaggtctggccccagaggtcctactctctcgctaacctcacccacctgtctctgtctcgtcccttccctcttctccctcttaaagcataaattaaagatgctgttgtaaggatgctcagggtc

SEQ ID NO: 186383 - DNA, 977 bp, Homo sapiens
cgtggtggcacacgcctgtagtcccagctacttggaaggctgaggcagcagaatctcttgaacccaaaaggcggagattccagtgagctgagactgcgccactgcactccagcctggatgacaaagactccgtctcaaaacaaaacaaaacaaaacaaaaacaaaaacaaaaactaaaactttaatcacatccagcttttgaggatgttccaggtttactacctactaaatacacagtgaatgaaaaatacaccatgattagcattaccataaaatgctaacatgattcaacaggaatggcttttctagaaaacgaatcccatttatcaaaatattatgctccctttgtatttccccaaaataagcaaatttaaggagtgcctctttccaaatttagggtgggaaacatgacattctttcactatttactcttttatggtttactttaaattgaagtaactcttattttattcaaataaatttctttaggaaaaaaatgcagatataaatgagttaactttttaggcaatgtaagaaagagaagttacaaaaagtgggctctgctattagactgcctaggttcactcccaaattacaaagatgtgaatctttggtccgtgttatttaaattcactgggacaagagtctcatagggttgttgtgaaaagcaaatgagtcaataaaggtaaactgcttatcagacccttgccaggcacatggaatgtgctaaaaaaaaaaaaaaaaaaagaactattattacactgattataaagcagtcttgttttacaattcctgctttacaactattattgatgtttcacaaactcccacaaattgaggtaatttctgtaacacccacactacccaatacaattatatttggaatataaaacatggtcaggcgatgtgtttttaaagggggatgtctcactgagagctgaactaaattagagtaaggtaccaaggtaccaaattac

SEQ ID NO: 186384 - DNA, 657 bp, Homo sapiens
agaggaaatcacttatggtagggtatcctgagtatggcgggagagcagggaaggaacccccagattccattccctctgtttgtctgctggtgacagcacataagcatgccctggacacccccatggacccaaatttagaaagtggataaattagggtgccattattcattttacaaaagaattcactgcaggagtcctttaaatggcaaagtcccctggtgccttttagcatctttatagatcaccagctactttgacagagaggctgggcaggcagagaattaaaattacagtgtaaggagccactgcccactgcagctcaatcccaaagaaaatcgcatctcagaaatgatggctatagctgacaggttctcatttactggctttttaggtagggtgatgtgtccggcaaggccactcgatggcaggagagggggagtgagtggcatcagcaacctggggatgtgagctgtgaagagtacattctttaccatgctgttcctggcacctctccctgggaatcaacatgcctactgagcccacgatctgatctaggaggatgtctctccccatttctaaactcccaggccacatgatcaagtccatgtcctaacatctgcctgaggttcctttcttgctccttcttgttccatccac

SEQ ID NO: 186385 - DNA, 564 bp, Homo sapiens
cctaccatccatccatccatccatccatccatccatccatccatccatccattcatctctccctctcccacaatccatctactcactgagaaacatccagcgaaggctctctgctggcctttcgtatacctatccaaacatcacttagagctggtctgaattacagtataaaaaccggtaatctgcatcaacattaccaatcagttgccaatgttaccaatcaatgttaccaacaggtctgaccatgtctgcaggattgtgcttattgggcagtaggaagaccctggagctgtggagtgtgaatgaggcctagagctaagtcatgttctcccaaacacatggtttcacctgcaggctcatagcatttgctggtcagcaggcctgacctcatcactacaggaagggaggtgaggcccagccctcatgccccctctcctttctctgccccccagggctccttcctcacactgacctcctgggcctggcctccctagcacagccccaccgtctctccctcctttctcctactgaccttggcttggccggtgctgtggctgtggcaag

SEQ ID NO: 186386 - DNA, 553 bp, Homo sapiens
catgtaatgaatatactatggcaaaggcctggggttagtggaagaacacaggctttgaatcccagcactgccatttaccacgtgtgaccccgagcctcagttactgcactcataaaaggaacgtatttacatgttccttgcaaaactgtcaagaataaatgaggtcattcaaactattgaaacaacagcatttacaacatgctaacaatgtcagtttccttaatccacaataaaaaatccttaaagtattttcagtaggtacattttatataaatgtccatgctattttacatacgatatcaatgagccattccaaagcctctcaaaggtcacagtctaatcaaaatggaacatttcacatatgagtcattttgtcatttttgtatgtatgtggcaagtccctgggttgtagtctcagactcttgaagtttaattaaagagctgtttttgaagatgaggactccaatacatgcatcttagaacttttaaatgccccataattcctacacttcatatgtcaccaacatccagtttgatcctttgcttgaatttc

SEQ ID NO: 186387 - DNA, 217 bp, Homo sapiens
ggtctgtgccctgtgtggggtgcctgccctgtgtgtggtgcatggggtctgtgccctgtgtgaggtgcctgccctgtgtggggtgtgtggggtctgtgccctgtgtggggtgcctgccctgtgtgggatgcgtggggtctgtgccctgtgtgaggtgcctgccctgtgtggggtgcgtggggtctgtgccctgtgtggggtgcctgccctgtgtggg

SEQ ID NO: 186388 - DNA, 292 bp, Homo sapiens
agtgaagggggaacagagtcagggtgcttgtgtggtcactcactgtgggtcagtgtttttgttggagtgttatgtggtgtctgctacttgggcttctcccatgctgtcagggccaaacctgtttgttttcacatgtcggggagatagacatgcaattaatgagctgccttatgcttaacgtggtggtgttttggagggctttcaatttcttattgggaatgtgagttttggtggtccatatagactggagcctttctgacattattccccatcaagccgtagtggcagttac

SEQ ID NO: 186389 - DNA, 247 bp, Homo sapiens
cccacaaggaagaaaaaagggaatgaagaaaatgggggaagaggtgagggaataaaaagaaataagatagaggtaaattttccaaagaggaaaagagattaaaaggtagcacaaaaaactagagtttaaagttctgggcaattcacagacaataatctcaatctctctctctctctctatttttccctatcaaaatttaattgcatgtatcaacattatagataaaaccattaaacaatcaagacca

SEQ ID NO: 186390 - DNA, 283 bp, Homo sapiens
ataacaccttcctgctcttgttcagttcttctgcctagtagacttcagcagtgtgagtttggttttataactactgtaaagtcatttttacatgaactgctcaccacttagtcctaattatcattggaacataaaatggacaaaacattaaaataggtgtcatgtaaatgttattgtaaattttatttatttataacactcttgaaggtttattagtttttgactgcttacaattttttttaattacagggaatatttatcagccgccccaagtgttgataag

SEQ ID NO: 186391 - DNA, 513 bp, Homo sapiens
taagtggaatgttttggctttatgtaagcaaaatggaaacacggtgattaatttacaatagttagctttaaaagttgtaggcaaaagtccagtactactgggaaaaaaacaccaaccagggaccagagaggactagggtcctaaatgcaacccagctattaactgtgtgaccttattaaccctactaagattgtgtgaccatggacaaaatgagaggaatacttgggccacacataggctggaacactattagaactactaaaaaacgacagacacctatgtgtattaacctaggagaagttgtaaaatatgtaaaacaaaaaacataatgcaaaattataggaactaatatataaaatgatactatttgagataataaatcgataagatatacagatgtgcatgtaagcccctgggagaaactggaagggtatacaccactgacaggttgtgtttgggtgcaggatggggaagagcagcagagtgggtctacattcctctactgtcagaaaa

SEQ ID NO: 186392 - DNA, 121 bp, Homo sapiens
tatgaaagaaaataattactgatgcagccttttcttttttaaccaaacaatgaatgaagtgtgaagatggaatcaagataagttcagaaatgcatgactttaatacatgctaatagtggag

SEQ ID NO: 186393 - DNA, 305 bp, Homo sapiens
aaccataggtatttctttttactggaaaaacaattagttgtttcggttttattttttcctttaattaacagtactagtgactttgtgaaagaatatgagttactatttaggtatgcttacttaactacaatacactacattgcagtatttctgaaacctaggacatacacattatatataacaactctatattgaaatatatattacattatattcattttaacttttgaatctgcctatgatcatgagttgattgaaatattatgtctttgcttatatcacccatcaccaacctgctgcagtta

SEQ ID NO: 186394 - DNA, 325 bp, Homo sapiens
attctttttctctgatattgggttttttatttctagcatttccattgactattttagtttccatctctaggggaaatgcatattgcctgcctttccttctagagcctctgctgtgttcatcatagttaccttagagtccttgatctatagttcagaaaacagggtcagccctgagtctgagtctcctaattcctttatcatctcttgactgtaatttgcttttccttgctttttttgtgctttataaattttaattgcatgctggacattgtgtgtagaagaacaatagcgaatgaggtaagttgcatagtctatagtttagtaa

SEQ ID NO: 186395 - DNA, 131 bp, Homo sapiens
cctcatttttgccctcttgctccccaggattaaatcacagcagtcgagattgaagcaacgttcaaatcagtttcaggaccttgttctcatactcctaaatcttgagctaacaaagccttcagtgcagtgtt

SEQ ID NO: 186396 - DNA, 124 bp, Homo sapiens
ttttgtgaacatcttcactgcaatatcattacataccccgagcctgagccagacagttgagcctttcccagattcctgaccctcagaaactcttattttaataaattcttatttttctacattg

SEQ ID NO: 186397 - DNA, 1147 bp, Homo sapiens
  misc_feature (817)..(817): n is a, c, g, or t
  misc_feature (833)..(833): n is a, c, g, or t
  misc_feature (926)..(926): n is a, c, g, or t
gaagattataatacctgtgagggagcatttggtgcccttcagaagatttgtgaagattctgctgagattttagacagtgatgttttagatcgtcctctcaacatcatgattcccaaatttttacagttcttcaagcatagtagtccaaaaataaggtctcacgctgttgcatgtgtcaatcagtttatcatcagtaggactcaagctctaatgttgcacattgattcttttattgagaatctctttgcattagctggtgatgaagaaccagaggtacggaaaaatgtgtgccgagcacttgtgatgttgctcgaagttcgaatggatcgcctgcttcctcacatgcataatatagttgagtacatgctacagaggactcaagatcaagatgaaaatgtggctttagaagcctgtgaatttggctaactttagctgaacagccaatatgcaaagatgtactcgtaaggcatcttcctaagttgattcctgtgttagtgaatggcatgaagtactcagacatagatattatcctacttaagggtgatgttgaagaagacgaaacgattcctgatagtgaacaggatatacggccacgttttcaccgatcgaggacggtggctcagcagcatgatgaagatggaattgaagaggaagatgatgatgatgatgaaattgatgatgatgatacaatttctgactggaatctaagaaaatgttctgctgctgccctggatgttcttgcaaatgtgtatcgtgatgaactgtgccacatattttgccctttgaaagaattactttttcatcatgaatgggtgtnaaagaatcaggcattnggtttaggagcaattgctgaaggttgctgcagggcatgattccatacttgcctgagcttattcctcaccttattcagtgcctctctgataaanaggctctgtgcgtccataacatgctggactcttaggcgcgtatgcacactgggtgggtccggcagcggccgacacgtcccgacggcataatgacgactggtaagcgctcgtgtagcacagaagtacacgacgcggcgcgggcttgtcacctacaggaagcggagaaccggcaaccaggcaatactagaaccggcctgcatcacatacgacatacacgctca

SEQ ID NO: 186398 - DNA, 347 bp, Homo sapiens
ctatctctatcctcctcccaaacaaatcagtgatctcaatgagtcttaaccctttgaacacccactctcattattgttgtctagggcaatgcttttcactctctgtggggaaagaccagttggctggagttttttttttcttcattccattgtgaactgatacttttgtaaaatacaatgaagagtcacaataacgtcaaattgctatagaagttttgaaacttttaccctcactttttccacgttgctcaccacagattgtgacagacagttcctagacaagcagcggtccagactacattttgaataacaatggcctagcttctttcaccttaaaacacataggt

SEQ ID NO: 186399 - DNA, 277 bp, Homo sapiens
ctgagcccaccagaccctgaaatccagaactccaaaaaaagccattattattagtaatttttcctagagctcaaatctacaccattaagcttgacaacaaagtccaaatgatagttttaaccagatttagatgaaccgtgcttcaccccaaaacacacaaccacgtttcaaggtactttgtaatttgcacatccatccctagggaaacgcctaggaatggaatacgtttctgagctctcattatgatcattatacacagcctctttccaaaccacat

SEQ ID NO: 186400 - DNA, 299 bp, Homo sapiens
cttccatgcccactagactctctaatgaagcgtggctgtctctctctggaaaaaactatggaattcttcccacccaatgctcctagcagccacaaccaaagggtcagaggtgacccttacaatgaacccaatttgccatccctcaattagatgtttaagattcctttccactttaatatcctgtggtgcaaatctaagcaagcctgcttgtttggccacatggaggtacatgttcctgcaaaatcaaccccaagaaatcctgttgctcacaggtaagcaggtaacccctgcttccatag

SEQ ID NO: 186401 - DNA, 183 bp, Homo sapiens
agagcgcctttcttctgaggggagaaggatttgtgaggagcagtggttgtgacgtccactcctgttgctttttccagttttggtgtccacataccttggggaagctgtagaattattttatgcctaatttttctctttatagaaaattattattgaattatctgcatagttcatagttttgtt

SEQ ID NO: 186402 - DNA, 414 bp, Homo sapiens
tcctgggagtacaggcatgagccactgcacccagccacaatgggactatttttcaggaagctctgctaagttgtgctatgatctttgttaatactaagttgttgttaatatagtacgtaaccctacagagattctgttacatgcaaatgagagcttgttaaagatcatgcaaatgttggcattcaacttgggtttttgtaatctaggatttactcttttatttccagattcttaactaaaaactatttctgtccctggggaagattttcattccttctgaaacgatttactggttgttatgcacacacagtgggtcgctgataaaaatggaagaatttattacatttagggggatgggatgtggaaagcagacagctgacagctttgcattcttgtttgtaccagactctagac

SEQ ID NO: 186403 - DNA, 417 bp, Homo sapiens
gactctaaggatccccgtaaggcggatgttcacatttggggactggtttgtccatgcccttgggtttgagctttgtctgagctccaagggaatgggaactggacgttggtaatctgtgatgtgctgtggcatcgagttaatcagactgttgcctacagcttgtctttataaagtaccaactccagcgcatgccccgggagcccaagtggctgctgtacttgactgtgatgtcaataacgatgactgtaagggctgtggcgtgggacggattcttctcagtgcactgcgtcacttccagaaagaaaaccactgtgcccagctgacgcctggctaattttttttttttttgagatggagtttcactcttgtccccggggctggagtgcaatggcgctatcttggctcactgcaacctct

SEQ ID NO: 186404 - DNA, 248 bp, Homo sapiens
ttcatttgcttaagaaccttcctcaaacaactacctccctctagagattttttcttgtctgtcgataaatatgactgaatccttcccattttaaaaacaaaaccaaaaatagccctcctataaacagtgatcaccatgatttctactttgtcacattcacctctctgtagtatctaatagagaaacatttgtttttcctaagaattgagtataccctagagaaactcctattccattactatgcgtcc

SEQ ID NO: 186405 - DNA, 269 bp, Homo sapiens
tgcatcctaaacccatacaaggatgtataaatatagaaaaatgtattgagttgtaattgtactttatgtaggttaatgtcagttttttttaagtgttttaaaaggcagtgtaaaagagctggaagttagtatgtacacagatggccatggcattcagctggggctggtacagggtctgtgggactggttaggggtggggcaggcggctcagttctgacttgggttggaagagtggaatctgggcaggcttcccctaaggaagtggctct

SEQ ID NO: 186406 - DNA, 152 bp, Homo sapiens
atgtgttcgtttaagagactgcttttaagactcgtgtttttatttagggattgataaatatatggtatgtcagaaggataaaacaagtaaattttaactgactaaaatggatttatttcattgtggaaaataatagagggtgctactatgca

SEQ ID NO: 186407 - DNA, 428 bp, Homo sapiens
tgcatttgctgctgaggctccttggagctacagtgatacaagcatttcatttgtacctgtgttcctgtgtgaaattctcttcctagtggctgtgtgtggaccccagtcctatcccagtcctggtccacacttgactctgactggttgctgtactgccctctccctgagtgtaagccccttgcggactaggcccagtttgttttgctcaccatcatatctgtagtactggcatattaccttgcacacagtaggcactatgttataaactttgtatttctttaaagaagcatttttttaatagtttgagtactctgaaatcgggatgtacctcataatcaatggtatcttacctgaaatgtgccatttgttgaatgaataaatactgcattttagaattatttcagagattcttcttcaattgcctatac

SEQ ID NO: 186408 - DNA, 491 bp, Homo sapiens
cttatacaagcttccacagaatattagagatagactagagtgccctttatttcctacacaggtttgtgtattggaagagtacctaaacatactgtcaccaaaacaggatcatttccctcatccctcctcaaggaccttattctgtcagttacctcgtcttttctgtatcttctattgcttcctctccactgtcctttcaaattattattaatagaatactcaggacttaaatattgtaataaggacattgccatcacctatttcatctagacataatgtcatgcttcttcccttcccttcattgcccacagtggcacacgactcactattttactccctcaagttccattctaaattcagctcttctaaaactgttccagctggggtcgcagacaaatccatgggacgatatgtagtcttcgtctgtcccaatttttgtgtagcatgaaaactcttgacaccacacactacaaactacatttcatgggagg

SEQ ID NO: 186409 - DNA, 321 bp, Homo sapiens
tgcattaagtatttaataactgtactaataattacaaacacttttaatgggccacttgggagccttaatgtggttaaaaaatgtatttcttctctgtcaagttaacttgtgtcaaattgagagaaattcttctaagcagctttgaaaggtttgagcttcataagcctaggagcaagtagcatattgtgaaagtagtttttatgtaagaagagacaacagaaatagggtgagtattaatgtagtgctttgtacatttcctttatagttttgtattttttaggtggagaagtgtcccaccaccctgttgcatccgctgtatgt

SEQ ID NO: 186410 - DNA, 160 bp, Homo sapiens
agaagatgatgtgtaatcatttttaaatttaaaagaaggcacagtgctacaaatgggtaattttgaatattggaactatggacatgtttttggaaaacccatctgttttcatgtttcttattttaactcgaatggggacttttattcagaggaggatttg

SEQ ID NO: 186411 - DNA, 262 bp, Homo sapiens
gtcttgtgacagagctttcggcacataacacagtgcctctcttctctgtctacaacaaaggccagccccgtggagagctaaaaagagtgaggaacaacaggcagacagatgatcctggagcacgttcagggaggagggcaggagccaggtctggctcagctccccaagtcagcggcacttcttgccttcagctgaaggcacggtcaaccgagaagccccggtgaacccacaagccacggtcgacccacaagccacggtgaaa

SEQ ID NO: 186412 - DNA, 600 bp, Homo sapiens
cctgttcctcgctgtcacacatattgaatgccagttcccgttcaatctatttcctaagtagctatttcctaaatctctttacttttcattctccccttgctgctggtccaagccatgagtaccggtctgaattattgcagcaatgtcccagctggtctcctttccttcagcactgtccttccccaatacactctctacagcacagccaaatactacaacctcaaagactttcccttttgttggaatgaagtccggaattcttaacatggatagcaaggcctgttattttcccttccttgtattattctcagcttcatctcccatcattctccagagcatgtgcaactgtcctctctgcaccctaaactccaccatatgcacattcagtaatgtggtaatgtcaagaactctccactttccaactttgcatatgctcttgcctctgcctgccctgtccatcatcttgctaatttctattcacactgtaggctttagtgcctcttccatgaaccattcatgaactccacatcacccagtcctaaaatcaaggatgactgcttgcataacatcctatattctgcctcatcctggaagtgatta

SEQ ID NO: 186413 - DNA, 198 bp, Homo sapiens
ccacctcagtctcccacgtagctgggactgcaggcgtgcatcaccatgtctggttaatttttgtatgttttgtagagaagcaattttgccatattgctcaggctatctcaaactcctggactcaagcgatctgcccaccttagcctcccaaaatgttgggattacaagcataaaccactgcgcctggccataaggtgg

SEQ ID NO: 186414 - DNA, 212 bp, Homo sapiens
ctcatcatcatccaatttattcctttagtttatattaccacaactctcctaaacgtcccaaagtctattattaagtctaacaacttagcttcgaacctcaacccaagcatctgacaacacactgaaatgtgcaagcaagagtccctatggccgggtgcagtggctcttgcctataatcacaacacttcgggaggctggggcaggaggatcac

SEQ ID NO: 186415 - DNA, 471 bp, Homo sapiens
ctttgagaaccactatgaaattgtttagtgaattaaattattatgcttttcgctattcacatatccacttccattgactgttaaggaatatgcttcaaggaggacagatgagatataggtaaagtttatttttaagatacttaggtaaaacaaaataaaccagcaactggcagatgtttggtgaccttgaaatctggcttttgttttgagacagtgtctttaaaatgaccagtgccacaaatgtaaacaggggagttggagggcattggagtattcaggaagaaagtgagaaatcagtaatttgtagaacatgactaactggaactattgtttggtctgctggggtttgagggagtagaggaatttgtgaagaaggaaagaaggttaggagatgcatagagcagagaaacaagggtctaagctttcctaggaatctcaggtcagacccttgttaaattttgtccgtatatt

SEQ ID NO: 186416 - DNA, 357 bp, Homo sapiens
aaagtcactaaagtatgaggatctattttccatttgggaaatatgctcttcttcggaaagactcaggttggaaggggagcattaaatttagaagagaaagatttggtacttacaaaatacaaaaacggtgtgattcatgttttctgaaatagctgctagtcagcttttcaatgtactgcatgcattcagtccactgcaccgtctcattttctacccattatcaatacaaaaattagagtatcttgacaacagatttttcacagtgggattcactttattctagggtcttttctagtaaaaataaaatagcaaaggaactccattatctagaagattttcaatacagcctattccagc

SEQ ID NO: 186417 - DNA, 687 bp, Homo sapiens
ttatctggaagtggaaaggggtcatcgtattgaagggtggggaacatgctatttacaataactgacaattatctgcaaatacagtagttaaataaaatggatatatccataaaatggaatattatgcagctgcaaaacaaaggtctcctctacaccctgatgtgaaaggatcaggaaggcttaaagttaactggaaaaacaaaacaaaatctaaggctcagtgtgctatctttttgtgttgggagggatatgaatatatatatatttacatgtccttgtacgtgcataaagaaattctggagacgtgtacatatacaaattaataaaaaatatatatttgtgacagagtatgagcacaaaagaggacaacagacagagtggcagcaatgctgtatatttcttagcttagctttagctggcatgtcttccccttaggaaggaaggagaatagcatacaaacaggtagcagtaaggatccagatgacagtatggatctcaaaaagtgggaagttgagcttgaaaggggcttccactagcaccataatttgagcgataaattatgctaataaaaaattacaaacaactgaataaaataagaacccatgggtccatactgatatgaatgaatgattgagtgagtgaatggagagaagtaccaaatcttacagtaaaatatcaactaatgta

SEQ ID NO: 186418 - DNA, 699 bp, Homo sapiens
gagtctagctggggagacataagattggaatctatatacagatagcccagtaaggcaagctaggtccagtggtgaaactgatagggtttcaccagctgaggtccccaagggtgagagaatgtcaaagaagacttcctggaggaggcaagttaaaggggattatgggttgggcaggtggacagcttcctgatccactaatcagaggaacactgaaaccacagggatccatcagaaatctgctgcctgttaactcaggtttccacctgcagcttctcacatagctggtggaaatgaaattggtgtcccttttgccaaaatagacaatgcccctaagtagaaagaaaagctactcctccccagcaccagcctacctctgtgggggtatttctgcaatgtgcattgcaagttgctgcatccactggccagtctggctctgagatcagccagctggcagcctctgcagtgggcatggctgggcagcctgaattctgaaaccaattaatgcactgcaaaggacggtttaccaagaaggtatctgcaagccttaaaaaatatctcctaaaaagttgtccacttgtagtcccagctactcgggaggctgagactggaggattgcttgaggctatgagtttgaggctgtggtgagctatgattgcatcaatgcataccagcctgggcaaccaagtgaaacaccgttgc

SEQ ID NO: 186419 - DNA, 194 bp, Homo sapiens
atctacagactaaaacccctcaataagcatggatacagaaatcctttaaaaatttagcaaatcatatccagcaccatataaagaggataacaccctatgaccaaatgggatacatttgagaaatactaggttcacatgattattaattatacataagaattatatagaattgtttaatacacaatagtaacagc

SEQ ID NO: 186420 - DNA, 722 bp, Homo sapiens
taaaatcttgatcatgttttgattggggttgtatagaatttatagatttattgggggattaaaatggagcaaaatattagctcttaggattgggatctggcacagggcaagcgtgcataactttttgcggagtcatgacccactgtctgtggaaggtgggaaggtgggcgtcccgcgctctctggacagcagaggccctctctggccctgggtcaggatgctcagtgtggggcagtggaaggtgctgtcattttctcccgaggcatgcagacaccagggattcctccagaggctctgtcggggcctccatgagatacaaagtgctggacgggaagggttggttccaacaccattcactcgctcacactcatcaaatgctcactgagcgcctgccccatgcaggtgctgggtgctgggtgctccaggggcaggcaagaaactcccgtgtctctgaaagaccttcctccagattcccaaaggcgggtgtggagcagggtggggtgaccctgaggaagagcccctcactgcagcctggaggggacagtctctggggtgggcttcacaggataggtcagttttccaggcaccaccaagaatggggctttgtagggagaggacgtggcatgtctggagacacagtggtgtggggtgggggctgggagggggtggcccgagtcggggaagggcagttggagatgaagcctgcttgaatcttgcttgag

SEQ ID NO: 186421 - DNA, 606 bp, Homo sapiens
ttgttcaatttccacctataagtgagaacatgtggtgtttggttttctgtccttgcgatagtttgctcacaatgatggttttcagcttcatccatgtccctacaaaggacatgaactcatccaaaaaggtgtatgatttttacagggaaagacatacttgataacctaaatgactgcctaacaaaaaatatacttttaatataaatatttacacctaaaatttatatcacaccttgttggctttgaaaagattttggaaaaagtaacagaatgatacataggttattaagcagaatttttaatgacaactttatcttataaaaatgacataaaaaatcaaccattaatttctcctgttgactgctacaagtcaatgagaatactgggtatttctcaccgagggtgagaaatttttttatgttatagataccgcaaattcactactactcaacacttttattgaaaacaaactggaatcaaaaactaagctttctatcagttacttaattcaatctactagtcattgaaacattggtcctggattatttcctcaaagtttgtgacaatatgggggaaagaacactcatatactacaggtggcaatgt

SEQ ID NO: 186422 - DNA, 159 bp, Homo sapiens
gagtgagtaccttcaatgagtgggaaagaataaacggcttcaaccattgcagacatgcccccaaaagaggaattactatgcctgctgagtttgggcacccccatcataagcattctctctgtttcaccagagttttagatctagtgtattccccatgcc

SEQ ID NO: 186423 - DNA, 535 bp, Homo sapiens
tagctgtctagaggatcccacgctgacctcttcccacagttacatgtctgcagtcgttcttaaccaaagctttcagaatacagaactactgatcctgaaagttgatcttaaaactcctgatcctagaagcccgaattggaggtggaagtagtattttctcaaattggggtaaagacagtgggagggaataggagtaaagtatgcataatttggtatgtaaagaaaaaagtacttttctttagaatgatgatatagatagcaagctaaacaagtgaatgtaccgagtgggaaaccagatgacagtagtgagcatccaggagtgtgagtttgtcatgggggagggagaagcacctaggaggcagatcagggtcacagctgcatgttttaagagtgaaaatagtggcctttcttaggcacataaaagtgccacgcactaggctggccactcagctttcacaacagaggggaggtatttgtatagtatgtgcttacagatgaggaagctaagactcagagaggttaagtagcttgccta

SEQ ID NO: 186424 - DNA, 269 bp, Homo sapiens
tgtgaaagctctaagctgcaagacaaagatttatacaagacagaaggaaaaggaagtcacagggtaatctgaaatacagcaaacatcactttccaaaaatatgctgtatatgcaaatgtgtgataaacgtcattagagtaagaaggaaacaaaggcacaacgaaatggctggtaaacatcacagctgccttctaaggagggtggattctaaccaaagaagcctcaggctccctctgcacagctgctggcagtgtgtagatggcagttgg

SEQ ID NO: 186425 - DNA, 709 bp, Homo sapiens
tcctctgggaaaagtttatgtaattttttcttacatattaaaattataaaggataaactctccctttgtttttgttgttcaaaactggtagtttttcttgaatttttatatttatgttttttgtcactatccacaccatattttttccaaagcctgagccactctgtggttcttgccccaatataacaatcatcccttcactcttagaattccttttcccttgtcattttgcctttctacagtttataaaaaatgaggactttggggagggaaaaaacccaacatttctgtgaactcgagactataggcagtgcctaaaccagtaggatcaggcaaataaaactagttggacagcagacatatcatgaactcttgcaacagcgtgttatctgtatgcatgtctaaagtgttatactgattcactattacaataaggatcatgcagttgaccagggtgaagcaggactgtctacaggattatgtgaattgtggtggtggagacagtatacaagattaatggattaaaacctagctgctttcctggaaaatggcctatgttctaaaagacaaaatctagtttttatttttttaatttatgaagctacaagtcaataatatgctagtgcttctggttcaaaatgaaagcaactggctatggtaatgtagagaagacagcaggaatagcaccagaatgttcgaggctttttaa

SEQ ID NO: 186426 - DNA, 336 bp, Homo sapiens
gcatcctgtggtacagaggatgtatttaccagtcttctcttgagatggatacttaggttgtttctgacctgtttttatcagaactacaagaccgtgtatatatcctggaatcaacatatctttgcacatgtgtgtgatcttatgtgcaggataaattcctaataatgacagctacaatgtctatttttaatttttctagataatgccaagttgcctctgaaaaagctgtacaaatgtatgtgatccacagtgtttgggagtgattgttttcctgttatcactatggcatttcatcaacaattttacttctgccaatctaataagcaaaagtattct

SEQ ID NO: 186427 - DNA, 310 bp, Homo sapiens
aataagtgtttctttaaaataaaaacaaaacaaaagcacaagtaagagaatgaataggtgtccaactccattcccaggatattttgaaaatcattagctaatacttgagcacttgtcaggagcacacgttgtttcccagatgctcattgccttctcaccactctgcataatcctaacacatgacacattagtttcagatgagccagatgccaaatgggagacattttacagtacagagaaatcagagtggtggagtaatacagaaacttttagccaaggcacattctctgggctctcaatcctttgcagc

SEQ ID NO: 186428 - DNA, 169 bp, Homo sapiens
taaggcagagcataaataaataactctaatggagggtggaggactcacagtagtagtaccatgaattacaacataaatgcctgaaaagagcctaggacagcatctgtgtgtaattaatagtcatgatgatcactcctaagtcactaagaaacagtttaaactttgcatg

SEQ ID NO: 186429 - DNA, 537 bp, Homo sapiens
tcatggaatacagacacagtcattactcagttacccttcaaagcctaagacctaaagacttgattggaccacaagaggaaaccagaaatgccaaagatgtatctttagccctttatctatgtaaatgttgtgctaatccaataaggaatgaataacaattctccttagtatatggtggtgagaataactgatacttttaactctttgacaatgatactattgtacagatgaatcacaagagatcagtttatttaggtattattctaataatggttagtggacagttttgccttcaagcatggaatcagtctaagaaaatcttaaaagctttttgaattcacatcaatgtcatcacaggagtagttttttttaggtggaattgatgtttactatgcccttaaagcaataatattgcactgtaagaggcttaacacatttttaacaacctctcttaccatcctagaagcactgctggatacatgttttcaagttgatgtggtttcagtgcagaaaggttctttaaggtagcatgaaaca

SEQ ID NO: 186430 - DNA, 231 bp, Homo sapiens
tgcgtgtgcactgattacaactactcctgtgttgtttacaaagaattcccaaggctatgagggaaagaagattagagaagctcttgtacatcctcttcttttgaaaagagtgatgcttgtcatgctgaatggggaaaaggtggaagcaattgccttggcaaccagagcaagacaaggctgccctctgtcaccactccgtattcaacatagtactggaaggtcctggcctaa

SEQ ID NO: 186431 - DNA, 118 bp, Homo sapiens
tgaatctgctggtacctctctcttctggggtcttcctttcctaagagtttcaaggtaacctccaatgtcatcagggaggtttgagaataactcagagctccctctcacccccaccctg

SEQ ID NO: 186432 - DNA, 354 bp, Homo sapiens
cttacttattagttctaggagtttttttgtggatgccttgggatcttctatgtacacaatcatgtaatctgcaaatatggggtcttattccttcttttccaatctatatgacttttacttccatttcttaccttattgcactggctagaaattacagcactatgttggataagcggtgagaactaatatccttggtttgttccccatcttagggacaaagcattcagtctcacccttaagtatgttagctgaaggcttatggtgtttaccctttatcaagttcaggaaaatccccctctatgtctatttttcctgagatttttaaaatcataaatgtgtgctaaattttgcatc

SEQ ID NO: 186433 - DNA, 616 bp, Homo sapiens
tggccgcatttttgccgtcttagaagtcaactggattttcatagctgtttctgccttcagtctatggagttaagatgtttcattggaagtataagaagacaatacagcctcacacaggtatttggttggaaaagggagaatagtttttaaaagcctttaaaaataattgttgatatgctcctttgatacactactaggtttcttttttcccccccctttttcgtaggacacatgctcaaagagatactaggtttcttagaggctagttgcaatgtggaatctgaaaccatatccaagaatttttttctactttgttacattaaaatccattggtctgtcagtgtcttgcatctggaatggatctcttacctgtgtaagatttttaacatcatacactgcttatttggaaaataatggttcagtgagttatgcagatcttccaatgttgacacattttcttatatagtatcaaacaataataattcattaatattacctctaaactcattaagcgtctttgatttttaggaagttgtcaggcttacagtggcagatgaaatctttctaaaattctgatttttctactgaaagcttaaattttaagcaacaatcttaa

SEQ ID NO: 186434 - DNA, 1050 bp, Homo sapiens
tatttatggtatttatcaactaactgctgtgtactatgctctattgaaaatgttagcaatatagtaatgaacaaaacagatgttatctctacccttatggtttttatattttaataaaagtggcagaaaagaaataggtaaaacaataaactgagctctttggagaagaggcccacgttcttttcagattctgatttctccgtgatataaatagttttttaggtgatcacttgtttttaatgtacctacctatctatacctttctctctctctctctctctctgtgtgtatgtgtgtgtgtgtataaaattacatatccagtatgaaacctaaaaataagattttggggcctgtgaatttttttaacctttcttaacctacatcctaattatttgatttgacattgtgatgaaacatactgttgttttgaattttggaaatagaccagtgattcttcagtagggtcgtaaggtcccgtcaatgcagcagtcaaattttttcttggtgggggggatgcatatgtgtatgtgtgtgcatgagtatcttgataatttagaaagattaattaaacattgatcatctatgtgaccacatttaaaatgagcaccaccacatccaaatgtctgagtttacattttgtgtcggtacttgctttggcagaactctgtgcctttccccaagtcttctgtgaccttctcacctggcctgcatcctggtccttatcaaccgtattttacagttaaggaaactcggctcaaactagcttcggggactcgctgtggccataggtgccctaggctgcagtctgagagtgaaactgaggtctcactcccttcatagtctgctctccgtctctgcctcatctggcttctcagggtggtggggcgtgggcactaatttgatttgatcacttagagacaacagcttacaaaatgctaccgagcagtgcctgtcctttctgagaacttgatataataacgttggcttgatctcctcagcctgtgtcttgagggaacaagtaaattaaacaagtaattagatccataatgt

SEQ ID NO: 186435 - DNA, 209 bp, Homo sapiens
acttctatatgtgatttgtattttttattataacctcatatttgttggaaatctatctatgagaatcctttgggacctaggtgaagatattctaaagagaatctgcatttttccttgcctaactcccataagcactaccaacccagatccactttaaaattatttcgttgcaattttcagaccacacacattacataaattaaaacccc

SEQ ID NO: 186436 - DNA, 176 bp, Homo sapiens
aggcatgagccaccgtgcctagccagattacttattttcagataacccatatagccttggtgtgacatagctacttcagtgtttcttgctagttctatttcattatattttaaagcagcttgaattttaatttttgtttacaaagtctattttgtggacttatctgtgtaaaaaga

SEQ ID NO: 186437 - DNA, 801 bp, Homo sapiens
  misc_feature (732)..(733): n is a, c, g, or t
  misc_feature (737)..(737): n is a, c, g, or t
  misc_feature (754)..(755): n is a, c, g, or t
aggggtccatacggcgtgttctggattcccgtcgtaacttaaagggaaattttcacaatgtccggagcccttgatgtcctgcaaatgaaggaggaggatgtccttaagttccttgcagcaggaacccacttaggtggcaccaatcttgacttccagatggaacagtacatctataaaaggaaaagtgatggcatctatatcataaatctcaagaggacctgggagaagcttctgctggcagctcgtgcaattgttgccattgaaaaccctgctgatgtcagtgttatatcctccaggaatactggccagagggctgtgctgaagtttgctgctgccactggagccactccaattgctggccgcttcactcctggaaccttcactaaccagatccaggcagccttccgggagccacggcttcttgtggttactgaccccagggctgaccaccagcctctcacggaggcatcttatgttaacctacctaccattgcgctgtgtaacacagattctcctctgcgctatgtggacattgccatcccatgcaacaacaagggagctcactcagtgggtttgatgtggtggatgctggctcgggaagttctgcgcatgcgtggcaccatttcccgtgaacacccatgggaggtcatgcctgatctgtacttctacagagatcctgaagagattgcacaagaagagcaggctgtgctgacacggcgtgacccagggggnntccnggtgaatggctggtccnntcctggttcctggacccaggctgggtgcgacgggtcgcgtgtccgg

SEQ ID NO: 186438 - DNA, 276 bp, Homo sapiens
tgtggggatggctgcagcgtgagttaccggacacaaatttcttcagagactacatgaagacaacaaaataggctactcattatggccttcccccactgcctttaaaaaaattctaaaattgtggtaaaagacataatataaatgttatcatcctaaccatctggagcatacagttcagttgccttagtgttgtacagcagaatcttcacacctttttcatcttgcagaatgaaaattctgtacccgtttcctcctcccccagctcttggcacccac

SEQ ID NO: 186439 - DNA, 480 bp, Homo sapiens
cctgataacaaactagcccacagtgctgagctctcctccatgccagcatgctgcagccttttataatctaactaaattctaaggtaaagccataaccacctcattcttccctggacatgtctaaaatagtaagatcatcctcatggagaaatagatcataggtattaactggtagtacataaaacaaaaacaacaaaaacattaggccattgcattttctgttaataagaagttgcagtgccccattaaattttctgtgtcaccaaagcctcccagttgtagttacacaaaggcaactttgtcttgagaaggctactgggaagatgggcctaatcttggcaagggcttggtgtaccaagaaccatgttattattttttaatcaaatgacaacacacaaaaagaaatattatttaagccatcttttcttttctttttctttttttttttttttttttttgttgttgttgcccaggctggag

SEQ ID NO: 186440 - DNA, 420 bp, Homo sapiens
cctgataacaaactagcccacagtgctgagctctcctccatgccagcatgctgcagccttttataatctaactaaattctaaggtaaagccataaccacctcattcttccctggacatgtctaaaatagtaagatcatcctcatggagaaatagatcataggtattaactggtagtacataaaacaaaaacaacaaaaacattaggccattgcattttctgttaataagaagttgcagtgccccattaaattttctgtgtcaccaaagcctcccagttgtagttacacaaaggcaactttgtcttgagaaggctactgggaagatgggcctaatcttggcaagggcttggtgacacagaaaattaatggggcactgcaacttcttataacagtaaatcggtagccgagctcgattctatc

SEQ ID NO: 186441 - DNA, 392 bp, Homo sapiens
gttacaattcctagctttatcacttagtagctatgaaattacaggcaagttgcttcccttcgctgagcctcacttgactcttttgtagtgagaattaggagcacctacttcttaggattgttgtaagaattaaataggataatccctataaagcacagtgcatggggcaagatgctcactaaacactagctactaaaattcaccactgaaagtttctgaagcccatctagtccatgttctaccctatacaatgatctcatcttattcattttcaggacgttatccctgggcctctgtgggatggctagggggcagttaaaggaagattttgcaaaaaagagtaataagttcctactctccacactgactcctctttcataacaactatcagc

SEQ ID NO: 186442 - DNA, 408 bp, Homo sapiens
ctagaggatccctcattctccccgactaataatttgagaagataaactaaaagtaaatgcattgaggggttactatttttttaggtgctgtagatatataatcatattaaattctcataggtattattattctcagtttacatatggggaaactgaggctcaggtaagttaatgaatttgcttaaaaaaatgccgcaacctatactggttccatcttgaatgcagccttttccaagccttctactttcttcaagacacaatacagtgcagaatagatcctggagaagactgggttggaattctccctcccgtacagtcctaattgtttgatttgtgtaaagcattcaatttttctgtctcttaagttttcttataaaggagataacatctctccaaggaactgctgag

SEQ ID NO: 186443 - DNA, 409 bp, Homo sapiens
gatcagcatagaggttatggaaataataatgcatcactgtggcaaggatcgtgttggaggtcataatcttcacaccaaacactgaggctgaaatatgctgcttatcaaaactgccacctgctataggagcagctgttgatccaggacccctgttggcctccagaccaccttgtttgagggcattcaagttgctcccactgggacttctcactgtgtatatgtgcaagcatatgggctcttcaggtcaaactgtggaaagctgtactggaagaaatttaaagtctctacaataataaaattctattttgaaataatatatgaatgtcagtagacttcagcaatgcctaaagtgtatgaaaacctaaattatgaactacacttcttagaaaataaaaaagtcttttgtttg

SEQ ID NO: 186444 - DNA, 369 bp, Homo sapiens
acgttgacacttcaggaggtcctgatgatatgtgcccaaggtggtcaggccacaacttggttttatacattttaggcagacataaggcatcagtcgatacatgtaagatgtacattgcttgggtctggaaaggcaggacaagtggaagcaggggcttccaagtcataggcagattcagagattttctgattggtagttagttgaaagagtttttatcactagaaaggaatgtctgggttaccataaggaattgtggagaccaaagtgttgtcatgctgatgaagccaccaggtaccagatttcagaatagactgtaaatgtttcttatcagacttgaagagtatgttttatgtttcttttttttttttt

SEQ ID NO: 186445 - DNA, 323 bp, Homo sapiens
ctttaacctctgagagctccgtctgggacagactgccctttagtatatgggacatgttccctatccattccactgtgctcccacatcttcctgttgttaccactggaaaggaatctacatggactacattaaattttatccctaggatataattatatcccattaaattatatccctaggatatagtttaatattacgcccttgtagctttcattgattttttatgaaataattcagacgtataataatcctccatgcaccttctaccctactaaagaaataaaacactacaatacaatcgaacctctaatcctccctaatcc

SEQ ID NO: 186446 - DNA, 349 bp, Homo sapiens
  misc_feature (313)..(313): n is a, c, g, or t
  misc_feature (332)..(332): n is a, c, g, or t
  misc_feature (342)..(342): n is a, c, g, or t
gaaatttatagcttgcccataccatgcctttaaccctctcctatccatagggtagatgggctgagggaagccaagtgagcagcaggcatgcttgggcaccagcagggtagaataatgtgtggaggagggagggggcaatgacacccctcccctccattctatgtgtccagtcttaggcccctgctgccctcctggctctcagtggagagaaaagaggaaataaatttggacccagccttgagatcctggaagagctcaattggatgttggtttggcatcctagcatctcctcacaaaattatgatcttccctngggcatttctaggccaccnaattgggttngcctgca

SEQ ID NO: 186447 - DNA, 304 bp, Homo sapiens
aggctggctgggtggaattgtcttcccacctgtgagtcacactttgtcagcactacccagtatagggggggaaaggtcatttttttacctgccttatcttggaatcttttcagcagtgcttccacaagagaattaagccctactaccctgaggcatccatggtacgtgtgacttaactttgtcttctacatctcaagctgggaaaattagccagtcagatcccgctgggtgttctgtggttaggctctcaaagaggctggagttctagggccgggcatagtggctcaagccagtaattccagca

SEQ ID NO: 186448 - DNA, 376 bp, Homo sapiens
atcagggattttatttccaaagattctgagacacctagctcttaccaatgttctgccttccccattctaggaagaaactccacttaatgtggagcatgaagtgactgaggagtcacagaattgtgtcattcttggccactgatgttggggaatatttaataatgctacacaagaagtttgctgggggaacacagagggagactaagcaggaaagattatttcctaccaaaaaagcttagaaacatttctcaatttaagcagcatgtcagctagtgtgcagttgttagcagagagacctgcttccctccaacagactgcaaacatatagtcacacagccatttctgggcactggaaataaaaaatacatatagtgga

SEQ ID NO: 186449 - DNA, 391 bp, Homo sapiens
aaaagcctagtgcctcacccagacttttgatgaaggatggatttgaagttacattctcttagcctaaaactgtctcttaaagctaaggaaagtattggagataaaagcgtgcaagcagactctacacagttgggcaagtaaccttttgtaaaattttaactttggccaaaatgcccagttgctttttctaaagaaggtgcttgtattagagacaaaaaataaattaataactatattaaatgatgtgccaaaataggtaccctcacatttaattgtacctttctctggtttatattaacaaacacaatggtttgtcagaatttttccttaaaacaaagttttgggtggggaaaagagttattctttaattcatacaagaccgcgctttgca

SEQ ID NO: 186450 - DNA, 578 bp, Homo sapiens
gttttcctcctttccatttcctcctgaaattctactccaggacccatttcaaatgccaccccaccatgaatatcttactttcaacaggatgtgcccatgccccctcaagcaggcagtgtcagccttggattacaggtatttatgggtatggcttattctcctattaagttcccaaaaaacacactgtcctttgcatcctgtacagcagggtttcctaaactgcaggtttcagcctatgaatgggaaattctaaaaaaaagaaaaaagagaaagaaagaggataggaaatatccaagtgtatcacacatagtaataagcgttatttcatgatgctcttgtttcacttacgtgtatgcatgttcaaggggtggtgggtggcagtgttaaacgtgtatttgttactgggggtcatggtctgaagcatttgaaagtcactgccctgatggtacctctcctctgtctaatattctgtgaatgcttattgaattgaacaggttgatgagtatgaaatgatccatgtattataacttcaaaggctccaacttaaaggaatataaagaataatgcctatctgaaca

SEQ ID NO: 186451 - DNA, 755 bp, Homo sapiens
gttgactctctactggtcatgagtatatcacagcagcagtttgtttgtttgttttttaccttttggattttattttcactaagttaatcataataataacaacaattataattactgagctcttaaatgtactgtctcccatagttttcacaacaaccttatgagaaaagtactgctgttatttttcccattttgaggaaatgaagaagccggccatgcaagtttaagtaacttgccctaagtcagtgtctcaagctcagcactactggacaactgggcccggtaattctttactggaggggtagaggggctgtcctgtgtaccacaggacagttagcaggagtcatgtctttacccacaagatgccaatagcagcccccatccagtggtgataactaaaatgtctccagaccttgccaaatgtgccctgggggcaaaatcaatggagaagcactgttctaagtgatgctggagatgagagtcaagaagccagggttctggctgaggtcttaccactgcaaaggcgccacggccccctcccaagagaaggcatcaagccccctttgcatgctccaagcaaaggagccggcaggagctcttgcctctgtcgcacacacagtctgtcagcactgcagacaggcctgaagcttgacaaatatcaaagtgagacaaagctgtaccaagtgccagcaatttcagacacagagtaatccttcagtacaagtaatgccctgtgtaactttcttcctatccta

SEQ ID NO: 186452 - DNA, 595 bp, Homo sapiens
tccatttcaaaaaaaaaaaaaaaaaagaaagaaaagaaaagaaaagaaaagtaagcaaaaatatagataattcatagaaatacacattaatgaaaaatatattttaaggaattcaaacacacaaggaacaaaatgatggtttaaatgcaattctgtgattctagttttcccttatcaaattagcaaagataagaagaatacttcaatctagtgtacctttgcaggaaagaaagccctttcatgtacacttgatgaatgtgtaaattgctaaactcttttttgaaaacaatttgtcaatatatatcaacagtcctaaaatatttatgcccttttctctagtaatttcatatcacaaagttgtcagagagatgcagaccaatatttatatcctgggatttcattgcagcattatttataataatgaacaattggaagcaactcaaatattcaacagagagcaattataaacaacattatgatacatcaagaaaatgtaagattatgtggctagtaaacattttgtggtatggtttggatgtggtcggtccctgctggaatgcatgttgaaatggtcgccaatccgcgggatcctcta

SEQ ID NO: 186453 - DNA, 649 bp, Homo sapiens
cccggctaatttttgtatttttagtagagatggggtttcaccatgttggccaggctggtcttgaacacctgacctcgtgatctgcccgccttggcctcccaaagtcctgggattacaggcttgagccaccatgctcagccgttttgttttgttttaaaacctggtctgcaggaataggtgagacttagcatgacctcagtttatgtttgaagaggccatttttctgccttgtaacatagtagttaagaactagattgcctgggctcaaatcaaggctcagctacataattgtgtcaccttgagcaagttttgtgctacagtttcctgtctgtaaaatgggtgtaaaaaagagtacccattttatagagttgtgctgattaaatgaatgaacatatataaaacatgtaggatagggcctgccacataaatattaactgtgatgatgcagcatcttttttaggttgtccttttgagggaatctgtgaagattttgtttgtttatatttatgcttgaaaaatcatatagcaaaacttaactactgttcttggaggaggaggaaagcaggtattgatctttatgttactggtgcttttaaattccttagctctacctggcctttgcctaacattttaattttgtgacccatca

SEQ ID NO: 186454 - DNA, 222 bp, Homo sapiens
aaccaaagctggttacagaaatcaaaacagtactaaggaaattactgagaacctcaaaataatagtacatatgtcacagagcagttacaaagtttacctgatgtaatccacagaatccattcacacatgtatagtatttggtatacaatgagacagatgttaactatcacccaccagggcgtaagctctgtgaaggaagggacttttttttttttttttttg

SEQ ID NO: 186455 - DNA, 375 bp, Homo sapiens
aaacatgctaacaatcagtctcagactttctctttgccttaattaggagaattaaaggagagctgaaatgggaatcatgtttttacgctgtgattcagtgctatttaaggctgtttccacgccctaaaatcatttcaacctcatgagtcttaaaggttccactttgggaagcactgacatcatctagtccttccatgttttacaaacgaggagatggaggctcagaagaggctgtcccaaggtttagaacctgtttacaggaattcacatggaattgagtactcacatgtattgagtacaggggaattctatggacccacagcagggaagtagggccgggtcttaagatgatattcttttgatcttcactttctc

SEQ ID NO: 186456 - DNA, 191 bp, Homo sapiens
aagattttttgttgctcaggatatagagaactctcttagaaatgagagacattaaccctactagtgttgtaaggtacaactaaaattgctggcctttctgaaaatttaccttccctaatcaatgactaattaatgagcttgcctcctgctgaaaaagaatggtcacaaaacaggagtactcaaatatgcca

SEQ ID NO: 186457 - DNA, 376 bp, Homo sapiens
cagatgccttctccttaatatgaaaggtgatttcatcaacagttctgtgcctttcactagcagtcttgcaaccttgtaagtgaacagcagaggtgtccccagttaggaactgtcaaggtaaatagagtacagtgtttcagtggttaactccttccctcaaatggttatgctatcccaaccccaacacattttaaaacaccttggagctctccaaagtttatactttgctctttctctgttttattctaatcctttaacatgaagaaatcattaagttacctatcctaattcctaacaaataaatgggcaacactgtagcaatatactcttcctagtctttgaaacctagacaaaaggaaagaatacagatctgcgc

SEQ ID NO: 186458 - DNA, 367 bp, Homo sapiens
tttttgaatttcctttacacttttgttgaaaattaatgaccatgtatatgtgtatctatttctgaactctgtttttctctattctgtgctttggatatttctgtttttttgttctgtgtttctgtctttaagccaataccacattacgttttttaccaaagctttaaaataagtcttgaaatcaagtattatgaattctctaactttgttgttcttttcaaaattgtttcatatttccatgtaacttttagaattggtttgtcattctgccccataaaaagctggaactttgattgaaatttccctgaatcataggttaatttgtggaagattgctatccttaacatacttagtctaaatgcaatca

SEQ ID NO: 186459 - DNA, 2349 bp, Homo sapiens
  misc_feature (1)..(2): n is a, c, g, or t
  misc_feature (5)..(9): n is a, c, g, or t
nncannnnngtcaaaatgatggactgaagaaaacatttacaattaacatcttaaaggagtatttttctccatatacatatataaaaaatcatgttctgggtgtggtcgctcattcctataatcctaacactttgggaggcctagacaggaggattgattgaggctaggagtttgagactagcctgggcaacataatgagaccccatctataaaaaaattagaaaattagccaggtgtggtggtgcatgcctgtcatcccagctactccagaggctgagatgggagggtggcttgagcccagcagttggaggctgcagtgagctatgattgtgccacttccctccagcctgggcaatagagcaagatgctgtctctaagaataaaataaaagtaaatcccagcactttgggaggccaaagtgggtggatcgcttaagcccaggagttcgagatcagcctggacaatacggtgagaccctgtctgtaccaaaaatacaaaaagttagctgggcatggtggcctgtagtcccagctatcccagaggtcgaggctgcagtgagctgtgatcgcaccactgtattccagcctggatgacaaagcaagaccctgtctcaaaaaaaaaaagttcacaaataaaagaagacaaataggtcttaaacatatgacaagatgttgagctcactgaaaagcaaatgtgaattaaaatttcaccaagagactgtttcccacttagcagtttggcaaagataaaaatctggcacctcacggctgggtgcggtggctcacgcctgtaatcccagcactttgggaggccgaggcaggcagatcacgaggtcaggaggtcaagatcagcctgaccaacatgatgaaaccccgttgctactaaaaatacaaaaaaaaaattagccgggcgtggtgacgcacatctgtaatcccagctactcaggaggctgaggcaggagaatcgcttgaaccagggaggcggaggttgctgcaaagcatggtgaggcccaggtgaagatctggaggcactcctatgatgtcccaccacctccaatggagcccaaccatcctttctatagcaacatcagtaaggatcgcaggtatgcagacctcacagaagatctgctaccctcctgtgagagtctgaaggacactattgccagagctctgaccttctggaatgaagaaatagttccccagatcaaggaggggaaacgtgtactgattgcagcccatggcaacagcctccggggcattgccaagcatctggagggtctctctgaagaggctatcatggagctgaacctgccgactggtattcccattgtctatgaatgggacaagaacttgaagcctatcaagcccatgcagtttctgggggatgaagagatggtacgcaaagccatggaagctgtggctgcccagggcaaggccaagaagtgaaggccagcagggaggatactgttcccaggagcaccctccctgcctgtcttgtccctctgcccctcccacctgcacatgtcacactgaccccatctgtagacatcttgagttgtagctgcagatggggaccagtgactcccattttcattttagccattttgtctcctgcacccactcccttcatacaatctagtcagaatagcacttctagagcacaggttctcagtccaagctgtggaaaagctccccttatccaacagagtttaaaagtagtgacttgggtttttgcgagttgctttgtttactaaggacttgtggggaggaaccatgctaagccatgaccaatgaggagaagcaacagagcctgtctgtccccaggagccagtcctctgctcgtctgcagtcaggccactgcctgagggctctagtcattccagtggaagatgaatgtaacctgcatggtgatgtgacaactgtttcctccctgacgccagaggagctggctctagaaggttgggatcaatcctgaatttagttatgtgttacatttaatttaagaagtatagtatatataaataatacaaaacaataacccttctggggtttctcgtggcggttgaaatagtcccacatgtagtcatcagaaaataagccattcctcataccaatataggatcagctccttgacctctgaggggcaggagtgcttcctggtgtgggtattacaatcccttcctgccttgtttcgtgacagtgaaatgcctcttggtcctgtccaagtatgtctttcactgatttctgaatcatgttctacttgcttggccctgccacatgggtccagtgttcatctgagcataactgtactaaatctttttccagatcagtataataaaggagtgatgtg

SEQ ID NO: 186460 - DNA, 331 bp, Homo sapiens
atgagtaatttttaatactaaaaaataagaagtatcttgaggattcaacaagatggtggttaagaaccggtcaaataattttactcacataatagaaaattatgcagctataaaactatagaccagtgttgtctaacagaaatagaatatgactgacatttgtaactttaaattttctagtaagcacattagaaaaagtaaaaagtaacgagtgaaattaatttcgttaatatattttatttagctcaacttatttgaaatatttcaacatgtaatcaatataaaaattagtaatgagatattttactttttaaaaatgtgtttcttgttc

SEQ ID NO: 186461 - DNA, 438 bp, Homo sapiens
ttaatttcagcttttgtattggaaatgcatttggatgactttcttccctactgctgggattgaacatttgatcttctttgcccttggtcggtgtcgaccagaagaacgtgggtgtctgcgaggtagcaagagatcaaggacaagttcccatcaggagcctgacaatcccagctccaggtgtcaacaaacattgtgttttaaatatttttaggagacaagaggacctgaaaaggagtcctttctggccgggggttatctaggtcttgggagaggtgtcaggagggatagctggggccgctggcgtcaaaggacccaacaggacaaaggagggccactggtggcaagctcctgaaaggcctgtttgttttttgttttgttttcagtgctgatttccactatctctgttgggtctataaaaataataacttttacagcttt

SEQ ID NO: 186462 - DNA, 416 bp, Homo sapiens
cttgagtgagtccactattagcactattaattttgttttcttgtgtggccatagactgcattcataaaaaccaacttgctgagcaaaagtaattgattatcacaaatctattactcttattggcaaagcaattaaaaaatctatgactcttgaagaaatagaatagggtccagttcacaaaaatacaggtgtacctcattttattgcatttcgttttattactttttgcaaatattgcaagtatatcaatgctgtttttccaacagcatgtactcacctcatgtctgtttttcacatttggttaattcttacactatttcagacttttgcatgattttatctgtgtggtgatttgtgattagtgatcttttgctgttactattattattgttttggttgccacaaactgtacccgt

SEQ ID NO: 186463 - DNA, 365 bp, Homo sapiens
tcttgtttcctgcacttctgcattttcctttttttccacccctgttttagtttggctgttatttaaaagtcggtttgtttttttaatttattttttgactgcttttgcggagcaggctatcctataagcagtatgctgagagtagcgtattcagaagtttttaaaatggaagtgcaggaaacaagaccggtcttgtttcctgcacttctccccacctaaaacactattctccaagttatatcacaggtttctacctcactggttgcaccctctcagtatctttctcctaaatgagatttctaaaatctagtgtgccacagggctctattcttggccctcttctctttccatttatcctctctttc

SEQ ID NO: 186464 - DNA, 285 bp, Homo sapiens
gttacagtactcattgagctttttctggagaattattaggattcctttcaatgtttctgcctttgtgctgtattttccataaatttctagtgatcctcagttgtctctttcttttaagcaagactgtgttgagtaaaacaggaattttgtatgattttcttttgcacttgtgtcttttttcttctggtaggtctttccctgactagctgacagcaggctctaattaagatatgacaagtttatataggctggcatcaggcaagcatgtataactgttgtcaaagt

SEQ ID NO: 186465 - DNA, 761 bp, Homo sapiens
tccagcctgttgacttggcctgggccagctgtcctctcacgctcatgattgctgcctctgctcctgccatcacatacacaagcagtgcctgttcagtggaacaaaaggaaatcaaaaagaggaatcacattgtcctgtgtctctacaatgtttttttttttttaaatcatgaaaaccgttcccagaaaccccacaacagactttctgtttcatctcattggccagaacagtatcacaggagactactgggattggcatagactagctaggatgcacccttagagcccgtggaggacggcagacatctgagcagagctgggcctcagcgggcaggggatgacagggactggcaggcatccttttggtcactcagaggacttccttcaatccacccagggctggttggcatcataaactcaggatggcagcacttggatggctgtggttgctttgtctccagtgagtgccccaggaaaccatctcttctggtcgccacacggctatttggtgagctgcttgctggggtgagctgctgctgaatgggtgtggttgaaactggaagggtgaggtcccaaagccactgtctgcccctgggtgactgcaacaggtagcccccccaccaacttccaggcaaatccgtgggaaatggaacaaggtatcaaggggaacaggggagtcaggccaccagggccccactgaggaaggcacctgttgcaccatattttgacgtcttgaatgtgtatccactggcccagggagtg

SEQ ID NO: 186466 - DNA, 587 bp, Homo sapiens
ctgtgatggggcaaggattcctaaaagcatcaggatagccaaagggctatcaatagtgactcttacaagaatttgtcatttcaggatatgtccaagaaatataaaaatcatctctaaggctagtgtgttcaaaaattgttgtcatatacttagaaaaattgatgcatgaagtgggtgggttttatttagggatggaaattaaggagatgattatgttgggcttgggtatataagaaatggattctctggaataagggcttaaccaaaatataaaagttgtctgatgaaattacccagtagggctgggcgcagtggctcatgcctgtaatcccaacacttcgggaggccgaggtgggcggatcacttgaggtcaggagttcaaaaccagcctggccaacatgttgaaaacccacctctactaaaaatacaaaaacaaaattagcaggacgtgatggcacgtgcctatgatcccagctacttgggaggctgagccatgagaatcgcttgaaccctggaggcagaggtggtggtgagccaagattacaccactgcactttagcctgggtgacagagcaagactccatctc

SEQ ID NO: 186467 - DNA, 213 bp, Homo sapiens
gtgtcaccacggccagcacagagcagagagaggagacaggcctgagggcctgaggggtgacaaggaaggggaggctgctgggacccattctgggccatgatatataaaatcatttcttttcttttctttttttaattttatttttaggagagacaaggtctggatatattgcccaggctggtctcgaactcctgggctctagcaatcctccca

SEQ ID NO: 186468 - DNA, 267 bp, Homo sapiens
aatcagccatttttccaaggagccctcgtccattttttttggagaatagtatttacaagccaaaatctgggcaataaatgtacctgttgctcttgtggtgttgctgctcctagacccttgcagtcaaacagagctgggcaatgcgtcttatgtatgtaagcacatatttattatgtgtgtatttctgtattcatctgtatattaaaaattgtcagttcacacacatctcaaattccgaataacatcataagtttcattttcattttc

SEQ ID NO: 186469 - DNA, 331 bp, Homo sapiens
gtctcccttgacaaatgaatggggcttgggacctcacctggggatgccagaggctgagtgaggtcaggctgagtgctaagtccattctggtccaattctcagccccaccactacccaacctgaacccagcaaggacagaattttccacagaattcaggacctgaatagaaaatacagtactagaaatactcatggaggtgtgacaagaatacccacaagtaaaaacgatggctccagatagaaatgtgatcatagcagcaaagtggggcgggatgtctggggccttctggctaaagacaattctgccaagtgggtgaactgagttttgagg

SEQ ID NO: 186470 - DNA, 207 bp, Homo sapiens
gtggaccccagggcgtgcagaatggcctctgggttcagccctgttgtccaagaaaccaggcaggctccagaggatgggaggaggctcgggcctggccttcaggtggcctcacgtgtgagccccatggtgaaaggcagcacccagacaaggtgtcactcccctggcggcctggtccctgcaggggggatcgctgcttctcccatgcct

SEQ ID NO: 186471 - DNA, 724 bp, Homo sapiens
tgacctttccaccacaaagcatgactagaaaaagccccctgcatgatgatgccaagaggcaaattccagaaatgggagtagacagtttccgatgaaccctagaatgcttacagactcgcaggattagaagaaacctttatagacacgtacacttatccttgcttgctcggccatcttctcactggttcaagtaaacagaacatgatgcctaccaaagatatcctgacatgcttctgaagagagaggctccttccccctgctcaagaggatgaacctaaaatttgttgcaatgaaggcacagtcactgtaaatatacctcaggaaggaaaccgcagaaaccctaagtcaaccacagttccagtacagaggaagccctcccttggacagaggtcataaggctaaacaagcaatgttccattggacacctctgttaccttaataggcatctcatcacctccctgcccaaacgccactgctattcatactgaataagacattagctagacctggaggcaggtctaatgataatatttcttcacttgagcccccggtttggtcactggcagaaggtatccttgaggggcttctgtttatgtcagcagatgttagcctgagaagtagcagcttttgtttccatgacttcttccaaatgaagtcagaagcctccagggttctcagatacatcagagagttctaggggcattgcttcctttgtggccagaac

SEQ ID NO: 186472 - DNA, 145 bp, Homo sapiens
tccccttcccaccaggccctaagagagtaaaatgcccccaaacatactccatgagacaggaatcaacagagatggaaaggctcagttaccacgagagaaaagaccttgggggtagaaaacatttcactgtgctactaggatctgg

SEQ ID NO: 186473 - DNA, 539 bp, Homo sapiens
atctttaatctagtataaagtgacttctacaccaacaatccactgaacatgcatttgccaaaaatatatccaccattactaattttaccatatttcagaacttctgaaaactcagtatgtcccacactctacatatctcctcctccccatacctgaaactagcttgtgactcttctaaattctctattctttaaaaaatagcaccaccacacctacctctgttctcaagctaggttactttaactgttttatttccaaactatcatctctgatttgtccttcctagaaccacagacctagaattttctgcatcgtatctagaaaagatgagatattttctctgccacccaatgccatcatctcccaccaacccagaagtggacatgggggcctgttaaaaactaaactataaaataaaagtaagaacattaaaagtctattataaacgactgagtgggataagctgaactattgccccacaaaagacttccacaccctgatccctgaaatctgacaatgttacctcatatggcaaaaaa

SEQ ID NO: 186474 - DNA, 248 bp, Homo sapiens
ctcttcatcacaatctggagttgctccatagccactaaaatttgctaaactgaaaacaacgttgcattttcaaatgctcaaagtcacaagcctcaaaatcatttgtaagtcactgttgccccaaaatgtacagactaaaaatataccttcttccacttaaatttaaacaacacacacttaatgacagccccacacccagactatttcaaggcaatttaaaagatgaattttgtaaatcattgggaggg

SEQ ID NO: 186475 - DNA, 1110 bp, Homo sapiens
aaaaaaggctgtggctatgtgcagctcactcactgcatgaactgtgcctgaggcatgcccaaggacaaggctattaagaagtttctcatacaaagccgggcgtggtggctcacatctgtaatcccagcaattttagaggccaaggtgagaggaatgcatgaacccaggagtttgagaacagcctggacaacatgggaatctttaaccagtttcagtgtagtagtgaaaaagtgcttccatctgacactctccgcagtgctctggcaaagactttccaggatgaacaacgtttccagctgggaattatggatgatgctgcagagtgctttgaaaacctcctgatgagaattcacttccacattgctgatgaaaccaaagaggatatatgtactgcccaacactgcatttcccatcagaaatttgcaatgacattgtttgagcagtgtgtatgtactagctgtggtgccacttctgatccgctgcctttcatccagatggtacattatatctccaccacttccctttgcaatcaggctatttgtatgctggaaagacgagagaaaccttcaccaagcatgtttggtgagctgctgcagaatgccagcaccatgggggatctgcggaactgtccaagcaactgtggagagaggatcaggattcgccgtgtgttgatgaatgctccacagattatcacgattgggctggtatgggactcagaccactcagattagcagaagatgttatccacagcctgggaacctgccttaagctgggtgatctgtttttcagagtgacggatgaccgggccaagcaatctgaactgtacttagttggaatgatctgttactatggcaaacattattctacattcttttttcaaacaaagattcgcaaatggatgtattttgatgatgctcatgtcaaggagattgggcccaaatggaaggatgtggtgaccaaatgcatcaaggggcattatcagcccctgctgctgctttatgcagatccccagggtaccccagtttccacccaggacctgcctccccaagctgagttccagtcatacagcaggacatgctacgacagtgaagattcaggtgagcagccagg

SEQ ID NO: 186476 - DNA, 442 bp, Homo sapiens
aaactgtcagcaatgtgtcgtcaatgctccacagattatcacgatgtgtatgtctcagattagcagaagatgttatccacagcctgggaacctgccttaagctgggtgatctgtttttcagagtgacggatgaccgggccaagcaatctgaactgtacttagttggaatgatctgttactatggcaaacattattctacattcttttttcaaacaaagattcgcaaatggatgtattttgatgatgctcatgtcaaggagattgggcccaaatggaaggatgtggtgaccaaatgcatcaaggggcattatcagcccctgctgctgctttatgcagatccccagggtaccccagtttccacccaggacctgcctccccaagctgagttccagtcatacagcaggacatgctacgacagtgaagattcaggtgagcagccagg

SEQ ID NO: 186477 - DNA, 739 bp, Homo sapiens
ttactgtgtttatgggacactgagcctggtcaggggctttggtatagggggcagaggaagaaagtcaaatgtgtgagttaggaatgtacattaatgtttgatttagcagtaactaaatacaaaccatcatcccccttctattccccatcttgaagcaatcaggctatttgtatgctggaaagacgagagaaaccttcaccaagcatgtttggtgagctgctgcagaatgccagcaccatgggggatctgcggaactgtccaagcaactgtggagagaggatcaggattcgccgtgtgttgatgaatgctccacagattatcacgattgggctggtatgggactcagaccactcagattagcagaagatgttatccacagcctgggaacctgccttaagctgggtgatctgtttttcagagtgacggatgaccgggccaagcaatctgaactgtacttagttggaatgatctgttactatggcaaacattattctacattcttttttcaaacaaagattcgcaaatggatgtattttgatgatgctcatgtcaaggagattgggcccaaatggaaggatgtggtgaccaaatgcatcaaggggcattatcagcccctgctgctgctttatgcagatccccagggtaccccagtttccacccaggacctgcctccccaagctgagttccagtcatacagcaggacatgctacgacagtgaagattcaggtgagcagccagg

SEQ ID NO: 186478 - DNA, 235 bp, Homo sapiens
aggagctccagagcaggaccctgtgttaacgctgtctcgctctcaggcttctgagtcccctctaacccaactttattatgtattaataataataaagctgctcaggaggctcctggagtacagctggatgcccctgccctaggaagcctgcgttctgggctgagggcgcagggccaggtggccacggggatgtggcagtcatatgggcgcggctctagcctctcagccacagaca

SEQ ID NO: 186479 - DNA, 362 bp, Homo sapiens
tttcgagattcagatgtagtagagggcttgccaaggtgcaaatggatgaggactgtgggtcaaggcagatgatctaacagctgcctccccttccttcactgtggtttatgaccaaacattttcagtgtcacctgattgagatctaggctgggtgtagtggctcacacctataattccaatactttgggaggctgagttgggaggatcacttgaggccagaagttcaagaccagcctgggcaacataatgagacccacgtctccaaaaaaattaaaaaaaaaaagaataaaagatctattaatgaaggtatgaagatacagtgcagatctgtgggacaagtctcaaatctagcagtggtcagc

SEQ ID NO: 186480 - DNA, 299 bp, Homo sapiens
cctgcttgagttgtgcaatgtcgggtaaatagctgagcggtggaataaagtcactgatttactaagttgaaaaaactgatgggttaacccatagctgaaaaagtaagaattatttttgagatggggtgttgttgatggctgatgtgatacttcagttcttatcttcttttttcctttttttttgagacagagtctcatgaccagactggagtgcagtgatgcaatcttggctggctcactgcagcctgcgcctcccaggctcaagggattctcctgcctcagcctcccaagtagctggg

SEQ ID NO: 186481 - DNA, 281 bp, Homo sapiens
gacctgggtgacagagtgagaacctgtctttaaaaaaaagagagagagagagaaagagagaaaggagggagggggggagagagagagagaaagagagaaagaaaaaggaaaggaaaagaaaagaaagaaggaaggaaggaagaaaagaaaagaaagaaatctaagttaaagcaaggagactccagaatgagattactgagaatagaagatccaggataattcacttccatgaaaaatatggataataaagtagaataaggacagacaggaggagccacttg

SEQ ID NO: 186482 - DNA, 450 bp, Homo sapiens
ggtcgacggggattacagcgtgagccacttaacatttattgtttgagacaaagtctcactatttcgctcaggctagagtgcggtggcgtgctccaactgcaacctccacctctcaggttcaagcgattctcatgcccagcctcccgagtagctgagattacaggtgtgcaccaccatgcctggccaattttttgtatttttagtagagacagggtttcaccatgttggtcatgctgatcttgaactcctgagtcaaatgatccgcctgccttagcctcccaaaagtgctgggattacaggcatgaaccaacataccctgccagttccataattttagtacatttataaagttttgccaccatcctcaaaattgttcttaggacagaagaaactctgtacccattaccagccatccgtatttccctccagctcttctcacccaatccccaa

SEQ ID NO: 186483 - DNA, 520 bp, Homo sapiens
gcggggggtctggagtggccagccaatcaggcgggcagtgccacctcggggaatgacgctcgggccaatgggaagggcactccattccgtcaacgctgtgggtcggggttctgagaaaagagagctgagtgggagtcgggccaggctgatgtgtgcccaagggaggggaaaagagagagcgaagttcctgcgaagaactgcgggaatgtgcggccggaattcactctccaccgccccccttatcccgactaggctgctgagggagcgcctgggccctgctcgcggataccctgccactcctaatagcacggcgcccagggaccctccgccacccatcactccatccgtgggattccagtgccttaagaaagacgcgctgttcaagaaggcacgttcattctgttctatatttccctcctccgtttcattattcgccttttcacatttgccgaaaccataatgatggaatggaatgtgtagcctttccgttttctttttaaaaaatgctaaagcttagcaa

SEQ ID NO: 186484 - DNA, 717 bp, Homo sapiens
tgccctggttttgagggtctttatccctctcacgcaaatggtagatttgactgtgatttctttagaatacatcacccaagactgaaccaaatgtttgtggtatcatcagagcaaagcaggactatagcttcctccttttgggacctatcgctttgcactcctgcgataaagttcttggcacccatactgttgactcatattgggcttgcagtcaaccaaaacctccgcgtctttttaataagtgctccgccagagcacttctaccccttcttgtgcttctcagccaacttcgcttcaggtcagctaaggatagaccttgggcccctcaccttctaaatttctcaggatatatggaaaagaggaataggggttggaagctggcataacacaatctttaaaccaagtgcatttgaaaaaaggccagggtggcggggcgtggtagctcacacctgtaatcccatcactttgggaagccaaggcaggtggatcatttgaggtcaggagttcaagaccagcctgaccaacatggcgaaaccccatctctactaaaaatacaaaaattagctgggcatggtggcacgcacctgtagtcccagctactcgggaggctgaggcaggagaatcgcttgaacccggaaggcggaggttgcagtgagccaagatcacgccactgaactccagcctgggcgacagagggagactccatctccaaaaaaa

SEQ ID NO: 186485 - DNA, 350 bp, Homo sapiens
attatcctacagcagaaggtagagtatatatgagtacaaatttggaatatgttttttaaaggagacaaatagtagatgctcaataagtgttgtttaatgaataccatttctaaaattaatgaatgagttagttgacttccatgagttatgctattaggaagtaaagatacaagcatgaaaatatgctgattccaggatgacagagtgtatggaaatagattatactacactagattacctcataatgagacatgtgtgtacttggtttcagtaaaattcatactggttcaaaataaactcttgatatagaaatttttcagtaattcactaaaatcaggtaaactgactat

SEQ ID NO: 186486 - DNA, 1669 bp, Homo sapiens
agaccagcctggccaacatggtgataccctgtctctcctaaaaatacaaaaattagccgggtgtggtggtgcacgcctgtaaacccagctacttgggagactgaggcaggagaatcacttgaacccaggaggcggaagttgcagtgagccgagatcacatcactgcattccagcctgggtggcagagtgagactctgtctcaaaaaaacaaaaacaacaacaacaaacaaaaaaccagttaagtgaaatgaggaaatttctttggtgaaagagaaggctagataagatgacagttgtctcaaagtcatcatacggaaaacagaatagaagcacagaacaaggactattgtatataagagaagcaggtgttaatgtaagttgctgtggaatgactgttttcaagaagagagaaggagccaatatatctactttcattaagaagctgaaattaaatttggatttccttctttccaaagctgagacacgatggccaaaaagcgattgctgtgattggagctggaattagcggactgggggccatcaagtgctgcctggatgaagatctggagcccacctgctttgaaagaaatgatgatattggacatctctggaaatttcaaaaaaatacttcagagaaaatgcctagtatctacaaatctgtgaccatcaatacttccaaggagatgatgtgcttcagtgacttccctgtccctgatcattttcccaactacatgcacaactccaaactcatggactacttcgggatgtatgccacacactttggcctcctgaattacattcgttttaagactgaagtgcaaagtgtgaggaagcacccagatttttctatcaatggacaatgggatgttgttgtggagactgaagagaaacaagagactttggtctttgatggggtcttagtttgcagtggacaccacacagatccctacttaccacttcagtccttcccaggcattgagaaatttgaaggctgttatttccatagtcgggaatacaaaagtcccgaggacttttcagggaaaagaatcatagtgatcggcattggaaattctggagtggatattgcggtggagctcagtcgtgtagcaaaacagatttgaccagtaggaactgagattcaacgtccccaagactgcaaaagtacctacaatcaaacaaattaatatatttcctaattggatcagcatgcagacaagtttacaaatatattacagaaagatttgaagagggattctggttacgttcagttaagcaggacactaatcctgaacaatctgatgtattaaagtttctaatgtttgtatctttggtttgatgcatacaatagagtggaagtctgtagtagttaatatgatgataattcgcttctaaatttaaatccttatttatatatgaagcatagctatgtcaatgtccagggaagcatttttaaatagtaaatcagaaacatgtaaactagtgaatacaattttctatttttcattcagaaatttgttgtcatagatgcagcctttatctggaaatcagtgggcagctctggtcaagcacagcatggcgaccactgtgtagtattttaccacctaatccttagtagccaacactgttaaatctgcataatgggtagcatatgaataaaataatatcttgt

SEQ ID NO: 186487 - DNA, 485 bp, Homo sapiens
tgtctcgagggtgaaccacggcctcccttacagtagtcactcactgtattcttgagaatgaccgaaaagtgctcaattatatgccctgaaaaatgctgtgctcagatccaaaatcctgttgcctgatgaaggcaaggaactgtagctgccccagtgatgatgagtttatttggattttatgctgtagggtagagggcagattcaggagtcacactgcctaggtttgaatccttgactcccaggcatgtgtgtgtgctgtgtgtatatgtgtgatcttggtcattacttagccttttaaaacttcagtttcttcaactataaaatagggtgatttttagttttcacatatgagtgagaacatgcggtgcttaacttgctgttaaaaaagttcatcttggccgggcgaggtggctcacgcctgtaatcccagcactttgggaggccgaggcgggtggatgacgaggtcaggagatcaagaccatcct

SEQ ID NO: 186488 - DNA, 385 bp, Homo sapiens
acaaccccacgggcaaaactaactttgcctttctgagtaaccgaaaaagacaatgcagtcagactggagtgggtggaacactgatgataagaaatgatgtcaaaaggcaggcaatggccagactgtgtagaacactggaagaaccagctaaagaggcaattgcaattcaggttcgacctgctagaagataatggaaacttaaaaaaaaggaaaagcgacggatttgaaggaaaaaataatgtgcctgccaggcggtttttttgaagtagattatgagattatgggaaatggaggagaaatgacagctcctgggtttttgtctgagtgaaatatatgagtgagaggagaaggaccatatagtgagatgaggaagaatgaaaaaaag

SEQ ID NO: 186489 - DNA, 669 bp, Homo sapiens
ccatttcagataccatcttgtctcctctttacatggtaaagagaacttgggaggaagggactgaggaatcaaagcttctgagatttgaggatctggagctcctatagattttgagaacaccctgtgacctctggtctaaatcagaaaaccgtaatatcccagagctgatcaaacatgcctacaccactgatcatctaggataacatcacccaccatgtttggagaattgcagatttgggacaaagaagaaatgactgtttcactagaaggacagccataactctggtaggagatgaacatcttcaggacaagagataagcactccctcaaacctgtcacttttagtacctgggatatctgaatcaactctatataatcaacaagagaattaggcaaataacatctggttgcactgatggacaaaggacataaagatgttattttcaaatgtcttctcctgaagaaaaatgaaaattgtgtagccagtcaccattttaggccactcattcttgtccagtcatctgtaggattatggtttgagggactttttaaaacaaaagtaaaagcaatacatatgatttgataagttccatgattaaactgaactaataaaaatagtaaccactcaatgaatatgccatatgctataccaagtatgttagctggagt

SEQ ID NO: 186490 - DNA, 101 bp, Homo sapiens
tcttttgttgcattccatttgctagtggatgcagccatccatctctctactgtccactcatatctgataattcattttcgttatgccatggtaactgtact

SEQ ID NO: 186491 - DNA, 513 bp, Homo sapiens
tagtattatggcctttgtacaaaggaataaatactcttcgcagggaagagttagctacatatagattaatgtagactgacatctaagattcatctttaagtgaagaaaaatattccatgccatcattttttatagtaagcattcagatttttttaactgacaaaatcagttatatgtgcccatataacaataaagatctctgaaatgataaacaaataatagtaacattgtctctagggaaaagagttagcagaaagtgacaaaaggcaaacagttttgaccaggtaccctttcatactattaaaatgcacaatcatagacaaataacctttaaagaaaaataatttttttttttttttttggaaatggagtgtcgctctgtcgcccaggttggagtgcaggggcgcaatctcagctcactgcaagctccgcctcccgggttcccgccattctcctgcctcagcctcccgagtagctgggactacaggcgcctccaccacgcccggctaattt

SEQ ID NO: 186492 - DNA, 391 bp, Homo sapiens
ggtataaagtcaagacggtactgctcctccctgtagtaagtccttttatcagggaaagcggatgaatagagtgatttttagggttaaaatggcagggtgaggttgttccacagaccttccactctgaatcaagaaaaaaaattaccaaaaaaatcctgtcctaaactataccgtccataaattgcaaccaaacaaagaaggaacaactttaagttacatctcaaaatggtggccaaagaaaagattctgaaagactggatgattggtatgggggtaacacaaaggcctgccctcattcccagaaatagtaatgagggaaaattagttaacatatactggaaattctcaatttggagaagtagactgtggggttaaataggcagtcccaaga

SEQ ID NO: 186493 - DNA, 375 bp, Homo sapiens
agcgccaatgtgaaactcaataggttcaacgtttcctgatttggagtttagggcttgtgcatgtcatacaattcatagtgtaattttcaaaccttcaaataaaatgctgataaaatggactccccaggtgagtctaatatgttaaggttgaaaaccactaatctcaatagtgaaaatttaagacagtcatagagagacataaagagtatatataaaaggaaagcaaagcactgaaagactacagcttagaaaacgtgtgtgtgtgtgcatctctttcaataagaatgtatgaattgaaagcctatcaataggtattctcccataacctcactggtgcgcttatttcttttcacatttggcataaaactatagcca

SEQ ID NO: 186494 - DNA, 545 bp, Homo sapiens
ctctttgcaataaatcttgctagtgctcactctttgggtccacactgcttttatgagttgtaacactcaccgcaaaggtctgcagcttcactcctgaagccagcgggaccaggagcccaccgggaggaacgaacaactccagacgcgccgccttaagagctgtaacactcagggcgaaggtctgcaccttcactcctgagccagcgagaccacgaacccaccagaaggaagaaactccgaatgcatgcgaacatcagaaggaacaaactccagacgcgccgccttaagagctgtaacactcaccgcgagggtccgtggcttcatgcttgaagtcagtgagaccaagaacccaccaattccggacgcaatgtgacattcaagtcaagaagtaagttaggtgttgtactattaaggttactggtagttaaaaatccttaaatgaatgagatttttctctatgaaagacagaagaggcctggcgcagtggctcaaacgcctgtaatcccagcactttggtaggctgaggtgggcagatcacctgaggc

SEQ ID NO: 186495 - DNA, 472 bp, Homo sapiens
tgctcaaaaacttaaataaaaacacaggccgggcaccgtagctcacacctgtaatcccagcacttggggaggccgagatgggcagatcacctgaggtgaggagtttgagattctgctcccgcaagtctcctcagaaaggagaaagaacaaagaagacgagcagagcctaaaggacctgtgagatgtcagctcaccaaccaaccatggaagtttgaaatgggcagaaagaatgtctgaaaaaataatggccaaaaccttttcgagtttaatgaaagacaaaaattttacaaatccaagaagctcaacaaactccaagtaggataaactcacaggacccaaaatgaaacacattttaatcagtgttgaaagccaaaagacaaaaaaagagagaatcttgacagcagcaagagataagcgactggataactgttaacagctgacttctcatcagaaatcacgaaggccaaggccg

SEQ ID NO: 186496 - DNA, 422 bp, Homo sapiens
atttgtttatccgttcttccattgatgggcgtctgggctgcttccagtttggggattttatgaataaagccactaaggacattggcatacatgtggacatatgttttcatttctctcgggtaaatagctcagactggaatttctgggtcataaagtaggtatgtattcaactttattagacactacagagtgggtgtattttcatctccattttacaacacaggccacagaaagcttcagggacttgtccaaggtcaaggggaggaagagaaataggatttttctccaggaataatgctaggtgcttatcctgttcatctcctttaatcctcaaagcaaccccgtaaggtgggaattctgattcccattctgtagatggggaaactaagggtcatgaacatccagcaaggtcaggttcaatc

SEQ ID NO: 186497 - DNA, 370 bp, Homo sapiens
cctcagtggccctcaggcctccccctcgccccttgtgtctgactcaagctccccagcatcctgttggatctgacgctctctcccactgagagcccggtgtaggctgccaatccctgttggtaataaacccctaaacctgactctatgccaggcagacacctgtgtgatggggctccaggctctgggtccatgtgacttctgtcccgggaggcagcctatggcaccgcgcacaaaagcctccaggcaggagcccactacttgggcttaaatctgccacttaactgtgtgcccttggtcaaatcacctgactgttttttgttgcttgctattgtttttaaattttattaaaatacacacaacataaaatgta

SEQ ID NO: 186498 - DNA, 384 bp, Homo sapiens
caagtgaaagccctcagttctagtaaggagacacacagaagagtgtttatttgtcatgctagttttttatgacttggacctaattgccatggggattaatgtgaccagtttcacattggtacatcaagtggcatcctgtgcaatctgctgatgatttaaggaatacagttaaagtaagcacatagaaaacaatgcttctccaaatgaaacacagtgagattttacataattttatttgctttcttgtttgtcacctggacaaagaacagctctgttttgtgattatacaccctgggaggtttccttggagtgagttctgaatttgtaaatcctaaggacttaatgtatgcttctattaatttgaattgaaacagaggttcccat

SEQ ID NO: 186499 - DNA, 423 bp, Homo sapiens
ccacctcaccctcctgagtagctggctgggattgcaggtgcaagtacacaatccaccacaaaatagttatgcataaactgtttttctaataacttgtgttagccactttatgtaagctgcataccatttcttaccatcttctggatttaagctctgcttggctttgtgttaatgtggaaagtcaattttttctttaattttatagaggcagggtcttgctctgttacccacgctctagtgcagtagtgctgtgatagctcgttaaaatcacagactcctgggctcaagccatcctcccacagcagcccaagtagctaagactataggcacacagtgccacacccagctaatttttattgttgtagttgtagagacagggtcttgctatgttgcccaagctggtcttgagctcctggtttcaag

SEQ ID NO: 186500 - DNA, 502 bp, Homo sapiens
agaaacattcaattgaaggaaaatcgtagcacataaatgcaatcctgctctatgcagagattctcaagcccatgcttatggaatcaagcgaggcttgactgcctttgactatgaattgcctaatttagtaaactttatgtttttagtgtaataaaaaggagctgaagaaacacatatattgtaatgatttggtcgttgttcttggttagcccccgacaacatcctttcaatgaatctaaatcaagtgagtaaagggaagtctgggtgtctcttaatcatagctaaaactcaccatcactttatagaccctgaatcattttataattatattcttcatgaaatttcatgatgacttttggttgcgtatcattcacaataaattttcatttagactaagtgtaagttattaggctctgcatatcactgtcaagtaggaagacattagatttgatatttaatgggttactgtgtgattccaatattaaacattaaacattttctt

SEQ ID NO: 186501 - DNA, 423 bp, Homo sapiens
tgctgtgttggccaggctggtctcgaactcctgacctcgagtgatcagtccaccttggcctcccaaagtgctggggttacaggcatgagctactgtgcccggctggcaatcacttctactcggcacctcagtggatttcaggccctcagtgctgggggcgccctgagcagacagcagctgagtcaggagcgtggccttgtaagatctccatgtctgaggtgcgagaggttgaggttgaggactagaattagacactgtagaaggctttactggaacgtggccctgaactggacagacattttatggatgggcagagagagaaggtattgtgaccccattttacagaagtggaaagtgaagcccagaggaaggcgtggaggatcagcagcagagctggaaccggttgactaaagctgtggtctt

SEQ ID NO: 186502 - DNA, 581 bp, Homo sapiens
caaatatattgtaaagtttagtttaaattatttttacagtgttttcatccttcttcatggcctccttcccacaaatatcaggaaaatgggaactgatgaggagagtaacattaaataaaaagggaagtacaagtaattttattgttgtgctcagcacagacggacccaattacagtcctacaagtacctgggttgcttccctcctgacctggagaacagtcccctggtacactgtcattgtggaaacagagaaaacacatctgttaaaaatgagctttagtggaaaaaattcagctggcattctcttttcctctctgtcgtccttttttaatagcactcttatgtaaggtcgttactatatatagtagagaacagggagctgtgatttgacctgtacagaggcagtcagatatgggccatttcctaccttggtgggcccaaaggcagctgaacctgctggacagcaggagcggcggcacctggaacccttgctctttgagacctcagcacagctgcacggctgttctcttcttgcatcttcagcttcccacctacaaaatcggcacagggcctacttctga

SEQ ID NO: 186503 - DNA, 194 bp, Homo sapiens
tgtggctatgcaggtgtcggttcagggaaagcaggtggttggattcaaggtgggagtttaccgatgggcgtcaggaaaaggcatgggatgagcgaatttaaatattgacaagaatgtcagtgccagcatgacaaaagaggagagtgaagcaagggagtgggctggcaaattgggagcagataggaggcagtgat

SEQ ID NO: 186504 - DNA, 678 bp, Homo sapiens
tctccacaaccccttatgttaacccagacactcctttctattgattccaggtctttagaaaataacttaactcctccaagcaattgccaaacagaaaaccttggcatcttcctatgacctgtaagcacccactttcccctgctttaagttgtcctacccttctgcaccaaaccaatgtatacctcacatgtattgattgatgtcttctgtctctctaaaacatagaaaagaaagctgtaacccaaccaccttggtcaggacgtcttgagactgtgccttgcgccatggtcagtcgtattttgtgcagaataaacatttttcaatattttacaggaaaaaaaaaaaaaaaaaaaaaaaaaaaagaaaaaaaaaaaaaaaaaaaaaaaaaagaaagaaaaaaaaaaaaaaaaaaaaagaaggaaagaaaaagaagaaaagggcgaagagaaagggaagagagaaacaagaaacacacgcaaggacaatgacagagacaatccacgacgcaaagccagctaccaaccacggaacgggacgacgcgaaaacaccaacgaatcgaaccacccaacggcacacacagcaaccaaaagccacccacaccaaacaaagacatgaaaaacaaaaaagcagagagagaggagcccacacaccagagacgagaagaagagacgcaaaca

SEQ ID NO: 186505 - DNA, 768 bp, Homo sapiens
gtgatgctcccacgtcagcctcctgggtagctggggcttaaaaagcacatgccaccatgcctggcctttttagttcttttttaattttctgtggagacaaggtctcactatgttgcccaggtgggtctcaaactcctgggttcaggcgattctcctacctcagccccccaagtagctgggattacaggtgcatgccaccatgcctggctgatttttgtgtttttagtagagacggagtttcaccatgttggccagcctggtctcgaactcctgacctaaagtgatccacccaccttggcttcccaaaatgattatagacgtgagccactgcacccagctggccctagagttttgatagagatggagggtttactgggaattagggcgcttccagggaaatgactggagttgaggtaaactggaaccagatcattaagggcgatgaatcctgggccaggctgtgcagacatttctcatatgcagtgggcagctactgcagactttgagctggggagaaggggctgtgtgagtagagcgttaacttgggagaagtcctttgcagctgtctgtgcaggctagattcatacaggcacaggaaatgagagaggtcagttgaacaagagttaatgaaggcctgagttagaattgtggcagtcagataacaaaggaataaatgtgatagaaattacaagagaccagctgggctctgtggctcaagcctgtaacctcaacactttgggaagctgaggtgggatcgcttgaggccag

SEQ ID NO: 186506 - DNA, 521 bp, Homo sapiens
ttccttcttggccctgccgaaaacaaggtgggcagttcctgccacctggagctcgtttccccacctgtcaaatgggcgttaagaattccattgtggtttgatacatggaggttctcactgtgttgcccaggctggagtgcagtagcatgatgatagctcactacagcctcaagcaatcctcctgccacacctcccgagtagctggaactacaggtgtgtgccaccatgcctggctaatttttttattttattttattttattttttgtagagatggagtctcactatgttgcccaggctggcctcaaactcctggcctcaagtgatcctcctgcctcggtctctcaaattgttgggatgacaggtatgagccactgcacatggcccaagagtttttgtttgttagttttgttttttgagatggattttcactcatctcccaggttgcagtgagctgagatcacgtcatcgcactccagcctgggcaacaagagggaaactccttccccgcctcccccacca

SEQ ID NO: 186507 - DNA, 378 bp, Homo sapiens
agccactgcacatggcccaagagtttttgtttgttagttttgttttttgagatggattttcactcatctcccaggctggagtgcagtggtatgacctcggctcactgcaacccccacctcctgggttcaggcgattctcctacctcagccccccaagtagctgggattacaggtgcatgccaccatgcctggctgatttttgtgtttttagtagagacggagtttcaccatgttggccagcctggtctcgaactcctgacctaaagtgatccacccaccttggcttcccaaaatgattatagacgtgagccactgcacccagctggccctagagttttgatagagatggagggtttactgggaattagggcgcttcca

SEQ ID NO: 186508 - DNA, 699 bp, Homo sapiens
agcacggaccttcttgctgtgtcctcacatggcaaaaaatgaaatggagagatagagcaagagagggctgaacccatccttttatagcaacaccaatcccacccatgaagatgaagcctcgtgcagcctaatcacctcttaaaggtcttgcctcttaataccattacaatggaaattaaatttcaaaatgacttttggaggggtcacatattaacaccatagcataagcataaacatttcacattaatagagaaagaatgagctggtagatggtcagccatttttgcacaactctatgaggtaaaaggaaaatcattattgacttctactttatggttaaactatggggaggatctccccttctttcttggggcttagataaccataaagtctacattcaattgtctactcttcctcagaaagttgctattataaatccatgctctgccttgtggtactgggtagaaggaagaaaaggcttttacagagcttatagtattcctctgaagtctgtagtaacaattaaaagaaaaagtatacactgggcatgtagatcaagcaaaagatctagtaaaaattataagttgttaggaagtcactaaaaatattttagtttatgcctttgatttaggacttttttggggtgagttctttggaatgaaattaaacacgttccaattcgaattcttactggataga

SEQ ID NO: 186509 - DNA, 340 bp, Homo sapiens
catattgttattataggcagagtttagatttaaatcttgaccttctgatttgaagtccactattgtttccactataacctagctgcttcctaaaatattttctaaatttgtgttttattttgaaatatcatacacaaaagtaatgagaatacaataagcccccatatacacataacctgattttatggttatgaagattttgctttacttatttcatctcttttccctactttttgctgaactattttaaagcaaatcctagtcaccctgccatttacccctgcatactttagtatgcatctctacaaaacacatatgtttccttacacaattataatgc

SEQ ID NO: 186510 - DNA, 247 bp, Homo sapiens
tcgccttcacccaaagtcattccatctgttttacacctaagtacactatctacattcttgtctgtagttacactggggggagataaaaatattttccatttcagtaactcagtatttgtgagtaatttgcttagtaataatcccaaaattaaattgtcttcgtataaggactactaatagtttgtgtgggatttgccaaataaactaccttcgggaaacttcttttttttttttttttttttttttg

SEQ ID NO: 186511 - DNA, 413 bp, Homo sapiens
tagctgggattacaggcatgcaccaccacgcctggctgattttgtatttttaatagagatggggtttctccatgttggttaggctggtctcgaactcccaacctcaggtgatccacctgcctcggcctcccaaagtgctgggattataggcgtgagccaccttacctggccatgctgctgcttttcatctgtttttttcttcatcctcactgtcaacacttttggccattatttctgatttggatagtagctggttggtctctcactatagtccaagatccaaattgctgctagtgtcattttcctataaaatcaatcatgtcatatctctttttggaaagctatacgtttgctatggcttatactatcagatccaatctcatctctttctcttctctccttgcatgattcat

SEQ ID NO: 186512 - DNA, 476 bp, Homo sapiens
tctgtgggtataaagaacctctcgggagagcctgaatgatcaggagatctgaactggggagccatcggcccagcaggaggtgcctctgcttggccaaccagagcctgctgcaagaaaccttttttttttttttttttttggttctgacaggcttgttggggaaattgaaaatctcctgtttgaaagccagataatttaaaatcctttctgattcagaatctcagcaagtagtgaagggctaggttattgattgtgggaaatggggcagcctcaaagggctctgggctatctcagtaccccatctccctcacccctcacgcttcctcaggtttctctctcatgctagcttggaatggatggtgtatttcctacccagttgcctttgtttataagcatccaccaccgctgcagtagggtcaggaaactggcaatttcctcagtgatccttgcccttgaaccctatctcctccagccta

SEQ ID NO: 186513 - DNA, 284 bp, Homo sapiens
  misc_feature (3)..(3): n is a, c, g, or t
ggnccgctctagagtatccccggctcatttgatccttctgcctcagcctccctagtagctgggactacatatccatacccagctaatttttttagtagagatgggggttcaccatgttagccaggatgatctccatctcctgacctcgtgatcttcctgcctcatcctcccaaagtgctgggattacaggtgtgaagtatggcacccagcctaaagtgttttttggacacatgtagggcagtcctgttccaactgttcatgtccaaacatagagaatgaaaagc

SEQ ID NO: 186514 - DNA, 310 bp, Homo sapiens
actgacggtgagctttgcaacaatttttatgccattaacatgtcactttattaagttccttagcaataagaaaaacttttcccaggcacgtagttttcctcccccacaggtaaatgctaactatttctagaactctcaactatttgggaagcttgccatcaactcccatgataccacccaacccacaccatgttttcggggagacaaaggtgccctacttccccagactataaactattaaaatggtgagaacatgccgagatccctgcactgcgctccagcctggcgacagagactccgtctcaaaaca

SEQ ID NO: 186515 - DNA, 290 bp, Homo sapiens
gtggaagctactcaaagtacgtcgccatcttttgttttgtggaaagtcaggaaaagctttctcgtagatgtggtgctaagaatggggcccttgggccgaatcttaagaaaggaacaggtctctagcaggctcagagggaaggacggggtcttttcaggcttgggtaaaaaactggagcatctgtgtccacttgcctctgctgggtaatgaattggctttctatagctgtttcatcttcttcccaaagggaatggtaaattttattaactcagcatccaaatgcgtatcta

SEQ ID NO: 186516 - DNA, 242 bp, Homo sapiens
ttaaaaccacctttgagaaagactaaggttttatccataactagaaaaaaactggaaaaaaacccaaatgttcatcaaaaggttaatgaatatcaaaatgtggctgatctataccacaggaataatattcagcagcaaaaatacattattgatacatggaatacattattgatatgcaaaaatatggatggatctcagaataattattttgaggctgggtgcggtagcttactcctataatc

SEQ ID NO: 186517 - DNA, 141 bp, Homo sapiens
accaggtagacatctggcctcagatagacaccaaggtcccagatgtacagcaggccccaaccgaaccccagactcatgtggacatcaggccacaggtagacaccaagccttaggtagataaataacttcaggtagacatca

SEQ ID NO: 186518 - DNA, 283 bp, Homo sapiens
cctcccaaagtgctgggattataggcgtgagacaccgcacccagcctattacccccatttaaagatgaggaaattgaggcacagagaggttaagtaatttgcctaactgcatacagctagtagatggaagagcagggactaaatcctgaatgtgagggccctagacctgggaggcttaatcatcacatctacttcatggtggcaggacagttgatggtgcaggggctgagggagcaggagtgggtgctggggtgaaccagtgttcctgaagaagggatcccga

SEQ ID NO: 186519 - DNA, 459 bp, Homo sapiens
accttggtccctggtggtgctgctgcttcgtgaagtatgcagtttgccagatgctaaagcgcgtgcctcactgtaagaacggtcacattaggtgtggatggattctcagtgctgagacgctcactcatcacaccttaacttcgctgttggccctggaagctttttggggggtggtccctgttctgtgcagctcccctgaggagtgcagagcattctcctggaatgttctgaaacatttgagggtgaccctgtggacatagcctggccattccaggactggcaggtgaacacaggatctggtcggggatgcgcatggtagagtcggcgggaactctggttggactccctctgggaagctttgcaaaggatatgccattggaaggagccaggccgggggtgaggcccgttcatggtgtgtgattgaggagagggcttgggggcagcatcaaaacaggactc

SEQ ID NO: 186520 - DNA, 437 bp, Homo sapiens
caccgctcctgtgtctgttgcccacctccttctccatctgtgcctcagttcctcctcctgtaaaacatgggaaagggaagcctgcacgagcataataaaccctgaggactcacactgtgctggccatgcttcttcccatagctaatgcagcgcttcctatccttgatacaggacgggatcgtggaagttaacagctcattccctgctataaattacgaagtcctgttctggcttccatttctcttgtttagacagaacttaaacctcataaagtgagtggaattagctctttaggtgaacagacacaattgtgtttttagatctgtaaattcgagaaacaaacctggtgggacctgcctcctgagggccctgtgtctgtgtagaggtggggtgggtgggacctacttccccagggtcctgtgtctgtgtagaggtgg

SEQ ID NO: 186521 - DNA, 1103 bp, Homo sapiens
gaccatcacctcagaaagcagccccgctgggaggtccacggagcagttcgccgagctgtgcacaggccctttattttccatctgtcaagaaaggaagctgcctgttgcttatttcctcctcccactcttctcccttcccgccagcagactcttccactttcaaaatattctgatgggggatcacaggagttttcctcaaacaagatcacttggggtcaactactgagcaactcccagcctcagccccacccattccctcaccctccagcttgagcaatagctccagttagtaaagcagttggatcaacaggacaacaaccaaaagtgaccttctacgtcctaaagcccttgcctgacaccacctctttttttttttaaattattcaggggccttttggggacccccagttgagctgtattctgcagaaagaacttccaaacgaaaggaataaggcattgttttaccaagagccttttctccctcaagaaacacaatgtaaactaggaaacttgcactttcttttacctttgggtagatgagcagaagggaagagttactacccagggtgaggtcattcctccatggtggtagaatatctggttctttcagtttccccatggtgctggcctcacaataggtgttcatgaggtgcaggctaattgggtgagtggatgcagtgctctgatggatttattcagtgtacaagattgcaaagccatgtgccagcaaaggcttaaccaccccaccctacccttcagaccagccccatagctttccatgtccctgtctgcccagcctcaggccaaagcaaaggcagggatctgagctgtacccactgtgaatgcccatctcctgacccctgtgctagtgtcttgtccctgcatgcctcggctgtcttctctctggactatgattcatggcagatattaaaaaggaaacagcatccttcaattctttctaccatttctcttatctttaaagggttcttattaagcagtatcttcaaacttatttatgtgatgtcatgctaggaagcagcgttgtcaatgtgccactttccatgagcactgaattcagtaaaaataaaagccaaataaatgat

SEQ ID NO: 186522 - DNA, 559 bp, Homo sapiens
taaactttatgattagttagcttcttttaaaaatattacttaggggccagggatagttgtcagcttcctgaattaagaggtttcagaaaaaggatggaaatcttgtcttaccaggagcatcctaattatgcttataggtacatatacaatacatagatgagtcccgagacccttttggggatcgattggtccattttaggaattgacccagacatccttttctcatattatttaaagattgttttaagataatgagcaattttctgcgtttcattgtcattaccattcactccaaagaaacagccttgcaatttggccaacgtaaaaaaagtttggtgatatcttttcatgagagagtcagccattcttatcccgcagaacagacaaattgacagggtaacagtaataaacgagttcccccttgagagagggaaggtcaaactaaagcagaataaatcaattgttatgatttcctaaagtagacactttttcagcgattactaatttaccttagattcactaaggaaaaaagagaatcttgtaatataaacgctcagat

SEQ ID NO: 186523 - DNA, 288 bp, Homo sapiens
tttaaattcagaacattactcacacaattctttccaaaataaatctgataacaggttaaaaggagtaaactgctgtatactctgtaaagaaaaatacattaacttccaactacacacctcttttcacaaaccaaagatcattctattattagaaaaagatacttccccctcactggttatgagaatctgactagtgtccattgttgttttatctctctgcatgcaaccttaaaaaagttaaacatggcaaaatttaaacattcaaaatctgcacagtttgattgcatg

SEQ ID NO: 186524 - DNA, 252 bp, Homo sapiens
tggcccccatctacctccctgacatcagcttttcgctccatcccctgctccagccatgctagcctccttggtgctctttaaacatatcaagcatgttcctacctcagggcctcaacacccgctattacctttgcctggactgctcctctccagacatggtgaaaccccgtctctactaaaaatacaaaaattagctcggtgtggtagcacacacctgtcatcccagttactggggaggcaaaggcaggagaa

SEQ ID NO: 186525 - DNA, 368 bp, Homo sapiens
gctgtagatattcaagttctactagcttctaactccttccatgtaaagcagcagcgaagctgccctgccaaggcccacagttagatttgtgcatctctgagcatcttttcttgagctctctttgttaccacctgctggtcacagagctgaggagggctgcacccccttccaccatggctgcagatgccctctgggagaacactcggggcagactcctgaggaccccatggtgttgagcacctgtccttgctgtggccaggctgcgctccgtaccaaggtaggcaaaacgccctgtcacccactgggcatcatacctgggaacctgggcacacccaaaaactgctgcatcatgctctgcccaaagccct

SEQ ID NO: 186526 - DNA, 349 bp, Homo sapiens
catgtcccaaaacccaaacttcgcttatctcctaataactcaatttttgaagccctctcactagccccttgggaagacagacaccttggcatccaacagcttcctcgctggtctgcagttccctctgccatggctgcatccagcccttccttctgtatcgaacctacacaaaactgccaatacatctgttcacctgttttcgctctgttgcttactccatccagaatgccttaaaccccttctcgaacaaatggaactctacaggagttcaagggtggagacaaatacctgcctcctgcttcacaaggtctcagctttgtgttcacagaaagcgttgtgtgtgcccctg

SEQ ID NO: 186527 - DNA, 678 bp, Homo sapiens
attttgtttatatttttgtagagacagggtcttactgttatccaggctgtcttgaactcctgggctcaagcaatactcctgcttcgaccttccacggtgctgggattacaggtgtgagccactgtgcctggcaaaagtgttcattttgaaaattatttctacatataccaagaagtatacaaataataacagattaagcatttaaactaaagggtaatcactacttacgtcaaaacatctaaggaagaaacagcaccagtcccacacaaattcttccagagagcagaaaaaagcaaaatacagtatcatccaactcatcccttgaaacacaaccccaacagtaaaacttggctcagataccacaagacaaaaaccatgggcagtctactgcaaaagaatcccaaacaaaatactaacaggccaaattcagttattcccagaagaacaacacttcacagtcaagtggggcctactccaggaatgcaaatttggcccaacacttgaaaatcaattcaccacatcagcaggaccaaaagaaactggatgataatctcaacagatctttctttaaaaaagatcataaaaaattttaaaaagaccaatagatgaattctcatctgctcaacagttatcaagactttgccacatttattcatgctccgtttttctttgtgatat

SEQ ID NO: 186528 - DNA, 432 bp, Homo sapiens
tccttagctattcattcatatttataagtgaaggatagattagtgtatgtaattagcattagtttttctgaaacttatgtaagtctgtttttccactgtcctactctgaatgggaggtctgatacgatctgtttgtgagttatagatagatggttattggcaagtgttactttagggtatgtaggcatggaaaagtagagattcccctcctcccaggtatcaaaagtatgagaaatttactcttgggatggaaaactttaatgtattttccttcactgcagagctacttctcctgtttccttttctttatatctgcggtagaattttgcagttaactcaggttcctctgtttctctctgaggcccctatacccacagcaagagctttcctcaagtaggcagtttactttcttcagaaaattagctgatttta

SEQ ID NO: 186529 - DNA, 275 bp, Homo sapiens
tggatactggggggtgactgtacttaaaacaatagtgtgtggtggaaagtgctaaacttcctaaaagttgtccaaatggtgagctgtgtgggtttagaagaggggagagaaggcttctagctagggaaggaggggtggagagggtagcaattgcaaaaatctttgtaaaaacagtgacatttgtgacacagaagagcagttgggtgtgtagctcttggggggcggaaatagttttggaggggagacagggtggctgaaaacagagaagagagagg

SEQ ID NO: 186530 - DNA, 250 bp, Homo sapiens
tactaataaaaacttgaatagcacagacaagcagctcagcatggaaatcaattactttcaagagataataatgcaaaaaaaaccattaggataaaaatgcagctatttaggggtaagaacatggaaatggaagtaacttctgagcattatccttgactaaaaaaaatttgtacacacgaaccaatacaactttagtttataataatatcattctgcaatttaccaactgtatatcaagaaacctggtggt

SEQ ID NO: 186531 - DNA, 450 bp, Homo sapiens
tagtttgggcctgcgaaggggaagggaggagtgagcctcgcagccctacactgacagggctaggagggctcctggtgctctccatctcttcctgagccccagctacattagcagaaacagagtctctccaaaaaatgagcaagaccaccctcagcatcggactccatgattggcactgataacagtagcttgagaacactttgctcttttggctatctttctgcaccgccgcaatagtgcgcatgaatgtcctggctgatgtgctcaagagcatcaacaatgccagaaagagaggcaaacggcaggtccttattaggctgtgctccaaagtcatcgtctggtttctaattgtgatgctgaagtatggtaaattggcgattttgaaataattgatgatcacagctaggaaaattgctgtgaacctcacaggcaggctaaacaagtgtagag

SEQ ID NO: 186532 - DNA, 312 bp, Homo sapiens
tccagtccttatgaactctctgtgggatttggctctggtggccacctctccaatggaagttgacccgtgcctcacttcagttgctagactttagtcagcgaatctcacactgcctttgctgggagtggaaggatctcgcctcacccactgctcagctgcctctcccccagtaccctgccttcagatcttgccaaaccactgcaagttcccaggacataccatgcttgctccctcccaggcagctttatcaaaggtatttcttctttacgatgctcaactcttcaaggaggtggtggagcagagaggacctgg

SEQ ID NO: 186533 - DNA, 327 bp, Homo sapiens
tggcagccctcagtaaacctgctggttctgccacctgtcctattccactcctgcaggaagctggagaaacaaaccctcttggctgtctgctgtccagggagtcgccactcccttcattatagccttgctcagagtgcagcggcaggcctggggatggcctcgggaggtaggtggcccctgagcccttctcctgggaaagggcagcagcagggagacgcctcctgggtgtgcacagagaaaagcacagtttccctaactccccgctccctaactcctcgctctttaactctcacctccctaactcccccctccctaactcccttctcc

SEQ ID NO: 186534 - DNA, 382 bp, Homo sapiens
acaaagcttcccatttagaaaaggttcaggcagcctcctgctgggatctgcccaacccctctaggaggtggcatggatgcccacctcttcttccaagggtgcactttgcctttaggtttggggaaaagtactgggcgagcctttgggactgttgtgtctcatgagtgggctgaccttggtggaggcttgcgtttcccatgtggggcctgactttttatgtgtccagccagagtgatgagctcgttcactttccctgcagtgcttccttgttgaacctgaaagagaggacgtgggagcttttgtaggagagagaggacacatgctttattcttgaactgtgaggtgtatgtcaccagagagaattggagacagcggtgactgt

SEQ ID NO: 186535 - DNA, 229 bp, Homo sapiens
tgcaccctgccttctccggactccaacagggctagcccctgctgcccagtcttgccgggtacagaggatcccagtaccaggaagagcagcctaatacccggctgctcagattagacttactgttctgaccaaaggcactgataacagtgggcaagaaaactgccttccaggaagggcgaggtattcagagaaaacgatcctttgtttcccggaagaaggtaaaaatgat

SEQ ID NO: 186536 - DNA, 358 bp, Homo sapiens
tcaaactggtccctgtaaatttactagctcggtggcctcaggctgaggcttcaggtgccaccactgtaaaatggggtcagcaatgaactgttttacaagactactatggggcaaaagcaggtaaaatgacagggttttctacatatagtcaacaaacttctgaagtcccttctaatcaaattatttcaaaggttgctaatgagagaaggtgaaattatgtctgtgtgtgtctcggagctcccagaggacagagaagggcattggatgtcgctggcaaaggaggctgacttgtcccctctggctagagggcagaggtgttgcctaggagctcctatctttcccttcctgcttcttccaa

SEQ ID NO: 186537 - DNA, 498 bp, Homo sapiens
atgctcccaggtgtctttgccatcagggcacaattctgctcccaccccatgcagatcctggcaggttgtcatacaaaccaaggactggcctgctacttacacttttataaatattcaatcaaaagacaaataatgtttttcacttctgagcaaggctttgccatgacaaatgactacccctcaatttgtttggggaacactgaaaaaccaagagttaagaagagaaatggagcaaaccagagaaatgttttggaaagaactttgagagaacaggtatctccagggtaagtcaatcctgggggcagaacacatttcttcactaaaggaacataggagagtaagaattattttcaaatcccaaatcctggattttctcattgctcccagcctattttgcataattgtatacatttgcatgttgtttacatttgcatattgttttctatggactcaaatccctgacaactgtaattatgaaaaatacagactgggtatgtt

SEQ ID NO: 186538 - DNA, 291 bp, Homo sapiens
aagtcagacacttcaagtattctattatcttcatattcctgaagatgtgttcccatctggactggttgcctactggttttatgtatacctgttatcctgggacttccctttaccagcaccttagagatattcattacctctttgtattggattacctgttttttagatttcatgtcttctttcttggtttagtctttcatcttggcagaacaggttctccaagtagctgcctgtgaaagggtttatgtaagttaaactttgagatcctaataggctgaaaatgtcttactc

SEQ ID NO: 186539 - DNA, 357 bp, Homo sapiens
ttcaatcatgtacgttgcttaaatttaagggcttcacacacttgtaccaacagtgataattaactttacataaattcttcgcattattgctgctcacaatgatgccataaataccagggaatttcaagattaaaataatcaagcatcttcagtagaatctttcaacaatactttggaccgcaagaaattaaatgcaacaaatttttgattcctcaaaagaacactactcagatctattttaatcagctttgaacgtgtcagagaatcaatctagtctgttaagtgataaatagctataagcatattacctcttcaacagttgtcgagttgccattccatttatgggaatctagtttt

SEQ ID NO: 186540 - DNA, 190 bp, Homo sapiens
tttccttactttattactgaggaaaccttattaaatgagaaataaattttaagatattgaacagggcatttggtctctaacgttgaggcttcctttactaaatttgtgaactgtgtacacccagggtgtgttgcaggcgggcaggtcaggcagaagacattgtgatccccaagggattattaagtttttt

SEQ ID NO: 186541 - DNA, 451 bp, Homo sapiens
agtggagagagaacgaaaatgtaaggagcagcaagacagatacaagaaggacactaggaaggagatttttcaagcagtgattgtccacaggctggctcagatgccacaccacagaggtacaaacttgaagtggtctgggccttctccgtgtgaaaatggcaaatccattcactgtttgctggatgaatggacttatcattgagctatttgctggatttaccatctagctaaaagatagctaaaagattccagcttagactatgtcatcaagaaaggaggcctgatagggtatgaaacggggaaaacaagaaaaacaaacaaaaatggatgctctcagctcttgaaaggatgatttatacccgtgtttgagcaaagcagattctgccttcagagaagcagcagcaaagatagctcatttctcaagcagcaccccatctcatccatcacccac

SEQ ID NO: 186542 - DNA, 140 bp, Homo sapiens
ggccatctcagcctgggattatagacgtgagcctctgcgcccaggcagcctcatctctgctgctccattttacctttccctcgatcattctccctttcatccaaaatcaggctcgcaaatgagattctccaaaagaaagg

SEQ ID NO: 186543 - DNA, 495 bp, Homo sapiens
agactatggacaaagataaaaacagataaaaataaaaggaaatacaaatgaaaaactaaaacaaaataacatcagcaacttaagacactgaaagcaagaaaacaaaagccatctttcaatcaacgtaatattaataatgtagcaatgttaattcaaaaaatgaacacctttacccaaacactcttcaaagactgcttttccctcctaagatttttcatgaaaactttagttagcaaataatctcacgataaaaagccgaagagtgaagagcacagctcctggtctcataccaatggctactatccctagtgctccggcttttctaagacacttatacaagaagatagcacgatccctcaaagaatgctgagcaggccgtaagtgcgatttgtctaacttcccatgagcagtcaacgggtacaaccaaacatagacccatacacatccacatcccctaaaaaagtagtctggattttcagtcagaaaacagtcggc

SEQ ID NO: 186544 - DNA, 166 bp, Homo sapiens
ctgggtatattcttgatccttgtttactggcagaagctctctgttgcctcaggcaatgggctgatccatggaatgcacagtggcttgagctccctgctcagtcccaggaggtaagatgagtggggctggaccagagcaggcctgtctacaggtccctcaatggcag

SEQ ID NO: 186545 - DNA, 525 bp, Homo sapiens
caacatgctcagaactttaaaaaaaaaaagatgtgttaatggcattcagagatgcagttatttgccctaagaataggtagagctctgaaaaatgtcttgtggtttgaattttactgaaaaattggaaggatagcatcactactgtgaacttttctatttggtattattttgacttcaaaagctctgaattttgagattaagtatacaaattcttaaaggataaaaatttaaaggagatctccatgtatcatcaagagcttatacatcacttagatatggccaagattataatattttggaaggtgtattctcaaacatgagtgtttgtggagggatatggggaaatattggatattttcccataatcagcaaactttttctgtaaaaggtcaggtagtaaatatttccatctctttagatcatacatagggtctctcacattcaactctgtgattgtagtgctaaaatagccatagacaatatgtaaattgtagataaggctgttccagtaaaactttatttaaa

SEQ ID NO: 186546 - DNA, 385 bp, Homo sapiens
acatcaccacggtgtaaacatccttatggctcaatctggcccatatccttatttcctcaagaccaattcccagaaatgtcacctacttctactttatattctctggatatatcttacatacctttacaagatgccttaattctttatttaagagaggtacaggggaaataactgaacatttaaaaaaatgtttccatacattacaactgttttggaaaaaatatcttttgacagtatacataagggtaggtttttaaattctctctcttccctctacttaatgcctcacagtccttatgaaaaaaaaagtgtatatttctcaactggcaagttatgaatcctgctttaaaagagagaatttctttccactacttaaaaagggctg

SEQ ID NO: 186547 - DNA, 313 bp, Homo sapiens
cttcctgggttcaagtgattctcgtgtctcagccttctgagtagctggggactacaggcgcacaccaccataaccagctatttttttttttgtatttttagtagagatggagtttcactatgttggctaggctagtctcgaactcctgacctcgtgatctacccgcctcggcctcccaaagtgctgggattacaggtgtgagccaccgcgtccagccaaaatatatatgtttttaaattctaggaaataacgttgatttggatatagaaaaattaaataccagggaatgctggcttataaattttagtccagc

SEQ ID NO: 186548 - DNA, 105 bp, Homo sapiens
ttgggataaaacaagagacagacagacagacagtgttggggaaacaggtgttggctgggcccagcttctgtcccatgttttgtgaaattgttttccaaccctttg

SEQ ID NO: 186549 - DNA, 347 bp, Homo sapiens
ccctcctcgaggtaacataatcagggccatttctccaatcctaacctggcaagagatctgaaatcaacagatgccttaaataatatctcaaacttactattaggcagataagtggcttaaggtaaacattaaataaaatgttaaagctgcccttcactacatgagtactgctccctttaagagagctgttttgagccacctcactaaaaacacagacttagcaaaagtttggatgtggttcatttactttaaagataaattactcgtttcagataatccatctaaatagtaaatcccccttactttactcaaaacaaccaggaatctaaaaattaagtttactctga

SEQ ID NO: 186550 - DNA, 303 bp, Homo sapiens
aatctggtattatgaaggataagatgtttgtaagtttagtttaagtcgttagttcaaatgaataaaatatatgccaaaaatctccgttttctaattatagacaaggaaatttgatttgatgtgtcatatatttaaaacaaatacctaaacaattgcctaaataaaagagtgtcttaactatgcattttagaacactaggtttctaaatcttacccattcacagcaaagtgagatcttttctggacccacatgactttttagccttctcagacctgagaaatgttattaaagtttaatattatg

SEQ ID NO: 186551 - DNA, 359 bp, Homo sapiens
  misc_feature (44)..(44): n is a, c, g, or t
gagctcggtacccccaggttgtgcaggtccatgtgtgctgtccntcacgcaacctgtacccaagccatacacacactcacagaatctcagaatatcagaatcaggtcactccttttacagatgaagacactgagtcctggagatgcagtcatgacatcagctattggcacgagcaagcctagggaccgccaaccctgcagtcagtgctctttccacttgccggctgtctctgcaatgtgcttctgacaatcagcccattctttctctgcctggtccatgacttaaaacaagtcagccaagtgcaaagggaaatggaaagtctgcctggaaccagcagagcaaaactattaatacaaagt

SEQ ID NO: 186552 - DNA, 408 bp, Homo sapiens
ggtcaaggctgcagtgaactgagatcatgccactgcactgcagcctgggtgacagagtgagatcctgtaaggaactgaaatcatgtactggatttccccttaacacacttatcaaagttctctgggtaagcttttaggatggagggcttctttaaaacacagcagtatcaatgctttcttcttttgattcttgattcccacagcactcacagtttatattatctgtctcattgctcgttccttctcctcttctcctctaccaaacttcctgaaagagttatgtccactcgtgttcttcacatgctcacctcccattcactccttactcttggtcctctaagtgtgatctgtggaccagcagcatgggtatctcatgggaacttgttagaaatgctgaatcatgggccc

SEQ ID NO: 186553 - DNA, 253 bp, Homo sapiens
tcaagagaggaaagggaaacttgtcagagcagcaacagtagctaagataaagctatataccttcgatttcagctattgaagagtaatggatacaggtcccaggtgaagtcagaacacttttcacccagactacaaaactcatttttgaaaaagattaatatggggcagtagaaccagcactggagttcgaacatttaaatttgtaacgataactctgccattaacaaactaaaagacttcaaacaaatcattc

SEQ ID NO: 186554 - DNA, 525 bp, Homo sapiens
ctctggagcttatccatctctctattacaacaagtactccttcaagcaaatgttgaataaatgaatgaatggacaaacaaataaatctgttctgtcaatccttaacagccagctgaaggcttaaatcagagaacttaaattgcccctgaaataattactgcaatctgtactactcttcagacaattccctatttctgtcaacctacccctaactcaatatttaactgatttctaactttgtgtctcaactatgtgatgctttccaaaactagaattaccttggcagccaggtttatagacttcaaagaaacctgatgctgctatggatggaaatagggggcaatagggggcaagctggtttgtgtggtgagtgccaaggttaagtaaatagacatagtggagccaaacattcacctgcatttcaatatgatcagatttacacacacacacacactcttaaagttagcaatttatgctatgagaatgagaatattttagacttgaggaaactcaaatttaataaaa

SEQ ID NO: 186555 - DNA, 747 bp, Homo sapiens
taactgaaagggaggtcttccttacccctccatagtccctgaagacattactaaccaacctctcccatactctttgctgagccaagacaccatgcggacttctcaaggtggccttccactaccaatcagagtgggtgcagatgatggagtggtcaaatcagaatctggaagcatctgttctgcttctggctgcatctcttaagagctgtgtgaatggaagcttctatttctttatttgaaatgggataatgcatacgaaagcatatgaaacattttttgaaattagatattataaataggccatgtaatatggtcttaaactattatttcagtcttctattgagatagagccagtggtgtgcccatttaacaaccaggtctcaggaaaaaatagctctgattgtagcctttgctgacttccttggtgcaaataccacatggcagattttaaactacgaatgagacatcgttgaatacagacttggaattcacagcaatacgctgttatacagtgttttcattgtacggatacagtagatgttgatcttctcaagaacatagataatagtagaaggtagtaaaataattcagaagtgatgatgtttgagtattgccttttgttttagatctacttttaatatttagtatttaacaatggctatttttagcaactggcctgaaaatttctgacaatttaacaattggctttcactagtgggcgtgagtcagctctagcacacttctggt

SEQ ID NO: 186556 - DNA, 353 bp, Homo sapiens
attgcccaggctggagtgcagtggcacaatcatgtaatcatggctcactatagccttgccctcttgggcttaagccatcctcccaccttagcttccaaatcctgggactgcaagcccatgccaccatacccacctgattttttaattttacagagacagggtctcactgtgttgctctggctggtcttgaactcctggcctcaagtgatcctcccaccttggcctcccaaagtgctaggattacaggcatgaaccaccatgcctggccttgaatgaatcttttattcatgcatgattttgtaatttcatacagcagtcatttggaaaaattggttctcttatggagattttat

SEQ ID NO: 186557 - DNA, 434 bp, Homo sapiens
gcttgatcaaagagaatcaaagtcacatcccacttctgaggcatccttaatcaggctatgacacagaacagatgggtaaacctttagagtccttcatttgcatttatttgcacttcattgtataacatgttcttattccaaatccctcctttctttccttcaaatctgttttgagcacttgctaaataccaggcactgtgctatctcattgcatcctcccaacagcctgttttatggctatcagtaataagaactagtggacttttttttttcttctgcatttatacgatgccaggcacagtgctaaatattttatgggcaacattatctcttgtaatcatcactattaatttaatgtgatccagtagaggtccacaatcccttatctgaaaccctggggccagatgtgttggaattcagaattttttggacat

SEQ ID NO: 186558 - DNA, 150 bp, Homo sapiens
caggaagattgcttgagtctagaagtttgagaccaacccaggcaacatagcaagaccccatctctaccaaaacaaacaaacaccacacagtgtttcctcaaaaaattaaaaattgatacataaactctacttcttgatatatacccagaa

SEQ ID NO: 186559 - DNA, 386 bp, Homo sapiens
agaagggaaagaaaggaaagaaagaaagaaacagtacaccagaagtatttccttccggtagctaaccactccttttcacccaaaggtaaccgctagcctgacttctaacagcatagagcagtatccttgtgtttgtgcattatatacatgtgattttttgtgtctggtttctttaactcactatgatggtcatgaggttcatccatattttgagtatagtcactgtttgctcatgagaatgctgcagtgcagtccattttgtgaatataccacaatttatgtattcaaccaattgttgataggcattggagtagtctacattttggaactattaaaaatattgctgctatgaacattgtaataaacgtcttctgatgaacatgata

SEQ ID NO: 186560 - DNA, 314 bp, Homo sapiens
tgctgtgattacaggcgtgagccaccgcgcccggccttgtttcccttcatcttaaaaggcagaacggcctctctttggggtgaccggaggcaaagagctgttgggagtgttttgtggggtctcttcttccttccttgtggctacatgaagcctgagtctcagcctctggtttcttggtttctttccactgccctgggcaaaccagcttcgactgaacgtcagccagtccagagagtaattaaaagagttaagtctcaaaagtaaatctccgggaagagccctcagtggtttcagacccccaggcacttgtcctc

SEQ ID NO: 186561 - DNA, 483 bp, Homo sapiens
tgaatggacgctgggccccggcaaatgaggcgctgtgggtccccaagaagtggggtaccaggctctactcccaccccggcctctgaaacgcttctctctcggccgctagcctagaggctgccagggttgggcactgttctcactcacacgctcacctctctcgggcagtcctcgagatatgtgaatggtggaatgaatgctctcactggggctgtgtcaggatgcgtttttaaattttctcaaattaaatgccaacccctcattccccaccccaagtagttggttcgtttgtttttagagtaactaccaaagcaacagcaatgttaaccgtccttgattagctggttatttggtgtagggtttttctcatcctcctttattcttcctgttaaaaaggagggcttgaacaaatccttcctaactctgtctctgccatatgaaaagggtggggggagaagagaaggaaggtggggagaaaggaca

SEQ ID NO: 186562 - DNA, 682 bp, Homo sapiens
  misc_feature (21)..(21): n is a, c, g, or t
  misc_feature (33)..(33): n is a, c, g, or t
  misc_feature (74)..(74): n is a, c, g, or t
  misc_feature (127)..(127): n is a, c, g, or t
ccaggtagacctaacagaganaggaaggaacgnaaactgctgaaatgcattacagaggccaatgcacctgccantgctcaggcaatgagactgatcctgaccagaaactcgggcaagcagaaacaancaagaagcagcaaataaaacatggcaaaataaatgcaggatgcagttagaatgaagaccgaccagaacatcgttaggtatacctgggataggtctaccctgggttaggttacctaggtagacctaacccagtcatttttaggatcatgaatgataatagcttctttttcatagtcatacatatgtggtttagaataaagtgagaggtcatcagtgcttctacaattattgtacgttctacattatgatacaattttttgctatccatctatttctctccttataatgagagcccctcagagatgtgaccccagtctctttgtttctccatgacctagcacaagtaggcactcagttatacttattgaattgaactaagcgacttttccatagctcataagtcttggaagaggccagcattttcctttatctcattttcttttctttttttttgcctattaattaattagtttatttttttatttttttattatactttaagttctagggtacatgtgcacaacgtgcaggtttgttacatatgtatacatgtgcc

SEQ ID NO: 186563 - DNA, 431 bp, Homo sapiens
tgtcatcttcctagtaagagctgaagactgggggctgcagacagtcccccactcacttggcttatttcctgggaccatgggtgctgtgggtggaactgaaaagtgagtgagtaatttggagatccctatggggcaccaggcagaaggctctttaataatttcagggtgaagccttcttgagaatggattttaaattagaagtgagattagggtggtggattggggtcttccctgggggttagaatcgaaggagaaatccctgcttagggagcacctgctttgtgcctgggaggggcaggagtaacagagctgcctaggaactaggcccctgaaaggactgtgagaccaagttcctaggggacagacactgagcaccggcctgaacatcgtatttaatatttctgaatgaatgaatatattaaacgcagtgg

SEQ ID NO: 186564 - DNA, 243 bp, Homo sapiens
gccactgttgcaattggttggtttttctgcataacagctgggtgtcttagaaatgagggggtttctatagtaaccaattacagccatgattggtgaaaaatcacagaaatatcctgtgtgtgaagttatgccagcgaggcaggcacgggcttaggtgctatggttttaatttcctggggcaatatttctctaagtactgatggcaggcaggtttgcttgtcatggcttttgattcagcctgcc

SEQ ID NO: 186565 - DNA, 452 bp, Homo sapiens
catggatgccttctgaggccacctctgtaaattgtgaaagtactttatgtaaactgtggcacacttcataacctcagtaagtgatgaaaaatggcattcctccaagatgcagagtctgagggctcaaaagtacctggttagtcttgagtacttgcttctcaatggccagactggcatgcagtctgtccaagtctttttaactttgcctggcacttattttcagagcccagggcttgtagttagtatttgtctgattaacgatgaggttggttaagagttagaatggggagggtgggaagtaagtgatttaacttgaggcttgaacctggaagttcatctagaaatagacataaacattgcccagggaaagtatcaccaatgtggatttttgtttctttcaaggctactgagctgtcatgactttgtcattcccttttctggcccttttagaa

SEQ ID NO: 186566 - DNA, 302 bp, Homo sapiens
attgcctcattgaatcctcagaacaaccctgtgagagaggtacaattattatctccattttgcatttgggataactgaggcatacagaggttaaataattttctgagtcacataattaacaaatggagtctctgcaaccattcaaacgtcttctcctcattcctttagagccctaggttggagggtaagttgagtgtcttcctttctgttcatcaccacttctaagccattgtcctccctgggtccttagtgcagtcatctcctgacctcgctttcctctgacccattgcttgaagatgtca

SEQ ID NO: 186567 - DNA, 479 bp, Homo sapiens
atcttacaggaagcactagctgcctaccactagtggggtggagagaaatcagcattactggaggcgtgcccacacttacctctcattgcttgtcttcagtggttctgttccttaaccagagtagggatagataattataccaccctggttcccttgctctggatcaaattttgtttttacccaaagctttgtaaaaataatagcttgtaagtaacactacttgctttatgtctatataagtgaaaaacatttttttgttgttgttagagacagggtctcgctgtgttgtccaggctgaagtgtagtggcacagtctcagctcactgcagccttgtcctcccaggctcaagtgatcctcccagctactcaggaggctgaggccagaggatcccacaagactgggaggttgatgctgcagtgagctatgattgcgtcactgcactccagcctgggtgacagagcaaggtcctgtctcaaga

SEQ ID NO: 186568 - DNA, 250 bp, Homo sapiens
cacagtggattctgggatgtacagaagttaattagaaagaaatgcacctgcggcgggcccgcttcggccatctctccggcccagtttccctcggcgtgcgactgtgtgctcagcccagcaccatgggcaagtgggacaaatgggtagcctatatgaacccaacagcaatggcgagatcaaggggtccaatccagtcttcagggccaaaaatacaggattatctgaatcgatcaaggcctacctgggaaga

SEQ ID NO: 186569 - DNA, 303 bp, Homo sapiens
cattagaattagctagtcaattttcaaaaaaagaaatcttctaagagtctgatagaaaatgcattgattctatagatcagtttgggtagaactgatatttttatcacactgaaccttttaattcttgaacatggaataccccacatttatttaggtcttaatttctctcaataatgttctaaagttctctgtgtattcggaatagtcttgtatatttttcattaaatatattactaggtatatgatgatttttgatgctatggtaaacaatgttggttttgaaatttcattttataatcgctt

SEQ ID NO: 186570 - DNA, 606 bp, Homo sapiens
ccccctgtattgtctggctacttcactgccataatgtcctccaggttcatctatgtgtcaccaatggcaagcatattagttgagtgtaccatcttaagatacgcaatgacttggccaggcgcggtggctcatgcctgtaatcccagcattttgggaggccgaggcgggcagatcacgaggtcaggagatcaagaccatcctggctaacataatgaaaccccatgttgcccaggaggatcacttgagtccagcagtttgagatcagcctgggcaacatggtgagaccctgtctctacaaaaaaatttaaaaattacctgggtatggtggcacacacctgtagtcccagctactcaggctgaggcagggaaggattgcttcagcccaggaggctgaggctgtagtgagctgtgaccattccaccgcactctcgcctgggtgacagagcaagaccctatctcaaaaaaagaaaaagggaaaagaaaataaaaaataaaaaacatggccactgttctgaaaacagtgagtagtccagagtggcaagatcagagatggtgttgagaggagtggcaagaactaccaggaaggtatgtagatatacccagaaa

SEQ ID NO: 186571 - DNA, 344 bp, Homo sapiens
caggtgatccatctgcctcggcctcccacagtgctgggattacaggcgtgagccaccgcactggccagagcctcctttttgttcccacagtgatgacttgagtctcatcccccacatctcttgctccacttcccccacttaggatgaccttcggacacctccaaatccattgtgtaaagtcagccccatctcctcccttcagaactgccctccctcctgggtccccatgtaatctttccccagacctcttccctgacaccctccagccaccaagtgagtcccctcttccctatgcccactttcctgcccttggctagactatcacttgccaaggatacacatca

SEQ ID NO: 186572 - DNA, 410 bp, Homo sapiens
gaacttctagcggcagaaagggggtgatcctttcttctccatcataagggtcatggcccacatccctgtaacaaaagacaggttaacgagagaaaagcattatacatttacttgatcctggttttacggcatgcgggagctacggaatgaagacccgaagattcaggggaggtcgtctgtgtgccttggttccatgacttgggggcagccaagtagaagtggaattggacaaatagggcatgagcgggccgggcgtggtggctcatgcctgtaatcctagcactttgggaggccaaggtgggtggatcacctgaggtcaggagttcaagaccagtctggtcaacatggtgaaaccccatctctactaaaaatacaaaaattagccaggcatggtggcgggctcctgtaat

SEQ ID NO: 186573 - DNA, 500 bp, Homo sapiens
  misc_feature (346)..(346): n is a, c, g, or t
cacactttctgtttcccactctctcccctgtgcacactactactgtttcactcctgcttgaaattcactcctacattcatcccatccacagccatagtaatccaagcacctgatagcaaaagtcaaacacactggagtctatctagatggggatttcagtgtgcctggccacagtgactgggggagcctctttctcctcgcattggcactgctggtctaaaattccacttgtcctccggggttcgtgagagtgccctttcctgttaggtctacctgggttaggtctacctggggtctacctgggttaggtctacctggccaggtagacctaacccaggtagggtgnggggcatccatatagtcactccaggtttatggagggttcttctactattaggacttttcgcttcgaagcgaaggcttctcaaatcatgaaaattattaatattactgctgttagagaaatgaatgagcctacagatgatgttaggtctacctgg

SEQ ID NO: 186574 - DNA, 115 bp, Homo sapiens
tgggcaaactcgtcatcctcaaatctggctaccagcaagacaattgccaacactctgaccccaagacattggaacaatggagaatatccacaagcacaaaaaatacttttggtca

SEQ ID NO: 186575 - DNA, 361 bp, Homo sapiens
  misc_feature (300)..(300): n is a, c, g, or t
cttcactcagagtgaggtcctgcaggaagaaatcggcaaggccagcagcgggcgtgggagatacgggcatagaggatgcaaacgctgtcaggggttcagcctctcaggggcccctgactgaaccttgggcagaagacagtcccccagaccagcctcccccagcttctgcccgctcctcagtgggggaaggagagctccagtatgcatccctcagcttccagatgtctgttattcttttttattttttgtgtatcttgtttttttttttatttgtttattttttaggaataaacagtcttnattgggctcagaccagagtccgtagggtcctgagacctctgtgtattgtcaaagaaacgcg

SEQ ID NO: 186576 - DNA, 457 bp, Homo sapiens
cggtccagtgtgctgtctctcagcctctaggggaatgttcattccctcttcctagcttccggtggttgctggcactccctggtgttccttagcttgtagacatatcactgcaacctctgtctccatcatcacatggcattttccttgtatatctgagtccaaagtgtttcaatcttcttcctttcttgaccatccaaccaaattcttagcaactgcacataaatcaatggaagtacatacttctgtcctcttgttccagacaaagtagatgtattactttcctagggctgctgtaacaaatgaccacaaaccaagtgccttaaagcaacagaaatgtattgtctcatagttctggaggccagaagtctgaaagcaaaatgtcatcaggccatgctgtctctcaagcctctaggggagaattgttcattccctcttcctagcttccggtggttgctgg

SEQ ID NO: 186577 - DNA, 417 bp, Homo sapiens
ggctccggcattagggaaattggaaaccaggcatggaagcagcgtccctaccttcctcggccaggttcataaacctggggctcaatccgcctctccatgtaggacactgtatgtttgcaggctgaggaattggccaccactgttctaaagacaagcaggcatgacaagatgggcgttaggcctgttgccgccaggttttgccggctgccgtccttcccaaggctttcccttctccatccatcctcccccggtccctcgacacagcactagagtgagaacaccctggatgtgacttggggactcctcctcggtgtgcttgcgtggagagtggagaggtgcgtcgtttgtgccccgctttgccatgaccggggtggtcctggcacgccgggtatctagacagcttttcatcagtcgctc

SEQ ID NO: 186578 - DNA, 788 bp, Homo sapiens
atttcactctgcagtacaaatttttagaacatattttggggtaaccttttgagtttgcttctcttagtttcattagtatctcaagagataatatacattgccagtgtagcataatttcattatcctaagaaggaaaataatatacttcctaaacaatcagaattgaagtcatagtcataattttttttttctttaatggataaggcttcgaggaaaattatgaaatgtattgtgctttagtagtgttagctgactgcattctctctgtggtttaggcttgatcatgaatgatgttgggatcctctgagggagagaagtgacagtaaaagaagggtagtaattgagctctttgggattggaactgctcacagtcccaaaagataaagcacaagtggcatggtcttttctatctagggcttaagctacaattactttgctttcctttagagcaaggtttagtgttttgttatgtatctttttggatttttttttcttttggctattgtggttttgctttctttttgtttctaatattataggttttagttatatagttaccttctgttaagacaagaggtctttagacagtgttggagaagaaaaggcaaaaccttcatttactgaaaatgaattacataaatgtccgatcaggttacctattaaattatgaatgttagtgtttaatagtttagtatatgcaacatatatttgaaaattataactgctattaaactagtgttttggaacttttttgttgcaaattatttgcttcggaactactgaatttg

SEQ ID NO: 186579 - DNA, 198 bp, Homo sapiens
ggcatttgtacatttcagagcacagggaaatatggcttgagagaaaggtgggtttgatcacagctttgcagtcttaaaatacttgctaatcacaactgatttggtgattttgtagatagttggaagctactgaagatttctgagaaagagaatgctatagtttgatattctttaagaatacatatctggcatcagggt

SEQ ID NO: 186580 - DNA, 265 bp, Homo sapiens
agtgtctccaagacctttcaaacactgtaatatcctgactttcaagataattgaaattgcagcagcgcagtcttccctttaaggaactggtgtttttgaaattaattagaggctggaaggaacttgagccatcttctaggctttcagaagttactataaatggattgtgatctggtggaatggatagctgccttgggagtcacaagataggtttgagtcctgtgtctgctcctaaaaaatggtgaaatcacttaatttttctgaa

SEQ ID NO: 186581 - DNA, 325 bp, Homo sapiens
ttaaatttcctttttttgttgggatatgttcttgctctgttgcccagtgcagtggtatgatcatagctcactgcaacctcaacctcctcagcttaagcgtcctcctgcctcaggctcccaaagtgctaggtttacaggcatgagcactgcacacagccataggagtttttcaatctgaaagaaagaacattaatgtgcaaaaagttttttcaaagaaggtacaaaacccaccagtaaaattaagtaaacagacaaacccaggatactctactactataaatgtgtgtaattcacttataactctagcatgaagcccaaaagacat

SEQ ID NO: 186582 - DNA, 303 bp, Homo sapiens
ttagtgtattttatatgtggcccaagacaattctactttttccaatgtggcccagtgaagccaaaagattggacacccctgccgtaaatggaattaaaatgttgggcataagatatcctcaaaagactgtcataatatattttgtggaaatagttcacttcatttctatgattagatggattaccaataatttatagtttattatgagtaatgctgcagtgaacattccccatatgtcctttggtgtacatgtttgtatttctgttgattatatacctagaattggaattgtttgggcatggg

SEQ ID NO: 186583 - DNA, 433 bp, Homo sapiens
aacaaccacatttgtgcacatggtttttaagtcttctaaaagcttgagtgagggggatgggaatagggcaaggtaaaaaacacctcaaagcttactgtttttactgatattcggctgtttttcttgaataaatgctccttggaatgttgcaagtctttgttaattcctagagtactgaaaaagttgatttggacaatttttaccactgtttttgttgctattgtggaggaagaaatttttgatggtccgttctctgctgttctaggagtgttgtctataaaattcttttaagagcacttttaaaatttgggatgggacaagggaaaattgttctaccaaaaatacatctgcactcaaatgtttattgcagcactattcacaatagcaaagtcatggaactaaccctaggtgcttatcagtggtggattggata

SEQ ID NO: 186584 - DNA, 470 bp, Homo sapiens
ctgtcaccaaaaatcacctgggacccacttcactgactgtctttccaaatgacatttgtcaaagaggaggagattcctagttggttagtttaaaaataaataaataaaggctgaggcatttgtccatacatagttcttcctagcttaatgaatgcaaaaatagggctaacctccttcttctaccaacattttcccctctgggtttacttgatcattgtgtgatttattttccttaagaatgcatagtgttacctgcatatgaaaagatgcttaatatatatcactaatcattagagaaataataatcaaaaccttgatgatatgtcacttcatggccattaggatggcgactattgaaaaacagaaaattacaagtgtcaacaaggatgtggagaaattggaaactttgtctactgttgagattgtaaaatagtgcagctgctatggaaatcaacaggcgattcctcaaa

SEQ ID NO: 186585 - DNA, 182 bp, Homo sapiens
gccgggctgtgacatgacttgacttgggttttaatggaatcactgtggctgctctgaggaggaaaacctccaagggatccagggcacaagcaaggggaccatttagcaagctcttgcagtacttcagcacaagacagtggcagtctggtccaagacagtggcaggcgaagtggtgggaagtg

SEQ ID NO: 186586 - DNA, 171 bp, Homo sapiens
gctattaagagcttactcatatatagtggtgtctctcaagataagaaaatatactttatgtatttattaaggtatgatattgaacaaggtaaagaatagggacaataaattctgtttgtgttgtattgaatattttaatatcctaacagaaagcagatttacaatatcttt

SEQ ID NO: 186587 - DNA, 1069 bp, Homo sapiens
gtgtggtggtgtatcccagctacttgggaggctggggtgggaggattgcttgagcccgggaggttgagtctgtactgagctgagattgtgccactgtcctccagctcaggtgacagagtgagacgcctccagggcaaggaagttgtggggtcctgatgggaatctggatttcctgaatgtcacttagggtgatcagtccatgtgatggtctttgggtgtgtggcggggcctttccagccatctgctgtgagtggcagagctgaagtgcattaaaagcctagtgctgtgtgatcagtctgggtgtgctcagccatgccacatggcgaggatggcactgcaccgtctggggtgctgtttccaggaaagccttcccttaaagctggccactggagtacctgactcaggctgataaggtatttatagttcaaaaaaagttgctgaatggcagtaatcccctggtgaggaacattccccatggctgtgctctccaaagtttgccaagattgggtgaagacgttcactgtgaccttgattgtagtggcaaaacctgaaaccaagctgtactcatttgtcaggggacttacaaagtagagtcagcacatattcatatactgtcatcctgggcaccaatagggattagggagctatagttggattgatctgccatgctgttcaggatggactgggaagttgaaaaaggaagttgcagaattggtgggtatggtaaagactcatttggtcaaatgaaggctgggtgtaattgtaataaagatagacacatttggcttggtgcagtggctcacacctgtaatcccagcaccttgggaggccgaggtgggtggatcacgaggtcaggagttcaagacaagcctggccaacataatgaaaccccatctctactaaaaaaaaatacaaaaaagttagcctggcatggtggtgcatgcctgtagtcccagctactcgggaggctgaggcaggagaatcacttgaaccccagaggtggaggttgcagtgagccaagatcacgccactgcactccagcttgggcaacagagtgagactttgtctc

SEQ ID NO: 186588 - DNA, 510 bp, Homo sapiens
gctagaggatcccctccataatgtgtgcccagagtcagcacatattcatatactgtcatcctgggcaccaatagggattagggagctatagttggattgatctgccatgctgttcaggatggactgggaagttgaaaaaggaagttgcagaattggtgggtatggtaaagactcatttggtcaaatgaaggctgggtgtaattgtaataaagatagacacatttggcttggtgcagtggctcacacctgtaatcccagcaccttgggaggccgaggtgggtggatcacgaggtcaggagttcaagacaagcctggccaacataatgaaaccccatctctactaaaaaaaaatacaaaaaagttagcctggcatggtggtgcatgcctgtagtcccagctactcgggaggctgaggcaggagaatcacttgaaccccagaggtggaggttgcagtgagccaagatcacgccactgcactccagcttgggcaacagagtgagactttgtctc

SEQ ID NO: 186589 - DNA, 337 bp, Homo sapiens
cttgattagacttatttatttgttgaaaagtctgtgtggctggtgtgtggaaaataaagaatggattgaaaaggaactcaagtggagcatcaagactcagttaaggagttaatctaggttggaaataattgtagcttaggcctggatgctggcaatagggaaggggatggattcatgaaagaatgggatacttgagaagaaatatttctgtgctggagaagtagattggggagttcatggcataaacattataatggatgctatgggcatagataacataaacatgtagagaaagtaaaggtgacctagggcagaagccttaggaacaccaaagttt

SEQ ID NO: 186590 - DNA, 195 bp, Homo sapiens
agactctatcctcacttcctaccctgacctcaaagctgcttgctagtaacacaggtccctagcagggtcatgcctcatttgtggaagataaatagttctactctagcatcaacaacaacccctcacacaatgtctagcaaagagtcaatgctcaacaaatatctgttgaatgaatgaacaaatggatagatggat

SEQ ID NO: 186591 - DNA, 187 bp, Homo sapiens
aagcaggaagagaaaaatgactcatgacagacaaaggaatcccaataagatgaacagctgagttttcatcagaaacaatggaggccagtaggcaggctggcgacatattcaaagttctagggtaggccaggcatggtggctcacacctgtaatctcagcattttgggaggctgaggcggatggacca

SEQ ID NO: 186592 - DNA, 509 bp, Homo sapiens
ctgctctcactggattagttccacggatacatggtcctctgcattagctgggttctctatcttgggtgacatcaaacctagagatgaactctagcccctcactgatacctcacaactcagtctcagaagacatttttgcatggaacagactttaatgaatggtgggtgagggggtgcctgctattgaatgaataagtatggggggaattagtcacaggacttcatactgagcattagagtccggagtctttgttcttggaagtcttcagctcccgcccggtccctgaggatcttcccccgactgcttgatcttgcatcattgccctccctccccgagggagcaacacagagcggccctagtccactctcatgatgcctccattaatcccccggtcagggaccttccagccctgcccacagcagtcgatgccttcagtgcatctcagtcttccacccccaaaagcggtggggggtctctgtgcgggatcacccctctcctaatacccctg

SEQ ID NO: 186593 - DNA, 915 bp, Homo sapiens
aaacatttacaattaacatcttaaaggagtatttttctccatatacatatataaaaaatcatgttctgggtgtggtcgctcattcctataatcctaacactttgggaggcctagacaggaggattgattgaggctaggagtttgagactagcctgggcaacataatgagaccccatctataaaaaaattagaaaattagccaggtgtggtggtgcatgcctgtcatcccagctactccagaggctgagatgggagggtggcttgagcccagcagttggaggctgcagtgagctatgattgtgccacttccctccagcctgggcaatagagcaagatgctgtctctaagaataaaataaaagtaaatcccagcactttgggaggccaaagtgggtggatcgcttaagcccaggagttcgagatcagcctggacaatacggtgagaccctgtctgtaccaaaaatacaaaaagttagctgggcatggtggcctgtagtcccagctatcccagaggtcgaggctgcagtgagctgtgatcgcaccactgtattccagcctggatgacaaagcaagaccctgtctcaaaaaaaaaaagttcacaaataaaagaagacaaataggtcttaaacatatgacaagatgttgagctcactgaaaagcaaatgtgaattaaaatttcaccaagagactgtttcccacttagcagtttggcaaagataaaaatctggcacctcacggctgggtgcggtggctcacgcctgtaatcccagcactttgggaggccgaggcaggcagatcacgaggtcaggaggtcaagatcagcctgaccaacatgatgaaaccccgttgctactaaaaatacaaaaaaaaaattagccgggcgtggtgacgcacatctgtaatcccagctactcag

SEQ ID NO: 186594 - DNA, 496 bp, Homo sapiens
gtgtgccatgctcctgagaagtttctgggttgtggctttaatgttctcctgcagtgagaacgctgacacttggccaaagggtcctcacctctcccctagtacacttctgagatgccaggaaggttctgaacatcagattgattcctgggactcccctccagggtggccttactggagtcaggagcccctgccccactaggatggctctgcagtggcctgaggacagtgagcactgactggtcactggtgcaaagttgcccactgtgatggttttgaccgttgatgggaaccaagtgaaagccctgcagctatttctaggcatttcagagggtgcttccctgcatgtactctgctgcagaccatcctccctgggccaggagcccgctacacagtaggagattctttttcttctcttttgagcacttttattctctttttcttaatctctgctcctcctttgaactgagaaatgtgcaaatcttttttgttagttttg

SEQ ID NO: 186595 - DNA, 274 bp, Homo sapiens
atggcaggcagagaccaagaggaggaaggagagggaggaaagaagagattcataggtaaaggcagagccagggaagaaatggtcatgatgaagggaaatcatccatcatgactggagaagtcattatttcaccagcaagactggttcactggcctgattagtaccggggagtgggactgaagtaacccaaatgttacgcatttttttcaatgccatggtattttgaaaaactgtttaatgtcgccctatagttggaggtagattgttgcataca

SEQ ID NO: 186596 - DNA, 366 bp, Homo sapiens
cctccactcccatctcattctatctgtatctcgctctacttaacctgagctatactgaatttgcattcggtttggacaagtcttagttcctcttttggcagatcatcttcacatttccatcaacatgcagcacaggtggaaaaaaaggggccaataactggatctgcctggggaatctggaagcccaagaggagctgcattttgggaaggagccaggctaggggcttaaactctgtacttgggggtagggttgcaacactggctcgaaggggaagaaagggattatcctcaacctttcacacatccagactctgggagatgcgcaggcttagctccctggcagggctaccagtgaaggcagggaga

SEQ ID NO: 186597 - DNA, 399 bp, Homo sapiens
ctgggatacctgctattaccaagccaaccgaaggcctgactttccctctgccttcctacataaaaagaagagagtaaaggtttaatgtcttctaggtagaagttagatgaccacccaggccacacttcaccaagtttgctttttcatctgccgtcaaacactactatccacactcagctttgctcatttattccttcccttctccctcctgccctcctccagactgccacagagatagttcaaggtgacaatggctcctctgcagcagcacatagcagtcttgccagacacaacagcagatcaagtaactactgaagatgatggctacacttggacaggtgacattacattatcatcaacaaacatttatcaccctcttgagtactgtgactacaaaga

SEQ ID NO: 186598 - DNA, 425 bp, Homo sapiens
ctgtttgtgatggccccttccagatcatggagcagagttacgaagcatcctccgaatgggacgagtaagaacgttctgaagtcccaaccaattctcgcacatatctggtggcgtttctccacccccacacctcacactcacccagcgggtggtctcagtctcccctcttgactcatgcttatcaaagtattcggtcctttacattcaacaagcaacagcagctcaagattagcgagcctcactatgtgcaaaaggctttaatgtaccacagtaccccacttcagagttattctgagttaaacgagattccgcttgcagagcacctggcacgtagaaagcattctcagcagaagtctgttactgttaatgtttgtgctacttaattcgaaagaaacaagtaacctactcaaaaccctactgcacat

SEQ ID NO: 186599 - DNA, 581 bp, Homo sapiens
ccgaggcttcttaaggaccagatcaaactcttactgggcttttctcacctcgctccaactctaccttattttccactatgtcagtctagattcttattccagccttcctatctcaaacacaacaagcacaagtttcgtctcccttgaaatgtcctccttctcttaacctacacgtcctgttctccttacaaggttcaagtcacaactctgcacacacctgactgatgtcagcgcttgccagtttcatccttcctgaacgactctagcagttacagtgtgcaacccgactcaagtataccatcaaatactactaagaatcactactacaaatcactaccaagaatgatagttgtgtgatcttggatagatcatttaacctatatgggccaccatttcctcatctgtaaaagagtaagtctaacttaagaaattttaaaagatcttgccgggcgcggtggctcacgcctgtaatcccagcactttgggaggccgagacgggcggatcaccaggtcaggagatcgagaccatcctggctaacatggtgaaaccccgtctctactaaaaatacaaaaaattagcc

SEQ ID NO: 186600 - DNA, 174 bp, Homo sapiens
gagtgttggggctgcctggcttgaaacctgccctcctgtcttccttgggggccagctcaggtctgaggctcttggctttagtctctgatttgcatgtcatcatcagggacgttgttgcgtcccatcagggccaatggtggtccttgtgctgcaggccagagtgtcctgtgtgtg

SEQ ID NO: 186601 - DNA, 492 bp, Homo sapiens
tttctttttgagacagcgttccactcttatcgtccaggctgtagtgcaatggtgcgatctctgctcactgcaacctccatctcctgggttcaagtaattctcctgactcagcctcctgagtaggtgggattacagatgcctgccaccacgcccagctaattttttttttatttttagtagagacagggtttcaacatgtcggccaggctgatcttgaactcctgatgtcagttgatccacctgcctcgacctctgagcctgtttctacgtctgaataattttcaggagaggctgggcttcgggagccctagtctagtggtctgtgatcttctgagaaggtttttttcttggcccctcctttcctgattcctcatctttcttctctgttttgatcacacttttgctcccctgggaagagcccagggcttcaggctggaggttctgttctgaggagataaggtcagctgaatgacacttaaggcttgacatttt

SEQ ID NO: 186602 - DNA, 456 bp, Homo sapiens
gatcttagtgcaactcaagatgggaaccctaataatgacagagtccttgcaggttggagcaaagtaaattgaaagaaaaactaaaacatatgctgattgtttaaaaatagatacagagactaaaaataagagtccaagctggaaggtgtttccatgtaaaataacctctcttgaggtttcctttaacctgatcatagaggctgggggacagaaggaagtgagctcactcatgcagccttaactccagtgcccaagtccacagcgagggcccagcacttcacggtttccaagcactcccacctgggccagctcacgccatctcatggccaacctcagaggtgggcaatgatgaatccccattctccagatgaagaaaacaggggctgaagggagttaaacctggagatcttaaatctttgaattaccaagttcaaaaaaatccctttccccacccct

SEQ ID NO: 186603 - DNA, 167 bp, Homo sapiens
aaagggagagaatggagacacagggattttggtgatggctagtgtaaatcaagggaatttctgagaggtctgtctggctaccacactccaaaattctcctaggtccctgttttcctctgaatgactttgtaaagagactagagcccatataatgccccatcctgctt

SEQ ID NO: 186604 - DNA, 293 bp, Homo sapiens
ggtttgactcctgactttactactgaccattatatcatcccaggctagtttcttttttttttccttaatttttttaactaatacataataattgtacatgtttatggggtatgtgtaatatttggattacatgcataggatgtgtgatgatcaaatcagagtatttaggatatccatcacctcaaacttttctcatttcttggtgctgggaacatctcaaatcttatcttctagctactttaaaatataccataaaaaataaaatacacaataaactgttaagcatagtacca

SEQ ID NO: 186605 - DNA, 513 bp, Homo sapiens
ggctagtctcgaactcccaacctcaagtgatctgcttgcctcggtctcccaaagtgctgggattacaggcatgtgccaccacgcctggcccttaattctatttttatcctcagtagaatctgtccattgttagccagttagaaatgccacacttatcttgttggctagttgaatgttgttgttttgcaatattagtttatgcataactttaatatttaatgattatttctacttaagattattaaaatcctatttgttttaaacagtgactttttaaaaaaatacagccggccctccgtgtctgtggattacacattcttagattcaaccaactgcagatcgaaaatgtttgaaaaaaaaaaagcgtaataaaaaagaatacaaatataaaaccaatacagtgtaacaactatttgcacatttacatttgtgtattaggtattataagtaatgtagagactgcttaaaatatgtgggagaatgcatgtaaactagatgcaaataccacaccat

SEQ ID NO: 186606 - DNA, 376 bp, Homo sapiens
ccttctcgtgtttagatacacaaatattattctgttacaactgcccacagtacagtaacatgctgtacaggtttgtagtctgggagcaataagctataccatatagcctaggtgtgtagtaggctatactatttaggtttgtgtaagtacattcaatgatgtttgcacaatgaaatagcctaacgacacatttcttagaacatatttccatcattaagcaatgcatgactacctagaaggaagtctgaacaactcaacaaatgcagagctagtaaaattaagaacagaacatttaaatagagccacgcaaaacatacgtatgtaaaacttgcccttgtattgcacttcagggattttacaatttcagattttacca

SEQ ID NO: 186607 - DNA, 241 bp, Homo sapiens
tgtcttcttccgtaagttaagggctggtgatatccaaatacaataattatactgattatgcagtcataaatgttgtgtcttctcccatctgtccttgctcttaatagctctatctgtattagtctacagtgatccaggccacaaacacaccatgctcattctaatttatgggcatttctttgcttccgttattttccttgttgcaatatcctccccttcttctccaaacttcaagacccct

SEQ ID NO: 186608 - DNA, 138 bp, Homo sapiens
gctgcagcccactgccacctacaggccagaggagacagagttcccttctacaatgctatggctttcttgaaggaagagggaaacatatgaactcagtagttacctgtcatctgggagtgtcttgaaaaaactgaactg

SEQ ID NO: 186609 - DNA, 229 bp, Homo sapiens
accaggttttagaagaattagaatgataaaagccttttaaaataaatattgattctcaccagcagctttccttatcaatgaactctcaggagtttcaaaatatcagtgacatatttttgaaatgtttaatggattgaatactcaaaagccaaatctgtctactttccaaagtatcaccttcttcgaacaacagaagagtcagaatagcagagtgctgaagaatttaata

SEQ ID NO: 186610 - DNA, 213 bp, Homo sapiens
taaatgattaaaacaaaaggattctttcattttgttttgtttttgctttatgttcaagtgtaaacatgcaaaggattattttagaatccatatgtagagtgctcaaagggaaaatcttatttcagggagacaaaatagaaaggaatagcaaaatgtaggagtaaggtgtgaaggggctaaatcagatcagttgtaataagaatggaaagaaaa

SEQ ID NO: 186611 - DNA, 588 bp, Homo sapiens
cttacacctcagtagtactcaacttggtagggtcagcagccatgtgtttagctggaaggtgcactttataaacaggtgaactgttttgttctatgtgactgtgatctttgctactgtagtggctaccatctaggttacaaataaagcagagttgttgaggaagcctggggagattcttcccaaaattccatctgtgtgaagctgacatcttagatacagagaaggctctaaccaggtagaagtaggtgtgtttgttctcctttaatctcctcacagtctcagcttccttgattctttttcatattttttatttgccttttctaagtaatgaatttggtctcagacaaggtgcacagacctcactgaaataatgagccaacatgagcatgaggatcgtagtacacaggccttgttatgtactccaggtcaggtttcataacttcagtaggatcagcctgaaggcaaagtgaattcttattaagacctagtcctcttttaatttagtaaatgtttcttatcctagacttcccagtactactgaggtgtaagcgcttacacctcagtagtacaaaatcaatacaaagtact

SEQ ID NO: 186612 - DNA, 518 bp, Homo sapiens
tcctgtgttgggagatatcaaaacaacagaattcttgccagtgggaacatttttcttttttagacaaggtctcattctgtcaccccagctggagtgcagtggcacagtcttaattcactacagccttgaactcctgggctcaagaaatctttctgcttcagcctcctaaatagctggtactataggtgcgtgccaccacacccagctcatgggaataatttttacactccttcagaaggagtcatttgtgattggagtccacatagaaacaggtttccctctgtacataatcgtaggtaccaaaatattactgtgtaaagtgttgtttatataggtcaatttttgtggaagatctaatttctattttcagagaacagagcacattaaaaaatctatttagtattgtgtactatataatctatgtgaattatagctccttaactaaatatattactgagttttttttttaatactgtaagttctagggtacatgtgcacaatgtgcaggtttgttacat

SEQ ID NO: 186613 - DNA, 490 bp, Homo sapiens
gaaggcagccttttttctcctgacttctccaaccccaccaactccaaagaatatccacccatgagaatctaagacacaccactcggaggtacacagcacttgggatgcaaacatgtcacccccattccacagtgcagcacctaaactcccttactggaatcaccctccagtttccccttgctcttgccccaaacaccacggcccctgctctgctccttctccagatccagtgcttccaaagccccagtcctctgcctgcactaaccctcctccttcaagtccaaaacatcatctgtcctgtcttctgactcttcagacttgtggccttagcagttgttcaccacaacccacaacaagcagaaaggaagtcagaacccacctataggcatctgtgtactatggaagaagctggggaagaagagatggagcctgcctataggtatctgtgcactaggggaggagctcgggaggaggagatgaagcctgccta

SEQ ID NO: 186614 - DNA, 274 bp, Homo sapiens
acactattttgaatgtctcatacaatatttatgggtcttttttcccttgactcacctttatttaattatcacttttgtctaaagccagatgctgcttcctccagaaagactgccagaacttccccgctctccaaagtcacactgggtgccctagttttgcagtcttaagaattatactttgttttcttataatactattctggtgtttcatcatttgttttccagattctgcttgggatttgattccgttgtcatggcctaccctggcattttt

SEQ ID NO: 186615 - DNA, 220 bp, Homo sapiens
ttcacaaattagcatttttagtttttattctccactgtgaggcaggctttggccataatcattttttctattctagacccaccctgtaagcagccgacccaggcccactccacaggcagcctggtatttcccagacattttgcccatgttcacttgggtgctgggctcctagccctgcacgatttcagtgaggttctccacttcccaccatctgtgaagg

SEQ ID NO: 186616 - DNA, 627 bp, Homo sapiens
  misc_feature (39)..(39): n is a, c, g, or t
gctctagagtatccccccttgccgtctttcttgagacanagcctggctctgtcaccaaggctggagtacaatggcgtgaacacagctcactgcagcctcaaccttctgggctcaagtgatcctcctgcctcagcctcccaagcagctggaaccacaggttcataccatcatgcctggctaatttttttgtagagacagagtcttgccatgttacctaggctggtcttgaactcctaggctcatgcaatcttactgcctcggcctcccaaagtgctgaagttataaaatggataagccattagactcgatgtagggtgtgagagaagaaaggaggcaagggtaacacttacttccctgagcacattaaaagactgaattgccgccgggcgtggtggctcacgcctgtaatcccagcactttaggaggctgaggcgggcagatcacgaggtcaggagatcgagaccagcctggccaagatggtgaaaccctgtctctagccgggcatggtggcgcgcgcctttagtcctggctactcggaaggctgaggcaggagaatcacttgaaccagggaggtggaggttgcagtgggctaagatcacgtcactgcactccagcctgggtgacaga

SEQ ID NO: 186617 - DNA, 105 bp, Homo sapiens
ggcctgctagagccaggagctagtgggagaaggaaacagtgttgcttatgaattataaacagacactcccgcaactttctctgacgtgatacaatctcaaagtgg

SEQ ID NO: 186618 - DNA, 353 bp, Homo sapiens
tctggacttctgccctacacattatgttcttattttattgtgcccttgctatataagtgtaaaacccaccatttcactggaaaaagataaatacttcatttttcactctaagaagtagcatatctaaatggtccatccaggaataatggagagtctcaaaaacaaacatcagaacttaacttcttagcacaccacacaaacaagaaaggcttcatttctagacagtctcctcatatgtctaattggccatgacaatatggtactggtatctcccttctttcctttaatgctatattttaaaaagtctgcattcattcaatatttagagtgtccctgttaaatgttgaataatg

SEQ ID NO: 186619 - DNA, 265 bp, Homo sapiens
acacggctcacacacatacacgccacacacacatacacgccacacacacatacacgccacacacacagagatagatagggcatggaacagaagacaaaatgcagccaatatactacaaaccactagatggagcgcagatgtacagtggagggtgggcacagtgggaaaagactacacagaaggtaaaacattggggatctacatagtaattccaaataaaatattagatcagttacataataaaatttcctgtgagcagcgttgg

SEQ ID NO: 186620 - DNA, 288 bp, Homo sapiens
cagccacaaaccaaaaatcctttgatttttattaacacactgaagtacttaccattgtccccattttacaggacagaaaaccaaggcttagagagttgttatttgcccactcagtcaccctttcagcttacagatgaagctgttagtgacagggtcagccctagaagctaatttgtaagcaggctatgaggtactcaaatatccacatactaaatgcagaatattcaaagctaaattccaggtttgttcacctctcacgttaccaaaatgtactcgtttcctctaaag

SEQ ID NO: 186621 - DNA, 352 bp, Homo sapiens
ttgccacctctcctcacccctcccaacaggcgacagagagaactaaagatggtagggagtcacaaggcagcagcccaaccctctccactccaagaccgcctccagcagtgtgctgttccaacacctgtcactggctggaccaacagcagagctgcactgggggacatttttagcacctggggctcccttcttttgagaactagcacaccaaagaaggcagcagctagggcaaggcctatgtgcccatgccctggggcttacaacacctcttacccccttgccccatacttctggcgctgaagttttatcaagaaatagccagataaaagatttgtgccaggccgggtgtggt

SEQ ID NO: 186622 - DNA, 774 bp, Homo sapiens
aaaaggcaaagaatacacccatattacatataattagtgtcccggaagaagaagattaaagcattgagacagaagtagtgttaaaaactataatcctgctgggcatggtgactcatgcctgttataccagcactttgggaggcagaggtgggtagatctcttgagcccaggaattcgagaccaatctgggcaacatagcgaaaccccatctctacaaatagtacaaaaattagctgggcttggtggcgtgcacctctggtcccagatactcaggggactgaggcaagaggcttgcttgagtccaggaggtcaaggctgcagtgaaccatgatagtccactgcactccagcctgggtgacagagagcaagactttgtctcaaaaaaaaaacaacaaaacagctataatccaagaagacttcactgaaataaaagtctcgaatctgtatattgaaagagctttccagctctttcaatctggaaaattgacctagaataatcaagacatatcttagtacaactattagactttaaagacaaggaaaaatcctcagttcctgaatcaaaaagatgaaataacttacaagggcaacagaaatagtctggcatcagacttctcaaaatcatcatgcaaagcaggataacactaacatcattttcaagaaactcaatgaaaggaggtgtgaaacaaagatttcatgccaagccaagatgtcaaatatgcaagctagagaaaaaaggtttggagtataagaacttggaatactatacacaca

SEQ ID NO: 186623 - DNA, 177 bp, Homo sapiens
gttattaacttcctaactattctcaaagatgaattttcttactactgttaactttgacagtggaagttagtggatgtagaattcaaagtacaaaataattgtcaagaattattttgaaggcctcgttccacagttctgtagcatctcttattacccttgagaagtcttatgctatcc

SEQ ID NO: 186624 - DNA, 516 bp, Homo sapiens
tcttcccctgacaaacactacccatgccatgtgaccaagttcaacatcggtagtgctaagtcacattgatatcgtggatctttgctatgatgtgataagaatggccctttccatctggggtcttcttcccaaaaacacatgaccacagtcaaatcatgaggggggaaaaacagaaggtgaaggttgaaaaattaccttttagatacaatgttcaatatttgcgtgatgagtacactagaagctcaatccccaccattatgcaatatacccatgtaacagacatgcacatgtaccttcaaatctaaaactttaaaaataaaaaatggtatccactagaattatgaaatgcaggactctgacacaccactggaaatctattgcttaatagtattagctacatagacaacatttgtctttcttactaaaaaaaactgtttcccagaccaaattctgcccaaggatgattcctcaaagagctgttctcatggccgatgatcagaggaaggaggaggtgct

SEQ ID NO: 186625 - DNA, 388 bp, Homo sapiens
atggctgtgcctatccgaggagtataaagacaggaaaacagtcctctggcttatctgccacacctgtaggagcaatagtgacacctacttccaaaactaccatacaaacgaagcttctcaaagtgtccaaaagcacatacatttaaacaagaccaagttcttttaagcattaagaagtggtttatcaacacctgtgaaaagaaggggaaaaaatgggaaaaaaaaaagtggactaaaatgccatgattgaggtttgggagacaactgtccctaagaccaaaataaagaaacaagtgggaacagcatgtcaaaatctacttccctaataaagaattactgctttaaaaactcaggcaacaaaaatacaaaaaacaaaaacaaatagaag

SEQ ID NO: 186626 - DNA, 204 bp, Homo sapiens
gctcagcagactgtggagtttctgttcttggttatggtcgggggggggcggtctcagaaatcttattcaaaattttgctttcctcccccactggttgtccttttcatagacatctcacccatgatagcagggaaatgaaacaagctgcatagaccacagagctcagagcctggcctttaggaagccctcagtaagggttcaggc

SEQ ID NO: 186627 - DNA, 153 bp, Homo sapiens
aagcttgaaagaagacagaattccatctggccttggtaccacgtttctcctaacatgaggggctagtgaccagacacgatagggcagtgattgctttgtcactgccttccctccccatgccctgccatttttatttttgatcttctcagaatc

SEQ ID NO: 186628 - DNA, 345 bp, Homo sapiens
attctttcttgttgaaatgatattctttctcccttttgggtgaggcccaatagcctggacacacaataaaggccttatacttccatgggttcaaccacctttgtaggctgtgctaagagattttaagtgagggttgtctgcattagacagcttccctctggccaatgagagtagggggtgtagaggccgagaggtttctttggagttttcttctctctcttttcttctaagagttctttagatgcaaagtcagggcctctcttctttcttctgggccaggtaaagtgctgctgattaaagcctgccttggattgaatgagcttccttctcatggcttctctgttg

SEQ ID NO: 186629 - DNA, 467 bp, Homo sapiens
cttcaaaggaacatggatacaaatatgtaacacccaatcaaatgttactaactcaatcaccatgatcctgtgtgacagcaaatagtgaccaaatctaaagaattcccaaagttgtatttaaatatatttttctgaaggtttttaagcaagttacaaaacagccttacttcagttttactatttcccagtaaataaaaatgaaaataaataaatgggtaatagtaattaagcagaaaatgagaaacaaagtgataatcacaaaatgtaaaattggcaccaaaaatccaattaactaaagaccttaaaaatataaagtttcctacagattaattttttcactaaatgtataccaacattcactatcaatatttatatattttctttttttttttctttttttttttttttttgagacggagtctcactcttgtttcccaggctggagtgtaatggcaggatctcggctc

SEQ ID NO: 186630 - DNA, 169 bp, Homo sapiens
ggggtgttgactcttgtcctgctttctgctgacctttgacgggaatcccagagtgcctgggcccacggaagccgtttttgatggttgggtgcacttcatgcccttaggttcctcgcctttcttctagagccgtgacttttattataatcatcgtatgcaccagatttga

SEQ ID NO: 186631 - DNA, 157 bp, Homo sapiens
aaactttaaaattgactttcagatttctttagccctaactgaaaattagtgtgtttcaccacaactaaggtaaggcctttaacagtttgtcagacaataaaaccagaagattctgactatttctagtaaggtcagtagtctacttagtggtaatcta

SEQ ID NO: 186632 - DNA, 375 bp, Homo sapiens
caagagaaataacagtactaaggaattctactaatatacatcaggaacagttatgtccactgcatcctaaattctatatcaaaacaaaaagatgtcatcctaaaggaacagcattaatatctgtttgcaaaatggagagaccctgtatggattgttacgggcaatacaggttccctcctccttccctcctcccccacaccttctgttacaaatctactttgatctagatatttgtaaaataatcctacaatttcgctcctaacttagaatgtgtggaactggtcaatggtatcaatgaaggagaagtgtctacacttatttctcatgcactaaaatattgtgtgtgtgaaaatgtgcaggtactactatgttgag

SEQ ID NO: 186633 - DNA, 480 bp, Homo sapiens
attatagtaagctcaaatcttgaaggttcataatatacagataaaatgtgtccgtgagactgagaaaggatcctgaaagacagactttcaatgatttcctgcattttatttctgttgtactttatctttacctttattaaacactaataaggttcttcttatagggcctcacaggcctttttagttttccaacctattcatacttggtgcaaacctagtaattttttgcatgatagtattgggattttactctgaggctaggtttcaaaactgtaagaacagctttctggaattgtatcattttcagtctttccatgtgttccattgtcccagccacacacacaccagataacaaaacgaaaagcaacctcaaaaggtaacacacctatagtagatgtttttacctcttgtaaaatctaaggaaaatatactaaaaatgaaggcatcagtaaaatagtatcactttaggttgacctcgag

SEQ ID NO: 186634 - DNA, 403 bp, Homo sapiens
ggtcaccgttctccccgttgatatatattccatttttttttcacgaaacacataatcttgattttcatagctgtagagtaattctggaaataggtagtgaattcattcaccattattcttttataatattgctattttattattctcgatcattacattaccttataaatggtagaatcagcttgtaaatttctaccaatatgccggttggaatttttattagaattgcattggatctggagatcaatttacgaagaactgactttttaaacataacaactcttctgatccatgacaaggtttatctccccactaatttagttctttcataatttctcaaagcaattttttgtagtttttggtgtactggcctactggccttacataaattttgttgactttc

SEQ ID NO: 186635 - DNA, 307 bp, Homo sapiens
ctctgctgatatttattaagctttaaaataatcgtactataatcttgaaacactgatttgtaaaaactaagaatgagtaggaatacaagagatctggaggaacaaatcagattgttattagggtttgactttttttttacatgggcttatggaagcaaggcattctagggtctagagggatgtgtgtgtgtgcttgtgtgtccatgtgtgcgcatgcgcacgtgtgtatctgtttgagacatactttctctgttcacttaaaagagctcatgttttcatttgtttattcttttctttcagggtattt

SEQ ID NO: 186636 - DNA, 432 bp, Homo sapiens
ccagtgtcactggcagagagtgagtggagaagggtggagttgagggccaggttgcagagcactcacggcactgggaggaccctgctttgggcaagttgggggggctgtctttaggaagcaaagggccagggccagctgacattcggtgggctctgcctggctgccacatcatcggtttgctgtggggagttgtgcctgtacatatacttgcaaaccaaatgtgttgatttttttatcgtgatttcagggccttcactttctcatgcctgagcatcagtcagtttgtctccgctctgatctcctgtccaccccacccaccgtgcttttacctgggtcctgtacaggcctgtgggctggcccttaagaggttttcaatgaatgcttgtcacctaaatcaatgaattgtttggatccattctccatctcccagct

SEQ ID NO: 186637 - DNA, 726 bp, Homo sapiens
gtgtctttgtatatgaaattaagttcaggttcccaagaaaagatcatcctggatttagggtgggacctaaatctagtgactggtgtcttaataaaagagaaggagatatgacataaacagagaagagacacaggcaagaatgccatgtgaagatgaaggcaaagatttcagtgatgtatctccaagccaatggagcaacaactaccaacagctaccagaagttaggaaagaatcatggaatgaactttcccccagagcctccagaagaaactaatcctgccaacacctggatttcaaacttctggcctccagaactgtgacagaatacatgtttgctgttttaagccatcaaatcttggcaatgtgttacacaaggtctaagaaactaatacaggcctttacttcacactatatacaaaaataagctcaaaatggaagaaagatctaaatgttagtggtgaaattacaaaattcttggaggaaaacctaggtgataaatctttatgaactggccgggtgcggtggctcatgcctgtaatcccagcactttgggaggccgaggcaggtggatcacaaggtcaggagtttgagaccagcctgaccaacatggtgaaactccgtctctactaaaaatataaaaattagccgggtgtggtggtgcacacctataatcccagctactcagaaggctgaggcaggagaatggcttgaacccaggaggcagag

SEQ ID NO: 186638 - DNA, 483 bp, Homo sapiens
tgtattatatgttgcattttatgtacatgtgggtaatatacgtacacatattagtgagtactcatatatgtaaaacacccctacctgacccaataaaagcatacaataaaatgttagctactgttgttgctgttgtcgggcttgttaatatcatccaaatgcctttctctgagctttatgcttccttacacatggaaataatttcttcccttatcttatttatgaatcttggcacaacagaatacactttctctctgaaaactaaactgtggtttacagctaccaaaaaaaaatgtaatacagttcataaactctatgtaaacagtttatagactgaacagaggaggtaagattgaacagaggaggtaaaaaggttaaaatctaggtatattaagacaaagaaactgcttatatgataactttggaaaaagaaacatccactctctaagtatggtggtagagcctgcaacaccaaatccagcc

SEQ ID NO: 186639 - DNA, 251 bp, Homo sapiens
ctgaagtccttccaaagacctttatgggatgggcctggacacctctccaaccttacctcctgccatcctcctcctgttattccactccagccatgctcgcctccttgcagcttctggaccacaccaggcactctctacctcaggaattttgtcctactgttgtctttatatcgatacctgcatggtgcaggcatctgctgaaatgcctactcagcagagatttttctgaccatcttatctgaaataatagc

SEQ ID NO: 186640 - DNA, 219 bp, Homo sapiens
gggcctgcgctttgtggaggcccccagggcacagcatccttgagcacccaaaatccctcatgcttgctgaagaggcccagtttgcagcaacagaggtcaaaacaaaaaaaattctggtgagctttggctcaacaagaactggacgtgaggttgacgtgtgtctggtctctctggccctgaggctggggttggtgtgcctttggcctctctgctccttgg

SEQ ID NO: 186641 - DNA, 130 bp, Homo sapiens
cttgacattctttgtagcctctcccgctctggttcagggcccagctagggatccagatctgggtgatttaggctccctctgtctggatcagtcctccttttcccttggaccccagggaggccgggaatgg

SEQ ID NO: 186642 - DNA, 529 bp, Homo sapiens
caggcagtgcgtctataatggcaaataataaaggaaataaagccgatgcccaaaaatgggagattagttaaatgaagtatatgatacatcttttttgttgggttgtttgttttgagacagggtctggctctgttgcccaggctggagtacagtggtatgttctcagctcactgcaacctctgcatcccaggttcaagcagttctcctgccccagcccacaagtagctgggattacaggtgcccgccactatgcccggctaattttttgtatttttagtagagacggggtttcaccatgttggccagactggtcttgaactcctgacctcaagtgatctgcctgtctcagcctcccaaagtgctgggattacaggcgtgagccaccgcgcccagctagtagtaccaatttatattctccctatccgtttactatgagaatgcctatgtttgtaaagcctcggtattattatttttgtctgtttaatggttatggaaacaccatcttattttacatttgcatttctttgat

SEQ ID NO: 186643 - DNA, 917 bp, Homo sapiens
cattaagctgattttccccctggcagctgacaaataagttcattgttcttgtagaagtgagctcacaaggttaaatgtgaatgttctcaaaggtacacagccttgtttcagaagaattttaatgcccgctgtaaaatcaatcatgcagagccaatttgaggtatgactccagggtatgcaaggtatgacttctctggaagccaagtcttttcacagggcactgtggtaatacccatagcactaatcctcagtgtgctggttgaagaaataaaatgtttttaaagaaggataaaggaggaattaattagaaaatttttttccacatattagcaaataaatgaaatgtcattttcatattaagtaagtatagttatgatcttcgtttctacctactctccttttgaaatattctttattactaaataatattttaggaggagttaacagaaataattacctgtaacatctgcagataaacttacatagctaacattgtgtgctgacttttttaaatggtgaagtggcattaatgagatgttcagtttacagaatttgaagtttgagttctattttaatagtctgccgtgtcccccaaatcccatttagataaattgaggttgatttttcacatagacttgcaatttttagacaccacattttttttatagtaacagcctcatttgcctgtacaataactaataatacagtatttcataggtacattgtatgtgcacaggaaatttttctttaaatcttaagagcctttaataaacgggatattttaatattttaatgttactacatttaaaaaatagtgttttcctacaaaattttctgtattcagtatacgttaactatgaaaatgtcaaacaatgaaatcattgaaatatatttaaggaaaaattaccaaccaaaag

SEQ ID NO: 186644 - DNA, 196 bp, Homo sapiens
ttagaggatccctgaacacccgcttaccatgtaggtacaagtaagactaaatgtgggagttggtggctgaaggaggtagaagacaagatcattggtgaagaggaggtcagtgacttgatgattcaagtataggaaaggttatctgtatgggtattgaaatcattaagaatgatgacaggaaaagtattggagagtg

SEQ ID NO: 186645 - DNA, 425 bp, Homo sapiens
ctgaaagctacaaattcaaaaactcaattcatcctgaatattttaagtttggcttacagttcttgtttttctatttataagacctgcaaatcttaagagtcacctttttagagcttttggataccataaatttagttctttaaataacttcaaacatttaaaattgcaataagaagtggaatacactcaaatttctcctgcggcatttcagctgtctaatgagaaaaccctccttagcactaattaatctttaaaaatctaataatttaacttaaatcttaagaaatctaataatttaacttagaaatgcaatgagctcaaagtctcttaaatatgccaataccgtgtataaacgcactaagatttccatgtaatattacaagatgattttgattagttagttccacattttatattggatttgt

SEQ ID NO: 186646 - DNA, 336 bp, Homo sapiens
tctggagaggtgaggtgggaggagggagccccttcccgcgcagagctcagcccgtcctatgagcatagccggtcctcttcagatccggggactcagggtccagcacatcttgccccacagcctgggacagggtcagggctgaagttgctgcacccggggacctagggcctcatttaactcaccccattcccaaagggagaagccttgttccagtgcccccagccctgggagcctggtgttctgtgagctcaggagggccagcgttctgactgggaggcaggactggactcttaggctgagcaggactaagttctgtggccaaggagcccgggcgtt

SEQ ID NO: 186647 - DNA, 333 bp, Homo sapiens
ttttccactgacaagtgtggggatggtttggagacgaaacggttccatctcagatcatcagtattagattctcataagcggggcataacctagatccttcgcatgcgcagttcacgacaggattccactcctatgagaatctaatgccaccactgatctgacaggaggcggggctcacacagcaatgatatgacagggggcggagctcacacagcaatgatatgacagggggcggagctcacacagtaatgatctgacagggggcggagctcacacagtaatgatatgacgggggcggagctcacacagtaatgctctggcagggggcagagc

SEQ ID NO: 186648 - DNA, 593 bp, Homo sapiens
gtgtactgacagtgtcctggagagaaagcaaagaaacccactgtgtgttttcctcacttgctgtcaggtttgttttctttccacattgatgttgattatggtcaaataggaaagtgctgttgccacatttgctttccagtgttttaacacttgctaacttagatggttctgagttctctagctttgttagcgaaagattggttcatcattgggttcagattctttggtaaacaaattccttagaaaatatcctcctggcagtattttccacaaggttaaatcgtcttaagcacactgagaactgtgttagcagtgggcctcagtttccttaggatgtctctttgtctacctggccccccatcccagtccgtcttccgcacagctgccagaatctcctcctttgctttaacatcctctaagcaaaatgctgcagcactcagggcaagcttcttccctttgtcattagacccttcctgttctctagccttccctgttccctccagtccctctcacattccctgccatattgaattagttgctttccctgctattttgtgcttatgtgactttttatacatggggcttcctctgcc

SEQ ID NO: 186649 - DNA, 564 bp, Homo sapiens
actgattgcataggttgtcctgaggtataaattatgtattagtatctaaagcacttgtaatagtgcctggtacatagtgagcactcaataaatatttgcttttttcactatagttatttgtttattgtctctagcctttcaccaaatacatgctctataaggatagagccttagtctggttcattactgagtgaccagcaactaaaatagtgtcaaacataggctgggtgccatggctcatgcctgtaatcgcagcactttgggaggccgaggcaggcggatcacgaggtcaggagttcaagaccagcctgatcaacatggtgaaaccccgtctctcctaaaaatacaaaaattagctgggtgtggtggcacacacctgtaatcccagccactcgggaggctgaggcagtaggatcacttgaacctgggaggcagagtttgcagtgagacgagattgcaccactgcattccagcctgggtgatagagcaagactccgtcttaaataataataataataataataataataataataataataatgtcgaacaccttatatatat

SEQ ID NO: 186650 - DNA, 297 bp, Homo sapiens
ggccgtggtcgtgcttctctcccattgccacagctgggcagcacatcacaccccgcagagcaacacctaagatcctggcatggtccccagggactggggttcggcctaccccacctcatcctatattctggcctcacaagcaccttaattcttcccacaatactatacaggaggcacctctctctatgctgctccctctgtgcagagtgtgcttcctcccccttccggtctatcaaatgttgctcatcctttaagtcccagctctgttcctttttcgggaagccttcccagagttcc

SEQ ID NO: 186651 - DNA, 394 bp, Homo sapiens
ctggaaagtctggtagagctcctcgggctcctttcttttctacccgcaaaacaatcttctgggcacaatcttaggagctgaatgctttgccgctgaataacatacgctctcaataggcttcgactgcagtctctgtcactttgctctctgcctggctcctggccaatgcaaaacatacagaagggggctttctcccccactgcccccttgtttagacggatctataccttcacttatccttggggcatgtggcccaagttcaaagctgaacaccaacaccacctgctcctcctcttccttcagggagagtgattgaactgcacgcctaatgcaaactaaagggggagttttcagggctcgtgagaaatccttggctatttgcatgcagttagaa

SEQ ID NO: 186652 - DNA, 438 bp, Homo sapiens
tccaagaggaaactccaaaacggctgctcagcaaaacggcagtggaggccaaatgagaaaggttgaaagggctcctttcttttctacccgcaaaacaatcttctgggcacaatcttaggagctgaatgctttgccgctgaataacatacgctctcaataggcttcgactgcagtctctgtcactttgctctctgcctggctcctggccaatgcaaaacatacagaagggggctttctcccccactgcccccttgtttagacggatctataccttcacttatccttggggcatgtggcccaagttcaaagctgaacaccaacaccacctgctcctcctcttccttcagggagagtgattgaactgcacgcctaatgcaaactaaagggggagttttcagggctcgtgagaaatccttggctatttgcatgcagttagaa

SEQ ID NO: 186653 - DNA, 589 bp, Homo sapiens
tgagacagagatctcggccctcacagagctgacatcctaaccagagagttggacaaaaatcacgataaatgagttggttaaatagcgatttgtgagtagaaaacgcagggacggtgagagagcagtttcaattttcagggggatctcactgagagggcaacatttgatctgaaggaggtggggaaggagccaagtgggcagacatctgggggaagagcattccaggcagaggaacagccagtgcaaaggccctgagacagaaatgtgcctggccggctgggtacagtaactcacatctgtagtcccagcactttgggaggccgaggcgggcagatcacttgagcccaggagtttgagaccagcctgggcaacacagcgaaaccctttctctaccaaaaatatgaaatttagctgggcatggtggtgtgtgcctgtagtcccagctgctcaggaggctgaggcgggaggatggcttgagcccaggaggttgaggctgcagtgagccatgattgcgccactgcaccccagcctgggcaacagagcaagaccctgtctcaaaaaatatatataaataaaaaagttttaaaaa

SEQ ID NO: 186654 - DNA, 288 bp, Homo sapiens
ataagggaatcaaataactgctacttcaatgtgtttcctgctcagccacacctggagtggctgtacagcagcgaccaagtgcaccaggcatcagtatgcctgggctcaactcctagttctggctcccaccatgtgtccctggggcaaggcgagctaatgtgtgtttcagtctcttcatctgtaacatggaaatgccatgtgtctgcttaatagggctgctggaaactttacatgagataaggcataaattactaattacagcgcctggcatatagtgagtgctcaata

SEQ ID NO: 186655 - DNA, 412 bp, Homo sapiens
ggacaaaagggacaacttaagactaacatacaaaatccacaaggtatcaactgcggtgagggaaagggagagttctcagcaagtctacgtagcaggcttctgtcagttcagccaactctgtgtgtgatgaactatttcagttatttccaaactgtaactgtattctttaatttttaaaataggtaatacagtcatatgtttcaatattcaaaacgtacaaaacaaggatagacccaaacatctcccaccttccttttccagccattgaattcctctccctggaagtttgatcttagcagtttcttagacctcctttcagaaatacattaggtttagataaagcacatgcatatacagtttccccatatgctcttttatttttaaacacagatggcaatacatactacatacc

SEQ ID NO: 186656 - DNA, 675 bp, Homo sapiens
agcagccaatgtttactgagcacctactatgggctggtgctgtccttggtgctggagtcacagtggcaaaaaccggagctcactgtctgatggggaaggcagatagatacggatcaatcacgctggagtgcatgtgggggaacgtgtgctccgaggcagggaactgctatgggaatgcagagaacagaaggcactgagctgagctcacactgggaggaggtgattcctgaggtcttcctggaggcagcaatgtttcagctgaaattggcagaatgaaaccaacctggcgacatctcagaaacctattctggagcagaaaaggcattttgcaggagtatacccacagcttgacgctgtttgtttaaggttacattcctgccaaacagtgctaatgagagtgcgagcaaacaggtcctttcatacacggctggggcaagtagaacctggaacattcttaccgagccagcaattccaggaatttattcttcagaggcatctactcggaactgcacaaaataatgtctgcaccaggttaatcattgcagtactgcacatcactgcaaacagctgaaaccaatctaaacacccatctgtaggagagctgagtaataaatcatgactgatccacccagtggaatactaggtgtccatagaaaagaacaaagaagctcaccg

SEQ ID NO: 186657 - DNA, 496 bp, Homo sapiens
ctccaagtacgaagttgaatagttgtggtgaaagtagatatccctgtcgtcttcttgatctcagagataacatgacttagcctttcaccatatgtataatgctagctgtaggatttttgcagatgccctttatcagcttgagaaaattcccttcctctatttctagtttgctgagattattttttttatcaggaatagatgctggtttttttccccttttcatcaattgacatgtactttttcaatatagtgaattatactgattaactttgtaatgttatactagctctgcattctaggaataaatcccacttggtctactattcaatttgctaaaatagagaaattctgcatctatgttcgtgagacatattagtctgtaggttttattttattgtaatacctttgtctgatttggcgatgattataattctgacctcacagaatgagttaagaatgatttctcttaaattttctggaaaggtttacatagaaa

SEQ ID NO: 186658 - DNA, 458 bp, Homo sapiens
tggcttcctgctgagcaatatctgcttctctttctgactcaggctgatgcatctgtatacttagcttcacttctccagtaaataagggagagctttattataaaagacaacttctattgattttcaagggggtgggtggttgtcaagctcactcctttctatgctctgagggaaaattattgtaagcgatctgtaaaacaatagatgaaaaaagaggagataaaaattaaataaaatttaaataaaaactaggatcctaagtgggaaaatagctttaaattagaaattgataccaaaaaataatgatatgtaatctaagatgaaaatattttgaagactatcagcatatctcccttaaatgttatttagttctgaaaaatatgtattgaagaactgttatattttactttatgtcttatattaaatgtgctaaaattaaaaagaaacaagtagataaa

SEQ ID NO: 186659 - DNA, 304 bp, Homo sapiens
ctaggtgttcccccaggcctctgagatgggactgagggaggggagccgatcacctgatacctactactataggaaggcattttagacaaaaacagaggactatgccagcaaagacagagtggggtccttgtagtatcagcatcagaaaacagcacaggtctgagaattatttaaactctgccttagatattcctgagttcatatccatgaaattgtggctttatttacctttcctttcattttcatgcttttaaaaattatagtaacttctctgtcttaacaaataagcttcatttaactatag

SEQ ID NO: 186660 - DNA, 402 bp, Homo sapiens
ccgttccacaggaatggatgagagggtccctctctggttctgccacagctgccttgagcagcagcagttccccagccccaagctgtcaccgcaaacagcagcatcaacctgtgatgacagactttagagtctgccatcccagaagtgataaaaaatgacccactggctgcatagcccaagtcagaggatgtgccaccctccttccctggtgcctcctgccccattcaccaacccccgcctcacacggccatgtggtccacagtaaccaacaagcaggccaaataaatgaaaccagccgtgagacctgtgggagctcactccaccttgaggacatttatacattcttctgggccaggcacagtggctcatacctataatcctagcactttgggaggctgaggc

SEQ ID NO: 186661 - DNA, 333 bp, Homo sapiens
actccctcttttgaagttattgagtcacgggaaggaccctgtggtgtatgttgtaaatttcctctgccgagcttggtgcgacctagtatttgcctgaatggagcaggcaagagtggtggggtgaggagattccatcgtggctgctcatgcattagtcattgcttcaccttagggagagacccagaaccctaatgtttagtgttgggatctcttgttaactatattcctctttttttttttttttttttggtaagacagtcttgctctgtcgccaggctggagtgcagtggcatgatctcgtctcactgcaccctccgccctcccgagttcaag

SEQ ID NO: 186662 - DNA, 634 bp, Homo sapiens
ttcccgtgctgggccctcctgggcgggttctctcttgctgccgccagtaccctgcccctctcgtcctcctgggtagcctgggaggaatggcagaagaaagcagtgaagccaggtagcagtagcccggccaccccaccaggctctgctgtaggctgggctctcaaggcagctgctccaggaggggccccctaggaagggactgccacactcctgggagcgttcctggccccctccagtgcaaatgaccctgggccccaaggctccgaacacccgcccctctgctccaggttaaaatctggattgaaaaagcaagtggggtttgttggcctctcaaaaagtggagcataggccgggtgcggtggctcacgcctgtaacgccagcactttgggaggtcaaggtgggcggatcacctgaggtcagaagtttgagaccagcctggccaacatggtgaaaccccatctccactaaaaagacaaaagttagccaggcgtggtggtgaacacctgtaatcccagctacttgggaggctgaggcaggagaatcgcttgaacccgggaggtggaggttgcagggagccaagatcgcaccactgcactccagcctgggtgagagagcaagactctgtctcaagaa

SEQ ID NO: 186663 - DNA, 370 bp, Homo sapiens
tcctccttccacagattgttctagaactgccaagactgtgggcaccctgctcctttctcctcatcttgccagccctgtagggaggggcaggataggttgcagtccatccttcagccccttgggggatgtctttctcaaatgtacaacagagacggggcagtcacagctaatgtgccacgcactcgcttggtgcccagctctctgctgaaggcattccgtgtttgtcctctgcctccaggtctcatgtcctggatgaggatgatactgggggtctgtggtgcctgcgtgtgctggggtgtggaggttgtagtgtgtgtgtgttgctggagtgagctgtttgtgtgtttatgtgtgtgtcttgcccgagcgt

SEQ ID NO: 186664 - DNA, 503 bp, Homo sapiens
accaacgagggtgggtgctgaaaggcagaggttgtgttctctctattcccagggtgcctgcggagccgcagaacctggcatctggtttctggaattcagccatgcccttggtttcctgcctcccatgtcagccctccagtgccacaaagaccatctcactttgagcctccatagacttccttctttccatccatccactcgtgtttgctgagcaccccttttatgccaggggttgttctggcactaggggtacagtagtgaacagacacggaaggacagagatgccgtttgtggaggtgaggcaagctgcaggaagagctctgttctggcgagttaaatttgagatgctgatttgatatccagtaaagacatcaagtaggcaggtctgaactacagacataccatgggagttgttgccatttagagggtctttaaagccaccagactggctgaaatcatctagggaatgaatggagaagaggccgaaggactgggccctgaga

SEQ ID NO: 186665 - DNA, 404 bp, Homo sapiens
aaaaaaaaaaaccctcatctgatttgcacttctatctctgacttaaggttgatccaaatagggcatcaaaaaacatggaagacataccctcagcctttgcacttacaggagaatttattacagattgtttcattaaggtattggaacttatacctctgtaaagaaaaaaaaaaaaaaagcaaacatttactgaccatatccaaatatggcatgtccaatataaaagtgaaaagcaatggctctggggctttcctgcaaagaggtactttatatacattttcttcgtttcaccaacatatgttctcactctctcccttttaaacttaggacttctaagtatattgtataaataaatatcgaatttcctttccagggacattgaaaatgccaccagtcccactacc

SEQ ID NO: 186666 - DNA, 651 bp, Homo sapiens
tctgaatctgaccactctaaggacctcatataagtggaatcatatatagtgtttgcccttcagtgactggtttattcacttagcacagttttcagggttcatccatgttgtagcatgtgtcagagtttccatcccttttaaggctgaatatttaacattctgttgtgttcatatactatattttgttaatccattcctctgacaatggacacttggattgcttccatctttttgctgttgtgaagattgctgctgtgaacatgggtgtgcaattatctctttgagactcaatgtaagacttttctgatgaagatccatcccgtggagtgaagctagagaggctgtcagggatgggcttttctatctccatgtggagaagttgtcgatgtaaggatcagttggagaagagcaaggcaaaccaagagacacacatgaaggaaatggcattcatccagacagaagcgccaactcaccagagagctgggaagacagtgaggtggaggaaaagagttttgtgtgtcttgtcttcctactcacatactcaatgtgttcacagattggagcataacttaaacagttatcagaaaagtaaagagtgagaagccatgtagaaataatgagagtgagaaacctctcagagcattcacttta

SEQ ID NO: 186667 - DNA, 341 bp, Homo sapiens
cactactaaaagtatagctacatttttctaatctgaccacttacttatattttgcataacggtctatttgaattcacataccatagtttaaaaaattaatgattaaatacagaaaataaacttattaactaatgcaatccattgtattttcaaagtctatttctggaagcttctcccaaaacattttgaagtgtaacaggcaatgtttaatcatcccccattctccccttcttcagtagacccaaattttcagccaaatagtcacctatcaaagaccacatatcccagactcctttgtatctaaacatggccacatgactaagttatgaccaatagggtat

SEQ ID NO: 186668 - DNA, 323 bp, Homo sapiens
ggctgcttgtcagggaaaaaccaaacttctctactgatttgggatttttttttaccataaattcagggtgcagttgttcttgaagtggttccattttgtgattaggctgagtatttttaagcacaactctctcccttgtccttagaattatctccagtatcctcaaaacaaagagcaaatgatgcaattaggatgcaatcccttgcctgtggatttcaaggaaaattattttccacactacttggaagctcatggacaaagtcaagctttctttagatctggtgaacttagaaaaaataacttgatgaagtgagattcttacc

SEQ ID NO: 186669 - DNA, 175 bp, Homo sapiens
gtactgacgagtgttactgaatttttctgtaggtaatatcacaatggagacggggtggacagaagtgttccttgtgtccatggcttgccttagttgtggcagcaatctagaattgctaaatagaaacactgaatcaaagaacctagacctggctgggcgctgtggcttatgcctg

SEQ ID NO: 186670 - DNA, 403 bp, Homo sapiens
caacatttattgagtttatttatttatagactttctacatgttattgacgtagaagtagaaagtatgggaaatcaagggccagattttatctgacccgtgttttatcagacctagaagctagcaataaaagtccaaagagtaacagtttacaacttcccacagtttaaagtaacttcttcagtgaatcgtctgtcttctgcgcttgtcacagttttaatgtcttaggtgatgagtagtagtagcagccagtcctaacagcagggcattttaggacattcaacacactgtatggaggaggttctaaataaatgactactgaactgagctttagaatttataaataaatgtcattattattgctttcaagtacacaacgtaaccaggattaggctaagaaaatac

SEQ ID NO: 186671 - DNA, 328 bp, Homo sapiens
tcaatccccaagcacatctagtttttaaagtgaagtacagcaaatataaataactggaaaatttccccccttttattaatctttcaaagaccagagcatgtcaatgctttagaatcattacaattccattaaaaagccgtaagacaaaaatgaaagtttcacattactgattttccacatccacacaatgaaaagtatcaatgcacatggttaggtttcaagaatactacagagcagtatagggtagctcttcgcagtattctaatttctctgcttctaaatctaagggcatattatttcccttcatccaaaagaacaagagggcact

SEQ ID NO: 186672 - DNA, 536 bp, Homo sapiens
cctacatatgtaaacaatttttaaataattttgaaaaaaaaatgtccatgggacatcagcataatttatttttgtgctgctgacattttggtcatgtagtaatcaagctgttaataactagtcacatttattgcatcattctcttagtaaaaagctatttttaaagcaaattaatacctcctttggagttatagtttctaaagaaggatcaaggatgaacatttaaaatggaaaacagcagggtgaaataaaccatgaacagaacgttcaaattagttgtgatctcaacatggattctttgattatggagagagaaaaaagcattttttaaaaggacaagctgtctttaaacatgtacattgggaagataccaaaagctactgaaaaaatgacactgtcaagatgaaagtgatttaaaatcctctatctgttattgcataatagactagaggtagcagtcaaatatgctcttctaaccaggcagcatccgggttcatcagcctgtgagagaaccatcctcaactccgtgcttcctc

SEQ ID NO: 186673 - DNA, 293 bp, Homo sapiens
gtcagtcaatgacatcatttcttgtgtggattttttcactagaataggtaaaatacttatctgaggtgctttcaaccagatggcttagtttctaattaaggtataaagactattattttacttgcacgcaaagtatttctttactcgctttattactttactcacacacaaagtatttcatgatttgaccttataaaataaggatttatatacttacctctaccctccccaaatttaaagataaacaaacacaaacacagaaaggttaaatattttgttccaagtttacagac

SEQ ID NO: 186674 - DNA, 359 bp, Homo sapiens
agactgacaaggtccagctctaaacaaaacttcccttcaacactgcgcccgggccttctctttctcttgtctctctcagactaagttatagtctccacagcttcagcgacagcacttaggagcgtcttgaaggctggtgccttcccttccacttcctcgtacctacacccacttccccacctatccaagtccgcgtgaagatgccactgtttcctgccaattggatttcttttttacgtccttcaggagactagtgcgttttccttacatttcaattctgatgaagtttcttattatgtgttcaatatctggtttccccattagactataaacttcttggttgcaggaattatgttgtg

SEQ ID NO: 186675 - DNA, 295 bp, Homo sapiens
cagaaagggaaagcagtcaggggagagcaggcggctttgctggaagggattctaccatgtgttctcttgtggccacacagattagaatctgtgctttcttcctgaactctccttgctttgttggaaagtatccttctttctgctgctttttgttactggcctgtccgggcccagaaccacccagtgtgcagtgctttgggtccatctgtggtcttcctcctcctcttctctccccttggctccagatgagaggtctgttgtggggagagagcctttttggagatgggctttctca

SEQ ID NO: 186676 - DNA, 649 bp, Homo sapiens
gacagagagagtgctttgaatgtgtgcacagtgaaaaaccatggaaagccatagcaaggttactgggagagtagatgctaagctccctggtactggcagtgaggagaggacacaggttcacagtgcctgtgtctagctcctcctgttggcatggctggtcacatctgggtgtacttcaaaaaaccttgtcagtctgatgaaaaactgcaatggcaaagccctagggaaagagaatacaactgccctatctccaatacctcttgtttatactcctccctttcattctatgcctttgaaaactacaaagacagcattatctagaggttctactctacaattgtccccatctcctcttgtcttgtttctatgctacattaacctaaactgctattgcagtattccaaatgctgtatctcagaatccaaattttcagcttgctgttcattaatggtctataagaacaagtgccattattgccccagtcccccatgccacaatggagttgggaatagttatcacctcagctgtacaatgcagaggatgactcctttattacaaagaaccaaacaaagatctatgaggggggccttcctttcatagaatgaaacatgttttgtagtccagtcactgacatttcaaagaactcaaa

SEQ ID NO: 186677 - DNA, 486 bp, Homo sapiens
tgagacagagtctcgctctgttgccaggctggagcgcagtggtgcgatctcggctcactgcagcctccgccttctgatttcaagcaattctcctgccgcagcctcccgagtagctgggactacagacgcgcgccatcatgccccgctaatttttatatttttagtagagatggggtttcaccatgttggccaggttggtctcgatctcttgacctcgtgatccacccgccttggcctcccaaagtgctgggattacgggcgtaagccaccacacctggcttgatcgcagtttcttaataccatttctgtgccattttcgggaatgttgtgtgtggtgtggttcttggacttggccatgtctgcaccctaagccatggctcctgaagcacctagaaccggaagctatattcagcaatttttaagttgaatttctgttaatacctttagatttaagaatattttttaaatataaaacttagtgggata

SEQ ID NO: 186678 - DNA, 665 bp, Homo sapiens
gatgaccccaagaagagagggtggccaagcaggcttagtacgacatgcattaataaaggccacattgcagggatgatgaaatgagaatattaaatccaatggaggtccattttgctcactatggtaaacacagaaattcatcctggtatctagaacagagtaaatcctcaataaacacttgttgaatgaacaaaggaacaaaccaatgaattaatgaaacatctttaccttgtgtctcatttcttatcacttatcatttcaatatgtgcaagaactcagagtacatttttcattttgtgtatgtgaaacttaccaacaaaatagtagctaaaaagttgtaaaacttacaagttttcaacaacaaagttgaaatgtaaatgaacatctgtgctccccgaaatacataataggcaagtagagaaatctagaaaggaaaggccacaggctgagggagttaacagatgcgatagtctattaacattaattttctgaagtgtatatttcagaaatttgctcagcctcgctgagtctcagtttcctcaactgtatactgaagacaatttctttatttaccaacctgaaatattcatagtgagtctaagatggaagaacagatgagtaaatactttaaaagtgtaataagaggccaggcgttgtggctcaca

SEQ ID NO: 186679 - DNA, 485 bp, Homo sapiens
gatgccatcatttggtagtaccctcattttatacttggataggatcccatgtaggattccaatattttacccttcaggccccaattaactgatttatactctacagacgactaaaatacaataattcagctgcaaatcacttccaatttaattcagtgagttatttaccatttaagttagaccactgtcagtcctctctcgaaccctccaatggcttaccatcccactccaggtaaaagccacacctggctcacctctttcaggccctgacttaaatgttactttctcagccttcccaactctgtaactgcaacagctccccttccacctcccaccctcatatttctctattgcttctctgctttttttttttttttttgagaaggagtctcactctatcgcccaggctggagtgctgcggtgcaatcttggctcactgccacctccaactccctggttcaagcgattctcctacctcagcctcc

SEQ ID NO: 186680 - DNA, 284 bp, Homo sapiens
tgacttatttaatctacctagtgactctctgaaggacacaacaggttatcactgccattttacagaggaggaaactcaggccctgagaagtaaatttccccagtgtgacacagttaagggacggaagtggtgttcaaattcaggcaatacagctccagaatccatcctcctaccctctgcacttgctttctctctagatggataagtgccattctctttgtgaaggtggcatctgtcctcagtctcactcaaggatggtctcctatttcccacagttgtgaaag

SEQ ID NO: 186681 - DNA, 349 bp, Homo sapiens
ggccgtgcattcaaacaatatcaatcggccctcagagaaagcacacaatggtcaaggtggcatttcaataaagcagacagctgccttctggcctgcatgtcagcctccctgcagcctggagagtcacttctctctctgtgggaaagcctgctggaggcatattggctacaagatgaggtttctttttccattttcttcttcttttttgcaaaaatcagcttgaagctcgttaatgtcaggaatgagagtgaagcgctcttacgaaatatgaaaggtggggtgcaggccagggaaaggactaagagggtggaggtgttggaaaggtgggataaaagcatggtggagggga

SEQ ID NO: 186682 - DNA, 176 bp, Homo sapiens
atcgagggggaaagcggagacagcaatggacaggaaacccaaagatggtgaaaaacagatacagcggaagtgactcaagtggctggaagtggaagagattgtggctggggacatcaaaggaggtgcagatgctgttgataaggttcccagtgtggccccggagtgggaggctgatg

SEQ ID NO: 186683 - DNA, 396 bp, Homo sapiens
cagttttccatccatggataattagtgctcttgtgaatgtgagggtaggaacatccttgcaaacgtcttttcctgtttacatgcaggagatgcttggcttatatttagagctagaatttctgggttattgggtttgtgaaagggctactccaaaaagataaatcctgaaataagccctgctgagataatccactttgaagataaagggggtgggggaacccataattatccttgtactgatacacagtcttaattactgtagctttataataagtctttatatctgatgggacaaaccggtcctccttgttcttgctcttcagaagctggctatttcaggaggttctttccttttccagagccattttagaataaacatttcagattttgctacaa

SEQ ID NO: 186684 - DNA, 631 bp, Homo sapiens
  misc_feature (29)..(29): n is a, c, g, or t
gtaccgcttgcgtctttctcctttctggntgttgaaacccccacaccaggaagtcctgctcctcgggctgctgactgctcctctcctcctccttttctcttcctcctcccatgagtgtgctcttgcatcgtggagtgacttggcaagaatgccctcaaatgcaggccccttgaacttgggctttcgcagcctccagacctgcaagaaataaatctctgttctttacttgtctcaggtattctgtcatagcagcacaaattggaatgaaacaggtatgtaggcatccttatatcttgctagctatatcttgctagttttggggatgtaaatcagtacaattttactgaaagaaacatgggatatcactgctacacaagcctaaaaatcctcgtattattgtatcagataattcctttgctctaaggaaatatacagaggtatgatatacaaatgtaggagtgaaagactattgcattactttttaaaatttttttatttttttatttttatttttattacttttttaaatagaaaaattgaacaaattaaatgcctagtactgtgggattatttaagtaaaacatgcaattactacttagcttttaaattgtggtaaaatatttatcatggg

SEQ ID NO: 186685 - DNA, 744 bp, Homo sapiens
aacagaagtctggcctgggctcctctcttgggtgaatttgcaatgccagatcctctctatcagtttggttttgtttcttgtatctctgggaaggcaggcagacagcacggtcacctgtgaatgcagctacaattggcttagctgcctcactgataaatgtgcccccagtaagctacaaagggattaccagcgttctcagcagctaaaggaactggtgaagatttccccagcaaaaagtagaagctcagtgtttcatagatgaagactggggagattgcaaaagacccatccaggtactgatgcggtcttctgggaccaggaaccctactcatgcctcaagctacctgtgatgaaaagtccattgtctgccacctgtctggtagatctgtcctgaggattaatgagataatgtctggagagccatgtgaagcctttggaaggagattacagataaaagtctagttccagtgaattaggctactgataagagtactgaataacaaagctgtgatcaggcttttaaaacgttattttgttgatatttggttacagctacttttagacactgaactagccagtggaacaagttctttctgaggtccctgaactttaaacagtcactctagaacagtctttctcaaagtctcaacccgaggagaattgtctatatcaccagtgtgtttgttaaaaatataatttcctggccttcaacttcagaactacaaatttgcaaaacttcaggaa

SEQ ID NO: 186686 - DNA, 375 bp, Homo sapiens
agaaaaaaatatcatgcatcacattaacagaataaaagaaaaccatattatctcaataactatagaaaaaaccctattaatactattaatatattcaacccctatttatatacactcggcaagcaaggaataaaagaaaatttgcttgatctgatggatatctatgaaaaactacaactaatatcttacttgatgtttaagcatgaataatttctcaagattaagaacaaagcaagaatattagctctcaacatttaacattttactgaacgttttacccaatgcaataaggcaagaaagaggtcagagatttcggaggaagaagataaattgtctttattcattgtcaacattattacaaactatacaataagg

SEQ ID NO: 186687 - DNA, 302 bp, Homo sapiens
gtgccatgttttccagggtggtcttgaacttccgagctcaagtgatccgcctgccttggcctcccaaagtgctgggagtgtaggcatgagccacctcgccagagtgctcagtgcttacctctttaacctcatttctaaccatggtctcccttgctcaccgtactccagccacagtgtcctttccgctggtccttgaacacatcgagttcatttcttccttaagacattttctccagatgtttttctctgctatggcttctttcctttcttttcattttttagtctctgtctaaatgcaatca

SEQ ID NO: 186688 - DNA, 1325 bp, Homo sapiens
gtttctaggaatttgtctgtttcatctaggttatccaattttttgacatatagctcttatactaattctcttacaatcctttttattcctataaatcagtagtagtgtctttcatttctgattttagtagttgagtattctttttccttaatctagttaaagctttgtcaactttgttgatctcttcaaagaactaattttttgtttcattgattctattgtttttctattctctatttcatttatttttgctctaatccttattatttccttcctctttatggcttcaaactcaattgaacataaagtattaagaaatttgacttttttctcaaatgtctaaaatgtaacaagaaatatgtctagagtcatcaaaaagcagcctgtttgtcagatttactgtttaatccatgtaaacagctttcatataattcatgatagaatattactatgtgctttggaagacactgaaggaaagacaaaaggtcattgggcagaaccaccctagattgactgttaaggccatcttctagtttgcaggacttgtggtagacagacagaataatatcctggacctcttgggtgtatacaggacaaactgaaataaactctcatttttagatcataatgtcatcatgaaacatatcaattcggtctaattctgaagaaaacaagcacaatgataaagtttgaatgtttgtctcctccaaatctcatgctgacatttgatccccaatgttggaggtggggcgcactgggaggtgttttcgttacgggggcagatccctcatgaatggcttggtgctgtcttcatgggattaagttctcactcctacttcctgtgagatcttattgttaaaaagaatctgataccttcctcccctctcttgctctcttcctccctgatcatgtgacacacgggttcccctttgccttccaccacgatggaggcttcctgaggccctcaacagaagcagatgctggcgccatgcttctcgtacagcctgcagaattgtgtgagccaaataaacctcttttccttatatattacccagcctcaggtatttgtttatagcaataaaaacagactgagacacatgatgaagaccctttgatatcctataaatattgatttctctccctgagagaagagcatgaatctaagtgatgccattactctaatgtgaattccacaactcttctcaaagatgtggcccatatgttcctaataatggctttctaagaatctgttctgaaggggtaccttctctctgattttcatttgcatttcctgcttagcttacacacttcaccttgcctatcca

SEQ ID NO: 186689 - DNA, 506 bp, Homo sapiens
taataaaaaaggtattctaaatcttaaaacaaggcaaaacaaatgtatttcctagaatgcaagtggtaactttagaatggggttggtattcattaattttcaaaccctagaagccttatctaataaatattaaaaagctatatgcaaatatttgcagtctataaatcacaacagcaaacgtgccaaaaaatgagctaagtgctctatgcaattgttacatttatttcttcaaaacttaaggcaagtattattattattataccattttacagctgaaggaactaaatttaggaaatctaaggaacattcctaaggtcacacagctattaggttgaaaaacaatggagtgtcagtaatcccttacggcttaacccaaaagtagggtgcacagccaggactccaaaccaggtctatgtaatatgaaaatcagtactcttaactacttctacagggcctcaccccaaaacataagagtgtatcatgtaaagcaaggaacaccaagccaa

SEQ ID NO: 186690 - DNA, 471 bp, Homo sapiens
aaccagaaaacaatgaagctgtttatctacaagagtaatgagagtatgatggaatggcaatggagtaggagggatatatatttcagggaagggagtgacactgctctgaatatatctttttctatagttttaactcttttggaagcacattcatgctctacatattttaaaaattagaagcaacaaaagaggaaggagaaaaagaaaacctaaaattgaaagcaaatggagacaaatcaactgtacttcaaacgaatattataaccacactaggagtggggaagggagctaatccaagtaccttatgaacacagtattgactatatactcccagtgttgcttggagatgacaagaggttgggaaggcaaagaattctgcaaacaaatcgtgacctcatttggtttgttttgatactggtttcagtgaagcaattccataacaatttattacaggattagcaaatgagaaaa

SEQ ID NO: 186691 - DNA, 428 bp, Homo sapiens
ggttccgcggccactgccctcctgcattagatggggcaccaattcctggttgaaacatggcagatgacaatttccaaaggctgtgaactttccaatagcagtaaactcctctgaagaggactgggatgtggaagtgggatccctgtgccgctggcagtgccggcagcaacccttctccggctcttactgagctagggaagctgttgctctgcgccttcttgtttagtttacaagatttaggacaagtgcctcggtttctgatgctgtcagagacttggtcaaggtgaaatctggtagctcagtttatagaactatgacgaggctagtgtggtggtgtgacattggtgaatgtttgtgagatggaaaagtactactagactttagcagagccagtggcataagaaacttaagtttaaggccaagtgctt

SEQ ID NO: 186692 - DNA, 403 bp, Homo sapiens
gagatttgggcggggacacaaatagaaaccttatcagtataggtaaagtatattatctacatataatcattttcaattcactgaattcgcgactgtccgttgataaggcattaaaagaactgactgtcgaaagtggtacatgtaaaagatattaatatactgtcgtgtactagatgtaaattcagcagttaagatctcgacattttcatatattccaaaatagttttaaatattttggtgttgcattgacccatgtcatttagctagtagacacatgtgcctttccattttcacagcaacatacgctttgtgtctgtaatgttcattgctttatatctgattttttcattggtttttcatactgtgtttggtttctacacatgagcacacagtgcctagaagg

SEQ ID NO: 186693 - DNA, 207 bp, Homo sapiens
cttagggaggaagcacgccaaagtaggcgcaccttcatacagtctcccaagcccgactgcctgcagattttctgtctgagccgccagaaacaaagatgacagccgaagggctgaaggtcactccagagtagggagagaggggtcttggtgggcccagatctcccagcaccaggcagtgggttctcacaccagccttggtctcctggg

SEQ ID NO: 186694 - DNA, 199 bp, Homo sapiens
agtgagaccagctacactccagcgggagcaagtccgaagacaacaggccaggagctctgcttaggagccacctagggcgtaaacccacgccaccccctgcccgcgcctcctctgtcctgcgaatgacactctggggcgccgtccagcaggtggctgcctctcaaccacctgtgcagtgagcacgagtgtgtgtggcgga

SEQ ID NO: 186695 - DNA, 591 bp, Homo sapiens
ggcatgagccacaacgcctggctaattttgtatttttagtagagatgaggtttctccatgttggtcaggctggtcttgaactcccaacctcaggtgatctgcccgcctcggccttccaaagtgttgggattacaggcgtgagccaccgcgcctagcctgctgtcagcatttttgatgagcctgttcactctggactctaatcttttcttcattagctcttttacaaacagttcatgctcaccaaagaaaatttgtaacatagaacaggaagaaaagttgcccacggtctaccatccaaaccccgtcattgtcaacagtctgtgtgtttccttctaatctcttatggcagtgaacttttgtttttctcctttgcagtcacactgcttttttccattccctggacagtctatggtcagcatttccatgttactgtgtagactggcattagtcgttcagatttgtgccattctcattgtaatccgtctctctcctacatgtgtgccttggtcagttgtgctcacctaaaattcgctaccttctcttttctagggaaccccaggaaatccttattagtgaccggcagtgcaatag

SEQ ID NO: 186696 - DNA, 341 bp, Homo sapiens
tgattccacctcttcgtttccactgccactgccccgatccctcaagccaccatcatctcttgccaggcagctgcaatagtctgtctcataactggtattcctgcctccacctttgctccttagaatccagtctctacacagtggccagaacaatcttttggaacaaatcagactttattctttctctgcttaaaaccctccaatggcctctaactgttcttggaataaaatccaaactctttattacgacctacaaaatctttgttttgatctacaggttctttttctccacccccgcccaagacggagttttgctctgttgcccaggctggagtgcagtg

SEQ ID NO: 186697 - DNA, 420 bp, Homo sapiens
gatgttacggcatttgagggtcttacatacccaaaaagagactgtcccttccagggttagctaattcctaaagatagtaaacaagttacttgagtgcatgtctctcatatgcaagccgaccaccccctttatctaactctcacatacaaagccaatatttcttctgccctaaatcatcccaggaccagtgctatgatttgggtgtggtttgttcctgccaaaactcatgttgaaatttgattcccagtgtggcagtgttgagaggtcgggcctggtaggaggtgtttgggtcagtggggtggatccctcatgaacagatcaatgtccttctgagaaggtgagggagttctcactcttgctaataggttagttcccatgagaacaggttgttaaaaagggtctagcttcttctcctgccat

SEQ ID NO: 186698 - DNA, 333 bp, Homo sapiens
tgtgagtttgttaatttttatttccccgtgaacatttggcagagttaaaattttagccatcatacattttattccctgaaatgtatcagtcacagttcccacagactctagatacacatttccttgtgggtgtatgtgtaaaactaccataacaaaacattttctatttcctcattttgattaaaaggaaagaagaaatgctaaactgcacttacataagtgacagtgcaatagtgacacaccatctgtgtacacaatttgtattctgtttaaatttaaagttataatgataaggtgagaaatgctaagagctaggaaataaaaaatacatat

SEQ ID NO: 186699 - DNA, 874 bp, Homo sapiens
gttcgtggcgccgcgcctccgggtgttggggagtccgggatgatggggaatccggggctcgccctagtcgcggggacaccgccttccaggagctgtccccaggcaaactcacagacatcttcaaagagccttcttggacattctgctttttgctcctcataacaggcttcggcataaataatatacaacagcctgggcactgtggctcatgcctgtaatcccagcactttggaaggctgaggtgggcagatcgcctaaggtcaggagttcaagaccagcctggccaacacggtgaagatggcctatcaaaatcattttgattttcacttctttatttcagatggagtttctctcttattttccaggctgcagtacagtggcgtgatctcggctcactgcaacctccacctcccaggttcaagcgattctcctgtcttagcctcacgagtagccgggattacaggcacatgcccccattcccagctaatttttgtatttttagtagtgacggggtttcatcatattggtcaggctggtctcaaactcctgacctcaggtgatccgcctcggcctcccaaagtgttgggattacaggcgtgagccacccactgtatctcttgttcggaggaatatctaatcaagaaaaatccatgctactggtggatatgaggggggacgtttcctgtgagatggggttcactcatgtgtgcccacctggtggtaaagggggcaacttcggctcaattaaacctcggctcccaggggccggaatggggggctgggcacacggatcagaagtgatgggcacctccagaacacagtggcagacaactggcgcaacacagttggagagtggagaaacgggacaaaggag

SEQ ID NO: 186700 - DNA, 665 bp, Homo sapiens
gttcgtggcgccgcgcctccgggtgttggggagtccgggatgatggggaatccggggctcgccctagtcgcggggacaccgccttccaggagctgtccccaggcaaactcacagacatcttcaaagagccttcttggacattctgctttttgctcctcataacaggcttcgatggagtttctctcttattttccaggctgcagtacagtggcgtgatctcggctcactgcaacctccacctcccaggttcaagcgattctcctgtcttagcctcacgagtagccgggattacaggcacatgcccccattcccagctaatttttgtatttttagtagtgacggggtttcatcatattggtcaggctggtctcaaactcctgacctcaggtgatccgcctcggcctcccaaagtgttgggattacaggcgtgagccacccactgtatctcttgttcggaggaatatctaatcaagaaaatcatttttactgtttttattttggtggtctcgtttttttcctgtgagatggagtttcactcttgttgcccatcctggtgtacaatggcgcgatctcggctcacttcaacctccgcctcccagtgcgtccggaattggtgggttcttggtctcactgacttcaagaatgaagctgcgcaccctcacggt

SEQ ID NO: 186701 - DNA, 356 bp, Homo sapiens
aacataaatgatactttattataaatattactctagtgtttgttttttgtacataatatgtgctggaaatttttttatgtcagtatgtcattcatattattattgttattataaaaatactacatgcacaaggaaataaaaattgaaagatttaaaatggaaagttgaggaagatctaaaatggaaagtgaaaaactccacctatccccaagttccatcccttagaggtaactgcttttcactgtatttgcgttttattctttgattacctccctaacccttaaacatatatatacttgtacttttatttctttaataactttaagcattcttggttgttgatcagttaagaatga

SEQ ID NO: 186702 - DNA, 365 bp, Homo sapiens
catcatctcggattcattcattcatccatctagtaagcacctcccatcatcagtaagcaacttgacacacacattcacagcaatgtgttccctcgaatatttaataacatgccaattttgtgccatcacttgtccaaggccacataactaagaagggcagcaccagaatctgaactggctccttctgacttcaaagttgtccattccctttttaacatcccatctgctggtcctataggttttatttaaaataataggtcggtcacagtggctcacgcctgtaatcccaacaccttgggaggctgaggcgggcagatcacttgagctcaggagtttgagactagcctgggcaacatggtgagacc

SEQ ID NO: 186703 - DNA, 510 bp, Homo sapiens
tgggattacaggcgtgagccaccgcgcccggccaatactattttcttttaggacacatgctcaagcaatgataggtgttatttaatagtaaagctgaattctagcttctgggagtggactaaaagctagaattcagctataaagcaacaggcagccccccgcccccccgccgcccctgtgtgagttgatgagttacttttttagggcttcttgatacataaggcaaccatacttccctctttgctctggctcacccctgttttcctggcagaattgtcagtagtgtcactttcattcttagatttattaattttgatgataaattctatgtaaccctagttattattttcatgcagcatgtgaggcatgttttatttctgtttttcctgtctagggaaaccaagaataccaactcactttgccttgtctgtgatgagaactgaaaaacctacagagtaatgaattcttacagttgcattagaaattcagtagccagggtggatttttcac

SEQ ID NO: 186704 - DNA, 347 bp, Homo sapiens
ctccactaaaaatacaaaaattagatgggtgtgatggcatgtccctatagttccaactacttaggaggctgaggtgggaacatcacttgagcccaggaggcagaggctaaagtgagctgagatcacgccactgcatactccagcttgggtaacagagcaaggccttatctcagaaaaaaaaaaaaaaagaaagaaaaggaaatgcagttgagacagagtggaaatgttagaaacttgagtaaatgttattctatcctgtgtgtaaaaattaacttaagagaggtgggggaaaggagagttgtttaatgggtatagacttacagttttgcaagttaaaaaagttctgg

SEQ ID NO: 186705 - DNA, 222 bp, Homo sapiens
gaaagaaaaagaggctctgacacatctttcagcctccttttgggctaggattggaattcattctagtggtgaatgaaccaactattgccaaagttgcttttttggacaatgctgctttttaaaaaatctcagtaccaggtcatttgaatatctaattggaaaaaatacatgtatctttaactgtaattataccatatacaaaaatcaattcctaactgactg

SEQ ID NO: 186706 - DNA, 270 bp, Homo sapiens
aggatcaagtgattctcctgtctcagcctcccgagtagctgggattacaggtgtgtgccaccaagcccagctaggaggcttttaatgtttattttgtttaatttgtagtctggcctctttaccaccgtgcttttctgaggctgtatttgtggagataaccagggatttccaaaatgccaaagccagaacctttttctcagttctcctttccttgatctctctgcagtatttaatactgttaatcacctacctttactttttttttttttt

SEQ ID NO: 186707 - DNA, 437 bp, Homo sapiens
tctctttccatagtccatactccaacaaagagaaatctgagcacacgtacatatttttctccagattctcatctgaaaccatggggagagatacgtttctcttttgccttttgatgtactcagtaaagtgctgagttcataatgttggctctcatttaaaataaaaggaaacaaggcaagcaacattaaacatttgaaatcgacaggaagggaatgttaggttcatctatacattaaagaattaaggaaggcagagaacagttcatagaatgggctatggagacttaattctcacaggaaaaaggcagtcatggtaattaatttccattaggttctattataaaatggtaatggaaaatgagtttagctatatggaattgtatgtcatgtacaattatgtgggaacaaatttataacatttatcagatggtatctgc

SEQ ID NO: 186708 - DNA, 373 bp, Homo sapiens
gtttgggtgctgacacttaactcaggggcttctcccttcatcttctggggaggaaggatcttctcacccatttacctttttgccaggcctcttctctaagggatggggcaggacccaatgctccccaccccagggtagcagatggggcacaagcagctgcttcctttgccagtgccacttcctgcctttcccccaccactccctcagtatccttcccagggaaggggaggctagacctccagaaagagcatttgtgaaggagaaaaaggttttggttgtgtttagctgaagccccagggatggaggcagagaatgggagtctgtccccaacagctggagcagagcgccggtgggcgtgggaggcctcccagct

SEQ ID NO: 186709 - DNA, 312 bp, Homo sapiens
aaattttcatgttattaattagtgttctcttccttcagcttgaagaactccttttagcatttcctgtaatgcaggtctagtggtgataaagttagctattgattgaaaaagtctttatcatccatttggttttgaaatacagggttgctgggtatagtattcttggttggcagtttttttttctctctctttcttctctttctttttctttcttctctctcctctcctgccctgtcctgtccctgtctctctttcttttcttttccttccttccttcttttcttttcttttccttccttccttttcttttct

SEQ ID NO: 186710 - DNA, 387 bp, Homo sapiens
gtaggcagggtgggcattatttccctccttaggcagtcagaaaggttccttcccaaatcacacagctggttggtgacaactgaggagagaatcagccaagattctccagcactgaatttgggttcttcccatgacccagttctgcgcctctcggcctactaacttaccaagggagcaacgccaacacacagaagattcaaacatcagggagcacggctgagtcaaagggaaacatttcctcgctgggaataacactaaggagccctactttgcctcaacattagaggattcgttctcttgttatacgtggtgatttcgtattgacctagatgttcttttgtgtaataaattgtaggaaaacattgcttgtgaaaagaagcaccattt

SEQ ID NO: 186711 - DNA, 530 bp, Homo sapiens
caggtagggtttggtacaggacctaggttctactaagaagatactcctacacaaaacttagaatgcagacaggaaacatgtgcagtggagggtcacacacagagcaagaaaatcttctgggcagctgtcacgatgagtctgctgtctagtcccatcctaggtggtaagcagtagatgataatgacagttttctgatgggacagtctcatgttgagcatttattttggctgcaattttcttggttatgaatgtaggtttggttctggccctctcagaattctgtaagatcccatactttatagtaaatttctttctgttttaataacagagttgattctgtagtctgcagtgaagaatcctgatttatgtagttgttagtaccaagaggattgcagggaacagactctcaagaaaatgcaaatctatgattgattatccaactccatttggctttaaaccagtggaaactgtcagccttagagaatggtattcaataataaaacagatttttattgtggttcccttgagca

SEQ ID NO: 186712 - DNA, 333 bp, Homo sapiens
tcttttgctcagcctgctgttttcaaggttcatccatgccctagcatgtatcagtccttcattcttttttattgtggaataatattccattgcatgcctatacctcatttgattcagcagttcatggtcttttgcgttgtttcccactttatggcagataggaataatgctgctgtgaacgttcatatacggcttctgtgtggacctacaagttttgatttctctcagttacagacccaagagtatatactctgggagcagaattgctaattgctgtgccatgtgttaactctgtatttaaccttttgcagaactacctgttttccaaagtgc

SEQ ID NO: 186713 - DNA, 376 bp, Homo sapiens
gcctttgcctcctaaaatgttgggattacaggtgtgaaccactgcaccagggtttgtgtggtttattatatgtcgattttacctcaataaagctgtttaaaacataaaaaccaagtttccatcaaattttaaattactctcttaaaaaatttaacttagaccttgaaaaatagtcatatgtttctatgaaaagttttaaaagcattatctttcaaaatcctgggtaaattaaatacaaggtcactaagatgtcagcaaacttttatattaaaaaccctttgaaaacatctcactgatcctactataatcaaatgagtgtcttcttttatgtaataaatctcacaaatgtgtggagtataacaatgattagcctcag

SEQ ID NO: 186714 - DNA, 354 bp, Homo sapiens
tctatgcatttgtaaaaacacatggtgtcatgtgctaaaatgagtgacttttactgtatagaaatttttggggccaggcgaggtggctcacacctgtaatcccagcactttgggaggccgaggtgggtggatcatctgaggtcaggtgttcaagaccagcctggccaacatggcgaaaccccgtctctactaaaaaatccaaaaattagctgggcatggtggcaggcgcctgtaatcacagttacttgggatgctgaggcagggagaatttcttgaacctgggtggcagaagctgcagtgagacgagatcacaccactgcactccagcctgggtgacagagcgaggctccatct

SEQ ID NO: 186715 - DNA, 339 bp, Homo sapiens
ctcaaatagctagaatatatgatggttagataaataagatgcagtgttcatacaatgtaatttttttcagcaataataaggaatacattctggaaatggatagtggtgatggttgcacaacactgcaaatgttgtcagtgccaccgaattgtacacacaaaaaatggttaaaatgataaatttggtgttatgtgtatttaaccaccattctaagaactgaaaaaggaggagattagaaatgaagtactgattcacggaacatggagaaacataatactaagtgaaagacgccatacacgtatggccacatagcatatgattccatttatatgaagtggc

SEQ ID NO: 186716 - DNA, 253 bp, Homo sapiens
aacttaataatgggaaggcaacctaattatgtttaatggagaaaaatatctgaacagatactctacctaagaatatatataaatggcaaaaagaagtgtatgaaaagatattcaacatagtaatgccattttggaaatgcaaattaaaaccttgagatactagtacaatttcactaggatgtcaaaaatttgagatactgacaatgccatgtgttaacaaggatgtggagcagcgggaaccctggtacgttat

SEQ ID NO: 186717 - DNA, 763 bp, Homo sapiens
gaagtgatttgcccgtcttggcctcccagagtgctgggattacaggcgtgaagcgccacacccatccaggttcacctcttgagtagagtgctgagatgctttctcacatgagattggtttctagtaataatagagggtttttttgctagttactttcttattgtatttatcttatagagtcttggttcttacaaaatcataatttgctttcaaaaatacatattttaaactacctaataagatctttatttagtgtcacatttacgaagggttgatgcttattttagtgatgatttgtcattaaaattatgtcaaaatgtcttaaaatgttgttgaaactgtaagcaaactcaacacgcacaaagctaattatgggtgccatctgtttatttttacaaagctttttttttaagactatggcattgtctgcttatgataagcttcaagattattataatgactaagtcctgtccttcaattagtgtagttgaagatgggaagataattcgtttgttcactgaccttttcctgtgtcagagtgtatgaaatatgacatgtcatgataaagaaactattgtgaagtgcatttagaagatacttaatttttatgagaaaaaaatgacatcaaagcagcagatgtggccaaagttttgtttaaattcttagaacttattcaaggttttagatgaacggtagacttttccagtgacttaagtggcttcattttaactcaaggttaagaatttctaagtgatcgaccaag

SEQ ID NO: 186718 - DNA, 318 bp, Homo sapiens
aatttatttgattcttctgttcttggatattttagtccttaactattttccgctattttataatagataatgctgtgatgatctttagagcaaagacttttatccttaggatgaatttctgcaaaagagggtctgattcaaagggtataattatttgtaaggctttttgatgcatcataccaaattggctctcagaaaggatagttttggcttccctgattcttctttgatattagacattttaattttttaatacttgataatttgataggtgaaaaaatagttgttttgatttggatttctttgattgctactgag

SEQ ID NO: 186719 - DNA, 362 bp, Homo sapiens
agtgttccgtactagtgttggcggtggctgtgacaggttgggcaggccagtccctagacttgcaggttgcatgtacaggttggtgccagctatggtggtagcagcagattgagtaggcccaagtttagactctaggaggagtgctcaggcaccactggtgatgaactgaactgggcaatcctcaggcctcccagagggtgtgcttgggtagtggcgtgtatgaagccaggctaggtggaactgccctcagtgaccctggtggtgcatgcaggtgctggctatggaaggcaggggtggggtgatccccaggcttccagtggaatgctcaggtaaggggcagcagcagctatgctgcagtactg

SEQ ID NO: 186720 - DNA, 268 bp, Homo sapiens
acaccgtactgcctcatgatgtgatgcactgaggatataccatcacttacatgggatttttgccaaaaatgcaaaacctgaatctaattacaaagaagcacctggacaaatccaaactgatggacatcctacaaaacaaagggtctgtactctacaaaacccaaaaattaaaaaggctgaagaactgtttcagattaaacaatacaagggatataattaaaatgcattgtataatattggaatgggaaaaatattaaaggatattatt

SEQ ID NO: 186721 - DNA, 417 bp, Homo sapiens
cagaggcaactgaggttggagatcatttttagggtcttaagttcagagctgtatctgtaatatcaacaacagatattctggctcttaccaccttgcccatttctcctcttagcactgtaagagtagttcttgctgagaaggcactagcctgtagtggcgatgaacatcagctttgagtatagcttccccacgtaaggactgtatgaccttggaaaactttctttacttgttgtgataaataaacttccttacagcaaattgatcctcaagttattcccctgtaaagtggaaaacataatggaaactaccttctaggcttgatatgaagattaaatgaggtaatgtacccaaagcacttagtacagtggctggaacatggtaaatatttgatcagtgttgttcttattattgttatgg

SEQ ID NO: 186722 - DNA, 887 bp, Homo sapiens
aaaagtcatagtccagtaatgcaaggatggtttaacatgagaaacattagaaaatcagtacaaaatgtgacattaacagattgaaagaaaaacgaatgtgattactccaatatggagactaaaagcattggataaaatacaacatcataaatatgccaaaaatatttggaaaaatttagcatcaattcatgtcatacaattcttaacaaactctaaataaaaacatttttccttaatttcataagcaatagtataaagaaaacaagctaacattacacaaacatgaaaccttgaaagcgttgcctttgagattggaaacagaacaaggacaccatccatcaccacttcttccaacattgtatagcagacagaggaggaaaagaaagtacaaggtggaaaacttggaaaataaaacatgcacctcacagatgatatggttattaatttagaaagccccaaaaaagtaattattagtaagagatttgggaatggttaccacataaaagaatcaatatacagaaaacatttctagatctatgtaccagaaacaagcagatggaaaataatgttttaagagatttccagtaccatccaaaatcttgtagttaccaactgcaagcctaacaaaagacctttagatggtttgtggggggaaattattaaacattgttgagagacagtaaaaaatatctcaataaatggttagaaagctgtaggagacctgaaagtgtaaatcccagtcaaccatagttctgttgggtaagagaatgctgacaagcgcatagcaaaggccaagctgcccttgaggaatgcagtgtgggggcctttgctgtaccagacagcagggtgtcctctaaagcagcagtgctccagatacctggacccaa

SEQ ID NO: 186723 - DNA, 438 bp, Homo sapiens
aattatttccatagaaaggagacaatatattcaaagaactagcacatgaaacaataacaacaagcataaccacaagcataaacctctcactatcaccaatattacctacttcaaaaataaaaaggcactgttcttcaaaccagagaataagtggtagatgtgcagtcatacagacacagcactaaaaacttctccctaagcaaaaatatctcaatatcacctactgggttccaatcaaagcaggtagctaagctttaaaaaagaagagagtatggaaagggaaaaacactaactttagagaaggccacctgtccctctcttgcagtggctcacgcctgcaaacccagcattttgggaggccaaggcaggtagatcacctgagctcaggagtttgagaccagcctggccaatatggcgaaatgccatccccactaaaaa

SEQ ID NO: 186724 - DNA, 830 bp, Homo sapiens
tcaagagggcaggccctggagacggagcacatggatttgaatcccagcctctcataggcaggttaattaatttccctgaatctcagtttcttcatctctcaatggagaaaataatagaagccacctcacgggaattaaatgagattatttacgcacagcaccaaggctgtggctactgtatttgacccctgaaacagttaatttttcttgacatcccttccttggtatatgtattagtcagggttctctagagggacagaactaataggatatctctctctctatagatttatataaaggggagtttattaagtattaacttacacaatcacaaggtcctgcaataggtcgtctgcaggctgaggagcaaggagagccagttcaagtcccaaaactgaagaacttggagtctgatgttcgagtccaggaagcatccagcacaggagaaagatggaagctgggaggccaggcctgactctccttttcatgtttttctgcctgctttatatccgctggcagctgattaggtggtgcccaccagattaagggtggatctgccttccccagcccactgactcaaatgttaatctcttttggcaacaccctcacagacacacccaggatcaatactgtcagttcaatcaagttgacactcagtatgaaccatcgcaatacaataggattactttctgtgataacctgtgtaaaaataggcagtcatgattttcctgttgtgttcttcaggtgtaaaacaaaaaatttaaaagaagaacttcaattttaaagatattattcaaactaagttaaacattttgtgtataaattaaaac

SEQ ID NO: 186725 - DNA, 354 bp, Homo sapiens
agtggatgaggcccctcataccagcagatctttccatagtcctcctgtagaaacaccaagtgtctgggtatgccttgtacagtaagttcttggaacctccccagaccctctcactgcactttggacagtgagtggcagagtgggtgggtgtttggtgtttggtttttgtttttgttttttagactgatcgctgcccattatgagtccccattactgactccaaaatagaaaagcttgtggtcagtcaggaaaatgatcatccagcttttttggctcttgaccctgactcctgtcaactaattaggggcattaggcaagatcttgtttcaccatctgtacaagtgttggaattat

SEQ ID NO: 186726 - DNA, 531 bp, Homo sapiens
ccaatccccatgaacaattctctcagaacacatactgaaactaattcttcatatctccatggctatcacacaagtcctagtctctatcttctcttatgtgaacttctgaaatgttttattactcccatttttgtcccatcatccatttttccatcagacacagtgattgtgattgctccaactcactgagcagtctggttctttgaactggccatgtttgtttggcgttctcaccattccctctggctggaaactcagtgctaggcatctttggctccttctgccattgaactcctgtttatcatctcctcaccccctcaccatctgaaattatcttttttttctgtttattatttatctcataactagaatatataagcactgtgggagcagagtcttgcccacagctgtatctctggcacctggaacagtgccaattatgtagtaagttctttcaatgatgtgtcataggaatatcagcccgctaatgagggagttctgaaatcccatagggtgcatagaaaataaaag

SEQ ID NO: 186727 - DNA, 600 bp, Homo sapiens
gaaaagggaatctaatcaggtcaagcaatttactcatagtctcccgaccatcaaatggcagagatgggattcaaatgtaagctttaaaaaaacattagcttcagttcactttcctctctaccacaatatctcccatgagatacagacactggaaattcttgaaatcccagcttaatttcacacaggagttgatcttcatgattaacttaatttctactcataggtatgtttctcaccttaaagtataattatgagactcctcagtgaagtattgggtctttactgattggtggctgcactaaagtctagtgaagataaagcatttaagcactgcatgtataagagttgcaaagaaggctggtagctgcccagcatcattggccttgtatcttgtatcattattcaactgtatgcactgttggtgcctaaccatttattgattgttgatgtgtctttccagtgaagaagacatggattttagagctagagatgccttaattctaatccactttgcttcttgctaccaagttatttaaactcctgagttatggagataataataactacctccaaaaaaattcttttttggtttaaatgaaa

SEQ ID NO: 186728 - DNA, 263 bp, Homo sapiens
tccccaaagtactgtccaggtctttgctagattatctctaaattgcaaaatgcctttcactgcatggagaggaaaataaattcataagtaaacaaaaagtacattctctaccttgtgggacgccgaaatcatgcacatttagtatagcccagaaacaaatgcttcctacgactctgcaggaccatgtctaagaaggaatatcctcaaatcctgaaatatttcaaacgactacttaagaatggagtacatcgacctcctcctac

SEQ ID NO: 186729 - DNA, 382 bp, Homo sapiens
ataagacagagataaggatacaatcagcagcatgcactgatcatgaaatccagagaccagcattctcagacagcgtgcagtacggatgcttctggctggcagggaggtcgtggcagtgggctgactaatgcgcgcgcatagattcacacacattgcacacacacattcacacacagtgcacacatacatattcacaaaatgcacatatacattcacattgcacacacacatcacacacaccacacacattcacacactgcacacacacactgcacacacatacacatatacacacattcacacactgcacacagtcacacattcacacacactgcacacacattcacacacactgcacatgcggtacctgtgtgcacccgca

SEQ ID NO: 186730 - DNA, 811 bp, Homo sapiens
cacaaagtgttaaacacatctggaaagggattctgacatcatcctgagaatctttggggaatacatatagcctgtagacccattcctctttgaccctataaagattctttaaagagtaataccctgagtggttttctggccagcttgcctgctcatttatctttgaggagatggaaggagacaatatgcctcgtggagatccacaggccctagaggtgtatggattgtgcatttggaagtgctgaagctgagagactgggtctcttggtggaccccaagggatctgcttttcctctactcattgtccctacacaacttttcctggcagccggcattgctgtttagatgggttgttctttgctgtttaagttgtttggcagtggtgtgtcaggatgcgggttttctgaatactttcccagctggttacttgagtggtggttagggaggggctgttctggggctgctctggagctgttgaggtcgggtgtctgtctggatactcacagctggtctgtcgaggagaacgctgttctcattctgctgcctttggtggtgctgtgtgtggctctttagatgtgggtggagatgagttgggggagttaatgagatctttttttagctgcttttgataaagtagtctgtactacaggattcattgtgactttttcccttaacctgtgcatacttctttgctagcctttgtgaaagagagttcaggccctcttgccctcttgctctttcgctctctcttgcccttctgccttctgccatgggatgatgcagcaagaagaccctcaccagaggcaggttc

SEQ ID NO: 186731 - DNA, 271 bp, Homo sapiens
acctttcttgctgagatgcattaaaaattctggcttttcagagcaaatgtaattagttcacattagtaacttcaccagcagcagcgacagaagcaaagtgaactaacaggatatggattaatgtaatcaaaatatcatctcccatcatcgccactctttaggcagctggctacacttcctctcttggttggattgtttttctttttaataaaaatgatacatcaatgaaatggatgcataactacttgtaatcccccctcagggcagtact

SEQ ID NO: 186732 - DNA, 337 bp, Homo sapiens
aaagaaaaccggttaggaaaagagacactgaggaacagctttttgaaaactttccaaggaaaaaaaaagactaactaaaagaacaaagtatctaacataaccaagagccacaaacatgggaagttacttttatttggtattaacaattttagctaagtagttttcatctgacacagtagtttggttatagacagcaatttccattccactttaacatctgggaaagatctaatattgaaaactgaactataatttgcataccatctttaagtgaaatgtataagagtttctttcagtagctcctcaagagtatttagcctttaaaaataatcctgta

SEQ ID NO: 186733 - DNA, 375 bp, Homo sapiens
ggaagaactcgatttgtcccctagcttagaggatgactcttgcaaaaatgggtggcgagcctttgccacagttgctggagaacaggaggcaggacacctctgggactgcgcgaccagcctggagcgagagtctttgctggcaggggttccccgacacacagggtgctgcttacagagggccacagacagcagtggtcctgagccagtacagggggtggctgttcaagacctcagagggctctccagtgtttctcttcagaaatccaggtctgagagctatctgggcatcccagtggtctggcccttccttctctggtgctgtgaactgggtcggagttggccacatatccacaacagggccagggcaccggtgct

SEQ ID NO: 186734 - DNA, 301 bp, Homo sapiens
tggtacatacctgtggtcccagctattcgggaagctgaggtgggaagattgcttaaacccggcaggtcaaggctgtagtgagccatgatcatgccaccgcacttcagcctgggtgacagcgagactcttgtctcaaaaagaggaaacaatacaaaggactagggaagatgccaagtacttcacatttaatagcaactgctaccctttgaagtaaacctgattattcctattagttagatgaggaaacaggcacagaatggttgagtaactttcacaagattacaaagctaccatatttcat

SEQ ID NO: 186735 - DNA, 323 bp, Homo sapiens
tttctacctggtggccagcaacttggacatattcccttactggtgatgttaactctcatcactgggctaaggtgatatctgccaagttcctgcactgcaagttaactcttttcccttttgtagttaagaagtgtcttgctgagagacaacggtggctcgaaagcctatcacgtctccagctttcacccaagcgtttcgtgtccactgattctgacagcattttgaattttttggtggcagttgcttttttaaggttgtgtgagatactcaatgttcaggggaagtccctgtgtttaagaagtccctttctactctgtcttagc

SEQ ID NO: 186736 - DNA, 431 bp, Homo sapiens
catctcctcccacctcttactctcctcccacctcttcctctcctcccacctcatgtgaatcacattctgtagagctgacaactgtgggtacccgaccctgcctgtgtggtgaggggcagcctagtatgaaattgaagaacaagagctctggagctggaccccctaggtcccggttccagctgtaccactcacaggttctgtgtgtcaccttgggcgcactacttgaacttctggtgcctccgtttcctcatctgcgatctgaggataattgtccctaactcacagtgttgctgtgaggaggattgagctaatgtatgtaaaggatttttaaactgtgcctgttcacagtaagtgagatataaatgctactgttgtcattagcaactgaaccaaatacaaaacccttggtctgttgagtaggaggtcccaag

SEQ ID NO: 186737 - DNA, 209 bp, Homo sapiens
tcggcctcccaaggtgttgggattagaggcgtgagcgcttttcttaaaagagttccagggttctatgttggaagagcgagtttgtcagtttttattggaacaaagaaatgaattgacagcattgtgataaacactggaagtgtcgcttctaaaatttgtccatggctgaaagtggtggctcatgcctgtaatcccagcacgttgggaag

SEQ ID NO: 186738 - DNA, 241 bp, Homo sapiens
gtgctattaggttggtgcaattacttttgcaaatactttattttggcagcctcaagaaactaacagaggcactttacttcttttcttctattatatatcagtagtaatacgcaaattggtgacttgctgtcagaattccaacatggctgttggccccagcatgagacagctttctgagttgaatgtttcacaaggttcttttggaaattccgtattgaaaaatttttggatggcactcaaa

SEQ ID NO: 186739 - DNA, 333 bp, Homo sapiens
gggctttggtgggactggaaaaatgggccactccgggcagacctagccccaagaacatagcagaaggggtcttttgctccaggactcttaggttggagagctgagtgtggactgcatttcaggtcctctcaaccctcagctgggcaccttggtacaatgcacaaaatgcaagcccacctacggcagccctgacaggtgaatgctggtgcgtgacagaagcctgggaacagtcacgggcttgtagaagtggaccaggtcctgcagctgcattggtaataataaccaagtattctagctgctcctcgggaagcaggtcccctcgattcccctcgc

SEQ ID NO: 186740 - DNA, 599 bp, Homo sapiens
tggctttactctcagcgtgagatgaaacagacaatacagtacacctgctgagtgacagagttgtccctgagttgttagggcctttgcccgccttggagctccacttgcttggtgcacagtaggcagcaaatgggctgtagaatcatggtatttgtgatttcctgtgtccttgacagttgagatattctctaaggctatttatgttctctctaccatgctcgtcacaagcagtcttctgggtcctcacaagcagtctttattgtttatatttctattaacaggtctgttcaaggcaacgtaaacctttcctaccatgttcctcaaaattcttccaagctccttcactacccaattccaaaaccacttccacattttttggtatttgttataacagcaccccacttccaggtactaaagtcttttagttttctattcctgctgtaataaaacccacaaatttcatgcttaaaacagcacgtgtggggcgcggtggctcacatctgtaatcccagcacttcaggaggctgaggtgggcggatcacttgaggtcaggagttaaagaccatcctggttaacatggtgaaactctgtctctacta

SEQ ID NO: 186741 - DNA, 694 bp, Homo sapiens
tggctttactctcagcgtgagatgaaacagacaatacagtacacctgctgagtgacagagttgtccctgagttgttagggcctttgcccgccttggagctccacttgcttggtgcacagtaggcagcaaatgggctgtagaatcatggtatttgtgatttcctgtgtccttgacagttgagatattctctaaggctatttatgttctctctaccatgctcgtcacaagcagtcttctgggtcctcacaagcagtctttattgtttatatttctattaacaggtctgttcaaggcaacgtaaacctttcctaccatgttcctcaaaattcttccaagctccttcactacccaattccaaaaccacttccacattttttggtatttgttataacagcaccccacttccaggtactaaagtcttttagttttctattcctgctgtaataaaacccacaaatttcatgcttaaaacagcacgtgtggggcgcggtggctcacacctcggcctcccaaagtgctgtgattacaggcgtgagccactggcccaatatgacctatatttaccccatcctagcagactaattatttgttgtcttcacttccagtgcttttccatgtctgttcatgtttttatgaagtcacaattctaatattcaattttgtattttgtttcttaacacagtatcttaatatt

SEQ ID NO: 186742 - DNA, 391 bp, Homo sapiens
ccaaagccaataattacttatagaaaacgtcatgtctaggcagcaggtgtcctaggaatgcaagtatgggtcatcattagaacatctatcatttcagtggattaaagaaaaaatgctcagtgatttgagcaaaagagtgttctattagattattctgactgaagtgtggagaaggatgagaaggactagagaagctgcagggcctgctgagcagacagactatggcaacagggagaagaggtgatggtagcttgtactagggtaacagcagtagtggtggtgagaaactgaccaggaatcacagcagtgatatactactttatggccttcataatggcaaagggtacgtgggaggaaaagggctcttttgtactcctggccctgggagtat

SEQ ID NO: 186743 - DNA, 410 bp, Homo sapiens
atcaaagtctgggtggtaaactgttttctacaaattttgtttggacattgaaagtaacacattttgattttttctaattgattcccaaggagattatatagtacttaattaaggcaatctctaaagttcttagccctttttccttatttaggtaaatttctgtttacttatctagttgaatattcatttactgatttttgtaaaatggtctgtaaaataaaattatgttggagttcttggaacacatgtctgtctaggagcatcttgtgctgtccatctctgttcatgcgtcatcccttaactcattgttcctaatcatagacaattagagttagaaggtaacttagcaaactttacaaataaagaaatggagtacttagacaacactgtagtaaaactgcatatatttg

SEQ ID NO: 186744 - DNA, 307 bp, Homo sapiens
cagaaaacctatgagagcagcttcaaaatcagtcttctaagcgcaagagagacttcctgaaccacattctgcttcatcaaccggactctacaacatgaacagcttgtgtctcttacagattctcataggcagatgcataaaacgtgaataagatgtgtccactgttggcacaacttcctgctacagctcagctagtaggaaatcatgtacaagtttcaactaagaaccatttagggagaggacatagaggagagaaaaaaaattcttttggcttggcttggtgttttgtattcagcatcacacctaa

SEQ ID NO: 186745 - DNA, 731 bp, Homo sapiens
aagcctgtaccggtccggaatttcgggatatttttaatcagtggtgacctcgtcatcgcgttaaaatagttctgccctcagcccctctttatctgtagatggcagagcgagcgccggtaaagatgctctgtcgtggagggctcagtggggcggaggagatggggagcctctggcgttgtcggagaatgcaccttaaaaatgactctacccttgagcaacgcaggaagcacgacagtgatacttctgtttgtgatgatggtattggcgaaaaatcactaccaatataatggattttatatatcagattgctttattctggatatcatggtaacaatacagaaagtatacataatttcccatttctgcaagtagtcatgactgctgaagaaagaaaaacttaaagctacggcagaattattttatggaaattctgattttgtttttaatttttgataactttttactaaaggtatgaacacacaaagagcttattttgttaggcaaatacacattaataagaatgcctagaagaggactgattcttcacacccggacccactggttgctgttgggccttgctttgctctgcagtttggtattatttatgtacctcctggaatgtgccccccagactgatggaaatgcatctcttcctggtgttgttggggaaaattatggtaaagagtattatcaagccctcctacaggaacaagaagaacattatcagacca

SEQ ID NO: 186746 - DNA, 735 bp, Homo sapiens
tcatcaccatctctgctcctctcagtggataaactttttaatcagtggtgacctcgtcatcgcgttaaaatagttctgccctcagcccctctttatctgtagatggcagagcgagcgccggtaaagatgctctgtcgtggagggctcagtggggcggaggagatggggagcctctggcgttgtcggagaatgcaccttaaaaatgactctacccttgagcaacgcaggaagcacgacagtgatacttctgtttgtgatgatggtattggcgaaaaatcactaccaatataatggattttatatatcagattgctttattctggatatcatggtaacaatacagaaagtatacataatttcccatttctgcaagtagtcatgactgctgaagaaagaaaaacttaaagctacggcagaattattttatggaaattctgattttgtttttaatttttgataactttttactaaaggtatgaacacacaaagagcttattttgttaggcaaatacacattaataagaatgcctagaagaggactgattcttcacacccggacccactggttgctgttgggccttgctttgctctgcagtttggtattatttatgtacctcctggaatgtgccccccagactgatggaaatgcatctcttcctggtgttgttggggaaaattatggtaaagagtattatcaagccctcctacaggaacaagaagaacattatcagacca

SEQ ID NO: 186747 - DNA, 359 bp, Homo sapiens
cccccccccacacaaaaatacaaaagatcagtaagataaaaagttgactctgaaaagataaacaaaattgacaaactgctagctaaattacccaagagataagatccaaataaacaaaatcagaaatgtaaaagcagacattacaactgatatcacagaaatacaaaagagcatcagagactatgatgatcaactatattctcacaaactagaaaacctagacgaaatggataaattcctggaaacataaaaccttccaagattgaacgaaccactggcctttcttccctatctaactcttccaaatcagaatttaagtatttaagcatgctaaagattcttctattttgaaaatttgt

SEQ ID NO: 186748 - DNA, 888 bp, Homo sapiens
ccccacctcagccagcctcgcctcagccagcctcccaggtagattatcacagcaaattttatcagcttcaaaaataccgtttgcttgttgctccattctttcccctcacagccaggaatggcattccaaagtccccttcttcttcccagatcctcctactctgtctttacagtcagtgcacttaactcagctgtgccagaaatcctttcatccatcagtagaaggctgcctgcttgtttgtccaacttgttttccgagtcttggctaattgtaccagacactggaatgttgaagaaacacaatgaagggctttttcattcagctggcccagcccttctattggttcttcacagttctaacccaaccaggggacagaaaagtccagcctctgtgggtgtcaggacagacactgcagccctgccccacaccactcaaaaaggccccgctgcagataagggcctaatcactggccctctgctctagctccctaaatagaacgacttcttcaggctaatgctgctttcaatcctgttcctgaaggcagggagggaggaggggcagcacctaggaaagcaagtttccagagattagcccaaacgactacaaatgaaaaaaagtaaatgcaagctttcctagcagaccattcagtttaaacaagccctatgacctgcctcagttgcttgacaacttcactcccaagtgggtatccctcccacctacaaactgctaataatcctgttactgcttactaataaaggttctcacagctgactttatcccgcctagactaagctctcagtcaccctgataacctgtgacaactgtactcagtttgtccctcttataagactctttttagccttggagatgaagggtcctcctagaatt

SEQ ID NO: 186749 - DNA, 235 bp, Homo sapiens
ccgctctgtctagggaaggaggggcgggtccctgcagaatgtgcctcctccgctctggctctgggactggctaggaggaggaacccttgcatcatttctggtgaggctgacaagactttggggtgagagttccttaggtgagtacatgggaatcaaagggccagtcattgtccccaccagggcaggaagcttgcttctccccaagcccattttgttcctgattttccatctcctc

SEQ ID NO: 186750 - DNA, 145 bp, Homo sapiens
tctggaacctcctttctctaaccttacccaagcctaaccttatccaagctgagctcttcaaaggcctttgcccttgggtaccacaggttctgagacaagagggctatggagagcccccattatagctggagcctcctgccctgcc

SEQ ID NO: 186751 - DNA, 1080 bp, Homo sapiens
ttacaggaatgagccaccacatccggccaacttgtcatttttgtaacagacataggatttccactgagaacaaatcagtgtaacagttgagtactactcactcgtgcaaagcatttgtttaaaataaactgatgtgtagataattttttcagaaagcctcctcaggaaagttctcaggagacataagtggagctggggagccttactgaaggtctgggtcacagacaggccttcccgcacagaggtctgagtgtgtgccctggtggtggttgacagtagcacagcagtcggtagctaattaagggagtttaagtggaggtgttctggttctgttctgcaccatcagatgcactgaaatgaaactacagccttggtttgtatcccaaatggactgctagtcagctttggtcttaacctttggaactgactgacttgtcatttgtggcattcctgagctgttgtaaaaactgtatcattctcccccagagaaaacagtaatactgataggcatgcagtgaaaactgagttgaagctaggtagtcacaattttgttattttcaaaagccaattggcatattactagatcagtagtttaaggatcaacttttttgattgttgaggccacaaattcaaactgttataagtaggcacaacaaatcttaggtcagcttgagaaagtattcagagaatatttctttgttttttgttttttcttttgagacagagtctcgctgtcacccaggctggagtgcagtggcacaatctcagctcactgcaacctccgcctcctgggttcaagcgattctcctgcttcagcctcccgagtagctgggactacaggcatgccccactacacctggctaatttttgtagttttggtagagatgaggtttcaccatgttggccaggctggtctcgaacccctaacctcaagtgatccacctgccttggcttcccaaagtgctgggattataggcgtgaaccaccactcccagccaaagaatatttcttcaggcagtggaaaaacatgtttgttgggtggtttccatgaaattgcaccatcatagacctgcccaggaa

SEQ ID NO: 186752 - DNA, 724 bp, Homo sapiens
taaaatattccaggaaaacagcttttattaaacaatagaaataagaaagaagattttgagatagtggaatatatagatacagtgtaaattaagacataactgagatcaacagatatgatttagaaagaaggataattgaagtattgctcagtaattcttaggctgaaaacaatgaaatgcaaataatatttatggctttagatatctcagtaccattgagtagaaacaattgtagctaatattgattgaacatctacaaatatgcagttactacttaaatgttgtactcgctgtttttaaattatctgcttctaaaagcaacaatagaaaggaatactattgttatctcagttttccatatgagcaagctatattactcagagtaaccagtgaaatgttgtaaaactaatgaaaggtttagatacaaacgaacttgaaaatttaacatgagaaagtaaaaacgtcctatgcatgttatctgtttttcatgaaatagaatattatacaaatatgtgccagtagataattcaaaacaatcagattacaaggtaccagtggaaaagaaagctgttttctgatcaagcctatgcttcaagtttttaatgaacctatttgattgcccatcccatttcaacaattatacttttaagtactgttggagtcacacaccaattatagactgctagatgctggctatggtaattactaatgtattccaccaacc

SEQ ID NO: 186753 - DNA, 545 bp, Homo sapiens
taaaatattccaggaaaacagcttttattaaacaatagaaataagaaagaagattttgagatagtggaatatatagatacagtgtaaattaagacataactgagatcaacagatatgatttagaaagaaggataattgaagtattgctcagtaattcttaggctgaaaacaatgaaatgcaaataatatttatggctttagatatctcagtaccattgagtagaaacaattgtagctaatattgattgaacatctacaaatatgcagttactacttaaatgttgtactcgctgtttttaaattatctgcttctaaaagcaacaatagaaaggaatactattgttatctcagttttccatatgagcaagctatattactcagagtaaccagtgaaatgttgtaaaactaatgaaaggctagggattctgctaaacatcctacaatgcacaggacagcacccatccccacaacaaagatttacctgagccaatgtaaatagtgctggcattaagaaatcctcttctatgtgattggatcttatgaag

SEQ ID NO: 186754 - DNA, 243 bp, Homo sapiens
aaacagagccgtgtaaagtgaaaagttgcatattcctcaaggttttaatttaactcgcattagattgaaccatttaaaactgccaatattcagctgtcatcgacccacaaaattggcaatttcaaacaggtcaccttaatataagtcaaaaccagatctcattccataatgaaatataaacaaagataggaacatgattaaaattattttggaggttttttttttttctatagcatcaaaagg

SEQ ID NO: 186755 - DNA, 653 bp, Homo sapiens
ttcagtgtcttggtgttcacaaggccccagcacatcgtctaggacgtgagacccacacgccgccctcagtctcctcagttcactgtttcccccggggaaacaaccgccagggcctgtaggaaaacacagcaaactagaaagtccagttggaagagatttcagatgtgctacagcctccacggcaggagtgaagctggacctccaggctcctgatgacactgaggattgtggagctgagtgacaccagccggcaggagaggccatggcaggaagtggagcctcccaccgaactccagggagcaccagcgactgagaggccacatggcgggcggctgtgggttgggggggctgcctgcccgcacactctttacggcagaagcagtgacatttcccttgctgtgcccatggcagggacgggcccgtggcaggtgctgtgagcatgtgcttgccaagttcctgatgcggagcccagccagcccagagggccacattcttgtcactgcttcttggagccgcagctcatgccaagttcctcacacccctctctgggctctaactttgtgctgcctcagatgttcagggtactttgcttcaagccatatcaaaagctggtttgaaaaataaagtcctacagaggtgctaactgaataagg

SEQ ID NO: 186756 - DNA, 543 bp, Homo sapiens
ctgggacccctgtccaggaacatgtaaggattcctgaagagatacacattgcttcattatcagataccttggtttaagtgccttggctggattctgataggtgtgtgtgtaacccgcaataccatagagcatgaagtgaaaaaaatggaaattccctgcgctatttggttcaggagatgcctaacggtactacatagtaaatgtcatgaaactactcaaaagcattggataggtttttagttcttgcttctagcaaaaaaataaaaatgtataaataaagtcacacttttttctatagattgggagcaacagaatatgagtggagtgaccatgtatgtcctggttggctcaggacaatcctaatttattcccattgtttcaatatgaatatttatagtgcccattcttaaaagggttctagtttgatcaagttaaacaatatagtcatgctaaatacggcttgagtttcacaatatacctgattggtttaacatatcatcaggtttcagatttagtcacttttaaaatgggtatgcttcctcc

SEQ ID NO: 186757 - DNA, 476 bp, Homo sapiens
tgtatgtatgtgtgtgtaagagagggggagagagagagggagagagagaaaaccacagcctttgaaatcaggcagattctgcttcaagccttggttgcctcattcataaaatgggcttgataataaatttgcttgtggaattgtggtaattatattaaatgagctgtccatatttattcattatgaaatcttgacatagatgctcaaagacaggagtgcttcaaaaaactttttgtgctgtggacccccttggaagtctggtgaaggcagtgaattcctttttgaaagagtgtttttcaaatacataaaaaataaatagagctaaaagggagccaattgtattgaaatatagttatcaaaatattagtaagcacatttgtgatacagtaatctatgtgttttattgatatattcaacaagatctggtgacagatctaataacagccataattttgaagcagagatgagcgtaaatg

SEQ ID NO: 186758 - DNA, 438 bp, Homo sapiens
ttggccaggctggtcttgaactcctaaccttgtgattcgcctgcctcggcctaccaaagtgctgggattacaggcgtgagccaccgcacccggccttttgagatcatatctcttacagcattgcttattcttcagagggaagtctgtaatattgttattgggttgttattactgttcttttccaaactataccccacataatgcttgtggcattcacagtctagctgggtttcccctggcaaaattatttcaatgcaatggttcattgacgggcggcactcctcaggcatcactgtgacattttgtgggcaggaatttagtggtactcttggcccatgtgtcccttcatctgggatgctgggatgtctcagactgaagggcagatggtggtggtggctccctggggggaggcttttggacaggaggtggctgggtgat

SEQ ID NO: 186759 - DNA, 530 bp, Homo sapiens
gtgtagtcccagctacctgggaggactagaggcaggagaatggcgagaacctgggaggcagagcttgcagtgagcagagatggcgtcactgcactccagcctgggcaactgagcaagactccatctcaaaaacaacaacaacaacaacaacaacaacaacaacaacaacaacaggatttgcctattatgttactctgttgattcagattctgttactgttactttatgatcatgtctctagagaaatctgatttgctttactctctctatggtaccaggctttgccagaatactgaaactgtttcaagtcctaggactcaggctaggacacaatgacgctctcaattgcactgaaccttggggcaaagaagagagtgaggcaagatagtggtcaagccaacagtgaggaagaatgaagagcgaattgcatgaacaccaccactccccgcagtgtgttcactgtgaggagtttgtgagaagggaaggaacctcaggtttatacttcaggattatataggtattcctagggt

SEQ ID NO: 186760 - DNA, 241 bp, Homo sapiens
gcaccaaggatatgacatcaattctaccccaaggcatctgccacgtctcatcacaaacactatccagtcataacctggcaggatggcgatgctcagatttgtccatatttggtccagccacctagcctgctcattggcggggtggcctatagcattctacagcacccgtcatgcgtgacgtcaggagagacactgcttcaggcctggtgaggcccatgggtcacattcaactccatgcctg

SEQ ID NO: 186761 - DNA, 400 bp, Homo sapiens
atttagtccacatcaccgttctgccaaaacacaagtgttttattgtgttttccctcagcccaggaagctggggctgtggaagcccaaaacacagatgaatgctcccagttctgtggcccgagcaacgaagcccagctgcctcacctgggggaagctgaaggagatagacagcaggacctcccagcccagtgagccacaagtcccagccctgcacacagtccccggaacatgcatgaagaagctgaggccatcacctgcggtctgccccgccagctccctctgcctctcggcacatccccaagcccatggcggctggctgcctgactctcgcttgcgccaggcaagaggagaaactgaaaactgctgggaaatcagcatcatctacattccagagacaaaa

SEQ ID NO: 186762 - DNA, 290 bp, Homo sapiens
tatccacaatcttccgctcccaagatgtgacctctccctctctgtgttcctttctctccatcagtatctcctggctatggtcatagcgtatttcagccgggccggcctcccctcctggcaataccaacgcattcatttcttcctggctctgtgagtggtttgctgcctcctatccgtcaatatccaatgccctgggacagcgggggaagtgggattccagcctttcatttattctttcacctatttgtcctctttactctgtgtacaaaaaagacaggattatagtctcg

SEQ ID NO: 186763 - DNA, 562 bp, Homo sapiens
ggaaaacactctgggttttaaacagcagcacctataattatggaggcgtcatcccttccataaaaaaagaaaacaaaacaaagaaagcaaagcccttctactaacaaggtgtagtcatagcatgtgttcagccttttcaaaacctgtctggcatttgtttctggcctggtggagagtatcttccatctttctctgagctctcataaaacaatacaaaggtaaacaattggagggcaattagcagtctctttggggtaacaggagagagaagtcaccggactattaatgtcaaaggaattaattatggtttgcataggtgattgagtgacttaactttgcaaatggttgaaaaataaggaaccaacgaagtttataaaagatgccagtttggagaatcatgtatggcagacttacaggactacctgtgaaatagtttaaggctatcaagatattgagatgcagcctgttgtataaggggccacatgtactatagatcacctttgtccaacttgaatgtgtgtgagacttggctgggtgatttttttaaaatacagatatttga

SEQ ID NO: 186764 - DNA, 246 bp, Homo sapiens
gcctccaacagagacacaaatcaaaacatatcacctggtaacaaacagatatcaggatttacgtaatttcaggcactgggctaccttcttttgaggatacaatgatgaataggacatagttcctgtcctcaatttaccatttattagaggaaataaaccaataaattttaaatcacaacacaatataataagtgctgcagagaattatgttccacatcccacagttgttaagccacttcttttttt

SEQ ID NO: 186765 - DNA, 529 bp, Homo sapiens
ccagggagagacaggttaagaggccattgccatagttcaggcaaggaatgatgacctgaactagggcagaaacaaagggaatggagaggaatagccatgtctgagaaatgttttgagaacttggtgaccaaactggatatggaaggtgaggaagatacaggagagaaggggacaggatgaatagagaggacaacatctaaggtagggagcagtagcaggcttggtggggtggcaggagtagagaaaaggagttcaatgttgaccttaagcttaaagagtctataagataccccaggaaagacagatgttccagtgaacattggagtatggtttagagctcatgaaagatggtcaggactggagatttgaatctcattagcacaagggtgcaaactaaaggcttatagtatgttgtattatattgcccagaaagagcagacaggtcaagtgaagggaggagaatgaaatcctgtgccaaaccaacatttaggcacaagaggaaccagtgaggaggggagagggtggtagg

SEQ ID NO: 186766 - DNA, 628 bp, Homo sapiens
gttttattttgtactctggttcaataatctttttttctgttgtatctcatctgctattaatcccatcacatatactatttatctcacatgtagttttaatctctaaaagtttaatttggttcttttaaaaatatgtatttcatgactctacttaactttttgaacgtatggaatgatgttacaataactgttttcatgtacttgtatgctaattctaacatctgttttatgttagagtcacttttgattgataaaattttgtcctcattatgggtaatttttcttccttatgccttataatctttgattgaatataaaacattgtgagttttacctaggtgtgcattgaggtttttttatgacaaatacatttttgagctttgttctgggatgcagctaaattacttagaaacagctttaacttttgagataatgcttttaaccctttctaaggaatgactggagttgggctaagatacttcatatttgaggcaagattcttctgtgtactctaccaaatgcccaatgactcatgaggttttctaggtggtctcatgggaaaaggtacaatttttggcaccttgtgagcaccaagcactcttccctttaatcctttcacattggtcag

SEQ ID NO: 186767 - DNA, 1834 bp, Homo sapiens
atgaacccatgattcagatctctaaatttataggtctttgttcaaaggtgttgggacctagaaatctattttccaaactttattcacggtttcctgtgtccactgggcaagagaaagggacttaactgggtctaaagtgaaatactcatttgaaccactctttagaactatagagttcaaagatgttatgtgtcaagttagcactgtgcttcctttggctgttttcattcagcatataggaaccttatgttcttagaatatgcttatgttcttagagtatttctctgtgttatttatacttttaccaattatgagctatataattcttttccatttgcagtaaacttatattgtagacagtccacgctgtaaaattatgtagaatctcaaagttaatgagcatggttttgtgctggcaagagaagtcttttgttatgcattttctaaatcttatttttgtgtgtgaacatatttaaaaaaacaaagatcacttaccctaaaatctaagcctcagtaggaacgtgcttttggccctttttatttccattgaaatatacttaaattatctctaggtaaagtgtttcagatgtttttgatgctgtgattgttctagactttataactttccaaagaaaatgtgtcatgttcaaaatccaggtttttttttttctttttaaagaactttgaaccaaaatgtatatttccctgtggtaaatattttaatattttgctttcctcatcaaatgctgaggtttcatatagtccggtatctccagcttgataataggagagttctccctcatttggagttgattatgtccatggcctttggaaagcaatgcttgtagtttactgaatcacaaatactagggaatatatttgaggggcctacttagagtctttttctagtgcagaaacatctgtagtgtaaaaactttgccacaaacagaatctgccttaactatgagacttgtgctccacttgtattctcaggcaagctcttggcagagtcagtgcaactctttatgatgatagagactgaaaatggaaagaaagacagacttctgtgaccatagtcactcttccttcatggagcccacagcgcactaaagtgaaatctggagaacttgctgttagtagtaagcatggtattagattagaattataggcctgttctctgctttctgtcttcctcctcttactataaaaccgtacatagtttttctaatcattgtatcttacattaaatttatattgaacaattcaaaaaccaaaacaacaagctttccttggaagttttctgtgagattggaaaatgttgtcttgcctttgagccacattgttgctggacagtcagggccacagtcaccctaggctttgaattcctgcagacatcccctggcaaggagggctttgtgcattttgagctttcctagattcctttcattgtgagggccaggattcttagggtgttttctttcagttagcaataacagatactgctgtctgtccactcctccccagctgctggggaaactaggatgcctagtgacttattcttgaatgttgctctttatcacaatcctgttttttctcctttgatagccttcatattgcttaccattttaatctaattgactgtccttgggaaaagatgagagtatgctaagactttgatcttgctttcagaaagggatcatttatctttgcattccccagatacccagtgtactctgtccctggcagattaagcttgataaatggcaaataaagtcgggaggcattttgaatgtaattagccataccatgatatactgtaaagtgctgcagctgt

SEQ ID NO: 186768 - DNA, 2023 bp, Homo sapiens
atgtctttgtgcatatgttagagtttttttggagtatatactaggagaagaattggtgggttgtagggatgttgtccttcaaatatttctgcctgtagtatatgtgagttccagctgttccatatccttgttttattttgacagaatttaatttttttagcccatctgataagtatgaagtggtatcctgttgtttaatttgcatctccctgatttgtgatgagattgagaatattttcatatgctcttctacaaattacttgttaatgtcttttgccagttaaaaaaaattaggttgactttcgcgtattgatttttttcataaatcctagatatgaattctaagttgtatgcattgtacatattctttttattgatctgtgacttttctttgtactttttaaattacctctcttgatgaacagatatttctaattttaatgtaattaaatttgttagtcgtttttttatagtttgtaatacttgtcctgaagtgtatttttctttacctagatgttgtgaagaaatacttgtctattttcttcaaaaagttgtaaagttctgcttttcatatttagttctttaatctgctctgtatagtacaaggtggtaatcctttgtttctgtgtgtgtacgtgtgtatgtatttattgattcaaaataattgataaccagctatcctgataccattgattgaatagtctatacttcatccacttgcttgtaatgccacttgtctcaaagatttttcctgcatagtagttccaatgttctccctgtcttttcctgcttcaattgccctttcaataagcttggatctctatttaggaaaggccctttaccttggtaagggttttcaaaaatttcttggctatttctggcctccttttttcatattttagaattaattttttatatgtacaaatacacatacatacttttttcaggaagttgtttgttttatcttatgttttcagatttactgatgtaaaattttttttttatattcttcctttcttccccccacatttcttatttggctggatttgtagttatgctgctctgtaattttttatttatttttgctttctcccttttttttttaattgatcagtctcaccatagatttgtctatttttattaatttttttttttaaagaaccagcttttggttttgttgaatctgtctttgttttctattttctctatttctgctgtttgctttttaatttattggtgtgatgtggaaattgattagatatgggtgagatagggttgaatgaaagattactccaaagtttctttggtagggaccaggtagatggtggtatttaccagctgaagtggaaatagttggaggcaatttgaggggaagatgtgtagtacttctcagcaaatgcaaaagaactgaaatcataataaacagtctcttagatcacagtctagtcaaattagaattcaagattaagaaacacactcaaaaccacaactacatggaaattgaacagcctgctcctgaatgactcctgggtaaataatgaaattaaggcagaaataaagaagtcctttgaaactaatgagaacagagacaacatgtgagaatctctgggactcagctaaagcagtgttaagaatgaaatttatagcaataagtgcccacatcaaaaagctagaaagatctcaaattgacaacctaacatcacaactaagagaactagataaccaagagcaaacaaaccccaaagctagcagaagacaagaaataaccaagatcagagcagacctgaagaagacagagacatgaaaaactcttcaaaaaatcaatgaatccaggagcggtttttttttttttaaactaataaaatagactggtagctaaactaataaagaagaagacagaagaatcaaatagacacaatcagaaataataaggggaatatcaccactgactccacagaaatacaaacaaccatcagagaatactgtaaacacctctatgcacataaactagaaaatctagaag
